United States Patent Application Publication US 2022/0102000 A1 - sequence listing, part 13

SEQ ID NO: 2599 - DNA, 32759 bp, Unknown
  16S sequences of unknown bacteria
agatctagtacggtctcgtgggctcggagatgtgtataagagacaggcgcaatgggtttaaccgccggctattgcggtaccttgttaactccaatggctgcaaactttaatattatgcccgcggcattgttggaaaccaagagcaaatacgctgtcatcaaggcacaggctcctatggctgtggtcatgctgatcatccatattttcctgatgtacttcttagcattttaacgttctgctatcatatcaataacagtagaaacagccgtgtgaaagaaacgggcgcggcactgcttgcagagataacaataccgcacggtacttttgcgggccgtgcggtgttatcatccttgctgtgaaaggagaagctatgaaaattttgattacaggttttgaccctttcggaggagaaccggtaaatccggcattagaagcggtcaagctgatgaaagatgaaattgcaggtgctaagatcatcaaattggaaattcccactgtatttcggaaatcggtggagaagatccatgagatgatgaaagcggaacagccagacgtagttttgagcattggtcaggccggagggcgctttggcgtgacaccggagcgggttgccatcaacgtagatgatgctcgcattaaggataacgagggcaatcagccggtggatacccctatctttaccgatggtgaagccgcctatttctcgaatctaccggtgaaggccatggtagaagcgattaaaaacaaagggctcccatccactttgtccaattcggcaggaacttttgtctgtaatcacgtaatgtacggtgtgctttactatattcacaaagaatttccgaatgtgcgcggcggatttatccatgtgccttttattactgaccaggttgtcacaaagccgaatgttgcatccatggcattggcggatatcaccgaagcactggaatccgcagtagaagcgattgtaaaaaatcagaaggatattcatgccataggaggcgaaattcactgatgagagaaccgtcagctcctcagaaaatgtttgtgtatggaacattgatgaaaggcttctatcattatgaaaaagcgctggtcggtcaagaagtgtctttggtccctgcccggacccgcggcttggtatggcatatgagcaaccggggatatccagctattaaggctggagatggctgggtatatggagaattggttgagttaaaggattttgcggctgtcattgatatcatggatgatatcgagggttattatggcccggaagatccccgcaacgaatatgcccgtatcctttctccggtggaaaatctggaaaccggcgatattgaagaagcatatgtgtaccattatgtcccagacgatctgggaacgccggaaaatccggtggtggcgttggcgcatggcagctggcgaacttttatggagaaaaataacgaaccgtcaaatcattaaatgaaaagacacctgtctggtctctgttaccaaacaggtgtctttttttgcaaaatcgaggctggctctgtcgtatcaagacggcgatatttcactcaaatccggttttgttgccttataaaagcgtcatggatttcttttcttcctttttcctaattggcggcacaaacctcttttgggggtttggcaaatacgactggcaaaaataccaacactgcagccactgccactgtcattgccgccagggataacggcgccaatccccacaaatccaggatcagacctgccgcataattgccgatgattccccccaacgcagaggtcatggccgttcccaaagaaatcgctgttacattcagctgcttcggggtattgcggcagatatattccacaaagatatagacataagcaccataactcatcccttccgccagccttccgattacaagaagcggcatggaagaggcaatcaggaaaaagaaattttttatcacaacaccagaaagcgcaaacaaatgcagcccacccagcggataacggcgcatgattttccccattgccatcatggatggaaattccaccatggcagaaaagaacatcaacagtcccagcccgccgctgtctcccccgatattcgtgacataattgctgataaaacagccggtagacttattggcaatatgatacagcaggcagctgagcacaaaaaagacgtaagttttattttggagaagggttttggcagcctccattccggaaatcctccgtgtagcctcctggttcacatttttttgctgcttattgcgacagggtgtctcctccaaaaaacaggtacataaaaataacagcacagaaaacaacaaaaagctcggtgcgatgatcccatcacccaaggccgcaatcacatttccaaaagccaacgccgttaaagcatacagaactgacccggcgctgcgtgtcaaaggatattgtacctgagaatctttttcccgcaaggccattgtccaggaatcgatcagcgaagctgcgggataaaacagaatcgactgcagcacaatcgctccatagcataaaatcgggctgcttaccgatgcctgaagcaaaaatgccaccggaacagcaagcgctgttgtgacaagcagaaattttttacaggtaataaaactgtcggttaagtagccgattagcggctgtgtaatcaacgttgccaccgcaattaacacctgtgcttgtgcgcactgcacgttgctgtatccgtgattttgcatatacaaaaccaaaaagccaaaataggtgcagtaagcgcaccaataaaatccttgcacacccattaaaagaagatttttacgtccaaaaacctccggtatcctgcgcatacgcactcctccgccccaccatcctgtatttgaccacagaataccatatttttcccggcacgtaaagggaaaaagcttttctttttacatgcgctttaccagtctttttcagaaagtccggttctctttttcacttttaaccccaaaacatcttttgccggcggaccgcagaatttctattcctttttcaccgcctttatactataataaaattatattttcttccttttgacttttcttttatcctcgccctcttaccgttctattttccgctttgcatcatgcgatttgaataaaaggaggatttttatggattccaaaataacaattgtttggcatggccattcctgcttttccgtatctgccgacggatacacgctggcactggatccctacgacaacagtttgaacggatacgctccgttgcaactgagcgccaatgaagttctttgcagccatggacatcacgaccatgcgtggctacctgctgttacactacacaacactgctgcccgttcgccgtttcagattcgctctgttcacacttggcatgatgacggccaagggagtaagcggggagaaaatctgattcatgtcatccatgtttttggcaaaacactggttcattgcggcgatttggggcatcttctaaccaaagaacaaatcgggcaaatcggctcctgcgacgttttgatggtgccagtaggaggattttacaccattgatgcggcacaggcccgtcaggtcgcagatcagctttccgctgctgtcatcattcccatgcactatcgctttggtgactacggtattccggtcattggagaagttgaggactttttgtctctcgccgggagctatcctgtccatcgttatcccggaaaccgtttcacattggaatctgacatatccaaacaaattgttgttttgacctatcaaaaattatcataaaggaagttttttcatgaatcggatcgaacaatttttacaggatcacaaagtgcttattcttgatggcgccatggccactgaactggaaagcaaagggctggatctcaacgatgccctttggtctgcaaaagtgctggcagaacagcctgatgtcatcgaacaggtccattacgaatactttcaggcgggagctgactgcgccatgactgccagttatcaggctaccatagacggctttctgaaaaagggctattccctagctcaagcggaaaaattcatcacggattcggtagccattgccgtaaaggcgcgagaccggttctggcaggatcccgataaccgaaagggacgtccatatcctctcattgtagcggcagtagggccttacggcgcttatttggccgatggaagcgaatatcgtggagattatgacatctcggaacaggaattgatggatttccatcggcggcgtatgcagcttttgttggaagcaggagcagatatcctcgcctgtgaaaccgtaccatgcctattcgaagcacaagcaatggcaaaggcggtgggagagtttgaaggtgccttatgctggatcagtttcagctgtaacagtgaagccacgatttgtgacggcacttctattgccgtctgcgccgctgcgatggacgttttcccgcaggtagcggccattggcatcaattgcacgcctcctcaccttctgccttctttgatccgggcggtgcgtaccgcttcgcacaaaccaatcgccgtctatccaaattccggagaaatatatgacccggttaccaaaacatggcggggaacttctgaagaaggtggatttgcccttgccgctcaagcctggtatcaggctggtgcacggctgatcggcggatgctgccgcactaccccggcagatattgctcaggtttacggctgggtaaaagatttacggtgactattatccgccttttgcatagctgggcaaaaatttaccgatcattcattttttgagggtgtccttttttctttctttgtggtaaagtaaaacgtatgatttcggtcgctgtccgccgcaagggcagaaaaacgccctggcttttagccatggtcttaataggagtctgttcatgaaaaattgtaaatctgttttcagtttgcttcttgccgttgtgctgatgatcgtatcgctggctggatgcggctcagacaaaaatgaagcattggttaaaaaaatcactggcaccgatccggaaaccactgtgatgaccattaacggatctgccatttctgccgaattgtattactattggctgtccattgtctgcgaagatactgctgcttattttaccgatggtattcaatgggatcaggtactttacgatgacgtaacggtttccgaatatatcaaaaccactactttggatacgctgatccaatatcaaattgtcaccgatttggatcaggaatacaacctgcaggatgaaaaagaggtgcagtcttatttggatgaaatgattgcaaataatattgaaaattttggcagtgaagaggaatttgaaaaaaaccttgccaattctggcgtaacaaaagaaactattttatatctctacaaaacccaatacctttacagcgacctgcaggacaagctctatgccgccggcggcccgctagaggtgaccgatgccgctgttcaggaatatattgaccagcattacggcgcagaaaacggcagctactctgctaagcatatccttctgaaaacagtggatgacgccggttcggccctctctgaagacgaaatcgcgcagaaaaaagcgcaagcggaggatttgcttgcccaactgcgcgccagcaatgacccgcaggctctcttcgaccagttgatggccgaatacaatgaagattccggtgagcctgacgaaggatacacctttggtcccggggaaatggtggatgaattttatgatggtaccgcagcattggaagaatatgaaatcagcgacttggtggaaagtcagtttggctatcatattatcatgcgcctgcccagtaagattcccaccgtggaagaaacgaaagaatcctatgccttggagttgttcagctccatgtttcaacagcgggtcaccgatgctaaggtagaatatgttcaagatatcacgctgatggaacccaaagaatattatacagaatacagcaaaggagaataagcctttgcttgatggctaaaaaaattcgtctattctgtgttttatgctattctttctgtgagaagcgcaaaaaggaaataggaaaaagaacaggctgtgggatttgaatcccacagcctgtttttcgatcactctgtcttttgttgtgtcgcttcttccaccttgagttttcgtaaaaagagcaccagaaagatagaactgatcaccaacgtcagggcatccgacaacggttgtgccagctgtacgcccagtaaccctaccattttcggtaaaatcaggatgatcggcaaatagaaaataccttgacgtgcacaggccagaatggttgcttctaacgattttccagtagactgcatcagcatattggtggggatggacaacgacatcagcggcagagccacgcactgagcccgaaaagccaacgctccgatggttataacctccaaatcgtccttgcggaacaacgaaacaatctgcggtgcaaaaataaatccgacaatgcacagggaggtcataagaaggaaccctgccttaacggtaaaccaataagattttctgacacgatcgtacttggcggcgccgtaattatatcccgccactggctgaaatccctgtccaatgcccagcatcaccgactgaataaacataaatacccgccctacaatggacatggctgcaacggctgcatcaccatataccgcagcattcacatttagggctacattggccacactggccagtccctggcggcacaaagatggaaaaccgatcttgataatctgtgcataaggatccgccttgcgcgaaatattccgaattgacagttttgtaatacttttaccgcttaaaaagcaaaacagaaggatcgaaaaactgacacactggctgatcagcgtagcaattgcagctccagatatacccatattcaacgcaaaaataagcagtggatccagcgcaatattgagcacaccgcccaacgtcagtccaatcatagatagtgttgcttttccttctgaacgcaggatattattcaacacaaaagaagcacacataattggcgcaccgaacagaatgtactgtgcatagcctctggcgtaaggcaagatcgttgacgtagctcctaaaagatccattagtccatccacaaaactcaatcccaaaattgtcagcagcagtccaaaggccagtgcgctgaaaaaagccgtggaaccaatgatattggcgtccttttgcttttgctgccccagcaggcgggaaatggtgctgccggcacccatacccaaggtaaatcccaccgcttgaataattgccatcagagaaaatacaattcccactgcgccagtggcactggtacccaattgggacacaaaaaaagtatccgccatattgtagatcgacgttaccagcatgctgatcgtcgtaggaatcgccagcgaaataatcagtttcgaaaccggcgtttgtgtcattttctcatactgtgcctgatctctcgttttttgattcatttttccttctccttgattcagttttactctagttcctcacctgtcaaattccgatacatccgttgtaaaaggcttcgcagcaaagcttcttcttctttggaaaaaccatccagttcctgtttctcaatcttggcaaaatgaacctgcatgcgggcaaaaacctgttctcccttttttgtaattgccacagttgccgatcgtttgtctccctgccggctttctctttgaaccaaccccttttcctccatattggccaaaagccgtgaaacggtggccggctcaatattataataggttgccaagtctttctgcctgcattggttatgctggattagataggataaaattttaggctggccaggtgaaagtccctcctgcgtcaagtaaggataggcagccccccgctgtgcggaaagcgcttttacaaccatcacatgaaacggaatctgcaaaataatccatcctcccggcaattgttagcttgacaattattagctttgcaataatctgtattatactgtacggacaacccgctgtcaatctatagagtaataaaaaactcgtctttctcaatttaaaattttgttctgttttgtaaaaaaagagcggaatcatccgctcttttaaaaaactttttcttatctctttgacccttagggccgtttattggatggtcagcgatacttcataactgcatacccaagctggaaaataaccaacacggtaggccgtacgctgagaagccaagttgctgctggaggttccataatagggaatttttcctctttgcagtacggcagaagacaactgagagaccaaagctgccgccaaccctctctcccgccaatcgggcaaaacatctactcccacctgccagagcatttcacagtcatcgctggctcccgccattccgaccaaacgttcccccgaccaggccgaaacaaccaaaacatctgggcgggggtcattgggatcatatcccagcgcgttggaaaaacccggtatccgatacagattttttatctgttccctggcgctccactccagccgaacaccggcgggaactggaagatgacgcagccgctccggatctggtagaaaataatgtcccaaactgcacaaaaatggttgagaccatagcgaatcccgatccaatccacctagctgctgcctcaaacgaggcaacagccgttctgatgcactgacaatggtacccataccaaaagtgaccatatcaaaaactggattttttcgcggaaacggccttcggccaggcagatccaaagccgggcaaaaacaaatcccgggctggtcaaaatctgttacgacgcaattcaagtcaatcgccagttgttttttcacctgctgtatcatttcttgtcggttcatcttctccctcctgacaataaggcaatatcacacggtaagcctttttcaaatctgccagcgagcacgcacaattcgcagggctggtagacggcaataaaaatgctttttttccagtattcggcagacagaaacgattgtaaaggtcgtatgcttttcgtccagttgtaaaaatggccttaatagacgcaaactgtaaaagagtttcgattgaattcgctttcggctctcggatgctgccgtccgcagcaccggatattacgcaagatgccagcacatcccacaaagcaatatggtggcgcagacagaaatcccgccttgcctctgttccttctggaatcggctctccaaaaatccccgccaaaaccggccaaaaacgatttcggggatgtgcgtaataaaagccatctgctcgggattgcggagatggcatggttcccagaaaaagcacccggcagtccttatcataaaccggcgccagcggatgatgtacctgtttcgctatcatggctaacgctccaaatctttgatgaagcaaatgatgcgccccgcctctaaaaatccgctgtgtagatgaaaatgccaactttcacggttttccagcgcacaatcagaccccatctcgctgccccctttttgtctgctccacttctcacattctgccagcaacgcctttgccaagccctgtccgcgataagagggcaatacaaaaattccctccagataacccaccggcgaactggaagatccttcgacataatcccagcgcaggccacattgggcgaaacctgccaatacatctccttgatataccaaaaaaacggcagcatccgggttttgaagcaatacgcgaaattcctgttccaattcctccctttcgtgggaaggccaaagcatccgtgctattgctgctgtttcctgccattggtttgttttagctcgtctaatctccatttttccgcctcttttcgatatatttttacaaaatattacaagtagtatttagaaaaaggaaagctgaggctcctcatacccatttcgaatgatagaaataatgtttgccattcggtattccaccccacattttctgcaagtctggacgtattcctcccacaaagggcctgccagcggagaattgcatccatagtcatatccgtatgtttttcgatatctagcggatagaccgggaaagcgttcctccaaccgggcgtaaaaatattcccgctgccgatcccgcatggtaagcccaaacatcttttttcctccattaaacagatactttgctcccgcctgcgctgccttttgaataattgtacgaatattttcaggatcatccgttatccaaggcaaaactggcatcagcaatactccagcgggaattccagcatcagacaacgctttcagcgcagcaaaacgctgggacgacagcggcgcaaacggttcaatctgtctgctgagcacgtccttggccgcagtaatcgtaatgttcaccgccacaggactttgagcgcgaatacgttgaagaagcggaatatcccgaacaaccaagtccgatttggtagcgataaccactccaaacccataccgcgcaattttttccaaagcatgccgggtcaagcattccgttgattcaaagggattatacgggtcgctcatcgatccggtgtgaatgattccgattcgccgcttggctcgcagttcccgctcaagcgtttccatggctccttttttcgcgcgtacccggtcaaaatcctcaattccataacattcactgcggctgtcacagtaaatacatccatggcagcaaccgcgatacaggttcatattataatgacatccaaaccattctgtctgctcccggtaaccggaaagaatcgtcttggcagggacatattccatattcaacttcctttacaaataatccaattttgctctttttgcctgactgtgctgaaatctgcgcggaatatgataaactctgccatccttttcaaagtatgcgcccgtctgcataaagtgaaaggggatcccccgcagcatacattgccggcgcagatctaacacccattcatagctgcatactcgtgcctcgctcccggattcgcctcctactgtaagctgatccacccattctcccagataagcggacaaattaattggccctaaaagcggggaacaaaccagttgtttatgccgaatcggcatattacggtaaatcggcagacgaaaatcagcccgatcttgattttcaaccgtacagcagaccgtgacgttcggataccctgtgccccagtctgacggaacgcattgttcaaatcgatgaattcgtttggtaatcataaaaaaatgaagatcctgtcgccgggcaatcatctgccaggcatccgctcgccaagggtccgcatcctccagaaaaaaatcagaagtaaagcaggtatatacaacttctccagatggaattttataagccccatttcgatttttttgaattggcagatcaaattcccggtttttacgtacggtatctggcagccgtccatatcggccgtccattcggaatacataacaatggcggcagccctcactaatctggtgacatccgtgccatgggttccaaccagccaaaataccgcccctttccataaaaatgttttttttcgtttcgctttatgatacaatgagcaaaaatgatccaacagcctctctggcggatcacagttttaccaaaaaggatgtttgtcatgccctattttatttttattgtcaatcccacagcaggcaaaggagtgcattccgaaagcttatgtgccagaatccgcagttatttttctactcaaaatatagatttcgagatttaccgtactgtcggcccgcaggacgctctccaatttgtccggtcttatccagctcgaaaagacaacgtcccaatctgttttgtcgcttgcggcggtgatgggaccctccacgaagtcgtaaacggagctgccggaagaacagattgcaccgtttcggtcattccctgcggatcaggaaatgactatgtaaaaaactttggcagtagcgacgcttttaccgatctggagcgtttggcaaaagggcaccctcatccggtggacctgttggactgctccggtgaatatgccgttaacctgtgcaacatcgggtttgatgcgcgtgtggcacatcatatgtccaaattcaaacgaattccatttgtttccgggtcgttggcttacacattatctttactgttttgcatcttagggcctatcagcagtacgatgaccatctcacattctggagaagaaccgctgacagaaaagctgattttagccgttgtcgccaacggttattgctacggcggcggatattatcctgtgccggatgcctgtaccactgatggtatcatggaattttgcggcgtacgaaaaatgtcccggttccaaatgtcgcgctttatcaacatttatcaaaagggcctgcatctgaacaatcctcaactggccgccaagattctatatcaaaagggccaatctctcaccatccgtgggaaacatccgctggtcgtttgtctggatggagaaattcgcaagaaaaaagaactttccatccacctggttccttccgccttgtctttttggctcccagagggggccattccagccaatcttcccccgattggcgctgttcaacattgacttttcctcttttcagaccgtttagcggccgcataagcggccgcctttttgtataggatttccattgcccatgacaataaaatccctgccgccacaccaacgctgtccagcaatacatctcgcacctgaccgctccgtcccggcacaaacagttggtgaatttcatcgctgactgcataggcagtacctgctgcccaaacccatcccactttttttcggacacttccgcaggaagggataaaatcccagtacagcagtatgcccaaaacggtataaacgaaaaaatgcgctgcctttctcaccaaaaactgaacgctttccacccaaacggcctgtgattcagcagagagcccagaaaagcccggccaaaaccaaaaagcagcatgaaaagccgtttgcccgctcagctgagaggaaccagatgcatcctgcgccgaaaaagcaaaaatcagtcccatccataaaaaagtcactacccggcaaaaaaggggcatccggcgggatgtatgctcagctttgtttttcaaccgccccatccttccaattccaccatttgcacttttccggatctggctccggcgtttgtgcaaaatacacagcgcagcggtaaacatacagcacacagcgatcctgatagccatgctgcatacagtcccggtcatacaattccttcggatctttttctcgcagatcctctacacaacagatccccaaagactccaaatgcgcagccatattcttgccgacgccggggattttttgtaaaggggttttcatttattttttcaactcctcccattccttttcccgaaatccaatcaaaattttctctccatccaacaggattggtcgtttgaccagcataccgtcactggctaaaagcgtatattgttcttcttcactcataacaggcagcttgtcttttagccccaattctttatataaaaggccgctggtattaaaaaaatgtttgagcggtaatccgctcttcttatgccatgttctaatttcctctttggtcgggttatgatatttgatatggcgacgatcaaaagaaaatccgttttcggtcagccatttggcagctttttgacatgttgtgcatttagggtattctataaatagcatcatattcctcctatctgatacttctttttttcattgtaccacaaacgatgccggaaaaaaacaaatagccctgctggtatcgaatcaagcaatctctctcagatcatgacgggcttcctgctcggtatccgccgaaaatacaaaccggcctcttgcgtcaaaaacctcgatatgtccgttgacccatttcatcgtatactccatgataaagcccacctttcttttgttctggctttatcctatcaaaatcagtgtcccaaaaaacggacttttctgtgcgaattttccttttttaattcaggtaaagaagtgtaaaaaaataacagcggcagtttttgtctgccgctgttatttttttatattattgccgcaagaaagagggattactttgtatttcgaaaactccggtcttattccaggctttccaaaaccatatcagctttgacagagctcgctgtcgggtcggcgctgtcaaaacaaaatgtgccataacactcctgcccctccagaatcatagagtaatctgccagatattctcccgtggtttcgtcctgataaatttcgctcagatccacaaataaaagaattttctcgtaactcatgccaatataaatttcatctgaaaaccacgcgccatcgctcatcttcacataggaaaccctgctctgatccgtgtattccatgtcatccgttgcaaaagaaagtccttgcgccggataaaagaaaaatgtctttccttgctgattttggacatcgtattctgttccaaaaaagtcccatacttcttgcagcggctccccgatataccaaattccggttcccacgctgacattagtgccactggaattgtcttctgaatacgtaaagtacattatataattgatgatgccattttcatcataataagcggcaaaatattcttcaccgttttgaccggcgatcatatcttcatattcttctaaatccgaaacatacgcctgtgcggtgctttttgcctgttctcggtccatccctactgatacgccgcaaacggtaaagcctacatcccggtcgctggctaccagcatatcaatcaggccagtactttcattcaatgttaccataaccgatccgtccagattggtataggtaccatcgtattctgtcagcagcacaccgctgccgtttttcaagtcttccaccgtaagtccaagataatcgctcaattcttttccattgacaaccgctggactctgcgaaaccgccgatatattagtagtttcttccagtgtcaaagttgtaatcaacatataaagcagaattccgccaacaataaaaattgccagcaccaatactgccacagcaatcactaccgggattacccaccgatttttctttttgggcggaacggctgacgggtcaatcgcatgatagtacgggtatgccggcgaagctgattcattggtcgacgacgcatccggatcggcagagctaatttttttcggcaagctttcttcctgttggggcttgtcctgtactttctcctgggcgaattcctctattttctggccgcacttagagcaaaaaaggtcgctttcctccaatggctgaccacaacgactgcaaaacatgcaccatcctcctcttctcttttcttcatcatatcgtaaataacgctgaatttcaacaaaaacccgcaaagggaaacctttcctttgcgggttttcttatttgctatcatgattctgatatggctgcctccattggcttttccagcaccagcggcgcttcttcccgtgccacagccagcatcaatttgatacggttttcctgattgacgcgagttgcgccaggatcgtagtcaatggggacaatattggcctgcggatacagatttttgattttccggatcattcccttccccacgatatgattgggcaagcaaccaaagggctgagcacaaacgatatttttatatccactttccaccaattcaatcatctcagcggtcaaaagccatccttctcccattttacagccatatccgatcactggctctaccatttttttcacctgttggtaagccgatggagctacgaatcgagaatgtcgttttgccgcgccgatcaccgcgctttcgatacgggttaaatactgcatcaaaagatcaatcactgcatattttgctcggctgccaccgtatagcttaatatcctccaaccgattgtcaaccttgaacagcataaatccgatgactcccggcaccatcacttcacagtcctgttcatgcagaaacgcctccaggttgttattgcccagtggggaatattttacataaatttcgccgaccacacccacttttgtaatactgcgctgtgtaatggaaagtgcagcataatcgtcggcaatctcgtttagattcgccttaacctcttttaaactcaatccttttcccgccgacatttggcgagaaagtcggtcaatccaacgatccattaacctttggctgctgcccggttccgtctcgtagggcatcgtctgattatgtaaaagcaccaacaaatcaccataagccagtacagccagcgcttttcgcaaaaggggcagcgtcagctgaaaaccgctgtttttctccagccccgatagatttaaagaaatcaccggaatatagtccaaccctgcctttttcagcgccttacgcaaaaggtggatataattggaggcgcggcagccacccccggtttgcgtaatcagcaacgcagttttgttcagatcatacaccccgctatgcagtgcgtccataaattgaccaatgaccaacaaagccggatagcaagtatcattatgtacatacttcaaacccgcgtccaccactgcttgaccgtcattctgtaaaatttttagattgtagccgtattcctcaaacacctttcgtaaaaatccaaaatggaccggcagcatgttcggcaccaaaatggtataatcttttttcatttcccgcgtgaattctacccgatctgtttgtcggttcattgcgccgcctcctttcccagacccagagcagcaaacaggctgcgcagccggatttttaccgcgcccaggttcgtaatttcatcaattttaatctgggtataaatccgatttttctcttccaaaatccgccgcacctcatcggtggtgattgcatccacaccacagccgaatgacaccagctgtaccaaattgattctggcatcgttccattcccctaccagctttgccgccgcataaaggcgggcgtgataagtccactggttcagcactttggtggggaatttctctgtcagatggctgaccgcgtcttctgaaatcacgaccgcacccaaatcgcagatcaatgtatcgatcccgtgattgatttccggatccaaatggtacgggcggcccgccaacaggattaccggcagatccttctctttggcaagtgccaagtattcctcacctttggcccggactttcgtcaaatatgctttgtattccgcataagcggcattggccgctgctttcacatcttttaatccaatatcaataaaatatttgcacaaaattttatgtatatgggccgggaaatccttccgccgatgcaggcccacataatcgttgatatagcgcacccgctgcatctgtgcaacattggcgccgattacctccggataataagccaccaccggacaattatagtgattgtcgcccatcccttcgtccaggttgtaagacatgcatgggtagaaaatcgtttcgacccccgcgtccagcaacgattggatgtgcccgtgcatcagctttgccgggaaacaaaccgtgtccgatggaatggttgcctgccctttcagatacaacttacggttagatgccggcgaggtgaccacctcaaagcccagttgagtaaaaaacgtgtgccaaaatggtagcaattcgaacatattcaaccccatgggaatgccgattttccctcgaaagccctgtttcggaacatactcttctaaaagctcccgtttataatcgtacaggtcgtaacgctctgactgggtataattggctaacggtttttcacaccgattgccgccaataaaacgccgtccgtcgttaaaagtgttgatggtcagccggcagttgttggaacagccccggcaggccactgcctgtaccttatgagtgaagttttccagctgtccggctgtcaaaagtccgctttgggctttggcgtgttttttggcaaacagcgccgcgccatatgcacccatcagtccggagatattgggccggactacatcccggccaatctcctgctcaaatgctcggagcaccgcatcattcaaaaaggtaccaccttgtaccacgatatgctctcccaggtcgtctgccgaggcggcgcggatcactttatacagcgcatttttcaccacgctgatggataggcctgctgaaatattttctacgctggcgccatccttttgcgcctgcttgaccgaggagttcataaacacggtacagcgggaaccaagatccaccggccggtcagcaaaaatacccctcttggcaaagtcagcaatagaatcccccagcgcacccgcaaaagtctgtaaaaaagagccgcagccggaagaacaggcctcatttaagaaaatgttgtcaatcacatgattgcggattttaaagcatttgatgtcctgtccgccgatatcaatgataaaatccacatccggccggaatttttccgctgccgtgtagtgggcaatggtctccaccagcccaaaatcaacgccaaacgcatttttgacaatctcttccccataaccagtggatgcagaacttaacacttttgccttgggatgatcccagtaaaaatcttccaaaaattcccggattagcggcacaggattgccggaattcggcaaataccgggaacagacaatattttcatcctgatcaataaccaccgctttgactgtggtggaaccagcatcaattccaatgtaaacttcttcaacagaagggttatcggcctgtggaaccatatccttggcatgccgggcacaaaaagcgttatactcttcctgactgcgaaacaacggctcgcaacttttgtaattctcttttgcagtataaccgattattttttgggccgcctgagccaggtcgaactgctgggacccaggtgtcatggcagcgcccatcgccacataatagagagagttttccgggcaaatgccttttagctccaaaattcggtcaaaagctgcacgcaattctgaaaggaaggttaacggcccccccagataaacaactctgccttctattacacgcccctgcgccagaccggcaatggtctgattcaccaccgctgcaaaaatgctggcggacacatcatttttacgggcgccctgattcaaaagcggctgaatatccgattttgcaaacactccgcaccgggacgcaatggtatatatcttttcataatcctttgccagttcattcatctgatccggcgtaatattcaaaagagtggccatttggtcgataaacgcgcctgtgccgccggcacaggaaccgttcatccgaacctccagccccccttgcaaaaagaggatcttcgcgtcctcaccgcccagctcgatcaccacatccgtacccggcagcaaccggttaactgctatacgagtcgcgtagacttcctgaacaaacggaaggcccaaactttccgccaaacccatacctgctgaaccggaaacggcaatctgcatgtggggctcctgcggaaatcgtcccgcgatgcggcaaagcatctcagacgccttttctgtaatacgggagaaatgccgttcatactcctgataaacaatcttttctttttcatccagcacaacgcattttagcgtggtggagccgacgtctagcccaattttcatgtttcatcaccttcccctaaccttaactgtgatccattaagcagaaattttttcaaattggctgttatataaattggcgtaaaatccatttttgtccatcagttcttcatgggttccctgctccacaatgtcgccatccttcaaacagagaatcaggtcggcatttttgatagtggacaaccggtgcgcgatgacaaagctggttcgcccaatcatcaggttatccatcgccttttgaatcaaaatttccgtacgggtatccaccgagctggtagcctcatccaaaatcatgatccgtgcatcagacaaaatggcacgagcgatggttaacaactgcttctgcccttgagaaacgttgctcgcctcttcattcagctgcatctggtagccaccaggcagagtgcggataaaatgatccacctgcgccgccttagccgctgcaatcacttcttcgtcagtggcatccagccgcccgtaacggatgttttccataatagtcccgttaaacagccacgtgtcctgtagcaccataccaaattcttggcgcaaatcttctttggtgaattcttttacattatgtccatcgacaaaaatatcaccggcatcaatatcatgaaagcgcatcaaaagcttgaccaacgtagtcttaccggcgccagtaggtccaacaatcgccactttctgaccagcttttacgtcagcagaaaagtctttgataattacttcgtccgggtcatacccaaaacgcacatgagaaaattgcacgtcgcctttcaagcggattttttccgcagacggctcctcactgcggtgtgccagagaaagtctgggcttgattaccgcctcttccttttcttccaaaaattcaaacactcgctctgccgctgcaacagtcatctgcaactgattggaaatattagccatttgggtaattggctgggtaaaactgcgcacatactgaataaatgcctgaatcccaccaatggtcatagttccgcctgcagccatagatgcgccgaggatacagattgctacataacccaaatttcctacaaagcccataatcggctgcatcaatccggataaaaactgcgctttccatccagcattgtataattttttgttctgttcgtcaaatgcttttacggatttttcctccccgttaaacgccttgaccaccaaatgtccgccatacatttcttccacatgaccattgactgcgccaagatacttttgctggcctctgaaatacccttgggactttttcacaacccccattaccaacagcaaagacagcggcagaatacacaaagcaactagtgtcagctgccagctgatactcagcatcataatcagcacaccgatcatagaagtaacagaggtaatcagctgcgtaacactttgatttaaactctggcttaaggtatccacgtcattggtaatgcgggagagaatctctccctggctgactttatgaaagtaacccaacggcagccggttgattttttgtatgatctgttgacgtagattataagatactttggcagaaatgccagccatagtaaatccctgaacataggaaaacaaagcgctcagcagataaaggcctaacaaagtcaataaaactacaccaatatagccaaaatctatcacaccgtctccgccggtaataacggccataatccctttggccagctcatcagtagctttggccagcacctttggccccacaatggtaaataccgtagaaatcgcggcgcataacagcaccataataattgcccaatgaaaaggcttcaaataagaaagcagttttcgggtactgcccttaaaatttttcgctttttctcccgtcatcatcctgccgcccggtccatggccgcgcattggcccgctgggagcggcatgttttggttggctcactgcaattcctcctttgaaagctgggattgagcaatctccagatattccgggcaattttttatcaattgttcatgggttcctttgcctacaattctcccgtgattcaaaacaataatttgttctgcccccataatggtactgactctctgcgcaacaaccaacacagccgcatttttatccagctttttttgcaaagcaccgcgtaaagccacatcggttttaaagtccaaggcagaaaaactgtcgtcaaataaataaacaagtggttttcgggccagtgccctcgcaatggccagccgctgcttttggccgccgctgacatttccgccgccctgagcaatcggtgcggacaactgcccatctgcagattgaacaaacgcttttgcttgggccgtctggatcgcgttccaaatttcttcgtctgaagcatcctctttcccatatcggatattggaagcgatatcaccggaaaaaagtacgcttttttgcggtacatagccaatcagactgcgcagctgtttctgaggcagctgccgtacatcaacccctccgatggtgacgctccctgccgttacatcataaaaacgggggatcaggttgagcagtgtcgactttccagaaccggtagacccaataaaggcggtggtttctcctgcctttgctataaaactcaaatcggacaatacatcactttccgcattttgatagcggaaagacacattctgaaattctaccgtaccgtccgaaatttttatccgcgcttctttctccgggtccagaatactcggctgggtgttcaacacctcggccacacggttggcggaaaccgctgcgcgcggtaccataataaacatcatggcaatcatcaaaaaagacatgataatttgcatgccatactgcataaaggccatcatatctccaatctgcatggtcgaagccgcaatcgcatggccgcctacccagatgataaccaatgtaaccagattcataatcaagctcatcgcaggcatcgtaaaagacatggttcgctgaacaaagcgagtagtgtcccgcagatcgcggtttgcctgttcaaagcgtccttcttcatacgtttcatttccaaaagcccgaatcaccattaagccggacagattttcacggctgaccaaattcagccggtcaatcagcctctgaagagattgaaatttaggcattgcgatagaaaaaataatcataatcagcccaatcagcaccacaacagccaaagcgatgatccaactgagcgaaacacttttatccaccgccattacaatacctccgatacccatgatcggtgcgtaacacaggatccgaatccccatggtaatgagcatctgcacctgttgtacgtcgttggtcgtgcgggtaatcaaagaagcggtggaaaatttgtcaaattctccactggaaaaactttctgccttttgaaaaacatcatgccgcaaatcacgggacaccgccgcgccgattctagcggaaaaaaagcccacgccaatggctgccagcacaccggccaaggccaccaaaagcatttttccgccggtcaatataatatagttttgctgtttctggtgcaagtctatacccgcatcttgataaagcagcgccgtaaacgccgggccaatctgctctttgaccgaatcatccgcctgcaaagccgcaaggtatgcctcatccaccatctgctgtggtatactctgtaaaaaaggcagcatttgatataacatttcgccgctgattccggacaaatccgcatcgctttcgttttgggtctgatcgctttgagatgcggaagattttagaagattcataagcgtcaatgcgctttgctcataaacttcctgcgttttttgttccacgcgatctgacgacaggacataaatgccgtcttttttctcataaccgctttggaatatttcccggtcctcttccttcatgagcaggcagaccagagccattccctgttcgctgattttttccggaaccggttcatcaactccatttttctgcagtcccacgttgacgatatcgctcatcagatttggcagactcagatcgctaagcgcctgtccaaacaacagtatcacgcacaacaacagtatgaaagcaaaaggttttaaatattttaagacaactttcatacgctcctcctttgatttttaccgaattctccccatttcgctcctgattttgatgaaatacacaaaaattataggtttcttttgtgaacttgtcatgaacggaatcccaataatttatcgttacccattttacgcaaaagcaagacagttctgacctcttcttttcaaaaatcagcaaaacagggaactggcgaagtagcgagattcccatctcaaaataaaaacatgaggccgaccggcctcatgtttttattctgccctggtcaggcgatataatcctgcattgacaatcgcggccgccacattgcttccccccttgcggccttttgccacaatacagggaacacccgcattcataatccgttctttggattgcaccacattcacaaatcccaccggtacgccgatgatcaaccgaggccttacagttccttcccgaaccaattcatccaagcgaagcaatgctgtcggtgcattgccgatggcaaaaatcagcggcacagaaagagttgcagctttttccattgacacacaagcccgggtaacccctctttcccgtgcctggcgggcaacatcttcgtccgccataaagcagtggacttgcccgccaaatgccgccagcgtttttttgttgatgccggaaagagccatttgcgtatccgtaacaatatgggcgccttcggcaagcgcctgcgaaagaatttgcgccgcattttcactgaagtaaagagtttcggcatattccagatctgccgttgtatggataacccgctttacaatgtgagctgtttcatccggaggctgctgctcccccaacaaatcggtaataatctcaaaactgcgccgctcaatctcctccggccgaatccgctcaattttcatagaatctcctcctatctctctatgccgtcccgagccattacgccccggtcgaaaggatgtttttgttttttcatctccgttacataatctgccactttcaaaagattcgctgatggattgcgtccagtgagtacaacctcccagccggcaggacgggcgtgtaagaaatccagcaacagcttctcatccaaaaggcctttctggcaggcccccaccgcctcgtccaacaccagcagcccctgcgagctttggctgcagaacgtgcccgcccgccgcagattctccgtatgcgccgccagacattttgctttttcttcctcgctcatacgaaaggaaaacccggaaagctgtggataagccagtgttgggatgcccaatcgttccagcgctttgatctcgccgctatctccccgttttaaaaactgcactaccaataccggatacccccgcccggctgcacgcagtgccaatccgattgcggcagtggtcttccctttaccgccgccatgatacagatggaccattcccagcttttgctccataatcaaagcccttcttctacgattttgtaaatttcgtccatattcagtgactggcgcattccatcggccaaaaggtcatactggcgctgtttatacgtctccatgtccagcgcctgtaccgatgcgggatccaaccccttttgccgcatcagcgctcttaccagcgcccgcgtagtttcctgccggtcaaacagtccgtgcagataggttccgtacacgttttcctggtgcaccagattccgattcgtccccgtccggcccatgtggatttcatacccatcaaaaggctggcctgacaattccgacaatacgccgcctactgtatccaataccccctgggcgcggacgcgggttttttctccggcaaattcggtttccagcggtaaaaggcccatgcccgaaatttctccgccatgttctactcccaacggatcgcgaatcgccctgcccagcatttgaaagccgccgcagactcccagtatcggttttcccgccgctgcgtgcttttgcaccgctgcctccaaaccattctggcgcatccacaacaaatcgtccatggtattcttggttccgggcaggatgatcaaatccggtttgcccagctgtcccggcgcggcgacatagcgcaccgaaacctgatcgatatattccagcgggttaaaatctgtaaagttggaaatgcgcggcaggcggatcaccgcaatgtctatgtccgcagccttatcccggcgggagaaacgctcgctcaagctatcctcgtcgtccacgtccaaatgcagatacggcaccacccccaaagttgggatatggataatatcctccagcattttaagccccggctccaaaatcttgacatcaccgcgaaacttgttgatgattgtccccttaatcatccttttttcttcttcctccagcagcagcatggtgccagccagtgcggcgaacacgcctccccggtcaatgtctcccaccaacagcactggtgatcgggacattttcgccatgcccatgttgacaatatcgttctcccgaaggttaatttctgccgggctgccggccccctctatgacgatgatatcgttttcttggtccagccggccataagcggccataatatcgggaatcagctgcggtttatattggtaatagtccgccgcccgcataacgccgcgcacttcgccgttaacgatcacctgagagccttgatcgctggtgggcttgagcaggattggattcatatccactaccggttccagtccggcagcctccgcttgcattacctgagcgcgccccatttccaatccatcccgggtaatgtaggaattcaacgccatattctgagatttaaacggcgcgacccgatagccatcctgacgaaaaatccggcataatcccgccgcgattaaacttttcccggcattggacgttgtgccttgaatcataattgcctttgccattttgattcgctcccctctttttttgtctgcaaaatctgtcgaatgccatccagcagcctaatattgtctttccggcttttgactgcaatacggcaataactgccgtccagcccccgataattgccacagcagcggatgagaatccccagccgttccaaacgctggggcaaatctgccagcggcgcccgaaaaaacagataattggcttttccgtcatacaccaataatcccagagcagcaagctcttcctgcaaaaatatccgttcttcggccacaaaccgtttggtcttttccacaaagtcccgctgagacagcgctgcaacgccgcaacgggacgcaggggtggatacgctccaggcctggcccgtcccgctgatctgccggatgcggttttcatccgcgcacagtgcatatcccagccgaattcccgccatcgcatacatttttgtaaacgctttgaggatgattgttccagggaaatcccgtaaaaagggcaaagcggtatagcactgttcttcttccaaaaaatcagtaaaacattcatccagcaccaataaggttccggatttttgacagcgtttcatcaactggaaaatccaatcagattccatcgccacgccggtggggttgttgggattgcagaaaaaacagatatccactcccggctgaatcgcctctaaaaagcgatcatccggtgcaaatcttttctccttcggcaaatcaaaatacgaaatctcacagtccacacattccagcgcctcggcatattctgaaaaagttggcgcgggcaaaacagcgcgtttcggcttttggctcagcaccatccgccagataatatccgccgcaccgtttccgcatacaacccagctttccggaacgccgtattcctctccaatcgcccggcgcaatgtccggcactggggatccggatagctttgatatgcgtccggatcctggcacaaggcatcttttaccgcctggggcattcccagcggattgagatttgccgaaaaatcaaccagctccaccccgtccggaaaatcccgctcggtataaatatcaccgccgtgttctttttttaccataaaagcacccccaccaaacgcaccgccaaaaacaggcataaactcaatactgaggtcagcgtcatcagacggcaggataacgggatatcctctgctgttaccggacgacccggatcgcctatggtcggcttatgaaccagttggccaaaataaaacgcatctcctgccagctgcacccccagcgccccggcgcaaaccgattctgttcgggcactgttgggactggtatgatttttgcgatcccttttatagatgcgctgggcatttttcccatctaaccccagcaaataagaagcgccgatcatcagccaggccgacagaatggcgggtataaaattcaccacatcatccagctttgccgcagccctgccaaaatagagataggtttcgtttttgtagccgatcatggaatccatggtattgattgctttatacaaaaaccccatcggcgcaccgccgatggctaaataaaaaagcggagccacgatcccgtccgaagtgttttccgccacggtttctaccgctgcttttgccacatgctccccatccaaattctgcgtgtcacgccccacaatccaggaaaggtagtgccgcgcctgtggcaaatcgccctttttcagcggaaaatacactcgcatactctctgtccgcaaacttttggttgccggaatctggtagcaaaaaagcacttccaatccaaaccgaacagccggatgaatcaaacctgcggcatataaaatcccaagcggcacaaaaaagcccagcaaaaacatacagactgccagcaccgatccggcccacaattctgctttgggcgttttggggaacacgctgcgcagcagtttttctcctttgctgatacaccagcccattagctgaaccgggtgcggcaaccaatgcggatccccgaacaaaagatccaacaggtaaccacatagcaccgccagtaatatttccatctcattccctcccgtctgtcagcgaggcaatttgccaagcctgccgcgctgtcggatcataccagaatcggtaaccaccgccgttggatgcctgccaatcgtaaaaatcccggtgcggcatggaaaaagcttctaatactgccattattgtgccgccatgacagacaactgccagagtcccgtccggatgccgttccgccgctttttgcgcaatggcggcaaatgcgctcttactgcgcacgcgaaacgccatcggatcctcaccgctgggaaacgggattgtcccgccgctgtccagccatttttgataagccgcttcattctttagctgatcgtaggttttcccttcatattcaccaaaatcgcattcccgcaaatcttcacaaacatttgctgaaatccccgggtacaaaatctcggccgtttgcgcgcaacggcgtaggggactatgccacacttcatccggtagaggaaaacaccctgccagcctttccagttcggcgcgtccctcaaggcaaagcggctggtcggtaacgccgatatacgccttcttcaaattcccctcggtttttccatgccgaatcaaatacaccaaaattttcattttttcttgatctccaatgctacaccgcaaaacacccgctccaccgacggggtggattttgcgatctcacacaaaatccgccccacctgttcccgccagtcccgctcaaaccgatccatcggaatcacgccgcagccgatttcatcgcagactacaaccctaactgcgccttcttgcaatccttttcgaacaacctgcacaggatcagcctcgcttttcatcaatcgacgcaccagcatatgcagcccgtacaaagcaggaagagaaaaggctttgtccaaactgcacaccgcgccgtcagaaatctccgaatccaaaaagcccagttctgacaatcgttctttttttccgctacgggtcccacctacaattaacttttctaccattccaacattcctccaaaggtgcagaccgccaaaactgccagctccgtcatctgcagaaaaaatcccgccagatcgccagtaatcccgccgaactgctttttgcacaggtgccaaaaaacaataaaaataaggcttatgccgatcagcaccgcaacgcctgcccaccaaaagcgccaaatcagcaaaccgcctgcaaacgccagataacatccacagcaaattcgcaccgtttttttgtccgcatatccagaaaataaatgcgccaatccggaattttttgccgcctgaaaactcaccaccgccatcgccgagcagcagcgggaaaggaaaaatccagcgcagcaaggtaccagcaggcgaggcgaggtatacaattgcccccacaaagcaaagctcgccagcagataaccgccgcaaacgatcactccaaaagctcccacgtgcggatcttttaaaatttccagctttttctccgtctcccgccgtgagtacagcgcgtcagctgtatccaccataccgtccagatgaataccgccggacacaatcaggggcagtaacgtcattccccccgcaaacagcatctcgcctgcatgccaggcccggcataaccacgcccatcccaaacagagtccgccgatcagcagcccgacccacggaaaaaagcaaaacagatatcgcattgtatccgcatgccaaggcacctgtggcattggtaccgtcgaatacatggaaaaggcggcgcaaaacccactaacccattttttcaagcaaagccctcccctgtccattctgccggtgaattaccggtataccgcagcaaagctctgctgtaagatcggcctgcgccgcaaggtactggttaaccaccgataggttttttagatattcctcggtgtatggcccatagtccaacccatcgcaaaataaatcaccagacacgaccaccagattggaaaccgatgcctgtaaagcgtccagcccctttttgaccgagtcaagcgccctttttcccgcaccggacggactatacatttcgtttgccatccagttggtcatacattccaacagcacagtgtcacagcaaaaggagtctgctttgtctgccagcgaagtatagatttccaccgtctgaaatcctttttcccgccggagagcccggtgtttttgaatgcgctcctgcgcttcttttccgaagggctccatagtggcaagataacatttctttcctcctaacgccacagccagcgcctccgcccaagctgatttgccactggcggcaccacctgctacaaacgcgagcattgcgcttcctcctttttaaagtcggtatagggttccaattcaatctctgaaaaagaactcattttttcatataccgctaatcccaaatccaagaccggaaataaggtcaccgcaccggttccctcgcccaagcacatccctgcgtgaagaatggccctttgtcccaatgcatccagcaacatctgcccggcaggttcagccgatacgtgagaggccaacaggtactcggcgcaagccggacacagccggacggcaatcagcgccgccgccgcggagatcaatccgtcaatcaccaccgggataccggcagatgcgcctcccaaaaatgcaccggcaatcccggctaaatccaatccgccaaccttggacagtacatccagcgcgtcgtccgggtttggccggtttaccgcaatacctcgccggatggtctctgccttccggacaaggccctcggaggaaaggcccgcgcccacgccggtaacttcggccggatcatatcccaacagcaccgataccaccgccgcgctggtagtggtgttgccaattcccatttcaccagtggcaatggcacggtatccctcatttgccagctgccgcgccaggcgaatgccggtttccaccgcccggaccgcctcctcccggcgcatagcaggtcccagagtgaaatcatcggttcccaaccggattttttcctgtaaaagaccgggaacctccatcggcttggatacaccgatatccaccggtatcaaatccactccggctttttcagccatgacacaggagcttgtctttcccttggtgaaattttcagtcacaatggcagtcacgctttgatcggtctgcgtcactccttgggcaaccacaccgttatccgcacaaaaaaccagcaatgcccggggagaaaaagatacgcgcgacgttcgctgcataccagcggcacggatgatcgtctcttctaaaaggcccagactgtgcagcggtttggcaatgctgtcccatcggcgggcagcctgttccatagccgtcttgtccaatggctgaatcgaccggattgttttttgcaaattcatactttttgctccttttgatatgtggcgcactgcgccaaaaaacgggatgctgcgtccggattgctccaaaaatacaaatggggatatcccgcgtacaaccgcggccctgcctgaacgcaaaaatattcgtcttttcgttttcgggccaaaaaactttcgccgttcttcgtcgtatccgaataatgaaaggaatggcccctgatttgtccgcccgctggacaaatcatttgctcccggcgcgataaaagatccacatagccaaaccggaccaagcgatcggtcatctgcccctttcctggcaatgcacctgccatgggaaaatcgttgccggttcgatctgccagcgactgctgtaaatacaaaaagccgccgcactctgcaatcgtcggcatttcgtttgtcaccgcctgtcgcaccgattggcgcatcgtctcattttctgccaacaaccgcgcatataattccgggtacccgccacccaaatacagcccgtccagatccggcggcagggatttatcgtgcagcggcgaaaagggaaccaacttggcgcccatctcttccaacagttccaaattatccgcataataaaagcagaaagcctcgtccagcgccacgccaatgcgcacggatacctgttgcagtggcggaaggctgggctttttgtactccaacgtaacggttgattgagccagctgcaaaataccgtccaaatccagcgttttttcagcagtctcggccaaaa

SEQ ID NO: 2600 - DNA, 32759 bp, Unknown
  16S sequences of unknown bacteria
gcctagctgcatccgccactggcggcgctcggcttcgcacccccgttcccctcccccgtggcgggggaggggccgtctatccaaatagttgcttgttcagcccatagtcttggcagcgtagctttctgctattggtctgcagaaaccgaataaaatgcgccgcaggcgccttgagaatgtatctgcggcgctgtacggacgatgctttgcatcgttcgtatccagccgcagcttaagcgttagggggtcttggggcacagccccaagtgtgttttggtatggggcccccggcgggacgcaaggcccgctggggaaaggaggagcggcggagcgttggagggttaccccaagcgtaagctgggtgacccgacatggagcgcagcccgcgacgacacacacgagtaaaaggaacgcctccgcggcgagcggtgctcaccacgcctttgcaaaagactccgcgacgccgttaggcgagaaaaaactttctgccgtcaatccctccggctcatttcattcgccacctccctttacacaagggaggctatgggttggtgcgcggccggatcagaacagccgtcctcgcccggccctggatagagccttacagcaccggccaggaacggggaatgaccatgccctcgtagagatcgacacagtagcggtcgctcatgccgctgatgaaatcggcggcggccctggctggggtctcctcctccgcgatgctgcggtagaaatccggcagcttatgcggattggccacatagtaggcgaacaggtaccgcacaatgtccctggccttgccctcctcgcctttggctacggggtttttatacaccgcctcaaacaaaaaccgcttgagggtgaggaagtgcctttcgctctcctcgtccatctgcaccgtttcaccgctgtgctggatgagggcttgcagcatcccgctgatgcggcggcttttgccgctgccaaagcgcagacgcacctcccacggcaggtcctcctcggtcagtatcccgccccggatggcgtcctcgatatcgtggttcatgtaggcgatcttatcggcatagcggaccacccggccctcctgggtgcggctccaggcctgtccgtcgctgtgcgccaggatgccctcccgcacctcctcggtgaggttcagaccgcggccctcccgctccagcagggtcaccacccgcacactttgggcggcgtggtggaagttggggtcgtaaacatcctgcagggcatattccccggcgtggccaaagggggtgtggcccaggtcgtgccccagggcgatagcctcggtcaggtcctcattcagccgcagggcccggctcagcgtccgggcgatctggctgacctccagggtgtgggtcagccgggtgcggtagtggtccccctccggggaaaggaacacctgggttttgtgggtcagccgccggaaggcattgcagtgcaggatccggtctctatcccgctggaaaggggtgcgcatgggacattcttcctcggggcgctcccggccgcgggtttcatcggcgaaggttgcccggggcgaaaggatctcgtgctccagggcctcctgctgctctcgaatggtcatattgtctctccttggtgggtcatttctgtgcaaaacgcaaattttggggggattgggggtcttttccgggtcgcaaacccctctactagtataatacgcaatcggggcggcagattcctgcctgtttgggcaaatttttttgaaaaatttttattttcctgtttttggccggcgcttcccgggggaacggcaccgtttttgcgggttcccttggggacaatttttgtgggggaacctcgcgcgcgcgcccaagtgcacacgccgcggcacgggcccgcgcgcacgcgcacgcgtaggggatttttacaaattggggatttatgtatttattggctgatttgtgggggcctggcggcagggggcttttctatgaaaaaagcaggcaaaagaattttaattaggccaagatggtgatcgcctaacggcggcgcattgattttgcagggtacaaagcctgtacggctcgccgccgggtaggcgtgcaaacaaggacttttcaaaaggccctgcgacgccgataggcgagaagaaattattaccttttgccggcaacccctcagtcagccatacggctgacagctccccttacacaggggagccttttggctggtgcgatgccacttcgttaccctttacataaggaagctttggggtgcgtggctgcgattgcttgaggagggctttaccccagctccgaccggtgctgctggcagaagttttcgtaccaatggagctgatcccgcagcaggcggggggtatccagggagtaggggcagtgggccacgcagcggcggcaattgatgcagctttcgatcttgtgcattttggcctgccattccttggtaatatagggctgataaggcgcgcgggtcatcaaaagggacatgcgggcggcattggggatctcgatgcccatgggacagggcatgcaatagccgcagctgcggcagaaatccccgccaagggctgccttttcctccgccgccaggcgctgcatttcctcgttccattggggcgggtcattttccagggagagccactggttcagctcactcctgcgctgaataccgtagatgggcaccacctgcgggtactggcgcaggaaggcgaaggtgacctccgggtgctgaatgaggccgccgcccatggccttcatggcgataaagcctacatcccgttcggcggcgcgctgcaccagcttgatttcccgctcatcggcaatgaccgagaagggatattgcagggtatcgtagagaccgctttccagggcttcctccgcgacgccgatgcggtgggcggtgacagaaatgtggcggatggcaccctcctttttcttttggagcagccaatcgtagacgccatcctcctcgccggggcggtagaccctgggggcgcagtgcagctggtagatatcgatgtaatcggtgcggagcattttaaggctttgctccaggtgctgctgcatgacctccggggcggcgggggcggttttggtggcgatgatgatattccggcggacatcgcccagggcctgaccgagcttaaattcgctatcggtataggcgttggcggtatcgtagaaattgataccggcctcatacgcaacgcggaggatggcggtggattcgctctccgggatgcgctggatgggcagggcgccgaacgaggtgcggctgacggaaaggccggtgcggccaagacgggtatattccatgggggacctccttagtgtggattttatggtgagcggaagggggatggctggggccgcaggcccggcggcgaagccgccgaagcggaccttcggtccgcttgcccgccctacgggcgggcggcctgcggccccgatcccggtttctgcttagggttcggggaaggggtagtagctttccgactggacagcgggggccaggctgccggcgctcagctcttccaaggcttttgaaaagggggaaagagcctcctgccggagcatgaagcggaccgtgacctccccctcaaaggcggtatccagcaggacggcaccatactggggaaggagattctgcagcttgccgtaaaaaccataatcagcggagagggtacattccacggcggggtacatgcatagaaccccggctgcggcgaccgctattttgcagccttgggtataggcgcgggccaggccgccggtccccagcaggatcccgccgaagtagcgggtgacgaccacgcagacatcggtgaggtcttcccgctggaggacctccaaaatggggcggccggcggtaccgctgggctcgccgtcatccgagaagcgggcaagattattctgccgcaggcggtaggcgtagcagttatggcgggcctcccggtggcgggcgcgcaccgattcgataaaggcggcggcctcctgctcagtggtgacgggggcgatgtagccgataaagcggctttttttctcgatgaattcatcctcggccggggcggcgatggtgcggtagctggggggcatatgggttctcctttccggtggaatgggggcggggggacttttctatgcggaaaagtgggcaaaagaattttatttagggcgaaattgtgggcgcctggcggtggcgcgtggccttttacaaggcatgatgagcaccgctgccgcgggggccaaattggtagtcgccttcggcgtcgcggagtcaccggagggtgacggcctgcacgcctacccggcgggggcctacttttgtatgcacaaaagtaggcaaaacgcacttggggctgtgccccaagacccccttgccgctaagctgcggctggatacgaacgatgctttggcatcgttcgtacggcgccgcagatacgctctcaaggtgcctgcggcgcattttatttggattcagcgggggccgaattaaatgcgcctgcggctccttatcagcgtcgtctaatcccgctccgggaatgcgaagtgtttccggtcggggcgtaccgacgcgttacgggtctttagggcggagccctaaatgacttttggttacttttcttcatagaaaagtagggcctcggcggcgagccgtacagattacgcctttgtagaaggctccgcgacgccgaaggcgagatgaaactatctccatagtttgcaccgtcaacccctcagtcagccatacggctggcagctccccttacacaggggagcctgttaaaaagattttcttcctttttccaaaagggaaaaacgcaggggagcaaaaataaggcggcaccgtgcggcaccgccttatacttttgcagattatttgcccagattgaagcgcttgttgaaacgatcaacgcggccgccggtatctaccagcttctgcttgccggtaaagaagggatggcacttggagcagatttctacgcggatctcggggacggtggagatggtctccagcgtattaccgcaggcgcagcgaatcacagcagggccatacttgggatggatgccttttttcatgcgatttcacctctttcgaattcctggcgccaatgttagcttgcattggctgaaccgtactgaaatagtttaccacaacgcccggcaaattgcaagaaaaaagtgcaaaaagttttggcggaaaaaatggcaaaattaccggatttaccgggtgacatagtggcggatgaactccatggcgcgctcggagtgaccacgaaccagctccagtgccttatccaaatcgccagccaacagggaatctatgaactccacacggtcggtgacggcgccttcctggctgaagtgagcacccttgatgagcgaatcattgaaattattcatcatggtgtaggccttggtgtaggtctcctcgatgaggtcattttcgcagaggcggatgagctcgacggagagcttgcgctccagctcctgatagcggcggtagtcgttcaactcgatggtggagagcatctcctcccggatctgctggagggcctgacggtgctcttcggtgaggatggtgacggcgtgatggacggcgtgctcctcaaagagggtgcggacctcctgcatgtcctccagttccttggcggtggggatcttgacataggcgccgcggttggtgatattgacaaccagaccatcgccgatgagctgcttgatggcctcccggacgggggcgcggctgacattgaagcgctcggcaatgctctgctccaccagcttttcgccggatttcagtttgcaatcgatgatctcctgcttgagaatctgataaacctgatctttgatggaaacgacacggataacctcgttatgttccatgactgtactccttgctttctgataaattctgtcatattgattccattattataacctatttagggtgcaaatggaagagggcaatacaaaaaatagacgaaaacaagcaaattgttcctatattatggaatttcagccatgaacaatcttgagaaatggggagccgtggtgagaaaacacggttctttgtgaaaagcgacaaggacaatagagtggatttatctcatttaacgaaaattgcacagacacttgacggaggggaagatggtcgatataattaaattgtatacaatattcattttcggttgtcgaaatgaattatcgtaaataaatttaaggagatattgtttatggcaaagttacacactatcgtactgcacaaggatgaggatgttacctccgcgatccatgcttacctaatggacaagaagtggaaagccggcgtcatcgtaagcgctgttggttccatctatgatgtgaccgtgggcaaccccggcagctatgagatgccccccaagatgctgcagaccaccattaatgagccctgtgagatcgtatccttcatgggcgagatcacccgcaagtgcgacgcccccgccggtctgccctgccaggtgaccaatacccccagcgattacatcgtacatgtgcatatgacctgctcccacggcgaaaacgccactgtgaccggcggcggcttccgcaaggcgaccgtactgcgcgcagtaaatgtgtatgtgctggaagtggaagacgaaaacgagctttgctgatgcagggagagaaataatatgagctatacctatgactttaatgtaatagtagaccgcagccgtgagcgcagcaagacctgggacccccgcaatgtgaagcccggccagctgcccatgaacggcgccgagatgcacttcgcctgccccatccccgtgctggaggccgtgcgtgaggtgagcgagtgccaggtatatggctacccctattttaccgatgactttgcccaggcggcagccggctggatgaagcgccgccacgactgggatgtggactacaagtgggtggaatttgtcggtggcatcgtgcccggcatcgcctttgccatgcaggccatgaccaaggtgggcgacggcatcatcatcaatacccccgcctactctcccttccgtgactgcatccgcgataacgaccgcaagctggtggaaagcggcctgctgatcgacagcgaaaagggcacagtggaatttgactgggccgacatggaagcgaagtttgccgaccccaacaatacctgcttcatcctgtgtgacccgcagaaccccaccggcaagagctgcacgctggaggagctgaagaagatcgaggagctttccaagaagtacaatgtattcgtgatcgtggacgaggtgcacgcggactttgtattcgacggcaagcggcacatctgctaccccaccgtgggcgactttgccaaggggttctccgctgtggtcatcaaccccagcaagaccttcaatactgccggtttccgcaccgctgccattatcatccccaatcaggagatccatgacaagaccaatgtgaagatcgcggccgtgaagggttacagccggaccatcaccggtgtagcggcctttgaggcggcctacggcggcaagtgcgacgattttgccgaccaggcacatgagtatgtgcagaccatgcgcaacaagatgtgcgactactttgcggagaatatccccgaaatgaagatcatcaagccggaagcctgcttcgtctgctggtgtgactgccacggactgggctttgaggatcagggcgagatgatgaaattcctggccgaggccggtgtgctgatgagcaacggcctggaatacgacaaggagctgggccgcggctatgtgcgtatcgcctatggcttcccggagatccagctgatgcccgccctggagaagctggccgccgctgtgaaggcccgcagaaagtaagggggtaaggaaaatgtctgctgagatcaagctgatcgctaccccggatgcaccggccgccaagggcccgtacagccagggcatggtgcatggagattatgtattcgtagcggggcagctgccgctggaccctgcgaccggcgaagtggtgcccggggattttggcgaccatgtgcgccagaccctgcgcaatgtggaggccatcctgaaggccggcggaagcgatctggagcatgtggtgcgggtgaatgtatacctgaccgaccccagccagttcccgctgttgaatgaggcgtattccgccgtgatgaagaccccctacccgccccgtaccgcccgcgctgtagcgctgggaccctacgatgtggaaattgacgccgtaggcgtagtagtaaaataaaccaaaaaccggaggaaccaacaatgggttacaagatttatgcccccaagccgatgtccgatgaatcgatggagatgctgcgcaaaaagggctttgagatcattggtgagtggcaggattcccgcgaggatatgaagaaatacatggccgaggcggatgtagtcattgcccgcgtccatttctttgatgacgagctgctggccctggccaagaacctgaagctgatccaggtgcacggcgtaggctaccaggaccatgtggtatgcgaggacgctgccaagcgcggcatctatgtagcgtacagcccctacggcaaccactttaccgtggcggaaggcgccgtggcgctgaccctcgcgatgaccaagcacatctgcgagtataacaccaaggtgcgtacccccgagggcatcaaggccaagatggctattgagctttccggcgctaccgttggtgtgctgggcctgggcaacattgcccgcagctatgccgagaagatgttctacggcatgaacgcccatattatcgcttacgatccctttattgatcccgctatcgttcccagctacatcaccatggtggagacgatggaagaggtattccagcaggccgatgtggtttccctgcacattcccggcgagcgctacaacaaggaccttatcaacaagaagcactttgacctgatgaagcccaccgcttacttcctgaacaccgcccgtgacatcctggtaaacaacgacgacctgtacgacgcgctgaagaacggcaagatcgccggcgccgcggccgatgttaactatgaggagttccccgacggcaagaagctgctggagctggataacttcatcaacaccccccacgctatggccttctccgatggctccctgatgcgctccggtcgcaactgctaccgtgagatctgccaggtaatgctggagggcaaggagcccaagtactgggtgaaccagaagggctttatccccaagaagtaattttctttctccttccttatagtttttgggctcccctggaataccaggggagctcctctatttattggtgcaggccccggtggggcctttctttttgcctctcccctgccctgcggcggaaagtgagaatggccggagagcggcaggaggggtgaaaagcccccaaagggacggcgggcgcagcggcggcgcgaacccgtgcgctgctgagattttggcgaatggggagcgggcaggccgcaggccgccccggctgcgccggggccagcgtccctaaagggacgctgaaaccgcccgaagggcggtttggcctgcggccgatgggcgggaaaagcagaaaatcggagcaaaaggcaaccgcccgactcccctgggtggagagccgggcgacgcggacacttatgaagttcaaggagaagttaagcggggatggatcggcctttgacatagtcacgcttgtgcaggtagtagatacccagcacgatgacggccgcggggatctcgatgatgagatccgggatgatgagcatgaccgcacagaccgcgaacagcagccgccacaggatgccgaccctgcggtaggtgtagccctgcatgagccacgcaatgggcaacgccgccaacaaggtaagcagcgcggagagaacaccggtaatgccagtggcaaagctggagaaatccagcatgataacgccgggggtaaggcagaaggaatacggaataaggaacgccacaatgcccagacggacggcttcccagccaaccttactggggttggcatcggccaaggcagcgcccgcataggaggcaatagccaccggcggggtgatgcagctgagcgacgcaaagtagaacaggaacagatgcgcgcaaagcggaggcaggccgagcttgagcagggagggcgcaatggtggtagcagtgatgatataggccgcggtggtgggcaaacccatgccgaggatgatggacaccagcatggagaacaccagacacagcaccagattgctgccaccgagggtgaggatgaaattggagaacttgagccccaggccggtgagggacaacatggcgataacgataccggaggccgcacaggcagctacgatctgagcggacccgatggccgcctggcagaaggcattcttgaggtgcttgaaggagaaacggtcattcttatcaaacagggcacaaaggacaaccgccgccatggcatacagggcacagcgcatgggagtaatattgaacacaacgagggtgacaatgagcactaccacggggatgatgagcttggcactgcgcttaagcaccgggataagcagggggatatccttttcatccatgccgagcaggtcatttttcagggcttccacatccaccatgatgaacacgctgatgtaataaaggaaagccggaatagcagctgccacacagacggtgccatagccgatgccggtcatttccgccaggatgaaggcggcagcacccatgatgggcggcatgatctggccgccggtggaagcaacggcttcaactgcgccggcaaagacgggacgatagccgcagcgtttcatcatggggatggtgaaggtgccggtggaaacgacattggcgaccgagctgccggagatggtaccgaagatagcggaagcgataatggcgatcttggcggggccgccgcgtttacggccggccagcgcggtagaaagatcgcggaagatgagatcagcgccgcagacattgaggaaggcaccaaacagcaggaacaggaatacggtattggcggaaacgccgatgggcataccgaagataccctgctggctgaaaatggtcttgatgacgcgggtaaagctgtagcccttgtggccgatgaggccggggagatatttgccgaagagggcatacagaatggtgatgagcgcgatggcgggcagcgaggggccggtcagacggcggcagccctccagcacgatgacggtgcagatggcgcccatgacgatatcggtgggactggcaacgagatccatgcgcagcaggaaggcatcgatatcccgcagaatgtagatggcgaccgccgcgacgcccagggccaggataatatcaaaaatcttggctggactgtaaaaatatctcttcttgcctttgtaatcgtacaccaggtagcacataagcatgccgaacatgaagtggatcacaaagaactcggagctgataaagaaaggatagatcacattgacgatctgcacagtgcacatggcaaagcacagcgcagaaatgataaagcgatagatgcggtcactctttttctcctgctcgttcagggtaggagcggtaggggtggtgggggcattttcgggcatgggtatcctccttttttctaagaaaaatgccgccgagcagggtctccccgcccagcagcatatatggttcagtcaataggatcaggccatgggagcgaagccctcgccgggagtctggagagtgatgccatgctcggtgtaccatttttccgcaccggggtgccacttcacaccaaccttctcggcgttttcgggaacagccagcttaagggcgttattgatgacggcgaggtcatcgtagttgctgaaggtggcatccagcagatcatagacgacctgctcggaaacatcggcggaagcggccatgacggaccactggcacagggtcttgatctcgaagtctgcattggccttataggtgccagcggggatgacggaatcgctgtagaagggatagagcttcttgatggtagcgagttcgtcatcggtcatctggatcatggaaacggtctgggtggcttccagctcggtaagggagggccagggagccggggactgcaccacgatggcatcaatgacaccatcctgcagcgcggtgatggtggcggaccaggtatcattgtggatcatggagggggtgatacccatttcctcaaataccacgccaaaaacgctatcgatggaggagcccttggggcccaggcctacgcgtttgccatccaggtcatgcagagtggtgatgccggagcctgccagagtgaaggggcaaaggctgggcatatcgcaggtgaacatggccaggggcttctgatacttgacgccattggcccaggaagcggtaccggtgtaggcgccgtagaggatatcggtggcaacgatgccgatctcgacctcgccggtctcgatgagggagacattggcgacggtgccgccggtctgctcggcggtcagctcatagcggccagccagaacattgttcattacattggcccagccggaaccggtggtataaacggagccgccgacggcgccggtaccaacggagagcttgacgacctgggtggtgggggtgtcattgccgggattgctggcgttatcgccgcaaccggtaagcaccgccagcagcatgataactgccagtgccatggtgatgatgcgctttttcatggtgatagtcctttccttcttatctttgttatttctcgatccggggacgccccggagggatatttagtgttatatcgtataatgtatacgatttgtctacattatatcaatgtgcaaaaagtccgtcaatccccttttgtgacttttggtaaaattggacaagtgttggggccccgcttggtgaaaaagacggttattccaaatgtgcataactgcaacagaactcagccgatggtgataagtcccttgatgccctgctggtcccgcagctcggtaaagcactgctcccattccgccaggggatggcgatgggtgatgagcggagaaagatccccggggaaagcggccagcagcgccagcgcgcggtccatgtgggtgtagtcgctcatcatattgaactgaagggtgacggctttacgcagggcggcatcccacgggatggggacggagggctgcttggtggcgcccagcaccgccatgcgcccaccgggccgcagagccttaatgccggcagcaatgccggccggtgaaccgctggcttccaccgccagatccacaccgcggccatgggtggcccgcagtacggcttccaccggatcgccccggccgctgttgatgaccagatccgcgccaagggcggccgcagcgggcagccgaagggaggcatcagtctccgccccggaaaggaagatgcgggaagccccgccgcagcgggcagccaccagcgccagctgggccacctgccccgccccgatgatgagaacgctctcgccgggggtgagatcggcatggaccagcacatcgctgaccgagatggtgaagggctctgccaggcaggcaaattcatccggaagattatccgggacacggtggagataccgggccgggaccgctatatattccgccagggcgccatcccgctggatacccagggaacggcggctgcggcagaactgggggtagcccaggcggcagacctcacagtgaccgcaggcatacaggtgcggctggcagatgacacgctctccaacggagaagcccaggctctcccctaccgctttcactatggtacctacaaactcgtgccccatgatgatgggcgggcggcagtctcgcagcttgccctgccagatgtgcatatccaggccgcaggtagtgcaggcgtgaacccggataaggacattatcctgtttggtaagggtggggacggggcgttccgtcaggcaggcggtgtaagcgccctcggtctctttatatactgctttcattttcggctcctgctcagcggtcaaattccagctccatacgatagagcagcgcggcggcctcgcggtaggtggtcagcttgccgcggatgaggtctccggccatatcccgcaccagctggcgggtcttttcgcaggtgatgtactccgcgggggatttgccatcgatgcgggccagcataaggatgcccagcagcgggatgcactcggcttccagttccttggcatcggtgaaatcaatcatgccaaagtaggtatcggtcatgcaggtaagcatattgaggatggcggccgagtactgccgcatatgggcggatttgagaacgatgtgattggtaaagaaggccacatcaaaggcggggttgccgtaatgggcgatctcgtaatccaaaatacagatggaacggtcggcattgaccagaatgttcttggggctgtaatcggagtgaacaatgacccggcggtcatcccggatcttgggaatcatcgcttcgatctcagccttgtactcagggtgcttgccggccaggaactcaaaatagggggagatgcgcagctggtagaagatatcctggttggcaaaggccgcggcggcctcggggctattggcgctcttattgtggacgatggccagcgcctccatcgtcttttgggcaacctcaaaatcgaagatgccggagagcagatcttccttccacatccggcaggaggctggggcggcatcccgcaccatgatgcagttttcctcatcatagaacagaacggccggggcgctttgcgggatgcacttattgtagaaatcattggcgatggcttcgatcttcatgcgggcgggatcggcatgccagtcttccttgacggccagcttggcgcggccctgcttgaccagcatggtcttgccctcagtctcgatgagggcagcaatgcaggagacaccgccgcggcaataattgacctcgtaggggatatcgctgtgaatgacgcccttttccagcaggtactggataaggacctcccgattttcaagatccagcatgatatgctcctttctttactgggccagtgcctgagagaccgcgactgcgcaggccacgctggcaccgaccatggggttattgcccatacccatcagacccatcatctccacatgggcggggacggaggaggagccggcaaactgaacatcgcagtgggtgcggccgatggaatcggtaatgccaaaggagatggggccggcaccgatgttatcgggatgcagggtacggcctgtaccgccgccggaagcaaccgagaagtatttgacgccatgagcaacgcaccacttcttataagaaccggcaaccaggtgctggaaccggatggcattggcggaattgccggtaatggaaacatccacatgctccagcttcatcacctcaatggcctcttcgacgctggaattgcagtagaccttgacattggcgcgctcgccgtgggagaaagccttttcgcccaggaccttcagcgtctgggtggcatggtcaaaggtggtttccatataggtaaagccattaaagcgggccaatgtgtagccggaatccttgcccagaccattgaggatgacacgcaggggatttttacggaccttattggcgctgcggacaatgccgatgccgccctccgccgccgcgaaggattcgtgaccggccaaaaggcagaagcagcgggtatcctcatccagcagcatagcggccaggttgccgtggccggttcccacctcgcgggtctccgctacggagcccggaacggtaaaggcctgcagaccctcgccgatcttcctggcggcctcggtggcctcccgggtaccggcggccagcgccacagcggtgccaatggtataagcccaaacggcgttatcaaatgcgatgggctgaatgccctttacgatggattccacatcaatgccgtgctgcaggcaaagcgcccgtgcagcctccagatccgcgatgccgtactggtgcaggcaggcctcgatcttgggcattctgcggtccattccttcaaatgtaatcatagcgtgtgccctccctcatcattctttgcgcggatcaatatactcgctggcgccttcgtactggccgtaggtgccaatgcagctttcgtaggcttccttgtggtccttgccggcccggatcagatccatcatcttgcccagatgaacaaagcggtagcccactgtttccttctcctcattcagggccatatccagcacatagccctcggccatctgcagcatacgggggcctttttccagggtggagaaaaccgaaccgcactggctgcacagacccttgcccaggtcctccagcgaagcgccgatgggcagaccgttttccgaaaaagcggtctgggtgcggccgtataccatctgcttaaagatctcccgcatggccacattgatggcatcacaggccagatgggtattcagggcttccagcagagttttgccgggcagatgctccccagccaccgccgcaccatgggtagcgccggtacagccggtggtctccaccagggcctcctggataacaccgtttttaacattcagggtaagcttgcagcagccctgctgcggggcgcaccagccaatgccatgggaaagaccgctgatatcccggatctccttgacctgagtccagtttccctcctgcggcagctcggccgggccgtggcccttgggacaggccacttttttcatgcgttccacttcgtgtgtgatttccacgcttgcgacacctcgattcgtagtctttgtcttgcttttatctcaccgcccgtgggcggaaccataacggaataggcaccgccccaaaggaagcggcggcgatctatttgtatattgtatacattctacaccatacgagcgaaccttgtcaatgtgtggttggtagaacctgcccgcgcggaactgtgcaatatcctcaaaaataaagaatcaaactgccaaaaaggccctgccgacagcggaaagctatcggcagggcccagagttaggtgctgtaatccggcgggcggagtgccgccactaccccgcacagcatggtgcggaagtcgtagaccggcaggcgggtggccaagtggatatccagcgcccaggggggcatattggtgcattccagcagaatggccccaatgccggggtcccgtcggatcagctccagcgcggcttcgatgtgctcctggcggcacttctcggcatcaaaggaggtacggtcctcccgcaggaagctggaaaattcggtggtatgctccatacccattacggtgacagggcagtagctggccccggcggccgccaggtggcgcggggtcaggttggcgctatccgccgtaaggatgcccacccgcttgccgggcggcagggcggcagcgatcatgggcagctgcagcagcgccgaggtatagaccggcacccgcaccgccgcgctgagctgtcgctggaacaacgccaaaaagccgcagctggtggtgatggcgcagaccccctcctgctccagggcctgggccgccgcaatgaagggtaccagcaggcgctcctcctgcagggcttccaccacatcatggtaggtggtgccgggcaccatacggtaccgtaccgcaaagggaaaggtggcgggattgccgatatcccccggcaagcgggggaaggaagcccggttcatcaagatgccgaccgggagactgttctgcgaaagggctgggatcatggtttagtttcctccgtataaaaagcggcggtaatggagctgcgctaataaaggatcctccgcatcgacctggcccataaagtaggccgccgccagcggcgagacccccgccgtgtagctgtatgcgctgtgcatcaggaaatagccgaaattctggagcttttcctcatcgccgccaatgatgggcaggccatccacaggcttgcagcgcaggcctgcgtaactgcggatgatattgaccccgcttagggccgggaactcccgcagcgcctggcgcaccgcggtttgcagcgcttcggccgggacggtagtatcgtgggttccggcgggcaggtcctcgctatttaggccaaaaatgatattgccgtgggcggtctggtgggcgctgctggaaaaggtatgcaggatgggtggaagcttttcggtgaccaggcagcagccgcgattgggccgcaccggcgccgggatccccaacttttccccgatctcatagctccacaggccggcacagcagatgacatgctcggcagtgacgcggccgcggtcggtcatcagcgccgtgatgcggcggtcacttatttcaaggtccagcaccttggtaaaggtacatacctccgcacccagacgcttggcggtctggatgtaagaatccaccagcaggaaaggattgatgtgggcggagtagggctcataccgggcggcgatcataccgttgccccgcatggccggttccttttcccaggcatcctccggggcgaggatccggacaacatcatagcccgcggcggcgcccatttctgcggccttttgggcggcggctatatctttttcggtgtaaagcggcttaagggagccggtaacggtaaattcaaagggccggtccagttcatgctccagcaggaacagccgcaggaaggagcggatcgccagctcctccataaaaagcggctgccggtcaaaaggtccgatccaggcgacggtgccgctgctggtgccgctgcatatttcattctgttccagcagcaggacttccctgccgtggaggctgagctggtaggccaggctggcgcccagcaccccgccgccgatgataacaaactcgctgtgctgcttcatgtgtcctcctccccggccaaaagggccgaaagcggcatgggccgcaccggggggcgggtactggggtattcctccgcggggggcaggtggcccagctccgccatcagaatggcctccaccagtgggcggcaggtgcgcccctggcatagtcccttaccggcccgggtcatccgcttgatgccatccacggtggtggcaccatcccggatggcctgtatgatctcgcctttggtgatctcctcacaccggcagatgatgatatccttatccttcatggagcacctcctttccacttgtggggagaaatccccggacggtatccagcagggccagcggcacccgcagcgtcaccacagccgtttggtgaaaaaccggcgggcacagcacccggtggatggtcccctcccccactggccggccgcggcggtcggtaaggatgaccgactgccccacaatgggcaggggagtaaattcatatgggagagaaagcaaaccttcgctcccggaataggtatcatcaatgacaaagatggcctggcccgggcagcaggggatgcacagcccgcagccggtgcattttccccggttcaggcagggcaggctgctcaggccctccgccatggtgatggccccctgtgggcaggcggtgcagcaggggttgcaggggatctcctcggtgcattcgataacggcatgggggccgcgcttcagctgttctgccactggacatacctcctctccagttccgctttggcggcgccgcgggcttccccgtgggggccggttcgcagctgggccgcacgccggcggatctcctccatctgccgcccggcttctgcttcctccagcaggcccagcgccgcggcaatggccgtcccggccagtcggccttcttccatggccgtgctggcctcctctatcccggccacatctccggccacatagatatccggattggtggtacacagggtgccgctgtgcagcggcagatagccgcccatcggcggcaggtgggtcagccccacattggccatgcgcagaagttctatcgagggggtaagtcccaccgccaagcagacggtatcagcctcaatggttcgctcggtaccgggaatatgccgataccgctcatccacccggccaatggtcacttcctccaccgaatccctgccgcgggcctccagtacggtatgcccggtaaggataggcaccccggcccgcatcagtttgttggcatggacggcatagccgctgatctgggacttggcctccaccacagcagccaggtgtgccccagcctgcagcagctggaaacccaccaccaagcctacattgccgctgcccaccatgatgattctgcggccaggcagcacccggttcaggttcaccatggtctgggcggcgcccgcacccatcaccccggggaggtcccagccggggaaggccagggccttttcggtagcgccggtagcgatcaaaatcttttccgcccggatgatacggctgtacccggcatgggtaacacccagtcgccctccgggaaagatgccgtaaacagtgtgggaaaggcagatttccaccccggctgcttcgcattccgccagcagctggcggcccagctccaccccgcgtaccccggccccgtggtgcccggagccgaaaaacttgtgaatctgcttaaagagctgaccgccggggcggtcgttttcatcataagcggtgacccgcgcgccgcagcgggccagtaccgccgcagcggaaagcccggcaggcccggcccctactatggccacctgggggttctcacgcatggggatcaccccactttcccaggccatgctgtgtttctacccgcatgccctcctccacccgggtgatgcaagtacgcacccccggcacgccgttcaccgtcatggcgcagtcagtgcagcggccaatggcgcaaaagatgccccgtggatggtcctcgcgggcggtgtgacggaacacccgcaccccggcctccgtcagcaccgccgcgattggctcgccttcgatggcggaaagcggttttccgtcaaagtatatcgtcacctgcctgccctgcggctgctcccccaggatggggtgctgccggatgcgcagtccggtatccttcggttctgttttcattgggtttcctcctgtttttcggtatggcaaaaaggatgagccgaggtctctacctcctcatacggctcaccagcgtctttttgatgacacgccggaaacagaacggtccaatgacggaatttttcataaaatcgtagttgctcctaaattaaatactgtatactatcaacataaatataggggattttggtgatttcgtcaataaaatttggccaaattggcgtcttcttagcgatttatgtatattgtatacaatattgcggaatgaatattggtgcgattgttcatagacttttcctacaaaaaagtgttaatgtaaaaaaggagagtttgccgacagtcgacaaaaagacattgaccggccctcttcgacagtataaagaatcgcagataaaaacggaaaggacaaaagaccatgaagaaactcaaagttttcctcagcctgctgctgacctgcgcactggtttttgcctgtgttggctgcggcgaaagcaacaacgatcccaatgcccccaagctgcaaacctttagtgccggctgctccgcttccggcggcgccttcaatgtagtaggcaccggctggtgcaccgttatgaattccgtattcaatggcaagtattccattactgccgaaaccaccggcggcgctaccgccaacactgcccttatcgagaccggcgagtgccagttcggcgtgggcggcgcttcctccactctggaagcctatgaaggcgtagccgaatggaccggcggccagaagatggtcaagtcccgcgttatcgcccccatgtatgagatgtccctcaccgcgttcgctctctccagcagcggcatcgagacctggagcgacctagaaggcaagaccgtcggtttgggctccaagggctccggcatcgatcccgttctgcgcaagctgctggatgccatgggcatcaatgtaaccgtacacaatgacgcctggggcaccaccgtagaggccttgaaggacggcaccattgatgccgttatcacccaggctgccggtgcatggccctccctggcggaaaccgaagccactcacgaggtcaacatcctgcccatgacagaagagcaggtcaagatcgtatgcgagatgaccccctactatgttcagagctatatccccgccggcacctataaggccaatgccgataaggatatcctctcctgttccatgtgggccttcttcattgcaagcgaggatgtggatgatgaggtcgtttacgagctgaccaaggccacctgggagcactatgacgacatggtcaccgtttatgccggtcttgccggcggcctcaagctggagaacatccccaatatgcccttcctgttccacgatggcgccatcaagtactatcaggagcagggcatccagatggcagaggtagcccccggcttctccccctcctgatgcctgccccacgcatttgaaccgactgaaccaataaacccgcaggcggccggccgcagcgccggccgcctgtccccttttccacaaagcctgacccctgctccaataaaacccgaccgattttttgtgatgggagttaacctatgagtgacaaagtaactacggggggcgtttctccccgcgctgataagatcttcaagatcatcattaccgtacttgcgctggtcatgtgctttatccagatcggcaagtatatcagcatcggcggcaagccgatcgtcaatatgtattatctgcgcatttatgcgctgcactatatgttcggaatgctgttcgccttcttgatgtacgactggaagggaaaagcatccggctggaccgggctcaagaagaaatggccggatctcattctctccgccgctgccattgctgtggcggtctatgtcatgatcgatccctccagtttccagacccgtctttccatcaccgccagtcagaatgacatcatctttggcgccctggccaccgtggtcaccattgccgcagcgtacaagctctccggcaaagcgctgcccattatggcggtcatctttatcggctatgccttcctgggcaagtacatccccggcggctttggccacaggggatattccctgcagcgtgtcatcgtcaatatcttcggcgatcagggcatctggggctccgccctggctacctcctgcaatatcatcttcctgttcatcctgttcggcgcctttttggaagtcagcggcgccaatgagatcttccgggatctttccatctcgctggcgggcgccaagcgcggcggcccggccaagatcgccgttatctccagtgccatcatgggcaccatttccggcagcgccatcgccaatgtagtcaccaccggcgccttcaccatcccgctgatgaaaaagcaaaagtaccgcgatgaatttgccggcgcggtggaagccgtttcctccaccggcggccagcttatgccccctgttatgggcgccgcggccttcctgatggccgaagccaccgccatcccctacggcaccatctgcctggcggcgctggtcccggccctaatgtactatatctgcatcttcagcaccgtggatgtggaatcgctcaaggccaacctgaccggcatggatctcaaggatatccccaagctgctgccggtgctgaaaaagagtgccaaactgctgctgcccattgccgtgctcatcctttcgctgtgcgtgttcggcttttccacctcccgctcggcgctgtattccatggccgtactcatcatctgctgctgcttcgataaggacgaccgcttctccctgaaaaagctggtgaatgccctgcgctccggcgccatcggctccaccaccgttatcactgccaccgccatctgcggcatcatcatcagcatgctcaccatgaccggccttggcgtcaagttctcctccctgctcatctccctcggctccagcagcctgctcatctccctgctgctggccatgctggtgtgcatcgtgctgggcatgggcctgcccaccgccgccgcttacatcattgcttcctccaccattgccaccgccctcatcaagctgggcgttccggttctgggggcgcacatgttcctgttctacttctcctccatcgcctgcatcaccccgccggtggcgctggcctcctatgccgcggccggcatctgcaaagccccgcccatgaaggtcagtatggaagcggtcaagatcggcatcgtggccttcctggtgccctatgcctttatctacaatccatccatcctcacctacgatttcagcagtccctacatgattctggataccatcgtcaccttcgtctgctgcgtcgtggatgctctccccatctcctatgtggtacaggggtaccattaccggcccatccgcctgtatgagcgtgccctgttcctagtcattgccatcggtctcatctggcccggcgtggtggtcccgctcatctcgttggcagtgttcctgctgttctggctgcccgcccgcgccaagtactacaaggaaaatcccaagctgcccactccggcagccaactgacctatcatctctctatctctcctaatatagcaaaaacccggtggccggcagcaatgccggccatcgggctttccttatagagagagggtctcattcccggtcgtggatatcgctgacgatgcggtaatacacattgccggtaatgcggtagataagggcatacagcaccccaaacatcacaaagctgatgacagtggtgagggcgaaaagccccacattgttcaggttaaagagcagcagcaggcggcggatcatggggaaggcaaaaaccaggtgcagccccgccatcaccagcggcagataaaataccgtaagcagctggctgttgatgctccgccggatctcggtcttggtcatccccaccttctgcataatgccgaagcgggactgatcctcgtacccctccgagatctgcttgtagtagatgatgagcacagcggcaaagaggaactccaaactgaggataatacccaggcagaacagcccgccgtaggtgccaaagaaatccgcctcattcatggtgcggcactcaatggtacgggtgcggatgccatgggcttcggtatagtcatcatgcatcccgatgttggcatcgtacaggctgttgctgatctccgcctgcttttcggcgggcagccccgtatcaaagccgtagttccaccggcacgcgggatactgccccagcgccgccaggccatgctcggcttcggtcaggtccggaacgaccagcaccagtgtgggggcaatatccatggcgatgctgccatcctccagcggagtgtccaaatagcctgccacatcgtaacgcagcccgtagccgaaatccacttccttgccggaaaagcggggcccgcgggcggtatagaccgccgcctcgccagggtccagggtaacattctccccggtgagggcattgtaatccaaggcggagacaaaaacgaagttatatatctcgccatcaggccgatagatcgtctgcgattcctcatctgtgcgttcaaaatcggcacgggtaccgtttaggtaaccaaagatacgcaggctgcgccaatcctgaacattttgcggggtgcagtttttctgctccagcacggcaaggatctcctcccgcagctccttcaccgagctgtcagagagatattccacatcctccacgccgtagctgatcgaaagctcccgcgggtagcgggccatcaaggaatcctccgcgccaaagtacaggctggtggtggaagagagcatcaccagtaccatggtggccaggatgcacaccgaagcgagtcccgcgccgttgcgcttcatgcggtaagccatggaggagactgaaacaaaatgccggggattatagtagtaggctgtgttcttctgcagctggcggcacagcagcacgctgccgcttatcataatgagataagtggccagaatgaccagtaccaccgccacaaagaacagtgccagcgccatcagcggctccttgatggtgactgccatgtagtaggccactcccagcaggataaagcccagcaagcccaaaaaccagttggcgcgcgggggcttttcgccggcggcttcgctttgcagcagctggatagccgaggtgcgtcccaccgcgaccgccgcccgcagcaaaagcagcaggtgaatgaccccaaaaatgagcagcgtggccataatagccggagcgctgatggaaaagacatagctgatgctgccgtgcatgaggttcatcaggcccagctccgccagcttggaaaaagcaatgccgcacagcagccctgccgccgtggtgccgatggccacaaaaatcgtttcccatatctcgatgcgcaccaggtggtggcgccccatgcccaggatgttataaaggccgaattcctttttgcggcggcgcaatagaaaagaatgggtataaaagaggaaaatgcaggcgaagatggccaccacccagccacccagcgccagaatggtggaagcggtcgtcccgccgcgcatgccgtccagcatttcattgtgctgcaaaaagatgatgatatagtacatcatcgccataccggtacaggtaagcagataggggatgtacaggcgcttgtttttccggataccggccagcgccagccggggatacagcccgaatttcattgctccatccctcccgtcgccagcagggtcagggtaccgcttatctcctggtagaactgttcctcgcagcggccgccgcggtacagctggtggaatacctcaccgtccttgatgaacagcacccgcccggcggtactggccgcccgcaccgagtgggtgaccatcacgatggtctgcccgccgcggttcagctccccgaagagccgcagcagctcatcgctggagcgggaatccagggcgccggtcggctcatccgctaaaagcaggctgggccgggtgatgatggcgcgggccaccgccgcccgctgcttctgcccgccggagacctcatagggatactttttcagcagctcggcgatccccagccgccgggcaacgggcatcagcctttcgttgatctcccggtagcccttgcccgccagcaccagcggcagcgctatgttgtcctccagtgagaaggtatccagcaggttaaactcctggaacacaaatcccagattatcccgccggaaggcggcggcatcggcatcgcccaccttggaaagctcccgaccgtccagcaccacgctgccggcggtgggcttatccagcgccgccaggatattcagcagcgtggtcttgccgctgccactttctcccatcacggccacatattcgccctgctccacactaaaactgacattgcgcagcgcctccacctggttcccgccaaagcgggtggtgtagaccttgcgcagaccctttacttccaagatactcataaactaagcagcctccttgcattggtgcccggtcccatcgatgaatgggaccgggccttactgctgctattgtaacaggtgcggggcctgccttgccatcgatatggcttacatttcccgccccaaatcttacatttttgtaaggtttccggcaccccacgctttcctcggccagctccctgcagagggcaggcttcggcccgcagggcaacccgcccctccggggcgggtttgggcggcttcgccgccctacggccgcctgcggcggccggccctgcgggccgctctcccctccccggggcttgtccctctcattccacccgcagggggtactgcgtaaaatccagcagcagggtggtccccacgccggaggtgcttttcaccgtcagccctacccccaggttgcggcagatgcggctgcacaggtacagccccagcccgctggcccgcttgtccacccggccgttctgcccggtataccccttttcaaaaattcgcggcaggtcctccggcgcaatgccgatgccggtatcccggatcgccagaacccgctccccggccagttccaccgtgatactcccctcccgggtgtatttcagcgcattggaaagcagctgctccagcacaaagcacagccacttttcatcggtaagcacagtaagccccgtaggggtatagtccagccgcagccgccggtctataaattccgccgagaaacggcgcagcgcctgccgcagcacctcatccagcgcgacctcccggaacacatagtccccgggagcgtcctccagccgcaggaaggccatcaccatctccacatactgctcggtgcgggaaagatcactcaatagccgccggaaaagggcggtatcctccccctgcagcgccaaccgcatcgaagcgatcggggtcttgatctggtgcgcccaggtggtgtagtactcgatggcatcccggtagcggttgtcggccgcgctttgcaattcagtgcacagctgccgcaggtgcagcagctgcgcccggtaatcctcctctgccaggctttccggcgggggcagctcccgcagcagctccgcggtcagatccccacagccggtcagtgcccggtgccgctttagggtccggcggtaatcccacacggcaaagcccagtcccaccagcagacacagtcccaccgggtacagcaccgcccgcagcggcagccggtacagcgcaaagcttgccgcaaatatcacgcagcagaccgctgccgccagcagcatccgccgccggtaccgcaggtaatcccaaaatcgcatcaaatgacccccctcatccccccgcacggagcagcagtttctgctgccattgtacgggagcggcaggggatttgtcaagggagggcttggtgcaggaccaggctggggccgcaggccgccccggcttcgccggggccagcgggctccgcccgctgaaaccgccctccgggcggtttggcctgcggcccctccccccgcgccaaccttccctatgccaacaacccctgccgtccctccctcaccgagctaccggtaaaggaaagtagtatcggccgccagggaatggtgctgccgttcctccatccccaccaccgtgcagggggtctctgcgccggtgcgcagtaccttcagcggcacccggtacttccgggccagaaaaacgctgcgggggtgcagcaccttggcgccgccctctgccatttccagcatctcatcataggggatgcgctcataccggcggctttgggggaattcccgcgggtcacggtcgtacacaccatccacatcggtacagatgcggcacccgcaggcatcaaaggccgcggccagcgccaccgcggtggtatcactgccgccccgccccagtgtggtgatatcgccctcacggtccaccccctggaaccccgccacaatcacgatcttcccggcctccagctcccgcaggatgcggcgtcggtgcagcgccgtgatctccgcggcagcatggttgccgtcggtatggatgccggcctgccagccggtgagggaaacagcgggaagccccatttcctgcagggtcatggccatcagcgcagcggatgcctgctccccggtggccaatagctggtcagcctcccggcaggcagggtgtgcggtcagctccgccgtactttgcagcagacggtcggtggtctttccctgcgcagaaaccaccgcgataatatggaagccggccgccgcggccgccgccagctgcccggcggcacagcgcagtccagcagcatcagcgaccgaagagccgccgaatttatagacaaggagatacatagggtcgcccctttccgggtcatagtgaatccaaaggctgagcctctgctttccaccctatgcgtgggggcctttccctgtccctgccccaccaccgccgaatccctgctccttctcgcatcagcactcgccgcaccttccgggcgccccgccccgcggtgttccgccgcggaaaccgaggggccgctccgcggccccccggttcggccgcctccggcggccggcggagcgcccggggccagctctctgcaccaccccatccaaaaaggaaggggcctacccctccccccgcaggtagccgccctgccgcagatgaagcagcagtgtcgtccccagcggggccagcagcagcccccagaacccaaaaatcttcagtccggcatacatcgccgtcagggtcgccagcgggtgcagcccgatccgcccgcccacgatccgcggctccagccacatccgcaccaccgtcaccaccgcgtaaagcagcagcagtcccgcccccagcgccgtctgccggctgatgagcagatggtacgccccccacgggatcaaaaacagcccgctgccgataaacggcagaatatccaaaagcgcaatggcaaaggcaatggccgcaaaatacggcacccgcagcagccacagtcccagtgtgatctccccaaaggtgatgaacatgatgcacaggtaggcaaacagcaccttctgcaccgcccccagcaggtaccgcttggattccaccataggccgcagccaccgccccggcagcgaccgcacaataaatcccgtgatcccggcataatcctgcaaaaagaagatggtggaaagcaccgtaaaggtcatggtgaataaaatcgacggcagcgaggaagcaatgccccccagccagcccaccacccgccgcgaaagggtggtcaccgcgttttgcagcacctcctccagggaggtcccccatccgccgccagcccgcccctgctggagcgtctgccacttttcccgcagctcctccgccagcggcagcagcgtctcccggtaaaaggccgggatctgcggcagcagggcgcttccctgccgtaccaccactcccccgatcccccacagtatcagtcccagcagggtcagcgccgccaccgctaccagtacagcacagggccggtaccgccagcccaaccgccggcacagcccggccgcggccgggtgcagcgccgccgccattacggcgcccagcaccagcggcaaaaaacagggcagcgcgtaccgcagccccaggtaacacagccccagcaccacgccccaaaaggccactccctgcaaaaacgcccgttttcccgtcggcacaccgctcccccctgtcgttcctgttctctatggtacagtgtacccgccgcacgggcgggatagtccttccccctcggaaaatttgcgcgagcacaggggcgggggcggtccctgcccctcacccagtcccctcgtagggaaagccgcggcccgcagggcgccccggctgcgccggggctaaggggcgaggcgacgcctcgcccccaaaaccgtcctccggacggtttgccctgcgggccccgccagccttccctctccgccagccctcccagccaaaaaaacgcccccgcgcgggcagcacccacgcagggacaaaaaatcttatttcactcaactcaccgggtggagagaatatccacctgggtcacaccgggcagggaaagcaggttctgccgcagcgtttcaatagccatcggcaggggcagccgcgccgaaaccgaaaccgccgccaccccgtccaccggaatgttctggttcacggtcagaatgttcccctgctgctccgaaaggctgttcagcagcccggaaagtacgccgggccggtcctccaaccgggcggaaagggtaatgaccttgtcgtccagcgcctcattgtgcacaaaaacgcagtccttgtacttgtacagcgcgctgcggctgatcccggccgccttggcggcctccgaaaggctgcgcacctggcccaccgccagcatccgtttggcctccaccacccgcagaaaaacctccggcagtacggaactatccaccagtaaaagccgggaaccctcccggtgggacggctgctgcagattgaccatgcgttttcctccttgcacacagttgtatttcttctacggacattctaccacgccgccgctgggattgcaagccaaaatccgggtttctgcagggcgccagccgcccgcagggcaaaccgtcctccggacggtttttggggggctccgccccccagccccggctgcgccggggcgccctgcgggcggccggcgccttttcgggcctctgccccgcctttacagctccttagccgtaacctgccagtacttgcggtccagattccgaaattgaatcgcctccgccacatggtccgggccgatctgctcgctccccgccaggtcggcaatggtgcgggccacccgcagcagccggtcatagctccgcccggaaagccccatccgttcgtaggccgccgccagcagccggtcggcctccggggtcagcacgcagtattttttcagcagcgcgggggtcagccgggcattgcaggtcaccccggtgccggcataccgccgccgttggatctgccgggccgcctccacccgctttctcacctccgccgaggactccgccggccgggcgtccgccatccggtcatactccaccgggggcacctccacctgcagatccatccggtccagcagcgggccgcttatcttgttcaggtacaggctcaccttggtctgggagcaggtgcacgcccgggtaggatgcccaaaatagccgcagggacaggggttcatggcccccaccagcataaagctgctggggtaggtcgccctgccgcctgcccggctaatggtaatgaccccatcctccagcggctgccgcagcgattccattgccgggcgggtaaattgcggcagctcatccataaacagcacgccg

SEQ ID NO: 2601 - DNA, 12044 bp, Unknown
  16S sequences of unknown bacteria
gacgaaatttcgtcgggcggcaaactgctgtattcaattatttctatttcaacagtgcgtcgagttcgtcgataagtgagccgaagagtttgagcgcttcgtttatgggttcgggagaactcatatctacgcctgctatcttcaacagagagatggggtcggtgctgctgccgcttgaaaggaaacgcttgtaatccgcaactgcaggcgcacccttttcaagaatcctgttggcaatggcaacggctgcggaaaagccggttgcatactggaacacatagtaattatagaagaaatgcggaatgcgcgaccattcaagcgctatttcttcatcggaaaccatatcgggaccgaaatagagtttgttcaactcataatatttcttgcaaagtgcatcagctgtcagcgtttcgccgttctcggacattttgcccatttcaagttcaaattcggcaaacatggtctgtctgtaaatcgtgcccttgaattggtcgaggaagtgatttataagatacgctttcgcatttttgtccgtcgtgtttttaagcagatatttcatcaaaagcacttcgttgcaggtcgaagcgacttcggcaacgaaaataacgtagtccgcggtattcacgggctgattcttcatggtcaggtaactgtgaagagcgtgtcccatttcatgggcaagcgtgaattggctgtccagattgttcttatggttgagaagaacatacggatgaggtctgccgaagccggaagaatatgcgccgctgcgttttccgacattttcataaacgtctatccaacgatttgcgaagccctctttaagcatatccgtataatcttcaccgagaacggaaagcgcttcaaggacggtcttttttgcctgttcaaagtctatttcaacagcagcatcaggaacgatgggagtgtaaacatcgtacatatgcagttcgtccacgccgagaagttttttgcggagtgcaacgtacttatacatcttgtcgagatttgcatgaaccgcttcgataagatttgtataaacgcttacggggacttccgtcacgtcaagagaagcttcgagcgtcgaggaatacttgcgtgcaccggcaaagaaacgaagttgcttgaactgtgcgtcaagagtggacgcaacggtgttcttaaactcgcccatacgtttataaaacgttttgaacgtgttctcacgcagttttacgtccgtgctttcgagaagaggaacaagcgtgccgtccgtcagatgatgaacatttccctgtccgtcaacaacatcgtcaaacgtcagatcggcgtcgctgaacgtgcttcttattctgtcgggagcgtccgccatttcgcctgcggcggcaagaagtttttcaccctcgtcggaaagaatgtgcgccgctcttcttcttatctgataaaggcttcttctgtatgtttcaagttcgggttcatctttataaaagctgtcgagaactttttcgtctattgccattatttcaggcgttgcgaatgaaagcgcacccgaaatatttacccaagttcccgttgctttgccgcgcatatcctgatagaagttattgcttgtatcttcgtcgcctttgcaggaagcatagccgagaagcgaactgagccgaagtgttacttcatcttcaaatttcagaaaagccaaaaggtcttttgcgctcttgccgagagtgccgcgatattccgcgattctttcgggaagtgctttcagagcctcatattccgcaaaccatgcgtcatcgttcgcaaaaacgggtgtcaagtcccaagtaaactcctggggaacatccgcacgtttcaaaatttccataacatattcctccgtatgattatatatttataatttttatcattatttattatcttcttcgggcttttcctctccgtcaagatcaccttttaatgttcttccgaaagatatcgaacctttgccgtaacggtttcgaagttcgtccatggttcttgctatccgtcgtttttttctctccgcaggttcttcttcgctttcaaaaagactgctctgttcgggttcgtctgcggggacaaggtttgtggcggtcacggttatcattcttatcgggtttgtaagcacccagttcctttttatcagttccatcgcaacgggaatcacgtcggacgccaaatctgaagcctttggcatcggttgctgacgtacaaaagaacgaaaatccggtgctcgcaaagtcacctgaacggtacggcacttcaagccgtgtttgcgcattctggaacaaaccgaatccgtcagttttgtaacaccgaaaagaatatcgtcaattccgacaaggtctcggctgaaagtcattccgttaccgacagacttgacctcttccctttcctctccgtttttgacgggagagttatcaagtccgttcgcataatcataaagttgcccgccgcccttgccgagacgacgaacaagatattctctgtccgcagacgcaaggtctcctatcgttgatattcccatatcatgaagaacctgaacggacgaacgcccgacatacaaaaggtcggacacgggaagcggaaaaactatctttttatagttttcccgggaaataacagtcgttgcgtcgggctttttatagtcgcttccgagttttgcgaaaactttattgaaagaaaccccgacggaaacggttatgcctatctcttcgcggacaacgcgcctgatctcatccgcaacggcttcaccgccgccccataggtgcgcggaatgcgtcatatcgagccacgattcgtctatgccgaaaggctcaaccgtgtccgtatatctgtaatagatttcatttacgcgcttcgaaaattcggaatatacgccgtgtctgggcggaacaatgcgcagatcgggacatttttttcgtgcctgccaaagcgtttcagccgttttgacgccgtattttttcgctatctcgttttttgcaagaattataccgtgccgtttgctttcgtcccctccgacagccatcggaacatctttcaggctcggatcaaacgtcatttcgacggacgcaaaaaagcagttgcagtcgcaatgaagaattatcctatcgttttcggtcttcatttcttttcaaccttcttacgaagaaatcccacgagagaaaatacaagaaataccgcaaggtcggcaataactatgcttgcgcccgtcggcagatcgaaacaggcaagtataaagcccgcaaggaaacaaagaacggagattatcgccgaacttatcacaacgccgcgataactcttgaacacgcgcattgatgatattgcgggaaaaactatcagccccgaaatcaggagcgtgcccataaggcgcattccgacaactatcgtaatcgctgaaagcaaagcgataaggatattatacgcccccgcgcgcacaccgtttgctcgggcggaactctcgtcaaacgtaaccgcaaatattctgttgtaaaaaatcagataaagcgcaagaacaacagcgctcagcgcgatgctgacatacatatcgtttttgccgaccgcgactattgagccgaacaaataactgtcaaccgctctgtttgtgcctgaaatatgtgcggcaatgagacctactgcaacggcgcttgaagaaataagggcaatcacgctgtcgcctttcagtttgctgttctcactcaaacgcagaagcagaaacgcggtcagtatcataacgggaacggcaacccagagcggggcgaggttcagaacagcggcaacgctcattgcaccgaaaccgacatgagaaagcccgtcgcctatcatggagtagcgtttgagaacaaggctgacacccaaaagcgcggaacaaagagacacaagacacccgacaactattgcgggaacaaatacggggccggcaaagaccgaaaaaatataatcaagcatcggttttccctcccgtgaacagttttccgaccgggcttttcagatagtccgaaacgctgccgtagaattcaacgccgtgttttaagtgcagtattttcgacgcctgtttaacggcatcgtctatttcgtgtgagaccataacaacggtcacaccctcatcgtttatcgtgcgaagtatggaatacatatccgcggtcacaagcgggtcaagtcccgttacgggttcatcaaggacaagaatcttgcgtgcgcagcaaagcgcttttgcaagaagcacacgctggcgttgcccgcccgaaagttcacgaaaagactttttccgcaaatcggaaataccgagcaggctcatatttttatctgcaatcatcttttcttccgatgaaagaaacgggcgtttgcccaaaagtccgagacagccgctgcggactatctcttcgaccgatgcgggaaaatcgttccgaactacggtctgttgcggcagataacctatgtcgccgtttttgatgtcgcagtcataaagaatatgaccgtgcttcggctgatgtatttccacaagcgctttcagcagcgtgctttttcccgtaccgttttcgccgacgatgcaaaggtaatcgccgaattcgatatcaaacgaaacgtgttccgcaacggtcagattatcataagacaaagtaacgtcgcaaacggagatagcgctcatcagtcaagcccctctttcaaaacttttgcgttttctttcatcagatcgatataagtaacgccgcggtcaaattcatctttgcttacgttgtggcaggaatgaaactgccgtatcttgcagcctgtctcttccgcaattttttgcgctatgcggggttcggaaagttcctcgtaataaacgacgggaatatgttctgtctttactttttcaattatcgcattcataacgctgacggacggttcgtcttccgattcgcatgaagcgatggcggcggtatacgaaagcccgtattcgtcggcaaaatatttaagtgcaaagcggctgccgaaaaccacttcttttcttattccggttgcaacaacttcacgaaattccgcgtcaagcgcatcgagttgctttatatatttttcagcatttgccttataaaaagccgcattctcaccgtcaacggcgcatatggcatcaagaatattttcaaccatttttattgcgttgacggggcttgtccagacgtgcgggtcaagttcgtgttcatgcccgtgttcatgatcgtcatccgatgctttgaactcaatgccctgcgtgcagtcaagaacgtaaactttttgcctgtcaacatttgtcaggagcgttgctgcccacatttccatattgtcgcccgtatatacaaaaagatcgcattgcgatatttcaagggcagcggacggcgtagggtcataatcatgactgtccgtgccgggagacagcagcattttcacgtttgccttatccccggctattgcgcgggcaaaatcgtattgcggaaaaagcgttgcaattatattcggttttccgttgtcttcccgtctcgttttcccacaggaaacaagcgagaatatcaaaacaaatactgcaatcagcgataaaacttttttcatattcatcctcaaagttataattatatatattataacacattaagtgaaaaatgtaaagatacatttatgcaaagaattattttttaccgaaactcttccattttccgatattatgtgatataatacagtcacatgtgcgaaagaggttaaaatatggaactttcaaaaatcaaagcaatagattttcattcgcatttcaatcacggacaccggtcggacagcgccgagagcgatgtttacaggtgcgacctcgacaatatcataaaaatgaacgatgccgcaaacgtcgaatatacgatatgttcaacttttgcctcggttcttgaccccaaagcgatcatagaagagaatgaatacttatacgacctttgtcccaaaattccgtcgctgtatcaatgggtggttatcgacccgcgaacggaagacacttttttgcaggcaaaaggaatgctgaatacaagaaaatgtctcggcataaaacttcacccgcccctgcatgggtattcgacggaagaatacggcgaaaaacttttttcattcgcggacgatatgaacgccgtggtgcagatacaccccgaatttgcaccgtatctttacctgaaatacgcagataagtacaaaaatatgatactcgacgttgcacacatggcggataacgactttttcagagcggcaaaacaagcaaagcacggaaacgtttatcttgacacttcgggcagcgcaagttttcagaacttcgttatagaagcggcggttgcacagggattgtccgaacgaatactgtacggttcggacacatacgccgtgggcgcacagcgcggcaggatagaatacgcccaaataccggaaaaagacaaaaaactgatacttcgtcaaaacgcgattcgcatttttcccgaattgaacgcagacaaatagaattgtgtgaagcacggtttttccatactgaacaaagcaagagagacttcctcgaataacggagaaagtctctcttgctcgtatttttttcctatttctttccgaaactgaattttgattcggttccctgaacaagtcttacaatattctgtttatgccgcactataacaaagagtacgcagaccgcatacataatgcttacggcaagtccgccgccgaatgcggcaacggcaaccgcgcctgcaacaagtgcggacattgtggacaatgacatatactttgtcagcggcagcattataacgagaactgccgtggctatcgcgcccgcccgccagtcaatgaaccaaactgtcgaaaggcagacaagaaagccctttccgcctttgaacccgtaatatatggggaacgcatgaccgagcatggcaaacagtcccgcataagcgacgccaagagcccacgagccgacatacgcacggaaaagcaaccccgcaacaacggaaatcacggcgcccttgagaatgtcaagcacaaaaacaaaccacgcatatttgttgccgaaaacacgcttaaagtttgtaaaaccggggtttccgcttccgcaggtacggatatcttttttatatatcgctttcgacataattatcgcgggattgagtcccgaaacaaaatacgcgaaaaccgcggatattatgtatgcaagagccttcattgttttttcctcttattcgacaatcattatgtaatgatatatatcctgctcgccgtcgataacatatatctcgcacattgaatgctttgcggcaagatgttctctaatctcttccgtttccgcggcgtcggaatccttgccgcagatgagaatgcaaatttccctgtccgtaaaatctatgctgtctataagcctttttgcggtgtcgaccctgtcattgtccgccgacaaaacgcggtcgcccacaaaacctatatattcgcccttgtagaggtcgagtccgttgctttccgtatcgcgcgaacaggtcgaaactgccgcggtggtaacgttttgcattgcgtcgtaaagttcggattcaacttcttcgggagtatcaagttccgtgttgagcatcgtcaatgcggcgtgtccctcaccgagggtcttgctttcaatgacacggacatcagccttttcatacattttcgctgcttgctttgccgcaagaattacgttaccgttattcggcagaacaaatatcgtatcggcatttaccctgtcaaacgaatcgagaaaatcttttgcagacgggttcatgctttgtccgccgtttacgacttcatccgcaccgaggttaagcatcatctgctttatgccgttcccgcaagcaacggtcacaacaccgtattttttatgttctttcggcttatccacagttccgaaagattcggtattgttgtgctgcaatgacatattctcgattttgaccgtcaaaaactcaccgaaattgcggcaaaatccgagaaccttatcgggcgtcatcgtgtgaacatggatttttactatgcttcccgttttgaaagcaacgatggaattacctatgttttgcagataatccgttataacggaaacgtcaaaattttcgacatctgtttttgccgtttgcagacggagcaaaagttcggtgcagtaaccgaattcaagcacgctgttttcgtcaaattttccgagatcgagtttttcggttccgattttgggggcgtcgacggcagcagcatcaaaatcgtcgtcgagagaacgtctcataccctcaactatacggataagacctgcaccgccggagtccacgacccccgcctgtttcagaacggcaagcagttcgggagtgcgcattaacgacgcattcgcctcagccaaaaatccgtcaagatattcttcaacggtttgtgcaccgagttgccccgccgcttccgcagattcacgcgcaactgtcaggatagtcccttccgtcggctccataacagcggcgtaagcgtgttttacgccctcattcatagcagctgcaagtttttcgacatcggcggtctcaactccgtcaagccccgccgctataccgtcaaagaactgcgaaagtataacgcccgaatttcctctcgcggaaaggagcataccgtttgcaacatttctcgccgtttctccgagagtttgagcctctgcaacttccgcgccgccgagaacggtcaggagcatattgtcgcccgtgtctccgtcaggtatcggaaacacattcagatcatttatttcgtcagcgtgcgctttaagatttgcagcacccgcctccaccatttttttgtaaagaagagcgtctgccgtcttcgtgttcatttcagtctcccaaattgtatgtaacttcttttccgagtccgaatatcgcaaccgcgtcgggacctatcgaagcgccgattatcggaccgatgtaaccgacataaatctctttgcagggaatttccgaaagtatgagaccttttaactgatctacttcttccgccgtgcaatcggcgtgcaaaacataaaccgtctgattttcggggtcgattatagactctttaagcaaggaaacgatttctttgaacgagttctgtctgcccttgactttcttaaatgcagactgtgcgcctacggcatcggcaatgattatcggttttacacccataagatttccgaaaaatgcggaggttgccttaactctgcctgcgcggcgaagcgcgtcaagagagtgaacggtacaatactcgttgactatttttctcatcgccgtaatcttttcgttgatctcttccgcggacatatctttttcggcaaggcgtgcggcttcgatcgcaagcataccctcacccatggaggcattgagggagtctatgcagaaaatctttctttcgggatgttctttcatcagtttttcggcaagaacgtgcgccgtgttgacggagcccgactgttttgaagaacaagcgatatagacgatatcctgtcctgcctctatgtattttgtaaacactctgttaaattcttccacgggaacctgtgttgtggttatacgtctgcccgaacgcattatctcataaaactcatgaacttcaccgggagtccacgcaagagacgcgggagacgttttgccgtcaagaacagtgttcatctgcgcataatcaatatcgtatttttccataaggtcgggagtaagatccgagcaggaatcggtaatgatttttacctgtttcattttatacctccgtattttcgacgtaattcgacattatttattacatataatatcattctaatctaaactgaaacgaaacaaacggggctgtaaagaaatttacgcttctttacagccccgaattttagcgttattattttattttcggcaacataaccgtgaatgtagtcatatcgttttttgactcaacaaagacgattcccgagtgcaggtcaactatgcgcttgacaacggcaagtccgacaccgttaccctgcgttgagtgcgaggtgtcgcattgataaaactttgcgaagattcgttctccgtcttttgaggaaattgaactgccggtatttgcgacatcgacggaaatgcttttttcgtcttgccgaatgcgaataaaaaccgttcctccgcaaggcgtgaattttatcgcattgtcaagcagattgagccatacctgacgcagaagttcctcgcttccgactacacttatctcgtcaaaatcaagttgcaggtcaatttgttttgccgtccacttgtcttcaagaatgagaacacaggtccttatctgctccgaaagattaaaacttgaaacgtcagtcaaaatcgtttgattttcaacctttgtcaggttcagaacgttggttgccattgcggacaggcgacgggattcttcttctataatgtcaagatattcccgacgctgctcttccgtaatattctctgttttcagaagtttcgcaaaacccgatatcgacactatcggagttttgaattcgtgcgaaaagttattgacgaagtctgagcggagcacctcggtattttcaagttcctccgccattttgtttatactgtccgtcatttcttttacgctcggattttttgaaaggattccctcaaactcaattcgggatttatactctcccctcgcaagcctgttcatcatatttattatagtgtttatcggcttcatgaacaagcgaccgaatataaacgaaaacgctatgccgaaaacactcagaacaagcgccatcagcaccatgaaccggttgaacgtcagcagtccgccatcaccgatactcaaaacgccggtattgacaagtaccaaggcggggataccgacgataagaagcgccgcaagcagaatagcaaaagcagagcccgcaaacatcgctgtcagagaaaaacgcgacgggtggtcttttaatttaatattccatgatacgccctttttcttttcactcatacgtttttcaccgccttgtagccaagcccgcgaacggaaacgatttcaaattcgttccaaccctcaaaacgcttgcgcaatcgtcctatatgcacagtcacggtctcccagccgctgtccgattccatgccccagatctcgtccataagttgaatacgcgtaaaaatcttaccggggtatgacagtaatttataaagcaacaaaaactctttctgcggcaattcctgaacagttccgtgacccgtaacggtcagcgcatcgtaatcaagcactacattgccgacaactatgcggtgttcgctgactatttttgctctccgcaaaagagcctttatacggagcagcatttccccttcgtcgataggctttgttatataatcatcagttccgaccaaaaaacctttgtgcttgtccgtcggaagttgctttgctgacaccatcagtatcggaatatcattttccgattcacggagagttttggtaaattcatatccgtccatttcgggcatcataacatcaagcacaacaaggtctatatgttccccgtcaagtttttcaagcgcatcttttccgtttttcgaagtcgaaacggtaaaattctcgcgacgaagaaccgcttctataagttttctcgtgtttttgtcgtcatcaacgacaagtatatgaaacatcgaaaaatccccttttcaaatacgcaatgcattatatgtataattatagcacatcggcaaaaatccgtcaaggcaggcaatacaactttaaatccgaaaaagacaaaagccgatatttgcagataataactcctataaaaggttcatttcttgcgcatataacggtgcgtcccgtatttttatgtctgttttttacaatatatgggttttgaaaagtaaaaattatatcacattttttattgcataacctattgacaaatgcttttgaatttgttataatatacaagccgttgaaaagacatgactcattagctcaggtggtagagcacatgacttttaatcatggtgtccggagttcgactctccgatggatcaccaaaacccacagaaacgaacacatcagtttcgttgtgtggc

SEQ ID NO: 2602 - DNA, 4486 bp, Unknown
  16S sequences of unknown bacteria
atcgacgatgacaaactcatagctctgcttggcctcttcgagcagctttttcatctgttcgctgctgagcatcttctcggcgttctccagatcctgaatgctgcacagcacatccatatggaaacgttcgctgtgcatgacttctttcttccaatccttgcccgacaatgcggcattcaggctgtgttctgtttccatgttcaggatgcggtccaggcttggcttgcggatatcggcatcgatcatgagcacatgatggccgcctttggccaacgagattgccaggttggccgcgatggagctcttgccttcattttccatgacgctggtcaccatgatggtctgatacccatgcttgcgcgaagattcctcaatgcggctgcgcagcttcttcactgcttctttatagcggaagcttgtcttcagtgaagtgatgagcagagcctcacggttctttttccagaaccggatgccgcggcgcttatgttccttgggcagccgggccagcatgcggcagtcgatgcgtgtcgtgatctcctccggcgtcttgatcgtatcgctgaaataggccagcagcaacagcactgccgcgatgaagacaccgccgccgatgccgcccatcatcaaattgcgcacatgggaattggcgctgaccggcgcctcgctgatcggattggtctgcgtgacattgagatcataattgaagtggtatttatcgccgttggtgcggtaccagtccagcacatactgcaagccaaaccaggcatcacggcgcgtatccgcctgtacgctgatgttgacgacattcgtgtcgttgacgctgttcacgctgcaagtcaatgtactgtcctcattgcccaggcgctcttgcagatacgactgcacattctgcccattaaagatataagaaagcgagcggatatacgcctgtgtcgtatccagctgcgaataggtgttctgttccgaaccaagcgtcgcgctcacgctcgcctgatagcgcggatgatacatcagggtgcgcacagtgtcaaagcccatggcgccgatgagcgcgatgagcacgatgagtttccagcgcttgagcacataggagatcatgcacgccagcttcatgatcagatcgcggctagttctgttctcgtccatgtcctcacccctttactgtaccacgacgaccagcttggtgatgccatactctccgctggtgcgctcgatgcggtaaatgaattcatatgtgccttcttcatcggcattgtagttgtcctggatgctgatgtcatcgatgagatcttcatcctcgatgccgcggtcactgacgctttcgatataatcctcagcatcgatctcagtgcctttatccacatagatcagataatcgctcagcgtgatggtcaggcttggctcatcccacagctgatcgatcttcagccgcagcgaagaggtcgtgccgcagctgtccgttactgagaatgtcgcatagtagctgttgccatcctgcgcctcgctgtttacgctcactttggcgctgatgtcgccatctaccgaactggtggctcccacataatcttgcagctgcacattataattattgtagctgatgcaaagcgcctgattcagcgtgatgcgcggagcgctgtagtcgctgtagcggatgcggcgcgtcgcgcggctgaggttatcgtcactgtcaaagacagcataggtcacggtccggcagttgtcattgtcaaactcagacatgctttcgataaagatcgaatcgctcagatcgccatcttcttcatcagctgcgctgagtccttccagcagcttttcatcgtcatccttcacgctgacttccagcacttcctgcggcgcgctgatctgcggcgcattgccgctgctttggcgttcctgtgtaaagatcaacacagctgcataggcgcagcagatgatgagcagcacgatcacatactgcactctttttctcatgcgttttcctccttcagatgcggatgccgagcagcttttccgcattggtgcggaatacggcgtcggcgtagcttcgtccaaactgttcgctcaccagatcataagcgtcgcccatcatcggtgtgcggtatcggatatgatgggcatcactgcccacaaaagtgatataacggcgcgcaagcagctccatcacggtctcttgcgcgtattctccataacggcggaacaggcttcccttattcatctgcagcagcgcgcccttttccaccatgcgctctgccagcgtcgctgagctctgcacacaatcataacgttccggatgcgcgatgaccggaatgcgcccggccgccttgacggcgtcgatggcatccagcacatcttcctcctccacatcaaagtaaaactccatgagctgatggttcgtctgattgagaagggcgatatcgtcaatatgctccccaaagctctctctgccgctgaacaaaaactcacatcccagatacagccgcaccgggatgccctcctgccgcacgatatccttgaattccgcaaagagcatgcggatcttttccttgggattgtcaaagccgtattccacggcataatggggagtcaggatcagcgcatccgtgccgtcctgccaggccgcgtcgagcatctccagcgatgtctccacactgtctgatccatcatccaccatcggcaggatatggcagtgaatatcgatcatgcctgttcctccttccttaaaagtccatcgccatgcgggcagattcctcttcgctcagctgagtcagcttagtgtccaccacacggtatacccgctgacaaagattgagcacgctcggacgatgcgtcgtgaccacacaggtcttattgggatgactctgtacgatattgcgcaatacgcggcgctctgtctctacatcgagcgcactggtcgcttcatcaagcagcaggatcggcgcatcgcgcaggatggcgcgggcgatcgcgatacgctgagcctgtccctcagaaagccccttgcctctggtgccgatctccgaatggatgccatcctccatgcgctcgacaaattcataagcgcaggcagatttcagcgcctcaatgatctgttcgtccgtagcgtcttctttcaccatccgcagattatccgcgatcgtaccagagaagatcgtattgccctgcggcacataggcaaacagcggacgtgtcgtcgcattcagcggatatgcattcccctcgctgtctgaaagcacggcttctccttcactgggcgtgatcaggcccaaaaacatccggatgagggtcgtcttcccttctccgcttggtcctacgagcgccacgatctcaccaggtgcggcatgcatgctcgatgaaacgagcacctgacggttctccacataagagaagaacacatccttcagcgtgatggtaaagccgccctcgctgatctcctccagatgcttcgtcgtctccggatgctttttctcacgcggcagctcgatgatctccattagacgcgctgcggaaatggtcgagctgatcgtgcttgggatgatggacacgacagcgctgaacgccgaagacagccggctggattgctgcaggaacagcgtcatctcaccatagttgatcgcaccgctccacagccggtacaccgcccagccaaagaacgaaaactgaatgaccatgccgatcagcgaaagcaccagattggatttgatgctgaacatattgtaatccaggttgacctctttgtatctggcctggaagcccttcagcctgcggctgaacaggtccatcaggctgaatgacttgatcgaatccacattgttgaacgtctctgtctcaaacgacatcatctcgctgttcatctctttgaccttcttattatagtcacgcatcttggacatgagcagcttcgagcttaacagcatcaccggcgcattgaccagcgccagcatcatcatcgtcggatcataatacaagatgagacagagcgttgcgataaagttgaacagattgaccaccagattcggcagccagccgatcgcgctgcccgccaccgtgccgacatcgctcgtgaatcgattgagcagatcgccgctgtgataacgggaaaggtcaagccagttcacctggatgacctgatcgaagatatctgcctggatctcattctggatcttgatgttgatcttcagcgtgatccgggacatgatctgactgaagaacagcgaaaacagcgccatggagaccatgatgatcgccatgctcgctgccttgtcggtctggatgccggtaacgatattgatcaggttcttactggcgatcgaactcaccagcgacatgatcgtcgagaagatacccagacatatgtagaagaagatctctttcttataattctttccataggagcacatccatttgaattcttcccacatctcatggatgctgccgtccttgatctttctgatcagcatcttgattgattccatgtctctacttccta

SEQ ID NO: 2603 - DNA, 3756 bp, Unknown
  16S sequences of unknown bacteria
ctgcgggaggaagatcttccggcaatctgtgctgaatatgaaaaattggcccaaattatgaaagagcgtcatgattttaactttttccattttaatgtggatttgacgcaaggcccctgtgtcatcaaacgcattcgcggctgcggtgcaggctgtgaatatgtagccattacgccggagggggatatttatccctgccaccagtttgtgggaagggaagaatacaagctgggcaacgtccatcaagaaggattcaatatggaagtttcagatcagtttgccgggttgaacatctacactcgaaaagagtgcggggattgctgggcgaagttttactgcaccggcggatgcagcgcgtccaatttgacggtgaatggagatatcaaaacacctaatcatattgcctgtgaaatggagcggaaaagacttgagtgtgcaattgcactaaaagcagctgctgcagctgaagctgactgagcggaacgaaagagaaattatacaaattgtaaagcgcacccggcgtggtcagacaacgctgggtgcgctttatttggggttattttaggggttacgcgctatatcttgtggttttgtgaaaaagaagatattcggcataaaaaggtacttctgtggtttacataaactaatttacataatatttgtgcataatttacaaaattgcgctttcgcaatattcccctcttgcgcaatgcgtttgcttgcactattataagatatagtatcaatatcttttatgcagcctcacgtaaaatcccagtgcagattgcttctaaatcgattcgtctgcacatagtctggatatgtgaggtgaagtcaccagtgaaacgcggtacttttcatggacgagttattttggcggaccgctcttttttgctcacgctttttttggccagttgttttttctttggtgcattgctgggcaatcgtgttgcagggatggaagaggtataccgcagcgcggagttgcaggagtttctgtcttcctttctgatgttagtgcgttccggccaactggagccggcgtcgtttggcgcagccctgttttcttattttaaatatccgatcttggtgtttggactaagttttttgacgatcggtatctttctcataccgatcgttactttttatcaggggttcatgttttcttttgcggtttctgcctttttatatactgcaggggagcatggcctggtattggcactgttgctgtttggccttcggtgtattgtggtgctgccgtgttatttttggcttgccagcagcggtatggcgctggctgtcggccctgggtctgggagtaaagcgcgtccagtcgatgaaagggccggaagcgacgccgtttggcggtttattttttgtagtctgatcctgtttgcaggggcggcttttgagcatctggttttggccggagtactgagtgccgtttgttaagagagaaaagaaagcaatcgagggaggctttgtctgtggccgattatgtggaggggtatcgtacttatttaaacgaagagcgccatgtgtctgccaatacgctgagttcttatttgcgtgatattcggcagtttgcgcagtatttgagcatgacggaggcaggagatttgtctcaggttcagcagggacagatccaggcctatgtcaactggatgacggcgcgcggaaaatcggcctccaccgtaacccgttcactggccgcgctgaagtccttttatcattacctcacagaaaaaggcgtggtggcaaaaacacctgtgcagaatgtgtcggctgcgaaggcggaacgtcatcttccgcagattttgaccagtcaggaagtagagttgtttttggagcagccccagtgcactgatatgaaagggtaccgggatcatgccatgctggaactgctttatgctaccggcattcgggtcagcgaactgattgccctcaatagttctgatttgaacttgagtgccggatttatccgctgtgcaggcaaaaagaaagaacgcatgatcccgctttatcctgcagcagtgaacgcgttgcgggaatatgtggaagcgattcgacccaatatgatcgcatcgccggaggaagaagcgttgtttgtcaatatgaacggcgaacgcatgagccggcagggtttctggaaaattattaagtattaccaggagaaagcccacattgaaaaagatattacgccgcatacactacggcactcctttgcagcccatctgctcgagaacggagcagatctgcgggcgattcaggaaatgttggggcacacagatatttcatccacacagatttatacccatttgatcaatcggaagctgaaggacgtttacaataaagcgcatccgcgcgccatttgagcaggcaataccattataaaaatcccgccgaagcgcatagggttcggcgggattttttcgtgttgtccggtttatgcttttgcagcgatcagctcgatttccagacgggagccggcaggaagggctgccacctgtacgcaggaacgggcgggcggatcgttggggaagcgcgcggcatagatgcggttgatttcggcgaagtccgccaaatctgtgataaaaacagtggtttttaccacgttcgcaaacgtcatgccattggcagacaaaaccatttccagattccggagaacctgctctgtctgctcttggataccgccgtctaccaatttcccggtttccggaacaagcgcaatctgcccagaagtaaaaaagagatcgcctatagcgacgccatgggaatacgggccgatcgctgcgggagcaccttgggcaaaaacagcttttttcatatcaaacactccttagtatagtctttgccccagtatactacggattggaaccgcagacaacaatctattgcgtttcccctgaaatatgatacaatagtactattctgatttgatggatgaatcaaataggagggattcatgcgtattcttggtattgatccgggtattgccaccgtcgggttcggttttgtggatcaggcatgcggctgcgccctgcggccggtacaatacggcgcaatcaccacagaagcggggcttccgctggctacgcgcctcatgcagatcaaccgcgatctggaagaattgatcgaaacgttccgtccggatgtgctgtcggtggaagagttgttttttaataccaatatcaccacgggcattgctgtggcgcatggccgcggcattattttatatacggcggaaaaactgggtgtgccgatttttgaatatacaccctctcaagtcaaacaagccgtagtgggctacggaaaagcagagaagcggcaggttatggatatgacgcgcaggcttttgaagctgaactgcatcccccggccggacgatgcggcggatgccctggctctggcgatctgccacgcccgcagcgccacgtcgctgctgcgccagaatccgctggccaagcccacagtataggaggaaacaaattgttttattatctcgacggcacggttgcctatctcgggccgaatcttgcagtgatcgactgcggtggcgtgggctatgcctgcgctaccacgagccacacgctctcacgcctgcagcagggggcgcgggcgaagctgttcacacatcttaacgtgaaagaggatggagtggacttgttcggcttttacagccagaatgagctatctgcgttccgccagctgatcggtgtgtccggcgtcggtcccaaggcggctttggcgatccta

SEQ ID NO: 2604 - DNA, 1693 bp, Unknown
  16S sequences of unknown bacteria
gaccgcccgcgtggtgtgtatcgtgctgaaagggctgggagaaaacctgcggaagatcgccatgcacatcaccaatgattttgtaacttcggcggtcaacgtgaatttccacagcggtatttctacctggtgctactttgacgagtttcatattttgctccgggacgccctcaccgccagctactttgtagccgtgtggaagatgcttcgcaaaaagggctgcgtcccctcggctttaacgcagaacgtcaaagacttattggccagccgggagatcgaggccattctggacaacaccgattttatgatcctgctggcccaggcccaaagtgaccgggcgattttggcaaagcagctcggcatttccgagcaccagctttcctacatcacccactctaattccggcgagggcctgctgttctatggggatgtgaccatcccctttgttgaccgtttccccaagggggagatatataacctgctcaccacccgcccggaggatttgaagaatgaagcgaaaaccgaataaacccagcccggaggcggctccccggcaggacgcgccggagggctcccctgacggggccaggacggaggctacctctggacaaaatgtccagaagtcaaagttccggcagaaaagcaaccaggaacaggccgcctcgtcaaagctccgcatggaaaagcgcggggagaagctggaacaggcaaaggataagctgtccaaacaaaagccgcccaaaaagcccggcccggtgaggcgggtgggccgggccgccggcggcgccgtccacggctttgtgcatggaaagctctttgaggtggagcaggagaacgtgggcaccgagggggcccaccgctccgagctggcgggtgaaaccgccctgcggcatggctcccggttcgttaagaagaaaatccgggaacacccggcaaaggctgtccagcgggcggagtccaaatatatcaaggctacggcggatcatcatttccgcgtggccgcccaggagaacccggagctgaggcaaaatgcctggaaacagttttggcagaaacggcaataccgcaagcaggcgcggcagaccgccagggctggggcggcaaaggcggcgaaaaagaccgccgccgccacggaaaaggccggggcccaggcggtaggctttatcaagcggcatcccgtgggggtgctcctggccctggcctgtctgctcctgctctttatcatgcagtcctgttcgtcctccctggtgatgctgggtaactccggcgcgggtgccgtgggcgctaccacttacccctcaaaggacgaggatattttgggggccgaggccgcctatgcagatatggaggcggagctgcaaaactacctggacacctacgaaagcacccacgattatgacgagtaccactttgacctggacaccattgagcacgatccctatgtgctcatctccatcctctctgtgctccacgagggggaatggacgcttgcccaggtgcagggcactttgcaaatgctttttgaccgccagtatattctgacggagcgtgtggtgcgggaaacccggtacgacagcgagggcgatccctattcctggtatatctgctatgtgacgctggaaaacaaaaccctttcccaccttcccctggagcttatgggcgaggaggagctggcccggtatgccctctatat

SEQ ID NO: 2605 - DNA, 32759 bp, Unknown
  16S sequences of unknown bacteria
tagcccttatgagggctaacacaaaccaccacttgaagtggtggttgtgaattagtgatgaaaaacttccacaggcggtggagcaagacgaatcaacacaacaagaaacaaaaaaatcagaagcgcagacgacagaacagaaaattatccgtgtcggttcatttgaggatacattcgattatgtcgataaaaacggtgtcaggcgaggatatggatatgaactcctgcaggctctggcaggttatgccggatggaaatttgagtatgtgaaatgtgactggtcgaattgttttgatatgcttgaaaatggtgagattgacgtcatgggcgatatctcttacaccgatgaacgtgcacaaaagatgctcttttctgatgaggcaatgggtgaggaaaaatatatcctttatgctgatttatcgaacatggatattgggacgtctgatttcaggtttatggacgggaagcgtgtaggggtgctcatgggcacagaacctgaaatcatgctgacagaatgggaaaacaggaatggcatacagacagagcatataaatgtatataataatgatgatgtcgaaaagaaattagcgaatcatgagatcgatgcttttgtatcgctggaggaatccatctggtctgaacagggaatatcatccgttatcgcgattggcaaatcaggcatatattttgcaataaataaagtgcgcagcgatatcaagacggagttggactttgctatgtgtcagctggaacaggacagtcctttttttaaggcagatctgtataagaagtattttacgcttgattataatcagagtcttatgggcggagaaaatcatggctgaaagaacatggtgacattcggataggatttttgagcaatgatccggcaatattttccatggacgaagagactggaaaacttaccggtatgccgtctgacatgcttacaagtgcacttgcgatctatgacagtacagcagataaggtaacattttctgattttgtaaaagacaatctgcctgagtttttggtcgcggcaggattttttacattcagcataattagtattatcctcgcacttttacgaaaggcaaggagagcagaagctgtcgcaaggattgcagcaaatgacacacaaaaactcaacgataagctggaaatcgctctgaaaaaagcagagaatgccagtctttcaaagacccgttttcttaacaatatgtcacatgacatccgcacgcctatgaatgcaattctgggctatgcgcagctcatggaggatgaactgaaagaaaaagagctgcctgaaactttagaacatctggaaaaactgcagcagtctggaaatcttcttctgtcaatcataaataatgtactggatatggcccggattgagagcggaaaaatggagcttgatgagaattactgccggattgaagatgtctggaagtctttgttggcagtatttgatgggaaagcaggaaaaaagaatattgcgcttcattacacgatgaatgtagagcatgaacatgtattgacagatgttaccaaggtaaaagaaatattggtcaatatcctgagcaatgccataaaatatactccagccggcggttctgttatggtaaacatagatgaactactatgcgatgagcctggatacatgatagcgaggaccagggtgagtgataccggaatcggtatgagccaggattatctgacaaagattttcgaagcattcacacgtgagcagaacaccacaaagagcaaaatcgcaggaaccggacttgggatgtcaatcgtcaggaaatatgttgatctgctgggaggaagaataaatgtagagagtgaacttggaaaaggcagcacctttacagttacattaaaacacaggatagcggatgaaagctattatgcaaaaaagcatattgaagagcctggaacaggaagtgaaattctcgaaggcaggaatatccttttggcggaggataatgatttgaatgcagagattgcagaggcaatacttaagcgtgcaggctttaagacagagcgcgtggaggatggcattcggtgtgtaggcaggatagaaaggatgccggcaggcacatatgatatgatcctcatggatatccagatgcctaaaatggacggttataaagcaacacaggcaatcaggagtttaccagataaggataaggcatgcataccgatcatcgcaatgacggcaaatgcattcgaagaagataagagagatgctattgcagccgggatgaatggtcatatcgcaaaaccaatccaggttgataacttgctgtcgatattatcagaaatcataaggcagcaggaaaagtaaatgaaaagagtaaggggaaatatgaccatgtcaaaagatgagtatttgattactgatgcgccgctgaaagcgctgacggtttttgcaatgccgatgattctcggcagcttttttcagcaggtatacaatatggctgactctattattgtcggtcagtttgtgggttcttccgcactggccgctgtcggtgcctgtgcagccctgactaatgttttcatttgtgtggcactgggggcgggtgtcggtgcaggtgtgcttgtgagccgctatttcggagcaaaagagtatggcaaaatgaaaactattgtgtctacatcactgatcagctttttgcttctgagcatcatccttggtgtctttggcttttgtttttcccatgcgatgatgagcggattacagactcctgccgatattctggaggaagcggtactgtacttgcgggtctattttgtgggatttccgtttctgtttatgtataacattctttccaccatgttcacttccatcggtgaatcaaaaattccgctggggctcttggtcttctcatctatcctgaatatttttatggatctttggatggtggccggtctggggcttggcgtgttcggtgcggcgcttgcaactttgattgcacagggcatttccgctgtgttttcacttttgattttcttttatcggatgcggcggtataagagtacctttgcctggtttgacgggcaggagctgcgctcgatgcttcggattgctgttccatcggttctccagcagtctactgtgtccatcggtatgatgatcgtacaggcggtggtaaatcctttcggtacacaggcacttgccgggtatgcggcaacaatgcgggtggagaatgttttttccctgatttttgtgtccatcggtaacgcagtttcgccatatgtttcccagaaccttggcgcaaaaaaaacccggcgtatcaaaaaaggttatcatgctgcattggtgttggacgtgtgttttgcggcgattgccttccttgtcattgaaacgctgcacacgcagatttcctcactgttccttggaaaagacggaacagccctggcctatcaggtgtccggagattatatgagatggcttggttacttttttatctttatgggaattaaaatggcgaccgatggagttcttcgcggactcggaatcatgcggccattcctcattgccaacatggtaaaccttgcgattcgtttgtctgtggcgttgatctgtgcacctcgttttggcattgactttgtttggcttgccgtaccggcaggctggcttgccaacttcctggtttcctatgcggcactcagaaaatcctggccgactgagaaagtggagtcatctcgataaatttggatgtagcacggattgtcttctgatgggcagtgaaccaaagaggaaatcaaaaatgaatgtaaatatcgcaaagagcagttccggaagtgggtttaaattgacttgggttggtgataagtttataatatgacccagattactatgtaaaaatttcgcaagctgatttttgtaaaaaggcagaggaatgtgagatatagtaaaaaaatcagggatttggcaaatatccgctttacaaaagtagtatcgccttataagaacggaggtcgagatgaagatatttcgctatggaaatccttctgcttctacgtttctgattcaaccgatagatgaccatgatctgggagagctgaaaacagaaattaacgagatcaggaaacaggtacaaatagattttcaactgattgcggtgaaagtggatgactggaatcgcgatctttcaccgtggaaagcgcctgctgtctttggaaaagacggtttcggagatggggcagaggatatgctgcggtttatcttggcacaatgtatgaattgcagcaaaacgtactatatcggagggtattccctggcggggttattttctctgtgggtagcttatcagacagacgcatttgcaggaatcgcggcagcttccccctcaatctggtttccgaatttcctgcagtatatgaaggaacaagatgtcagggcagattcggtctatctcagtttgggagaccgtgaggaaaagaccagaaatccgttaatggcaacagtaggtgactgtatccgggaaggccatgagctgctccttggcagaggaatccgtacgaccttggagtggaatccgggaaatcattttaaagatgccggaattcggatggcgaagggatttgtttggttaatgaaaaataatgcagattatgtagaactggaggtttacgaaaatataaaaattctaagaaaggagtgtctactcaaaaaataccgggcattcttgaacagcaggggtatagccggattcatattttgagtggcagaaaaaaatgagttacgcaattgtattcagcagccagacaggaaacacaaaattgctggcagaaactatttataagaatttgaagcaggagaactgttgctattttgggacacctgatttggcagcaatggaagcagacatcctttatgtaggattctggacggataagggaacagcagattctgcaacagtggattttctgaagcagatgcatggaaagaaagtatttttatttggcacggcgggttttggcggcagtgaggagtattttgctaaaattctgaaaacagtgaagaaatcgctggatgacagtaataccatcattggcagctttatgtgccaggggaagatgccactgtccgtgcgctgcaggtatgagaacatgaaaaaacagccaactcatgcgatgccaaatctggatgcgttgattgaaaattttgataaagcgctttctcatccggatgcagaggatttggagcacctgaaacaagcgataaaataagcgataaaacaagcagagaaatggtttacttgacaaaggtttatttttcacatataattaccgatgataattatcaaaaataattattaaagataattgtcaataataaccaataataataatcaataacaatcaataacaatcatatggagggaatctatggattcagaacgaatcaaacgtatgttggatgcctgttatcaggcaaaacggattcgggatatgcttccaccgctgccacagggtgttactcctgcgtatattcactatctggatacaattcaggcgttggaacgtcggggcatctgtgtgaaggtatccgacatcagtgatgcactggagcttccaagacccggggtaacgagaacggttaaagagatggcagcgaaaggatatctcagaaaatatgcatctgaggaagatggacgtgtgacgtatatttcgctgacggaagcaggatatcagctgtctcagaaatatgatgagcaattttttgctgcacttgcaccttacatggacggtatttcggaggaagaggcagatggtatgattcgcacgatcgataagttttatcaggttatgctggagaggaggaattcctttgacgggagataaaagagattttacgcagggaaatattttaaaaaaacttgtattttttatgcttccgatactgggagcgcttgtgcttcaggcggcttacggagcggttgatcttttggtagtaggacgctttggatctacctcaggactgtcagcagtctcaaccggaagtcaggttttgaatctggtaacctttgtggtgacgcagcttgccatgggtattacggtattaattgcaaggtatcttggcgagaaaagacaggaacaaatcggtatggtccttggaggtgctgcagttgtatttgcattgatttcgactggtctgtttatcgtgatggtcggactggcaagaccgatttcagttttaatgcaggcacctgaagaggcggtaaatctgacagcaagttatgtgagaatctgcggaagcggaattttttttattgtggcgtacaacctgcttgcagcagtttttcgaggaatgggagacagtaaatcgccgcttttgtttgtcctcgtggcctgcgttgtgaacattatcggagatctggtgcttgtggcaggactgcatcttgatgcggccggagcagcgtttgcaaccgtatttgcacaggcagtcagcgtagtatttgcagttgtgattctgctgaaaaaggatctgccgtttaatattcggaaacaggatttcagactgaatgcacaatgcagacgatttctggcaattggaattcctcttgcactgcaggagtttttgacccagctttcctttcttgcgctttgtgcgtttgttaatcggcttggactggaagcttcttcggggtatggcgttgcctgtaaaatcgtaaattttgcgatgctgattccgagtgcattgatgcagtcgatggcatcatttgttgcgcagaatgtgggtgccggaaagtttagacgtgcgaagcaggcgatgtttacagggattggcgtagggctggtgtttggctgccttgtatttgtactggtgcttttaaagggtgatgtgatggctggatttttttcgtcagatgaagcggtgatccagaaaggctttgcttatctgaagggatttgcaccggaaacgattgctactgcgattctgttcagtatggtaggatattttaatggaaataataagacggtatgggttatggcacagggattgattcagacgcttttggtgcgtctgccgtttgcgtatgtgatgagtattcagccaaatgcgagtctgacaaaaattggtctggcagccccaatatcaacaatggtcggaatcgtactgaatgtcggattttatgtctatctgaatcataaagatccttttcagagtgatttgcaataaaaatgtggtaactgtttggcaccagcctctaaaatgcaaagaaaaatgccagagaaaatagcttgcgaagtgtacggcggaatgatataatgaaacaatactttttgcgctgcatatcaatctacagtacaaactgaacaggcggtggattttccaagaggccgggccgactaaaatggcagcagatgaatttgcatctgtgggacagtagtttacgaattgttccacaggtgtttttttatatagtatagtggaaaatatcgttagaattatctgattacaggaaaagttcccgggatgatcgtatagtctcggggcattcttgaatttgcgggcataaagttatcttggataaatggaggtaactgttatggaacaaaatgaacattcaaagtacgaagatccgaaaaaaagagcggaaataggaaaaatgtctggtctgatcggaattgcatgtaattttctgctggccggaagtaagatcgcagtcggaaattttgctggttccacatcgattgtagcggatggacttaacaatatgtcggatgctgcaagctctgctgtaacgctgatcggatttaagctggcagaaaagccggcagaccgggagcatccgtatggccatgcccgatttgagtatctggccagtctggttgtttctgcaatgattttggtgattggtctggaattggcacagaagtccgtggaaaagataaaaaatccgattccggtggaattttcgtgtgtgacacttgccgttctggtgttttcgattctaatgaaaagtggcatggcagtatttaacagcaggatgggaaaaaagattcaatcgacaacactgattgcaacggccgcggacagcagaaatgatgtggtgacgacgacggcagtactgcttgcaacacttgcagagcattttttcggttggaaagcggacggaccgatggggattcttgtatccctgtttgtgctgtacagcggagttacgctggcaaaggaaacaatttcgccgctgcttggcgaaggcgcggacgcaaagatccgtacagagctgatgaattatgtgaaagagcatccgctggttctcggctgtcatgatctgatggtacatgattatggtccgggcaagtgttatgccagtattcatgtagaaatggacaaggatgtcgacccgatgaaatgccatgatgtgattgatcatattgaacgggaatgtctggaaaagttcggcacgaatctggtgatccattatgatccggtcagtacaaatgatctggagctggaagagatgcgggaatttgtggaacaattacttgtgaaaagggatgaaaggcttctggtccatgattttcggatgcgggagaaagaaggaaagacagagctgatgtttgatctggtattgccggataccatgcaggaggagaaggagaacatccggaagatgctggaagaaagtctggagtctgccggaaaacagaatataacattgaacatcacctttgatccggagccggaaatgtaaaatatcagatgtcatcggacgggagataaggtgttcgtcaggttttgtaagatgtcaccggacgggaagataaggtatctgtccggttttgtcaagatgtcgccggagttttaggtatagaatttcggcggcatctttttgctgtattttgtactgatttcacaaattcttttttgccccttttcttttccgaacgattgtagtatcatatcaattgcagtgcaagcactgaatatagtatttttaaaaaagacaaacaacaatatatagtatgtgctatcatagactgaaaaaacggaaagatttgtggtttttccggagaggcagcaatgagaaaggacggaggagacagttcatggacagtacagtaaaaacgcgtgtaatcaaaagaaacggagaggaagtaagctttgatctttctaagattatcagcgcgatcagcaaggcaaatcgggaagtggatccgattcatcgaatgaatgaatatcagatcatggcgattgcggagaagattgcgcagcagacggaggaagccatgcatgcagtgaatgtagaagacattcagaatatggtggagaccggaattatggagatgcgcgggtatgaggtggcacagaaatatgtgcgctaccgttacaaacgtgagctgacccgcaagtcaaacacaacagacaatggaattcttgcactgattgagcatctgaacgaggaagtaaagcaggaaaattccaataaaaatccggtgatcaattcgacgcagcgtgattatatggcaggcgaggtcagcaaggacttaagccgccgtgttctgctgccggaggagattgtgcgtgcacatgaggcgggaatcatccatttccacgatatggattattatgcacagaaggagcataactgcgatctgatcaatcttgaggatatgcttcagaatggtaccgtcatcagtgagacgatgatcgagaagccgcacagcttttttacagcctgcaatgtgacaacacagatcgtggcacaggttgcttccaatcagtatggtggccagtcatttacactgtcacacctggctccgtttgtggatgtgagccgtcagaagcttaggaaaagcgtcattgaggagcgcatcgaggcaggcgaatcactcgatgaggagattatctgtaaggtaacggagcaccgcctgaaagaagaggtaaaaaacggaatccagacaattcagtatcagctgattacactgatgacatgtaatggccaggcaccgtttgttacagtcttcatgtatttggatgaggtgccggagggtcagacgagagaagatcttgcgttgattatcgaggaagtgctgcgtcagagaatgcagggagtaaaaaatgaaaaaggcgtgtggattaccccagcgttcccaaaactgatctatgtgctggatgaagataatatcacggagaattccaaatactggcatttgacggagcttgcagcaaagtgtactgcgaagcgcatggtgccggattatatttctgcaaagatcatgcgtgaactgaaacagggggatgtatatccgtgcatgggctgccgttcgttcctgacggtggaggacagccagagaaatgaggatggaagccataaattttacggacggttcaatcagggggttgtaacgatcaatctggtggatgtagcctgttcgtcgcagggcagcatggaagaattctggaagattctggatgaacgtctggaactctgtcacagaggactgcgctgccgtcatgagcgtctgcttggaacggtgtcggatgtggcaccaatcctgtggcagaacggtgcgcttgcccgcctgaaaaagggagagaagatcgataaacttctttacaacggttattcgaccatctcacttggatacgcaggactgtatgagatgtgcgtgcggatgacgggaaaatcccataccgatccggaagcgaagccgtttgcacttgcggtgatgcagcatttaaatgacaaatgccgggagtggagagaggcagagcatatcagctattccgtttacggaacgccgatggagtcgacaacttatcgtttcgcgaaatgtctgcagcgccggtttggcatcattccgggtgtaacggacaaaaattacattacaaacagctaccatgtacatgtgacagaagagatcgatgcgttccacaagctgaaattcgaatcggaatttcagaagctttctccgggaggagcagtcagctatgtggaagtaccgaatatgcaggaaaatattccggcggtgctttctgtgatgaaatacatttatgagaacatcatgtatgcggaattaaatacaaagagtgactattgcgaaaagtgtggatatgatggagagatcagaatcatagaagatgagagcggaaaactcatctgggaatgtccgaactgcggcaaccgtgatcagaaccttctgtcagtagcgcgccggacctgtggctatattggaacccagttctggaatcagggccggacgcaggagatcaaggaccgtgtgctgcatctgtcaactggaacgatttctgcaaaagagtgctgagaagcgggagtgagagatgaacattggagaaattttgacagctgattgtgcgaacgggctcggcatgcgggtatcggtgtttgtatccggctgcctgaatcactgcaagggctgctttcagccgcagacatgggaatttgattatggaattccgtatgatggggcggtggaacagaaaattttggatgagctggcaatgccgtattacgacggtctgacgatccttggcggggaaccgtttgaaatccagaatcaggagacagtagcagcgctgattggcagggtaaaaaaagaacttccggcgcgaaatatctggatgtacaccggttatacgtatgaccgggatctggttccgggcggatgccgttatacgaagtttactgattcgatcctggatcagatcgatatcctggtagatggccggttcatggaggaaaagaaaaacctgtgcctgaaatttcgcggctcagagaatcagcggatcatcgatatgaggcagacacgcgcagcaggaaaggctgtgctcagtccgctgaacaattaggtttgaaaggcagtcggagcgatccggctgtcttttttatgatgcgtccggcagaggagtagttggagtttcgctgtgaaaaaagagaatgggcttgttttttgctgcttaaaggaaggaaagcattgcttttgaaagttgatatgttataataaaaccgctgtaatattgtaaaagaaaacagcagaagaaagaacaaaaaagagaaaaatcagttacaaaaaagagaaaaaggagacggagatgggcggtatatttggagttgcgtcaaaaagaagttgtacactggagttattttacggaatcgattatcattcacatcttggaacacgccgcggaggtatggcggtgtgcggagaacagggatttcagcgtgcgatccacaatatagaaaattctccgttccgtacgaaatttgagagcgatgtcgaggagatggagggaaatctcggaatcggctgtatttcagactatgatccgcagccgcttctgatccagtcccatctgggaagctttgcaattacaacggttggaaagatcaataatatggaagaactgattcagaaggtgtatgaaaacggaaacacacactttcaggagatgagcagcggccagatcaatgcgaccgaactggtggcagcgctgatctgcaaaaaggattcgattgtagagggactgcagtttgtgcagcaggtgattgacggttcgatgacgattttactgatgacgaaagatggtatttatgcgtcgagagaccggctgggcagaacaccgctgattgttggaaagaaagaggacggctactgcgtttcttttgaaagttttgcatatctgaatctgggctatagtgattatcgtgagcttggaccggcggagattgattatattaccccggatggcgtgaaggtggttgcggagcctggaaaagagatgcggatctgttcattcctctgggtttattacggttatccgacttccgcttatgagggagtcaatgtagaagagatgcgttataaatgcggaagcatgctggcgcagcgggatgcgcaggccggagatgtgcacccggatatcgttgcgggcgtgccggactccggtattgcacatgcgatcggttatgcgaatgaatcaggaatcccgtttgcccggccatttatcaagtacacaccaacatggccccgttcgtttatgccgacgaaacagagtcagagaaacctgatcgcaaggatgaaactgattccggttaaggcactgattaaagaaaagaaactgctgctgattgatgattccatcgtgcgtggcacacagctgcgggagacaaccgaatttctgtatcagagcggggcaaaggaagtgcatgtccgtccggcgtgccctccgcttctttatggctgcaagtatctgaacttttcgcgttccaagtcagatatggatctgatcacgagacgtgtgatccaggagcgggagacgaatgtgacgcaggaggtattggacgattacgcggatccgtgcagcaaacggtatgaggcgatgcttgaggcgatccgcaaacagcagaatttcacgacgttgcgctatcatcgtctggatgatctggaaaaatcgatcgggatagagccgtgtaagctctgtacgtactgtttcagcggaaaagagtgacaggagacagaatgaaaacaacagataaaaaaggaaaaggtgagtcgacggaaaatctggatgaaaaaagaaagcttgcgcttgagatcattgaaaaattgaaacaggcttatccggatgcgggctgtacgctggattatgacgatgcatggaaactgctggtcagtgtgcggctggcggcgcagtgcacagacgcgcgcgtgaatgtcgttgtggaggatttatataaaaaatttccggatgtgaacgcgctggcggaagcacagccggaggagatcgaggaaattgtccgtccgtgcggccttggaaagagcaaggcgcgtgatatcagtgcctgtatgcggatgctgcgtgatgaataccacagtcaggtgcctgatgattttgatgcacttctgaaattgcccggggttggcagaaagagcgcgaatctgatcatgggagatgtgtttggcaaaccggcgatcgtgacggatacgcactgcatccgcctgacaaaccgcatgggactcgtagacgggatcaaggagccgaaaaaagtagagatggcactgtggaagatcattccaccggaagaaggcagtgatttctgccacaggctggtggagcatggaagagcagtctgtaccgcaaggacgaaaccgtattgtgaacggtgtgtgctacaggagatctgtccgaagatcggagtatgacagaaaaaacagaggtggagcagattgcagatgtctgtttgtaactgttcagagccaggcaaaatttcataaaacaggcggaaaatgcttgcatttttaagcctgtttttgaaattttatttggcggatacgccacaccgacgaaatgcgtagcattttggaggttggctctgaacagttacgtctgtttcataatagtcaagaaaacgtaaaaaaaagaagaaaatccgacccattcttacctgaaaatgagaaaaaaagtcaataaaagaaaaatgattgacatttgaaatgaaataaaatagaataccaactaaggcaaacaaaaccgacagacaaaatgttgtatgtaaccatataaaaagagttgcatgaaactatcggaagtgcggcggacaggaaaaaagtacggcgcgtctgacaggagtaaatggtgtattatttgctgcaggacgagtcagctgagaaatggcgctgcaaaagtcagttttgagaagatcaggaggtgcaggatgaaaaaacataaattctgggcatgggcaatgatcgtatgcctggctatgacaatttacacaggacacaaacacaaataaacaggaggaatgaacaatgtgggattgctttaagaatatcgacggaaagaaaacaggaatttttgcagctggagtactcttcggtaccgcaggcatcaaactcctttccagcaaggatgcaaagaaagtatatacaaactgtactgcagcagtgcttcgcgcgaaggactgcgtgatgaagactgcaactacaattcaggagaatgcagaggatatctacgcagatgcagtagcgatcaacgaggagcgtgcagcagcagaggaagcatttgaggatgcggaggcatgctttgaggatgaggcagaggagacaacagaagagactgcagctgaagcagcaaaggacgctgcagcagatgccgagtaattaattatagaaacgattacagatcatgtgaaacacagagagtctgcggcagataccgaaaggtgtcagctggcaggctcgccttctgtttaaccggttcgatttattacggaggaatattatgagattttggatcagacaggagtccaaaggcagaatgcgtgttcatctggatcagaagcgcatgtcgtacaaccaggcggatatcctgcagtactatctggagaacagcaagggtgtgcggtctgcaaaggtgtatgaccgtaccgcggatgctgtaatctgttacacaggagtgcgcagcgaactgatccgtgcgctacagcagtttcgctatgaaaaagcagaagttccggcaaacgtactggagcattcaggaagagagctgaatgaaacgtataaggaaaaactgatcaataaagtggtgctgcattacggacggagatggctgctgccgtatccggtcaatgcctgctatacggcgtttcattctgtgaaatacatttgcaaaggattgaagacgctgtggaaccggaagattgaagtgccggttctggatggtacggcaatcggagtttccgtactgcgcggtgactttataaccgcaggttcgatcatgttcctgcttggtatcggggagctgctggaagagtggacacacaaaaaatcagtcggagatctggcgcggacgatgtctctgaatgtatcgaaggtatggctgaaaaaggatggccaggagatccttgtttctgcggatcagatccacgagagagactgtgtggtaattcacatgggcaatgtgatcccatttgatggaattgtagccgaaggagatgcgatggtcaatcaggcatccctgaccggcgaatccgttccggtgcgcagaacggttgcaaactcggtctatgcaggaacggtcgttgaggaaggcgagctgacggttgaagtcaaaaagacaggcggcgcaagccgttttgagaagatcgtaaaaatgatcgaggaatcagaaaagctgaaatcaggacttgagagcaaagcggagcacctggcagaccgtctggttccgtacacactggccgggaccgcacttacgtatgtgctgaccagaaatgtgacgaagacgctgtctgtcctgatggttgatttttcctgtgcactgaagcttgcaatgccgatttctgtgctttctgcgatccgtgaggcaggacagcataaggtaacggtaaaaggcggacggtatctggaggccatggcagaagcgcagacaatcgtatttgataagacgggtacgctgacgaaggcaaaaccgaccgttgtcaaggtggagtccttcaacggacaggatccggatgagttgctgcgtattgcggcatgcctggaggaacatttcccgcattcaatggcaaaggcagtcgtacaggcggcgcaggagcagaatctgcagcatgaagaaatgcattcaaaggtagaatacattgtcgcacatggcatttccacgctgatcgaaggcagacacgttgtgatcggaagccatcactttgtatttgaagatgagaaatgtacgattccggagggcagacaggaactgtttgattctctgccggaggagtattctcatctctatatggcgatcgagaacagccttgcagcggtaatttgtattgaagatccgctccgcgaggaggcaccggaggtaatccgggcgctgcatgaagcaggtctgaacaagattgtcatgatgaccggggacagtgagcggacagcacgtgcgatcgcagcgagggtcggcgtagatgagtattattccgaggttctgccggaagacaaggcaggattcattgaaaaagagaaggcggccggacggaaggttattatgatcggagatggaatcaatgattcaccggcactttctgcggcggatgtcggaatcgcgatcagcgacggggcagagatcgcaagagagatcgcagatgtcacggttggagccgaggatctgtaccaggttgttatgctgcgccggttaagtgaacttctgatgaaacgcatccattggaattaccggtttatcgtcggattcaattccgctttgatcgcacttggcgtgaccggtgttttgatgccgacgacctccgcaatgctgcacaatacatctacactggccatcagtttgaagagcatgcagaatctgctgtaaaaatatttccggctgccgtgtggtgcagaagaaaaatgtgatgtgtaagcattcagagcttctgtgaaagaaacacatggatttaagatgaaccaaagcggatattcgtaatcctttttgctgcctgattcggttaaagaaaaattgccggaacaggtatagtggaaaaattgaaaaaagaaagaaaaacaggcgatttaccgtgggcagaaatgcatcgcagtggcgcctgtttttgattgaacgcagataaacattccaccgctacaagtgcgcacagtacgaaacaaaggaatatttacaggaatgacaggattctttaagatactgcaaacagagaaagaagattgtaaagatgtgtggtcagaacaaggggcgtatttctgcagagaatgataaaaacagaaaatcacccagtgaaaagaacaaatgtttgcaaaaggtatggacattcgcaggaaaatgtggtattctgaacgtcagaacaggagttcagataaaaaatcagaaacagatgatagagctcgaagaaacaaatacagaaaaaacagattaattacagtacagattgctcatagaacaggtgcagaatcagagaaaggaaaagatgcgatggatcattttaagttagtatctgaatatcagcccaccggggaccagccgcaggcgattaaagagctggttcacggctttaaagagggaaatcagttcgagacgctgctcggtgtgaccggttccggcaagaccttcacgatggcaaatgtcatcgcccagttaaacaagccgactctggtacttgcgcacaataaaactcttgcagctcagctttacggggaaatgaaagaatttttcccggagaacgcagtggaatactttgtctcctattatgattattatcagccggaggcgtacgttccgtcttcggatacgtacatcgcaaaggactcttcgatcaatgatgagattgacaagcttcggctgtcagcgactgcttcacttgtagagcggaaggatgtcattattgtggcaagtgtttcctgtatttacggtctgggcagcccggcggattacaaggatctggtgctgtatttacggcaggggcaggaacgtgaccgggacgatgtgctgcgcaaactgatcgatattcagtatgatcggaatgagatggattttcaccgcggcactttccgggtgcgcggcgatgtgctggagatttttccggcgaatgcggatgattatgcgtaccgggtagaattttttggcgatgagattgacaggatcacggaaatcgatgtgctgaccggtgagatcaaaaagggtctggattttattgcagtatttccggcgtctcattatgtagttccaatggataagatactgaaagcggcagatgctatagaggaagagctggaagagcgcgttgcctggtttaagagcgaggacaagctgctggaagcgcagcggatcgcggagcggaccaattacgacgttgaaatgctgcgtgagaccggtttttgttccggtatcgaaaactattcaagacatctggcgggacttccggccggggcgacgccacacacgctgatggattattttggcgatgactatctgttgattattgatgagtcgcacaagacggttccgcagatccgggcgatgtatgccggggatcagtcgcgcaagagtacattggtagattatggcttccgtcttccttctgcgaaggacaaccgtccgcttaattttgaagaattcgagagcaagctggatcagctgctgtttgtctcggcaacaccgggagagtatgaggcagagcatgagctgctgcgcgcagagcagatcatccggccgaccggtctgcttgatccgaatgtggaagtgcgtccggtagagggacagatcgatgatctgatcagtgagatttataaagaaactgcggctggaaataaagtgctggttacgacgctgacgaagcggatggcggaggatctgacggattatatgaaagagctcgggatccgtgtgcggtatctgcattcggatatcgatacgctggagcggacggagatcatccgcgatatgcggctggatgtatttgatgtgctggttggcatcaacctgcttcgtgagggacttgatattccggagatctcgctcgttgcgatactggatgcagacaaagaaggctttttgcgttcggcagtgtctctgatccagacgatcgggcgtgcggcacgaaatgcacagggacatgtcattatgtacggcgatactgtgacagattccatgcggattgcgatcgatgagacgatgcgccggcgtgagatccaggaaaaatacaacgaagagcatggcattacaccacagacgatcaagaaagcagttcgtgatctgatcagcatttcaaaggaagtggcaaaggaagaaaagcagctggaaaaagatccggaatcgatgagccgtgcggaactggaaaagctgatcggagatgtgcagaagcagatgaaaaaggcagcatcggagctggatttcgaaaccgctgcgcagctgcgtgaccagatgatttcgctgaaaaagtatctgcaggagctggagtgaaagtacttacgataatggctgtaagcatgaggagatgcagactgccagtatctgctttgaccgggatattcgcagtctgcattgccggcataaagcaaagtacagtcgggcagatcggattgcgtgaaaatatctggtacaagatgaggcaaagagctgagaacaggagaacgaaacaatggaaaaaatacaggaaacaaataatgagaccgggaaaatggataaaaagcagtacatccgcatccggggagcaaatgaacataatctgaaaaatgtggatcttgatattccacgcaacaagtttgtggtcctgacgggactttccggttccggaaaatcctctctggcttttgatacgatctatgcggaagggcagagacgctatatggagtctctgtcctcatatgcacggcagttcctgggacagatggaaaaaccggatgtggagagcatcgagggacttccgccggccatttcgatcgatcagaaatcgacgaaccgcaacccgcgttccacggtcggcactgtgactgaaatttatgattatttccgtcttctctatgcgaggatcggtacaccgcactgtccgaagtgcgggaaagagatcaaaaaacaaagcgtggatcagatggtggatcagatcatgtcgctgccggaacgcacaaagattcagctgcttgccccggttgtacgaggacgtaagggcgagcatgtgaaacttctggagcaggcgcgaaagagcggatacgtccgggttcggatcgatggaaatatgtatgaactgtcagagacgatccggctggaaaagaatatcaagcacaatatcgagattgtggtcgaccgtttgatcgtgaagccgggcattgaaaaacgactgactgattcccttgagaccgtacttcatctggcagaagggcttgcgcttgcagaagtcaatggtggtgttgaaaatggcggtgaaatactgagtttcagtcagagcttttcgtgtccggactgcggtatcagcattgaggagatcgagccgcgcagtttttcgttcaacaatccgtttggagcatgtccggactgttacggactcgggtacaagatggaatttgatattgatctgatgattccggatcgatccctgagtattatggatggagcgatcgttgtgacggggtggcagtcctgtacggaaaagagcagttttacgcgggcgatccttgatgcgctcgcagaagaatatcactttgatcttgcgacaccgtttcaggaacttccgcaggaaattcaggatatgctgatttatggaacggacggacgtgaggtgaaggttcattataaagggcagcgtggtgtcggcgtatacgatgtcgcgtttgagggactgatcaaaaatgtagagcggcgctaccgtgagaccggttctgagacgatgaagcaggaatatgagagttttatgcggatcacgccgtgtaagacctgtcacggacagcgcctgaaaaagtctgcgcttgccgtgaccatcaatggaaagaatatttatgaactgacgaatctttccatcggagatctgcttccgtttatggagcaattgcagctgacggagcagcaggagctgatcggacatcagatcctgaaagaaatccgggcaagattgcgcttccttgtggatgtcgggctggaatatttgagcctcgcccgtgcaaccggcacgctgtccggcggagaagcacagcggatccgtctggcaacccagatcggatcaggacttgtcggagttgcttatattctggatgagccgagcattggactgcatcagcgtgataatgataagctgcttgcgacgctggagcatttgcgtgaccttggaaataccctgattgtggtggaacacgacgaggatacaatgcgtgcggctgactttattgttgatgttggtccgggagcaggtgagcatggaggaaatatcgtggcgagcggcacgattgaagatctgacaagctgtgaagcgtctgtgacgggcgcttacttaagcggccggattcagattccggttcccaaaacgcgcaggacaccgtctggctggatcgaggtaaaaggggcgcaggaaaacaacctgaaaaaaatcaatgtcagatttccacttggtgtgatgacgtgtgtgaccggagtatctggttcgggaaagagttcgcttgtaaacgagattctttacaaacgactggcgcgtgacctgaaccatgcgagagtaattcctggaaaacatacggacgtactcggactggagcagctggacaaagtcatcagtattgaccagtcaccgatcggccggacacctcgttccaatccggcaacgtataccggtgtgtttgatcagatccgtgatctgtttgcagcaacggcggatgcaaaggcacgcggttacaaaaagggacgtttcagctttaatgtaaaggggggacggtgtgaggcatgctcaggcgacggtattctcaagatcgaaatgcacttcctgccggatgtctacgtgccgtgcgaggtctgcaaaggaaaacggtacaacagagagacgcttgaagtaaaatacaaaggtaaatcgatttatgatgtgctgaacatgaccgtggaggaggcgatggaatttttccgccatattccgtctatctaccggaagatcgaaacgttaaatgatgtcgggctttcctatatccgccttggacagccgtctaccgagctgtcaggaggggaagcacagcgtgtgaagctggcaacggagctgagccgtcgaagcacaggaaagacggtctatattctggatgagccaacaacaggtttgcacttcgcagatgtgcataagctgatcgaaatcctgcatcgcctggcggatggcgggaatacagtgattgtgatcgagcacaatctggatgtcatcaagacggccgattatatcattgatatcggtccggaaggcggtgacaaaggcggaaccgtgatcgcacagggaacaccggaagaggtggcggagagtccggtatcttacaccggaaagtatattgcgaaatatttataaaaagaagcaggaaaaaggctggcgcaacgcgccagcctttttcaggaaagagaaaaatttgggttgaaaaatgtttgccccgtatggaaaatccatacaagtaaatgtttgagggagtacttggcagcgtgtgggggctgccaagtgtgagttatgaaatatattagctgtttgctaatatgcttatactataatggataaatgtgttgaaattatgtccagattctaaaaaaagaaagaagttcattaagaaatcctatacacctgattaagcctttgtttatgtgggtttatacggtctggcaggtgctgccaactgttgccccaaaaatatcgctcttttaaccgagtcaggcaagtcccctgcgaggttgcacggagcaataagcagtgggtagggacttgaccaaatcagcagcggcaaaatgtgatgttaacagtagccagggcggccggaacagttatgagaaatttaagaaaaacaaattccaatttttcagattctattatataatgaaacaatgggtaagagggaagaagagagaatcagtaaaaagcagaaaggggtatgacatatggcagcaacagatgtcggaattgaccttggcacagcaagcatccttgtttatgtcagaggaaaaggtgttgttctgaaggaaccgtcggtcgtcgcatatgaccgtgatacgaataaaataaaggcaatcggggaggaagcaagactgctgctcgggcgtacgccaggaaatatcatggaggtgcatccggtgcggaagggcgtaatttctgattatacgattaccgaacagatgctgaaatattttatacagaaagcaatcggaaaaatgtcgtttcgaaagccgcgggtaagtatttctgttccgagcaatgttacagaggtagagcggaaggcagtggaggatgcgacctatcaggccggggcgcgtgaagttcacattattgaagagccaattgcagcggcaatcggagctgagattgatatttcgaggccgtgcggcaacatgatcgtggatattgggagcggtacatgcgatgtggctgttctttcgctggatggtatcgtggtaagcagttcgatcaaagttgcaggagacgattttgacgaggcgattgtaaagtacgtaaagaagaaatatggtttaatgatcggcgagcagactgcggaagaaatcaagatcgcgatcggaactgcgtttgaaaaaccggaaccgaaggtgatggaagtaaagggaagagatcttgtaaccggacttccaaagacaattcgtgtcacttccgaagatacgcgggatgcactgaaggaagtgacggggcagatcgtggatgcggtacacagcgtgctggagcgcacgcctccagaacttgcggctgatgtggtggaccgtgggattgtactgaccggaggaggtgcgctcctgaacggtctggaggagctgatcgaagcgcggaccggaatcaatacgatgacggcagaagatccaatgacagcagttgcggttggaaccggacgctttgtggaactgatgtcagaaaaacgaaaagaagacgaaaaataggccggtttccggaagcgggccggtgaaaaccaactggagaacaaatggaaaagctggaaggatatgtggatcacattatctatcgaaatgcagagaatggatatactgtcatggtaatgctggcagaccaggaggaagtaacatgtgtaggagtcctctcctatatcggggagggagagaagctggaggcggaagggcaatatattgcgcatccgacgtacggagaacaattcaaaattgaaacgtatgcggtgaagccgccggaggatgaagagtccgtggagcgttatcttggctccggagcgatcaagggaatcggtactgcgcttgcagcacggatcgtgcgccattttcatgcggatacgtttcggatcattgaggaagaaccggaacgtctggcggagattaagggaatcagtgagcgaaaggcaagggagatcgcacagcaggtctatgaaaaacgggatatgcgaaaagcgatgatctttctgcagcagtttggtattacgacggcacttgccgtgaagatttttgaaaaatacggtcagcgtatgtatgaggttctgcagaacaacccctaccagcttgcggatgatattcacggtgtcggatttcgcattgcagatgagatcgcgagaaaggcaggtgtcagtgcagattcagagtatcgtgtgaaaagcgcgatttcttatgtgctgcttcaggctggaaatgagggacatatttacttgcctaaagagctggtacaaagccggacggcgcagctgcttggtgttgggcttgaggatatcgaacagtatctgatggatctggcggtggatcggaagatcgtcgtgaagcaggaaaaggaacaggagcgggtgtacagtgcatcttcctattatatagagatgagtacagcgcggatgctctgcgatctgaatattaccggcgagatcgacgaccaggtgattttgaaaaaaattgcagcgattgaaaaacagacagaaatgtatctcgatgagatgcagaaaaaagcggtgatcgaggcagtgcgctgcgggctgcttatcatcaccggaggacctggtactggaaagacgacaacgatcaatacgctgatttcttattttgagtcggaagggcttcagattttacttgccgcgccgacgggaagagcagccaaaaggatgacagaggcaactggcgtagaggcaaaaacagtacaccggcttctggaaatttcaggactttccgaggagagcggtgcggtgggcggttttggacgaaatgcgcagaatcctctggaggcagatgtgattattatcgatgagatgtcgatggtggatgcgtatctgatgcatgcactcctcgatgctgtgacggtcggcacgcggctgatcatggtcggagatatgaatcagcttccatccgttggaccgggaagtgtgctgaaggatatgattcagtccggatgcattccggtagtttccctgaccagaattttccgacaggcacaggaaagtgatattgtcgtaaatgcgcataagatcaatcggggcgaaccggtgctgctcgataataagagccgtgatttcttctttttgaagcgggacgatgcaaatgtgattatcagtattgtgattcagcttgtgagagataagataccccgctatgtaaatgcgaagatgtatgatattcaggtactgacaccgatgcgcaaagggctgcttggtgtagagcggctcaataaaattctgcaggagtatctcaatccgccggatcgcacaaagacagagcaggagcaaaacggcgtactttttcgcgaaggtgataaggtcatgcaggtgaagaataactatcagctggagtgggaaatccgcggccgttacgggattccaatggaaaaaggacttggaatttttaatggagatatggggatcatccgggagatcaataaacagacggaacgcgttacggtagagtttgatgaacagcgcatggtggaatatccgtattccgggctggaggagctggagcttgcctatgcggtgaccatccataaatctcagggaagcgagtatccggccgttgtgattccgcttttgtccgggcctaaaatgctgatgacgagaaatcttctgtatacagcagttacgcgcgcaaaacagtgtgtgacgctcgttggagatccatatgcatttaatcagatggaggcaaatacagtggaacagaagcggtacacggcgcttgcagaccggatccgggaactgtcggaggcaggcggattctgaaaacgatttatgggatatcacatggggaggaaacgtgtctgtacgcaaaatgagaaatcatttatatatcggggagagatacggtatctaagtgagaatcggaagaaaaaaagaaaacgaaaccaattccaggacagggagaagcgctggcaggaaactgcttctgacagcaaagaaaacgggaatccatgcaggaaaactgctgttggatctgctttatccgccgcgctgtccgatctgcgatcggattttgagccggagagaagggctgtgctgcgccggatgtgaaaagaaactgccccgggttgttggtccggtctgtatgaagtgcgggaaaatgattgaacgcgaagaggatgagtactgcgaagactgcagaaaatatgcgcatgtgtttacacgcggtacggctgcttttgcctataccggagcaatgcggcattcggtgtaccggatgaaagcagaaaacaggagagattaccttgatttctatgcggacgcgatgacacaggcactggagccgtatctgatgcgctggcagccggaacggatcatcggggtaccgatgcactggcaaaaaaaatggaaacgcggttacaatcagtcggagctgctggcaaagaaactggcagagcggacagaaattcagatagaaggttcgtgggtatcatgctgcaaaaagacgaaagcgcagaaaacgttgaaccgaaaagaacgggaaaaaaatctatccggttgttatatacttcggaagccggaaaaatgctttcgcagtgtattgatcgtggatgatgtatatacgactggaagtacggttgacgaacttgcgaggaccttaaaaaaggccggagtggagcaggtttactttgttgtgttatgtattggaaaaggcagtggaaatggtaaaaagagagtatgcacggaacagaatgtgtgttatactaaatctgaatccgggtattttcatcaaagacacaggtgaaaatacctgctaaaaggaaaggagagaacaaaatgaacagcctgaaggtatggttggcaaatgatatgtcatggtttacaatgccgaccgtttcaattacgattacagatgtgctggaaattttcattttggcttttcttgtatacagtctgctgctctggatcaaaagtaccagagcgtggacacttctcaagggacttatggtgttggtggtatgcgtatcactggtttatattctgcacatggataccctgatttttatcgtgaatcggggaattgatattgcgattacggcggcgatcgtaatctttcagccagagctgcgccgggcactggaacagattggcgagaagcagatcgtttcttcactgattccgattgacacgggccgcgatgtgacagagcgtttcagtgacaagacggtcaatgagattgcgaaagctgcttcagagatgggcaaggcaaagaccggtgcgctgattgtgatcgagcagaatgtcagactggatgaatacgagaggaccggcattacgctggattccgtgctcacaagccagcttctgatcaatatatttgagcataatacgcccctgcacgacggcgcagtgatcgtacggggcaaccgcatcacctctgcaacttgttaccttccgctttctgataatatgatgctcagtaaagagctggggacacgccacagagcgggggtcggtatcagtgaggtgacagattccctgactgtgatcgtatcagaagagaccggtggaatttccgtggcctacaagggagagctgaaacgaaacattacagtggatgaactgaaagaacagcttgtgatgcttcagaacaagacggttccgcagaagaaattcaggatctggaaaggctggaataaaaatgaagcataaatttaccagaaacatcggactgaaatttttgtcgttgatcgtggctttcctgatttggctgctggtggcaaatgtggatgatccgacgcagacggttttgtttaaaaatatcaaaattacaactgtcaatacagaaagtgtgacggagcttgataaggtgtttgatgttgtggaggacgatgtttacggtgataccgtaatcatcaaagtcacggagcgaagcagtgtgcttcaagcattgaaaacatcggatttcaaggtaattgcggatatggaggcgatcaatgaggttggagcgattccacttcgggtagagtgcagcaatccgtctgttacactggatgaaatggaggttataccgtccgtgatgaaagtcactctggagcagaaaaagcagagtgattttgtggtaacagtcacaacgacaggcagcgttgcaaatggctatgaggtcggtacaaaagaggtagtacagggtaagactgtacagattgcaggtccggaaagtctgctcaacaagatcggaaaagtcgtggcagatgtcaatgtacgcggattggataaatcggttcgaaagacggtagaacttcagatttacgataaaaatgaggaggcattatctgacagccagatggcgcggctgcagatcaaggattcgtccggagtgctgctttcaaacaatgaagtaatggtagatatcacactctgggaagtaatgagtgatattccggtagaaattcgcacgacgggcacgccggcagagggatatcgggtggctggaatttcaacgatgccggtaacggtgaatctcgtcggcacaaaggaagcacttgcaaggctgaatggaaaaattactgttcaggattctgtatcggtagaaggggcgactgagaatgtgtcagaggagatcgatctgacagaaacgttgagtgaactggaaggcattcgtcttgtggcagacacagaaccgacgatttctgtgactgttcagatcgaaaagagcggagatcagacgctggagattccgctttccagccttgaagttcagaaccgtccggatacggacaagatcagtctggtcatttcaccggcggatcagattcaggtgaccgtacacgcagatgaagaaggaacgccggctttgaatgtaagcgatatcaaggcaagcgtggatcttgcagcgtgtgcagaggaaggggtacatgaaattccggtggaggttcagcttccggatggatattcgcttggatcgccggtcagtctgatcgtgacttctcaaaagattcaggaagaatcacaaacaggaaactgataaaactgcaagggtaaaagtaaaaaagaaaataacggatctgacagacattggagggacagcagtggtaaaaaagaaggtgaccgtaaaaagcaaagccggactgcatcttcggccggcacgagacctttgcaagaaggcgatggaatttgaatcaacacagatcatgatccattttcgggaaaaagagttcaatgcgaaaagcatgctcggcattttgagtgcctgtgtacagcagatggatgagattgaggttgtctgcagcggagccgaggaggaagaggctgcagcggcgatccagcagctgctggagacggaattaagcgggaacgagtgattgttctgcgcgacagagaagaatgcaatggatatttacacaaaaactgcaattgggacggaaggcagtttgctgctcacgcacatgggagcaggcttgctgtggcctgtgaacatttgatttacagccgtcagatttggaagagaataagaaaaatgaaaaaagaatgattctgcagtgaaacagaatcattcttttttgtaatgtgtcaaactcgtttaccgtacactgtacggatttacgaaagtatccgtcggatcccaggtctgaccgtttgtaatctttggaacagtctcacgcgggataccgttggtcggctttgcgatgctgtcgcgaatcgttacctgtgtgccaaccggaatattttcgaacagccactttgcatgtcttacggagagacggatgcagcccgcagatgcctgcgtaccaagcttgttgtactcccaatactccagcgaatacgggtcattgtatctggtattcggaacagagtggaaaaggatatcgcttgtaatatgagaacaatactgtccccaggacggacccatcagctcatgccagtacagcttatccagaatggtaaaagtgccggatggtgtgctgacaccgtcgcgtgaggtggagcagacaaaccattttaccggaacattgccgcggtatacaacgacagaacatggggtccttcgctgtacttcaacacgccaggtaccagttgtcgggataatgctgatcgctccgcttgtgccaaagtcataaacaacgccgtcgatcgtgtgacgtccggtatacatctgtccgctctttggatcaaagtaatactttctgtcattttcaatgagccagccgacatgacggtcaccgcgcggtgcgttgaaataatacgtgtatccgcccagcttcagccatccggtaagaactgcaccgtaagacttatcattttgattcgggttgagatagaagtactttccattggaatatttcagaccggtttccatggcaccggtttttttattgaagaaatattttctgccgtcgatattctgctgccagccgtaaagacgttttccagaagcatcggaataataacgcttgccgtttgctgtgatccagccggtctgaagaacaccgtccttgtcgaagtagtaataattggaatcgatgttgtaccagccgttttcggtacgtcttccgttctttggattgaagtagtacttgccgactttattagagtagcgggcttttaaggtctgccagccggtcagctgtttataatcgtcaccaaagtagtaggtataattgtttgttgtgatccagccttttcttgcccagccgctctgcgtattaaaataataactggtgccgccgacaaaaacacggcctcttttctggatgccggttgcaggctgaaaatagtaaagcttgctgtttattgtctgcagaccaacttttaagatgccgttgttgtctgcatagtaataatttttatcataggtggatctcacgtaaccggtaatacgtccctgtgtgcgcgttacgtggtaaagcttgccaagtacgcggatcgtaccgaaattgatcgctccggtttcgtctgcgtaataccacttgccgccagcttttgtccactgtttgcgggcaacgcgtccgtctgccgcagcgttgaaacagtaataagtcccgttcgttccgccgagccgtataattccggctttgccggtcagcagccttccgtttgcgggattaaaatagtaggcattttttccgatctgtacgacaccagtctgacgatagccctgcgtattgaaataatacgtatatccgctgatctgctgctttccggtaactctcctgccgtttttgaggtaatacataccggtggcatctttctgccatccattctgggcagctgcctgtacggttgcagcagtcccctgcggcaggccggttacggaagctgcggcaggcgcggcgatcacaagaccggcagccaggcagaaggcagaaatcatttttttgattgtcatggttcttctcctctccttcttgtttcaagtatcattcatttagccagaaaattctatgattaacagacttttcctcttgcaattatattcgttgaaagaggtaattgcaagcaatcaattcgtaagaaaatattaatattttgaaaaggttttaaaaatgcgcctcagtcaaataaaagccaaagcggatattcgcaattcttttgctacttgacccggtaaatcaggaatctccggtttggcagttgtcaatttacaggaagtgctctataataggagaaataaagcggctgtttgatttgcagtaaaacgcctgttggtctgaccgggtcaggcaggtttc

SEQ ID NO: 2606 - DNA, 26909 bp, Unknown
  16S sequences of unknown bacteria
gagctcatcgcaactcgcgcgctttacgaagaaatacagagcaaatacagcgctgcagatcccggcagcacaaagtacaagatcaacaaaacagagaaaaagggaaacgacacggtcctgtacggaaagctgtacctctacgataagtacggaaaatcgactaccggctattccgacggttccggaagttatatccgctcctttaccgtcgagatcgacaacgataccggcaaagcggtcagctgtacgataaaataaaaatacagaacgagaaactgaaaaaagggactgatattctccgtcccttttctttttctccgttcctaaaatcgctgtccgtttcttctgtaatacctcccgctcgcacagaacctctcaaaatccgcaggcatgcagatcctccaaaacgatagagtcctgcaaaactttcacctcctggcgcccgctatacctgttccagatattctttcagacccgccttccaggaatcccgcacatcggcgccggcagagggagcggaaaaatgatatctctgtttcagatactcgcccagataatccgtcactttttccgcacccgaaagattcagatgatctcctccgtcataactgtcggtcttccagtcgatcttcaaatcctgtgtcagcggattcaggtccagaaagtcaatcccctcctcccgcgcgtattccgatacaatctgatgcttggccgcattccagtttttcggggaaggcacactcaaaaggagaagctgactgccctcttttctacaaaacgattgtatttttttcagataatggcgaatggaaaagacgaggggctgcggctcccctgcttccatacagtcggtgcgctcacacggccggcagcctttcctgatctcaaaacccctccaggagacttcgtccggcagaatcacagccgtctttggagaaaagaacaggtctttccaacggttgtgataggaaaacaccggaacataatattttccggtctccgtaacggccatccgcagctcttccaccagatttgcgtgggtaaaaagttcattggtctccaggataaccagatccggccgttgtttttgaaatgcgcgcttcatgaggtaatatgcctcgctgatctgctgacctgtctgaccgcagacataagatgtgattttctgtttttcccacagacggtacggtgagatcgaggtaaagctctcactgtcccccagcaccagaacgtcgatggaattctccggctcgttcaggacactcagcgcgttgcggtcccggttgtcgatccacgaagcgtctgtaatcctttccggctgtacaaaaatagaaacgacgaagagcagcgctgccagcgctgctgcaaatccaaaaaaatgttttgcatgttttaacatctctcttgccccttgtgaaaataaaaacaaaatgaattatttttatattaagtatcttacggggcgagacaaagatcaattaaataattcttaattttatcgaattcgtcatatttcgcctaatccacaatcggaaagaaaatccgcatttcaaaaccgtttccccattcggaatgcgcctccaacgtcaaattcagatctgccgcgatctgtttcgccagataaagacccatgcctgtggccttctgccgcatttctccactgtttcccgtgaatcctttttcaaagatataagggagatctccgcttctgactccaatgccgtgatcacggatacagagcgtataaccgttggcttccgccgacgacatttcgaccggggcaacctcaggagcccgtttttcctcaggccgctgtattggcacggtctcccgcttcagttggatctccagccgcggccgatccgcttcaatgtttgtcagatcacacgcgcctccatatttcaccgcattgctgatgatctgacgcagcagatagctgcagccgcgccggtcgctgtatacgctgattttcggcaggtcgttcaccacgttaaattttttctctttcagcagaggagcataatcctgcaggactccctctacacattccttcagatctatcagttcaaacagataatcccgacgggccgacttcagccgggcgtaaaagagcatctggcttacggattcctgcagaccgtttcggatataatccagcttatgactcacctgtggcggcagctctcctccgcgattatccagcagaaaagtgagaagagaaatcggcgttttgatttcatgcgcccaggcttccacgtattcctcatagtccgccacccggtcggaaagccggttctgtacgtcccgctgtttccgcatgacctctcccgtcatgcggatcagctcccgctccgatgcgcttaaaaggcggcagatcctctcctcattgtattcatccggattttgcagaaatctcacaaaggccctccttcttttcttttcctgaaagagaagaaatcccgccgtcgcagaaaacagcagcgcagaagcgagaataatgacgatcagaagagaaaaaaacgcctggacatcagcgatccacagcatcagcgccgcaaatccatcgacacacagcaaaagcgttatccatggaacatattttccgaggattttcatctcacttttctcctttctcaccgcaggccatctgcatctgcctcccggtcattttccccgtctgcaagattcccgcattcttcggccccggcaagccgatacccgacgccccggacggaaacgaccctctggcgcatttccagtttcttcatcgtcttcttcagccgggtcagatttacctgcagagcgttttcgtcgataaattcagaggttccccacagagcccggcagagttcttctttttccgccgcttctctcccgtgcaggaggaagacctccagcagacgcccctgatttttcgggaggacgacagactgattgtgaatatacagagtataggtatgccgatccaaaagaaaatccgctcccgcgaggagatgaccgcggccttcatagcggcgcagcagatttgagatccgtgccagcagccgttcttttctgcagggtttggtcagatattcatccgcgcccagatccagcgcatgaagttcgtcctgcatctgatctctcgaagtgagaatcagcacgggaataccactcttctgtttcagttcccggcagatctgaaaaccgccggcaaagggcagattcagatccagcaggaccagatcgggagcggatgagatcaattcccgcgccgcattttcaaaagaaatcacagattctgcatcatatcccgctctgcgcagaatttccgtcagttcctctctcataaaaatatcatcttctaccacagcgatccgcttcatccggatttcctcccttcccatcgtctccgatcttctcctgtcgtatcatcgtctttctttttcaaagcataataaggcatacccgcagatctgcggtcttttttctatgcgcccgcagacctccgcgcgccgcatcgtcagactgtatcgaaaaaatcgtccgcagaatgtgttttttctctattcttcccgctccggcaccatcagcgacagcagatagcgattgctgtttctggcaaccgccgcgacataagcaaattctatcagacagaggagcagaataacagcggcagccgtcagaagcagagaagacatattgtcctgaactcttgaaaagagcagaccggcaaacagcgctcgtacgccgaagatactgctgaccgcagcaaccgcacatggaatcccgaaaaaatagcggatctgccgctttgccgaacggcacagcacctcataacccgcacccagccggatcaaagtgcggtaacgccgctgcgctctctgctgcaacgtcaggaactgcacgccgatcactgtgttggctgtgatcagaaaaataaccgccagatagatggtgagatagctgatcgctaccatgtaaaataactgacgtcccatattttgaagataactttcgtattgaatccccgccgcgtccagtttttcattcacaagagaaatggactgcatcagactccggtcttcctttatttccgaactcagtataccgtcccagtaaacactgtgccgcccctccgtcagccggtcaaatgcctcatcgctgaggatcagagcgaaggacagtgtgatcgaacggtccaccacgatatcggtattctgcacggatcctttcagccgccatttttctcccgccagttctactgccggactgcccgcgagcgcccggtttaatatggtattgtactccggttctgtcatctctgagtcgatataaaccgccgcttccctctcttccagtttcagaggctgtcttcccgcggccgtgagaaggcggttgtatccggacagagagatcaggcggggatattcagtatagctgagattattcagaacaatctccttttcctccgaatccggttcctgccgtatagcatccatcacgctctccatagaaaatactccccgaagatcaccttcttcccggtatacgtagccggtttttatttcaaatacctcgtcaaacagccggttcagatttttctgctgaagctgctgctccacggagaccggcacttcattctgaggaaacgtatagtccaaaacgtgttcttccgaagttccgtaattgtgcgacatcgccgcaccgcagctgaaacagcacagcgccgcgaggattagaagagagctcaccgccagcgcaccggactggcgcatcacgttttcttccagctgacggaaagtaaatatatgaagccggtccgatcttcctgcacgccgcgcaaaaaaatccatcacagtccgcagtccgtaaaaaagcagaaatgttccgcagactccggaaatcagcgtcagacccattcggaagaccgactgccaggaaaatccccggatcgccagaatatacgccgcggttagcagcagaacgcccgacagcagaaccaaaaggcagatggcaggcgttctccgcgttttgattccctccggcgcgggctgcagcagatctccgatctcctgatgtgcaatttttccgctgaggatgacaaacgccgtcagcttgaccgccacaaacccgacagccgtccacagaaccgcttcccaggaaaggctgatctgatgagacagaattccgatccccacaaacctcgcggtgatcagacttgtgagctccgataagaagaacgctgtaggaagtccgacagcgagagccgcgagactgcttcgcagatcctcggacaaaagcaggaaaaagagtttctttctgctcattcccatcatcagatagacgccgaattcatgacgacgtcgttccagctgatatttgctggcataatagaccagaaaaaagacaatcagaagcgtcaggcagtaaaataccgggacaatcgtcagcagccggttcaccgcgtcgctttccatctgcttcagaaatcgcatgacatcctgctgcgacaaagaaaggatgatataaaaagcgataatcgaaatcagcagagagagaaaaaacagtccgttttcttttcggctccgtctgctgttccgcctgaccagatcaaagaacatgggcgcttcctcctcccagctgagccgtcaccttcagaatccgttcgtaaaacgcttcctgcgtctcctcggggaaattcctgcggagttcgtgaaagatgacgccgtcccggataaacagaatccgccggcagtaactggccgcggcggaatcgtgggtgaccatcagaatcgtcgcgttctgcttccgggaaagtcccgacaatttcttcatcagagctttcgcattcttcgaatccagcgctccggtgggctcatccgccaaaatcaccgccgggttcagaatgagcgctcttgcagcggcgactcgctgtttctgtccgccggacatctgtgcgggaaacttatccaaaacatccggaatctccagatacgacgtcagctcctccagtctctctctgcccgcctgcgctgaaactccgtgaagggcgagaggcaaaaggatattttcccgtcccgttagattatccagaagttcgaagttctgaaatagatatccgattttcttcccgcggtattcggcaagctccgcccccttcagcagatgcagcggcgtgccttccacagccacgaaaccgctgtccggccggatcaccgctgcgatgcaattcagcagtgtagactttccagacccgctgctccccataataccgagaaactcccccgaaaaaacctgaaacgagataccgtccagtgctttcgtctgattttcggatctgccgtaatacttgcacagattcccgacctctaaaatttttcgttccataaaaaacacctccctttttgatgatcccagcatagcacagatcaaatccgaaaaacacttacatcggatgaaaggaagctgaaacggatccttgccgcgaaagcagaacggcacagcccttcttcgataaaaagaaaaatgccgcccggcatcggagaaccatcccattcggaagcgatcgaaatcatactctgcactctcccagatgtcaggtcatctccgcctccggcggcatttatacagcacgaaaccgatatccggcacatctctgtccggaaagaaatccgctgtttgtccgtcacggatacgccccggcagccgcacggatttcatagaaccgcactgtgaaattttacttctctgaaatctcctccgccgcatcacgcgcctgctgcagcgatattccctcttttgcggcaatccgcgccagatcgtcgtactccgcttttttgcgccggatcccccagccctcggcatattttacccgcacggaaccgtaggaagtctgcacattttttaccgaacgatccaacgcgtagcggccgcagatattttcccggacgcccagcgtagtggtatgctgaaacagcagacgaatcatttcgtctctctgctcgcttctgcaaacacaggtgaagagaattcccggacgattctttttcatccccgccggtacagtatatacatccagcgcccccgcttcaaacagccgctccatagcgaagcccgcggcttcgggagacatatcgtccagattgcagcagagttccacgacactctcctgctgctcctgcgtctgcccaagactggcccgcacacagttcgtccgggcgaaatctttcgttccgcagccgtatccgatcttttccaccctcatcaccggctgaggaccgaactctttcacaaagtatttcaagagagccgctccggtaggagtgcagagttctccccggatttcgcttccgtaagtcggcactcctttcagcagataagccgccgcaggagccggcaccggaaggattccatgggcgcagtgcacgtgaccgctgcccacattgacaggtgaagctgcaatccgttccggcgccagttcgtgcaggagcatacataccgccgtcacatcggccactgcatccatagctcccacctcgtgaaaatggacttccgtcaccggtttgtcgtgagcggcgctctccgcttccgcaatcagacggtacaccgccagtacatctctctgtaccgcttcaggaattttgagatgagagacgatatgctcgatctcaggaagatcggcgtgatgatgaccgccggcggaatcgtgatgtgcatgatcgtgtgcatggtcaggatctgcatgtgtgtgagcatgactgtgacagtcatgctcagcagcagaattgcgatgcataggattgtgtacgtgaccggagccgtcatgcggtgtatgaccgtgacggtgatcatcatcatgtgcgtgataatggccgtgtatatgttcgtgatgctcttcgaatccgaggacgtcctcactttcctctctctgtccgtgaaccgtcacagagacatgagttccggcaattccgcatttcatcatcttctccgctgtcaccgcaactccgggaaggccaatgtcattgagacgcctcaaaaaatcccgggaatcggggtgaagttccaaaagggctgcggtcagcatatcccccgcggcgcccatgccgcattccagatagatagttctcatcgcccgcctcccatatgatttatcatactcgcctgataggccgctccgaacccgttatcaatatttaccacactgacgccgctggcgcaggaattcagcatcgaaagaagcgccgaaagccctccgaaggaagcaccgtaacccacgctggtaggcacagcgattaccgggcagtctgcaagacccccgatgacgctggcgagagctccttccattccggcgatcgcgatgacgacactggcggacatgatatcgtccatatgagccacaaggcggtggagccccgctacgcctacatcgtaaagacgaaccgtttcatttccaaaagcctctgccgtcagagccgcttcttccgctacaggcatatcgctggtgcctcctgtcgcgatgacgatttttccgcagccgtcaggttcgggaatttctccgacgatgcctacacagctgacctcatcgtactgaagaggcagccgttccgccgcataatccgcagcttcccggctcatccgcgtgatgagaacggtcctctgcccccgttttctcatagcggcggcgatccgggcgatctgctccggggtctttgacgcgccgtaaatcacttccgcggttccctggcgtaccgcccggtgaagatccggtttcgcaaaaccgagatcctcaaaaggctcctgccttaatctcagcagcgcatcgtttaccgaagcatctccgtctgcaaccatctgcagcagatgaatcaattctttttgttccattagcgaacctccatatccagtaatattgtataaaaaaacggcttcacagcttcacagattttttcgcggttctctgcggcgcgaagccattgtttctccggaaactgcagccgcgccgccccttggcagaccctgacccgataatccgaaaaccccatctctgccagcgcgctttccgcctgttctactttctgaaggttctcttctgtcagtccggttcccgtgggaaaacgagttgcgagacaggcataagacggcttattccaggtgaaaagccccgcttccttcgaaaggcggcgaatctcctcttttatcagaccgcattcccgcagaggggaacggatctccagctctttgagagccttcattcccggccggtctccccaatcatcagacgcattcgttccatctaaaaacagagaaaaaccgtcggaaagagctctctgcttcagatggcggaaaatcgctgtcttacagtgataacagcggtcagaaggattggacgacacctggggatgagataaaatatcgtattccagcacaatcaggcggaccttcagctctgcggcgagacgccgggcgtctctcagttcaaattccggctgaaaaggcgtctttacaaaatacggctgaacctgcgctccgtttctcaccgccgcgtacagcagataagcggaatccactccgccggaaaatccgagagcagctttcggatgaattgaaaaaaactcgttcagcgtcatcgatacctccatgaaaatttacggataactaaaataatgcggccggatccgcagaatcagccgcatttcaatcactgaaaactctaatcaggctcgccgcctttttccggtctctcgcccggcagcaggagcattctgaagaaaacagacagagatcagcgctaccgcgctgtattgaaatcaatcgttctcatactttttcaagcgatttcgcttcggacactgctccgattttaagcaaacgattacggcagaaatgttatgctgatatcttatcacattccggcggtaccgtcatcttttatcaccattatccgagcatagcggaaaaatccgccatcgcttttgagatcttaatctgctgcggacagacttgttcgcagcttccgcatccgatacatgcccccggctgtttctcctccggcacagccatcagggccatcggcgcgataaaaccgccgccggtaaatgcgtgctcgttatataagtccagcagcataggaatatccagattctgcggacagtgagacgtacaataacggcatgccgtacaaggcagggcgatctttttgaccatctcctccgcaatcgacagcagagcatccgtctcttcggcagacagcggcttttcctccgcaaaggtacggatattatcccgcatctggtcaaaattcgacatgccggacaacgtgacgacgacattcggaagactctgaaggaaacgaaacgcccaggccggaatgccttcctccggacgcagccggtgcagcgcagcgctgtcttcttcactgagagacgccagactgccgccccgcagaggttccatcacccataccggaatcccgtactcctccgccagctccgctttttctttggcgccctggaaagtccagtccagatagttgagctgaagctggcaaaactccatatcctcaccgtaagcttcgagaaaacgcttcatcacatcgtaatttccgtgagcggaaaaacccagatggcggattcgtccgttttctttctgtttcaccagatactcataaatcccgtacttcggatccagataagcgtcgatattcatctcacagacattgtgaaacatatagaaatcaaaatattgtacgccgcattttttcagctgtttttcgaaaatctcctccactttgtccatgtttgagagatcgtagcccgggaacttggacgccagataaaaagattctctcgggtaatttcccaggatgcgccccatgacgatttccgaattgccttcgtgatatccccatgcggtatcgtaatagtttacgccgttttccatggcataggccaccatttccgccgtctttttttcgtcaatctccgcgtctctgccgccgattaccggcagacgcatcgctcccatgccgagagcagaaatctcaatatccttaaatttcttataaatcatatcttctccttcattacagactatttttgttttgtctcgtcctccgctgcattccgaagaaccggataaatactccgaagaccccttgaaaggctacagaacgctgtattcttcatccgtcaccggttccagccactcgttgccgcagtcctctccgggaatttcagccgcgatatgactgaaatagctgtccgcctttgctccgtgccagtgcttcacctccggaggaatcgtgacgaccatgccgggctccagactgactgccttcttcccctcctcctggtaccatccgctgcctgcggtacagatcagcaactgtccgccgccgctcttcgcatgatggatatgccagttatttctgcatcccggctcaaaagtcacattggccagaaatacagaacaccggctgggatccgtcagaggatttaaataggattgcccgtgaaaatactgggcgaaagccacattgggatcccccgtaccgaatatgttttgtctttcaaattccgtcttatctgcaattttcataaagctcttttcctcctgtttttctaaaatgtaaatatatagcacagctgccttctgatcatgtatcttggatttcccggacaagccagacgaccgccgctttttttcctatcggggaatcttttatttccgcccggttttaattatatatgcgaaagcagaaaaatacctaatacttatatggcatcgtcggttatagcaaaaatgcatacccctataaggcgagcgctttgacacacgagcacattactgcaagtccccaggccccactattgaggaaagacctctttttcatcttctctcagccgcctttttctttccactccgtctttgcatcgccttcgttgcatcgtaagccagaaacacaaacaggcccataattgcagcgtattctgtaaaaaacagaaaggctggccgttcaaagtcaaaaaacacaaaagaagatgtcaggaacatataggaaagaaattgattcttaaagaacgcatataatccatatacagcaatgcccgcgccggcggtccgcaatacaatttggaccggctttgcagttttcagttttacgcggtatccttgctgctgcaaagcctcccggttttctttttctcacaggcccagcccggcgacccattcctctacatcccgctgtgcatcgggaacgctgtttctggatagggacaaaccatcctcaatgaccgtcgcgcccggctgtatttccgcaatcgtgcggattgttccggaaaaaccgcttcctccatgcgtggtaaaggggataatggttttcccgctgaaatcatattcctctaagaaagaatacagcggcataggaagatcgctgttccagttgggatagcctaaaaaaatcacatcatattcgtccagattctcaatctttgaggaaagtgccggtcttgcattgtctgccttctcatcataggcaaaatccaaaagcgtatcatggctgcccggatattcctgctccgtttcgatgcggaataaatctccgccgctttgttgctggataagctgagtaatatactggttatttcccagcatttcaccgtctgccacaacccggctggctcccgccacggtatctacaccgtctgtttcagggacggagaaataggcaattagaatgttgccggaagggttgctctccgcagaagatgccgcttccggagaaggatctgtttgtacagatgcgggaagcgtggtgctttccggctccggattgctgctacaagcagccagagaaagaatcattgtgacagaaagaagggtagctgcaaatcgtttcatgagaatatattcctttttgtttgatttttatatgttaaaagacgttttgccctatctgataggcttcatcaaatgctgcatttttttgtacatcgccgatcttccagactcctgcgccatagacaacgcccatttcttttgctccgggcagacattccaagtaaccgcgcagaccgtccaccgtccgttccattgctgctttcccgtcagcggcagtagcgatcagataaaattccttgttttcaagccccggtgtttgcgctccgcccaacgtgcggtcaatcatagttttcatctgcgcgcacatcgtatagaaatatacgggcgtagccagcacgatcacattggcatcccgcattttttcgattatctgctccatctcgtcccgctttacacagcgccctgttgtcttgcaggcataacaggccgagcaataatcaattttcaaatcagcaagccggattttttccacccggtttcctgcctccgccgcgccttttagaaactgatcgcatagggtatctgaattgccgcccttacgggggctggatgaaataatcagcacttgtttactcatttaagttttcctccatttcttccggcaccagttctaatgttacagcgccgggagtattgtgcatattttctgttcctcccgctgtacagccgctaaaataacggcacagcccattactgctgtcagagaaagtgtaagcatcctctttcacataccgcaccttctttctattctgatctgtctactgtataaagcagccggattccgtcctctttcagcggctccgcttttttcagatgaaaccccaccggcgcactttcaggaagaaaagctgtccgtgtaaatactgacgaggcatccgggcgtattcctcgctgacggcctgtgcctgaggcgttccaaaggagcggcccgcgatcttgccatccagcatacttaaaatgtgacagataatgtatggtcgtttcatcatattctcctgtttattccataaatccattatcagacagatacctggaaatgctttctgtatttgatgctcttgtaaatagcccttcatggacagcagcattcgcggcactgttccgcacgaattccatcgaattgtcgaattgttccgtgtccattgacgccgactgtgtaaacggataaatgtctacgccagaaaggtcatagctttccagaaatgttccgataatcatcggggctgtgtgccaccagattggataaccgataaaaatcgaatcatattcttcaatggaatccggcaggtttgcaatagctggacgagcgtttgtatcccgttcttctcttgcaacatttccagtttccgtataatcatccgggtatggattggaaggctcaatttccaacaaatcagcgccggtctgctccgcaatgtaagaagccatttcttctgtagttccagaccaagaaaaatatacaacaaggctttttccactttgctctggaatatccggcgtttccggtgctgtttttgtgagataacggtacaacatggttactgcttctgcacgagttgattgtcccgccggatcaaagcgattttcactttttccggaaacaatatcattttcctgtgcccatgtaaccgcactctttgcgtaatccgcaatttcagaagaatcggtaaacgagatattatttgctgtatctatgctatcgcctttataatcggcatagcggtaaagcatggtaacaaactgctgacgctcaaccggatcatctggcccgaatcggttttctccataaccggaaacaatgccgttttcggcagcccaaccgatggcgtttgcataataggaatctgattttacatctgaaaatgtagaaggtgcaacttgcggctgtccttcatttcgccagagcatcgttgccaacatcccacgacttaaagtcatatcgggggaaaactgttccggtgccgtgccggagatcaatccattttctgatgcatatgtgacagcttctgcatagtaggcaccttctgacacatccgaaaatccacttgcggccagagccgttacagaatacgtcagcatagccgctacaactaaaatcattgacagaattgatcttaattttttcatgaaaattactcctttctaaaaacaggccgtccattctatattacaaaatcagttcgtcagcaatccattttcaagcaagtaagcatcaatgccgtctgtatcggattcactcacaaataaaccgtcatgaacatttgcgtttgcggcattttccctcacaaaatccatcgagttcttaaactgttcggtatccatcgaagccgactgtgtaaagggatagatttcttttcccgtcaagtcatagttctccaaaaatgttccgataatcatcggggccgtatgccaccagatcggatagcctactaaaattgtgtcgtattcctctatagaatccggcaggtctgcaatctccgggcgggcgttttcatctctttctttttccgcaatatctccggtttcattgtaatcatccggatatggcgttttcggctctatttcaaaaagatcgccgccggtctgctccgcaatgtgatttgccatttcctccgtatttccagaccaggaaaagtagacgaccagcgtttttccgtcatccgaggatgtttccgcttcggaagtttttgttgcctgtgattccggcgcttcactcctggtggcggattcattggaaggtgtgctttcgctgctgcttggtgcagcctgaccgcaggctgcaagagaaaagatcatcatgaaggccatccaaaggccaagtgtctttttgaacatcgtaaattcctcgctttctatttactcaaagtttaaatttaattctgacaaccatatatcaatccggctcgtactgctgattctccgttctccacagatcgccagccttcacaggaatttagaaacgttggcatcacttcaccaatatcatttcctccgctggtgcaaaaagggataatcagctttccgtccagagtacagctttctaaaaaggtgttgcttgggcaggtgtcgcgtgccaccataccgggaaccttacaaaaataatgtcataggaatccatatccgaaaccgtcttattaagctctgatctctcatttcttctgacttccgagtaggactgcggtaaacaatggccgggtggcggtagacattgtatcctgcaaaagcagaacagcgattaacataatcacaaatatcaaaataccgcacctcctgtatttcatccgcttgctccctcacacacattccatcaaaatttcataaatttcatctttgcttaactctctggggccgcattttataatatttacggtatccgccacctggcgcagcagatcgggtgtaatttcaaccgcagatttcaattccctcattgtagtcggaagcccgcattttttaataaaggcctctaatgctgataatccggcttccgtactgtcttcgtcaaaaaccatgcgggccagtcgggtgaatttttccggagcgtctttcaggatatgtcggcagtataccggctgaattactgccagcccctgtccatgattgcaatctgtgtaagctccaagctggtgttcgatctggtgcacctgaaaatctgtgagccttccgcatttcaaaattccgttttccgccatagccgaatcccacatcagattgcttcttgcctgcatatcactcatatctgcaagcagtctcataacggccagcgcaaggtcgtccgacacattatcctgatcggaatgcccaagaaaggtttccatcgcatggctgaacgtatcaaaggcgccggagagcacctgcatgggcggaaccgactttgtgtatgccggatcgagtaccgcaaaggatggagcggcggcaaaaatcccccctttccattttctttaagggtgataactgcgccgctgttcatctccgcgcccgtaccggaaacggtaacaaccgctccgagcgggattccctgtaccgggaattttcctttcacatattccagctcccacagatcttccgccagcacggcttgggcggaaaccgctttgcagcagtcaatcacgcttcctccgccggcggccaaaatgaaatccacctgctgttcccggacaagcgctgcaccttcctgcacttttgcgtaagttggattcgacgcgataccggaaaactccacaatgttttttcctgcctgcacaagcagcccacggatttcatcgtagataccgttcttttttacagaacctcccccatatgccagcataaccgtattaccggtatgggcaagctctaccagaagcgcttcctttgcactcccttcgccgaaatagacttttgtcggataagaatatgtgaacttattcattgtgacacctcctcgtttcatctcacaaaatttgtcaatactttttcgttttccggatgaccgataccattttcttttcccaaagcgaaacatttcagcatccacgccatgttctttccaagattgtacatcgtcatcagcccctctctgtcctcggcgacctgctccggctgcgctccgtagacatgattccagtaagtcgaagaaaccactggcatggaacagattgtaaagtatttattgatgacatcaaatgaggctgtcgtgcccgctcgtcttgccgagagaacagccgccgccggcttgtattgaaaagctgttccgccggaataaaaggctctgtccataaaagtcatcagtctgccgctcgggtgagcgaaatagaccggagaaccgaagataaaaccgtcggctttttctgccttctctacaaactcattcacaatatcgtggtatacgcagcggcccgtctccttgcatctgcgacaggcaatgcaatccggcagcgcagcatttccgatgaaaaaccgttctgtttcgatcccttcttcctgtaaggagcgttcgacttcctgcaaagctgcacctgtacatccattgttccgcgagcttccgttgataagcaataccttcattcgggagatcctccttccactcttgttatgttctgtttttcatgctataatccgattgtttcaaccgcttgctgcaaccgattataatttgcggtagtaactatcggtcaataggctccttaaaaaaatttcaatttatttatgaacgcaataggaggcgattataatgtatacgatgatgcaggtctgccgggaagtggatatgacttatcagactttaaaatattactgcaatgagggactcattcccaacgtaaaacgcgatggaaacaaccgccggatttttgatgagaaagatgtgaaatggatcaaggacttgacttgtctgaaaaaatgcggtttgagtattcaggaaatgaaagagtatttggaattgtgtttacagggagagtccactattcttcggcggaaacaaatgctaactgagaagcggaaagcgctgaaatcctccattcaggagttggaagacagcgttgcgtatatcgactggaaacaaaatttctacgatgaagtgctttcgggagcgcggccttatgtcagtaatttaatccgggcagcagaataaagaaaattcaatcgtgacaaaaagaaataccagccgaatcacggctggtattttttgcttatgcagatatcaaatattcgatctattcaacgagcatttatagacagtaaattgatcgccgggcgaaaggcgcgaaactcacggctggtacagcatccgactgtccggccttgccgcggcgccatttcagggccgcacgagaagtcacgcggtatgctttccccccccctaaaatacaaaaacagctttccgaaaaagaaaactgtttttgtatcaaagtttatcctttgtcatcatggtgcggtcgatgggacttgaacccatacgcccctcaaacgtgcctgtctgcctattccagcacgaccgcaaacaacaatagctattgtagatgattatgaaaaatctgtcaatactttttccaaaactttggtgaaagatccgcttcatatttccggatatcgccggcttttctatggatacggtcttgacatgaaacttttcccgccctattattttcacagatccatcgaagatacagaaagacagattttcaaccatatctattgagaaaggaacagatccatgacatctccacaacacgctccgtccatttctttccctctgagacttgcgatttatatcgccggcggaatcattctcgctctcggtatcacactaaatacaaaaacctgtctgggcgtctcgcccatcgtttcggtgccttactgcatcagcgttctcgcccaatttcctctgggaattctgacatttctattttacggcttctgcattttgcttcagtttcttctgctgagaagagaatttgaaccgatccgcctctgccagatcttcatgagctttgtcacgagtctgtttatccaggttttcgatacgatactgcctgtgccggaaccgctgcctttccgcctgctgctgctaaccgccgcaattcttctgaccggtatcggtgcggcgatgacagtagctatgcagatctgtcctaatccggcggacgggctggcggaagtcatcggcaggaagtgcggaaaaacgttcggattcggaaaaaatctcttcgatctcatcagtctcgcgatctccgccgccatcggactcatatttcgccggcagttcatcggaatcggcgccggaacgattctcgctatgatcttcaccggaagagtcgtggctctgacgcagaaaccgctgaatcggctgaatgaaccggctgaataccgtaaaaaatgctgacctcttttctccggacaaaaaggagatctttcagctgccgcagcgttacagatttcgcgttcccttcgctgcggtctgagctcaacagcctgtcagcagcttcgtcaaatcctcgacggaaacgtccatcctcactgacacctcttccaaagtcattccagaatgaagaaaacgttcgacgactgtcttcatttcttctccgacttcgatcatatgtccgtccagatcgtaaaatcggacaacccgctgaccccagctgtgctcgacaatcccgcccagctgttcaatctcgggatattgtgccagcttatccaaaaacccgtcaaaatcctgttcttcaaaacagatctccgcattatttgtttttttcagaatctgttctttcggcagaccgacgagccagtgaaaattctgctgcagagccaaaccgcaggtgaaagaaatattgataccgtaatcctggtacaactccagtccaaacaaatcctcataaaattttctcgcggcatcgatatccgcaaccgataaaacaacacacgtatatctcattcttcaaatcctcttctgcttttttatcctcgttttcttcactctgatccatcccgctttctgatgaacccatttctgaactcattatactacagcccgctgtttttgtatccaaacaatcatcttccggaggatccgccccctgctgaaatgcagaccggcattttccttcgccgaaaacacgagcggccggaattctccgaaaaataaatcatccggacccatctcccacaggaaatgagtccggatgatattggtttggtgcggtcgatgggacttgaacccatacgtctgctgacacacgcccctcaaacgtgcctgtctgcctattccagcacgaccgcagatattctatttcgcgcctcgttcgcaacaacaatagatatattacacgaatctcatacttttgtcaatgtttgaaagtaatttttttcatttccttgtacagtaccgcaatacacagatgagaccggcggaatgactcgaaatagaaaaaaattccttccgagccgcaattttatgacgcaaaaggagtctatccggaaagaacagacaaccgatgccgtacgcctccaggccgtctcctcacacattcgaaaagatattttcaattgtcaatcttccacgtctactctttcgattttaaaaatcaccggtctggtaccgtcattgcagcaggcgatcataaccttatcgtcgtttgtccagccgtgcataatcgcaccgccctggagaccggcgtagatatatctgctgatacaatcccatgcttcagagcagaacggcacgcctgcctctccgcagtgcatggttcccggagacagcaatactccctcatccggcgtgccgctcctgatcagcgtacccgcacccatgtgccaataatcatcccgttcatcattacggcagaacagaaactcatcccccacgttataacacggacatttcccgctgtccggcacggcgcaatactgcgcctgcaattccgggtacagtttcttatctataacggtcactttcactctgtattccatcgcaatacctcccctttcggtttatatgtattttctaaatatctgcttatcttttaattacgccatctgtttccccgccagactaactgtttcaccgattcctgtcctcaaaggaagcgcccttttgcgttctctgcatctgagaactctgttttctgcaaaaaaagaggatgcttttcccccgctgccgcttctgcacgacatgccgcggtttcaaaaagcatccttgtattcgaaccgtcgcagcgcccgggcagcctgcggatcttcagactttctgacgctgtccctctgcagaattgactgatttcgaaatcttttacaggcggaaaccaccgccgaatccatttccatcaaatccgtcgaaatctcccgtccccgggaatccgtcgccgccggtgaggggatagatcttttcttccggcacgccttccggtctcatcttattataatattcgttaaaagcgcgctccgcatcatactcgtttttggcggtatataacacggcgatgtgctccgggtcgtcgtcatagataaacgtgatctcattgcagagaccgtaatcccagacgagagtacccggttctccttcataaacagcgtctctttccacgacgatcatgccgatattcggcgcgttatccatcagcttcttatagacgatagaacggtcaccgcctctcttttcgataaccatctccatagcgagacgatacgcttcgtcaaattctctctctaattcttccttctttttgtcgtccactttttgtgtcctccgcttctgtctgcgtgcattcttacatgccgatatgaccgaacagcatccgctctctttccctggcgtcgaacaaaatcggcttgcctgtgtacttctgatccagagccatctggagattgcaggtcttcacgccggcctccataaaatccagttcagagataggaactttcttgccgtcgatcatcttgtaaagcttgtcttctccccgcatgcccacattcttgatgaccacacaggcgaaagagagctccagcacgagcacatcggcgacgtcgaaatatctggtgtccggcatgcagaaatgatactcatcaaaagaaccgatctgtaccggttttccgtggatcatcaccggattttcttcatttatcctattgttgtcttccatctttcattacctcctgcttctgaaaaaatgataacatattcttcggtctctgacaaacgccgcgcgaagcaggcgtttgtcctactcgctctgcgccgtcccgccgtcgtcctctgcggctttttcctcttccggctgcaggaacctgacactccagtcctgacaggacgcataatagtcattgaactgtgatacgatcagcccttcaaaatcggcggatgtcacagccgcgtatgtcttgtagcaaaggcacagatacggcacttcatccgcgatgatcttcttggcgtcggtcagatcctgtttcatctgctctgcgctgacgccggaaaacatatggtcgagcagactgtccagcgttgtgttcgcataacccgccggatttccgtatccgctgtggtaaaactgccgcagatcaaaacgctcatcgactttccagcccgcgataaacagatcgtaagagccggaagacgccgcgctgatcagagattccgacgccacttcggtaatcgaaacccggataccgatttctcccagctggcgcgcgatcatctgagccgccattctgcgggattcgttctcggaactggtcaccagtttcatttccagttcgccgccttcgctgtcttccattacgccgtcctcatcggaatcgctgtacccggcttccttcagtaattccagggcggtttcccggtcagaggtgaagtcattggtcgtctcggttcccagataccccggaaaatacagatcgtcgctcttgataccgctgctgtaataacatgaggaaatgatctcatctctgtccaccgtcatggcgacagcctgacgcacatacttgctggcgcaggcgccgctctcccggatatgaaatcccagcgtctcaaattcattgctggtaaacggcgtgactttaagccgtttattgcccgctatattttcgcggttgaactggtccatcaccatgatactcaattctcccgcggaaacgagtcccggatagagatccgccgccggcatcactttcagcgtgatcgtattggaaggcttcacttcaaaagtgtgttcattggcgctgagtctgatttcctgtcccgacgcggaatcgatcttataagctcctgacccgatcagaggctcgtcctcgacgctgagaaattctctgacgccggagtattgtgaagaactgaagataggaaagtcaaaatcagcgatggatgtatcggaactgtctctgaggttcacggtgaactcataatcgctgtgaacggaaacaccggagatgttggataccttggaagcatacgcggaagtttctcccgcactcttcaggacatccaccgaaaaatccacatcatccgccgtcagttccgaaccgtcgctgaagcgaacgccttttttcaggcggaattccagatctccggaatcgttatatgtccaggattccgccagttctgccgtcggttccatggtatctcccagaccgatcagggaattgtacaccagcttggtcatctgatagatgtcctcatccgaagacgtggccgggtttaaattccggattttcatcacgggaatgctgatctcatgtgaagtcacatacgtgccctcctgcccttcgctgtctgtaaataaaccgctttgctgacatgcagtcaaagcggccgttagcaccagtgccatgattatgtatgctgtttttgcctttttcgtcatgataaaacatacctctgttatcctacggaagtctgcggtcgagggcttcgatctgtgcgtctacgttgcggaacagttcttctttcgtaccgctgttgtcgatgacataatccgctctttccagtttatactgcctcgaagtctgagaattcatacgcttgataatgtcgtctctgcagatgcagtcgcgcttcagaatgcgctgtattcgggtctcatcatccacatccaccacccacgcctcatttgccggctcgatgttgtacggtacctcaaacaggagaggatgatcgtaaaagatgacttttttctgcagataatcctttggatttgtctgccgcgtcacgtcccggcccgcctcccgaaacgcgtccgtgcgggctgtgatcaggacatctacgtatttctgtatgatactgtccatctttttcttttctttcggatcggaaaacacgacttttcccacatacttgcggttcatcgtaccgtccggcagcagcgactcgggaccgaacgcctctacgatttccgccagcgccggttctcccggcttttgaagttctctcgtcgtcaggtcgaaatcgataatttcgaagcctttttttctgagataatttgaaacagtcgtcttgccggagccgcttcctccggtcagtccaattatatacataatatgtcgattccttattttcgttgacgtgctgaagctgtttatctatattatttatacctttaaaacagataaatagcaattacaaattcacaaaaacacgtttaaatcagtgcaaagttcaggaaatccgcctgcggcttccccacccgctccgtccgtctttacagctgactcggcggtgtgcgaaaaccggcacagacgtcgctctttccggtctccgcctctattttatactgtaccaatcgtttcccgtattgacttctgcgatcagaggtacgctgagtttggcggcgccgcacatggattctgtgagaatccgtcccgcagcctccgctttctccgtcggcgcgtcgataatcagttcatcgtgtacctgaagaacgacggaagcttccgggatctccgtccgcagcctgcggtaagtctcgatcatagcgagcttcatgatatccgccgctgtaccctgtaccggcgtattcatagccagacgttctcccagctgacgcgtcatataattcgatgcgtggatttcgccgattttcctcctgcggccgtgcatggtggtgacgtatcccttttctctgcattcggccaccatacggtccatgtattccttcacccggggatgtttgcggaaatagtcgtcgatatactgctgcgcctcgtttctcgaaattttcagatccgaggaaagaccgaaagcgctgatcccgtaaatcacgccgaagtttaccgcctttgctctgctgcgctgcagcggcgtcacatcttcggagggaatatcgaatactctggccgccgtactgcggtgaatgtcaagatttttttcaaaagcttcgatgagcgccggatcctgagaaagatgtgccatgatcctcagttcgatctgagaatagtccgcccctaccaggattctgccctcgccggaagcggtaaataccttcctcagaagccttccaagctcctggcgcaccggaatattctgaagattgggttccgtgcagctgagacgtcccgtagtggtcaccgtctgctgaaaatgggcgtgaatccggctgtcgctgtcgatcagcggcagcataccctccacataggttccgttgagttttgtcagcatccggaattccagcacctgagcggcgatctcgtaatcccgcgccagatgctccaggacttcagcattggtggaataaccggacttcgtcttttttcccggaggaagcttcagcttgtcgaaaagaatacttcccagctgcttcggggagttgatattgaattcttctcccgcgctttcgtaaacagccgcggtgatcttatcgatctgctctttcagactgactccgatctcttccagttcttcgccgtccgcacggatacccgtcttttccatactggccagcacttcgatcaacggcagttcgatctcctgatataccggagaaagctcctccgcctgcatacgctgcgcctgcaccagagccagccgcgacgacagcgcgagaattttacggccgagatttgcctgtttctgatcggtttccccgaacatatcgatgacagaagcctcttcgagaatctctctgtcggtgggaaattcttcgtgaaagtattccagtgagagctgagacaattcataggaacgcttctgcgggtcgagaacatattccgccaccgccgtgtcaaacccggtatgaaagactctctctctgtgtgccgctgcggaaagcccggcgataccgctgcagaaaagagcgtaataatccggtttcagatcgtgtccgcagattttcccttcataagaggccatccattccgtcacatcggcggcagcttcttccgtccatggaatgtaatacaccgtatcggaagaagcgatgcagacagaagaaatctcaggaagggtgacgtgcgcattgtcgtgaaaaatcttcagccagagggattccgtccgtgacaggtcgtctttcatctctccgcgcttctccctggtatcggctctgacgatatccgcagaaggagatacggcgtat

SEQ ID NO: 2607 - DNA, 7482 bp, Unknown
  16S sequences of unknown bacteria
gagatgtgtataagagacagcctttcggcagcgctgccagaaagtccagctgctcaaaccgggccgccatgccgtgcattcccatcggtgtggtattcaccagaagatcagaaaaaagggcgcagtcctgcaaagtttcctcatccaagccgcaaggcgtaatctgcgtgggaaattcctttgccagtgcttctgctttggagcgagtacggttgcacacaaaaatgcgccgcgcgccggattgcgccagctttagcaccacggcccgcgccgcgccgccggcccccagcacggtaatcgtcttaccctccggcgagatgcccgcctccaacagcatttgcaaaaatccccggccatccgtgttgcagccgcgtatcttcccatcccgcagcactacggtgttcaccgcccgatacagctgcgcgtcagcatccagctcatccaccagctccaccagatccgttttgtggggcatggtagcgttgaagcctgcatacccttcctctgccgcacggcgaaggaaggcggcagtttcaccgccgcgcacccgtacccggccatacacatagggcagtcccgtctgcttcaaaaccgcattgtgaatcaccggcgacaggctgtgctccaccggatcgccaatgacacagagttttttggtttccacagctcacatctcccccttttccggttccgccgcagccaatgcatataaaacggcttctgccgccgcttcgggcgttttttcagaaactaccacatcggcgtatttgcggtagagcgcatcccgctctcgggccagacggtaaattttttcccggccctcccgcaaaaggggacggccgctgatatccagtccctcggcaatctccgcagcgccgcgatcaaggaagcagacaaagccgcttctgcgcagcgccgtcatgttttcctcccgcagcacaataccgccgccggtagcgataaccgcttcctcagtgccggccgcttccctggcgcagacagtctccacgcgtcgaaagtaatcctctccctcgcaggcaaaaatttcggggatggttcgtccctcccgctgcacaaccatctcgtctgtatccagcagcggccagcccagacgccgggacagcagtgcgcttaccgtgctttttccgctgccgggcaggccaatcagcacgagatttcgttttatcatcgctcaggcccccttggggtaattgcccagaatccgcagcgtcagcgtattttccaccagttcaaacaggacggtgttcagcgcgtcgctgcgcagatcgccttccacgtccacaaagaaacggtattcccagcccttgcccggcatcgggcgggattccagccgcaacatgttcatctggtgagccgccagaattcccaatacattgttcagcgtgcccggttcgtgaggcagagtaaacatcaggctcagcttgccgcactccggccgcagctccatggtcggggccaccacaaaaaagcgtgtataattatccgcgctggtgttgatatgctcttgcagcacttccagcccgaagagctgtgccgcccggcggctgcagatcgccgctttgctcttcactccgctgacagccaccagctgtgcggcagctgcggtgttcagcacggcgttctgcttccagccctcatgccgagtcaaaaagtcctcactctggaaaaagccctgctcatgggaatacacatcggtgatatcctccagcaccgtgccaggcagcgcgcacaggcagtgctctactttcactgtctgctctcccaccacataggcgccgtactcagccagcaggtcatagactgcattgatcgagccggtggagttgttttcaatgggaacgacgatataatctgccttacccgccaccaagagttcaaaaaggctacgccaggtgggggcgctgcggcgctcggccgcttccccaaaaaagagggctgcagcttcttctgcataggctccggccacaccctgatagaacacctgcggcatactcaccggctcccgggcgttttgcaccagcgcctgcagagcgcgcacctgttccacactgctctgctgtgccagcagtgcgcgctgctgacggcgggaaatcgccatgatactggaaaagaaatccttcacctcggttttgagatatggatttttcagcatggattctttcttcgccaaaacttccgcttcacggccccgatccagcacaggcatgccgtgctcctttttgtactcgcccacctgccgcgtcacgttcatgcgctgttcaaacaacgctaccatctgcgcgtcgatatcatcaatctgcgcgcgcagttcctccaatgtgctcatgtgcggtaccgctccttttctttcagatacgtttcacagctgcggcggtttccttcgatctcctccgggcgcaggcgacgcaccggtttcgccggattgccaaacgccatccacccttccgggatctccgtgccgccggtaaccaacgcgccggcgccgacaatacagtttttgccgatccgcgcgccgttgagcacaatggctcccataccgatcagggcgttatcgcccacggtacagccgtgcagaattgccccgtggcccacggtcaccccgctgccgatgcgcagcgggcagtcctcgtctacatgcaacactgcacagtcctgaatgttggtattttccccaatactgatcggcgcttcatccccgcgcaccaccgcattgaaccatacgctgctgccggaagcaatgctcacatcgccgcaaatcactgcgccggacaggacaaccacatcccctgcaattgcctgtttcttttgttccatcgtttcgtttcctcccacgttttcctgcacgcaatccgctctttgctcaaagccccagcaattcgcaactggccagagccgccgctgcctccaccaccggcagcgcccgctgcacaatacaggggtcatgccgcccctcaatcacaagcgttgcatcctttttttccgccagatccaccgtattttgctccatagcgatggacggcgtgggacggatcgccacttcaaacacaatgggcattccattggtaatgccgccgttgatcccgccggaggcattggtgcgggttttgacctgcccttcttccatataaaacgggtcgttggcttcactgccgcgcatgcatgaaaacccgaagcccgcaccgaaagcaatgccttttaccgcaggcaccgcaaacaggtgctgagcaaagatgccctcagcattgcagccgaaatccggtgcgccaaaccctgcgctgatgccggttaccgtgcaggaaatggcgccgcccacactgtctcccgcctttctggccgctagaataatctcttcaatctcctccggactcggatccggtgttccctccaaaatagaaatggcagatgtaatgataacgcctttttcctgcaggatcaacttggccaacgccccggcaaacaccagcggcgccgtcagccgcccggaaaaatggccgcctccgcggtaatcgttaaatccgccatagcgcaccgcgccaacataatcggcatggctgggacggggcaggtgtttcagtttggcgtaatctttggagcgggtgtccgtattgcggataatggcgcacagcggcgtgcctgtagttttgccgtcaaatacgccggaaagaatctccggctcgtccgcctccttccgggccgtagtcagggcgcttttcccaggagcgcgacgctgcagttccgcgcggataaaattcagatccatctccacaccggaaggcacgccttccagcactacgccgatggccggcccatggctttcgccgaaaatcgtataggtcatattacccctcccgcgtgatcgctccgccgagcatttcgtaatcctcccagaagtcaggataggacttgcggacgcactctgccccctcaatcgtcaccggttccttgcagcgcgtggccgccacagcggccatcatggcaatacggtggtcgttgcaggcatctaccgaaacgccgccgcacagcgtttccacgccgcagatcaccaatccatcgtgcagttcctcaatatgtgctcccagcgcattcatgaccgccgtaaccgcagaaaggcggtcactttccttaatgcgcagccgcgcggcatgcacaatgcgcgccgttcccttgcgcaccgccgccatggccgccagtggcggcaccaaatcaggacagtccgccacgtccagttctacatcgccgctttggcacaatttcacacaagcgtcggccactacctgatctccctgccgggaattctcgttcatcccggtcacatccaccagattccccaacgccatagcagcgtaccagaagccggcctgggaccagtcggcttccacgcggcgctgcgtgggtgcatagcgctgcgcgccaggcacgaaaaagctgccctgtttcccttccagcacatccaccgccacaccgcagcctttcagcgcatccatcgtcatggcaatgtagctttcgctttccagcgcggtggtggccgtgatccgtgaagctccgtccagcagcggcagcgcatagagcagccccgtgaaaaactggctggacacattgccgggcagcaaaaatgtaccgctttccagcgtgccgcgcacagtaagtgtgccatccttctgttcccagaagattcccttttcctcaaacagatcaaaatagggcgtctgcggtcgctccatcagtcggccccggccgctgaacacgccgccgcccgccaccgccagagcaattgggatcagaaaacgcagcgtggaaccggactcgccgcagtcaaaatggggcattccatccttctgcagaaccggtgcaccggcagcaagtccttgcacgcggatcgtgctcccgtcaatcttttcccagcgcgcacccagctgttccatgcacgaaagggtggccagaatgtcctgagaaaaggccacgttcgagagcacgctttccccatccgccaaggccgcagcaatgatcaaccgatgggcctggcttttcgacggcggcggcgtaatggttccacagagcttttggggccgtattgtcacattcatgcgtctttctcctctaacagcgcaaacagcgcttctttttccatgggcacgatctcggcctgtccgggctggaccacctcaattacgccgatgcatcggccctgtgcctttttatccagccccaccgcggcacgataatcttccatcgtgcacggaatctcgatgggcagctgaaaagctttcagcacccgctccagccgcgcctgcagcgccgctaccgggcggcctttccgccgttccagctccagcatcttcaccatgcctgcagccaccgcttcgccgtgtgtataggtttcataatgatatgccttttcataagcatggcccagggtatggccaaagttcaaaatgccccgccgtcccgtatcacgctcatcctcagccaccacggcgcgcttgatgtcgcagcaagtatacacaatcttttcccagtgcgcagcggctgcctgaatgccatccaagcgttccagaaaatcaaaaaagggagcgtcggcgatcataccatatttaattacttccgccattccatcacacaaaacgcggttcggaagcgttgcaaaacaccctgtgtccgccagcaccagcttgggctgataaaacgcacccaccagatttttaccctgaggcagatcgatggcggttttgccgcccacactgctgtccacctgtgccagcagtgtggtggggatctgaataaaatccaccccccggaatatggtggccgccgcgaagcccgccatatcgccggtgacgccgccgcccagcgccaccacaccgtcgccccgagtgagaccgccatcggcaaagccttcataaaggttgttcagcgttcggatatttttactggcctctccggcgggaaatgtgacggaaaaagcagtaaatccagccctcagcaaactttccatcaccattttcaaatacagcggtcccacattgctgtctgtcactaccgccagccgttccgcccgcgtcacggcgcggatacgcgcgccgcactgctccaaaagtcctgtgccgatgagaatgtcgtattcccttcccggcagctccaccgtcagttgtttcatccagccaaaacacctttccccagaaatttctcagaaaaacagacaagcgtttttcgttactttaccaccgttttgcccatcagattggccatttgcttgattttgcccatcagctgctcaaactgatccggcgtcagggattgctggccatcgcatttagcgtggggcgggtcattgtgcacctctacaatgataccgtcgcacccggcggcaatgccggacatggtcagcgattccaccagccagctcatacctccggaatgggaaggatcgacgatgatcggcaggtggctcatgcgcttgatgcagggaatggccgccacatccagcgtgttgcgggtataggtttcaaaggtgcggatgccgcgctcacagaggatcacgttttcgttgccctcgctcatgatatactcagcggacatgatccactcctcataggtattggacaggccgcgcttgagcagaatcggtttgctcattttgcccacttccttgagcagatcgaagttctgcatgttgcgcgcgccgatctgcacaacgtccactttttcctcgaacaggtcaatgtatttgggactcatcagctctgtgacgataggcagacccgaagcttccttagccagcaacagcagatcaagcccccgggtgcccataccctggaacgaatacggcgaggtgcggggtttgaaggcgccgccgcggagcatggatgcgccggccgctttgacacgctgggccacctctaccatctgatcctcgttttccacgctgcaggggccggcaaccacgccaaaattacctccgccaatcttcgcactgcctacagacaccacggtgtcttcgggatggaacttgcggttggcctttttatacggctcggaaacacgcatcacccgctccacatgctggttaatcgtaattttgtccatatccacggcagtggtgtcgcccaccaggcccaagatgctgcagccgtgtccttccgtgatgctgactttcagattcagctgttccagttccgccgccagcttggcaatatcctcttttgaggcatttggtttcataacaacgaccatgctattttgctccttttttatgtgaattttttgtattgcaaaaagaaaaaggctcattgattgttgtcaatcaatgagcctttcatcgttttccatcccgggaacgtcccaaaacgccccttctgcttctcatcaattcacaactgcacagtttcccagcaaaaagcgctgccgccgataaatcgaccgcagaaaaaagaggaaaatacagttgcaaacagcatattgtcc

SEQ ID NO: 2608 - DNA, 32759 bp, Unknown
  16S sequences of unknown bacteria
tgaaagccctgctgtccgaggacgaatacgcctccgcgcgggaatccaccctgaccgcgttctataccccgcctatagaagttccagaagtctacttcctattgagcatcatatacaacgagtgtctgcatctagattctcaatgcaaaaagcttaaaccgattgcttgcaaattgaagaataaagtaattcaaaacatgatatcagagatataatttgttattcaactgcaagggaataagcaattattcaaaattggtttattacaaggaagcagtaacaaatacaatacaaacaaaaaatgagagtagctttggagatgtgctgtctcttttgtaatttaagaagcttttatttatttctaagtgagaattttgtaggcacaggaacactcttcctgtgcctacttgcttaaaaatctattacttcctgatttactatctctctcacttgagaactaatattgttcatcctccgcacccaagccatttggtcggtggctttgagttgttccgtgacaccttccttttcggcgtattcttttaccagccgagaaaaaagctcctgtgcctgttcttcggtattggcgaggtgggaatggagcttgccggaagtgagcaaattgtagtacagcacattatgatgatgtttcaaatatcgtttgtgccttaatgcccacacgccgatattacccgtttctttttccgctggtaaagctaggttcggcagtagataatcgccttgttgcgtgtatgtaccgccgagttgttcaaataatgtgtcagtcatagtaaaaacctcctttgcgcttatattgtacaaaggaggcgaataaaagtcgaatgtgcgatttatgaatttgtaaatccgctattgccaaaaattacagcgaatatttcaaaacttgagccactttttacagcgaacatagcgaatattcagtgaaaattcagcgaatattcactcttatgttttcgattctcgtatcacttgccaacgagggaattctcgaagcacacggatatgccaatcggatttgcgggtgatagtgcgaaaatatttcgaacaattgcctacatgacgataattaaagcctgctttttaaccgttctatttgcttgctgaaaaactttacgtaggtgtcaaattgggagttcccgataatagatatgagattcaaagcctttttagtttctgctatagccttatcgatctttccgttttcttcgtaatattcagctaacttccacatcatttgaagcaagttttcaaaagaaatccatttttgcttttcagcagcttcaaacttagcttttcccgacaaaagataagccttctctgtcagtttagtaaagtatatttcagggatttgctcaatagcagcttcagcactctctaaatccccttttgctttataagcataagcgagaaatcggagcgcatcatatttcacgtcgttctgattggttttttcaatcagtttgctggcaattgcaattgtttcatccggctttactgaataatctaatacatatagcagattgtttaataaaatgtcattttcgggatatttctttaagccctcctcgaggattcgcctactctcagcaggattgctctctctgtattgatatgctttttcagttatgatcctaactgcatgttcaattttctttaggttgaaatcgaataattcatccatagacacaccaaaataacttgccagtacaggaacaagagtgatatcaggaagagcaatattattttcccatttgctaacagcctgaaaagaaattcctatactctccgccaactgttcttgtgttatgcctcgttgtttgcgtagttctctgattttatttccgatattcatatttacctcctaaatctagtaaagtgcacttgcttttgagctcaaatagagtataccatatgactttttttgttgacaataacttggaaaacgatgtttttcaaccaagagttgaaaattgatgtattgcatttatctctattacacctcaagcataccgcattatcggcaaaaaatcaatcgttcaaagcctaccttcacatatatttttgccgatagcggcagttttgattccgccccggcatttgcctacacgactttgggtgcagtccggcataaccggtgcttttcacgcactgccaaaagcgtgattttaaggcgaaaaatcgctcggttctatcaaaaattctaataggcttttccggaaatccgttagaacttggcgaaatcggaggagactttcggactcagattttcactgtgttttcgatgcaaagaggtgcgaaaagccttgaaaatacggcacttttggggttctcgcatctgccgttatcttccgtcaaattccgccaagttcggtttttaccacttgactcgaaatcatgatgccccttgagggacgagggttcgaatccctccgtctccgccaaacagtcagccggatcccggttattccgggactcggctgattcatatttatgtcaccggaggtagagcgtcgtaacgctcggggatcgtaaggcgcaagccttgcaggccgcataccggattaggtgtcgagtgcgctcggttattactttgtaatgaccgggtatttttatttttcggagggaattatgaaaaacacaaaagtaacccttgccccgctggaagcggatgaccgtgagcagttcatccttgataatcaggagtctttcaagtatggcgcagtggaagagttcgggctgcgggacgatcattttgaggaggacggagagatcatttcccgtgcgacaattgagcaaagcattgacgcacccgacagcgagacatattggattctgtatgatggcagaaaggttggcggtgtagtgctgaaaatcaacaaagaaacacatcacatcgagctggaacttcttttcgttttgccgaaggaacacagcaaaggtatcggctatggcgcttggcttgccgtggaagctctgcaccctgaaaccaaggtctgggcgacctgcacaccatattttgaaaagcgcaatatccatttttatatcaacaaatgcggttttcacgccgttgagtttttctccgccatgcacccggagccgaatccgccgaaggaagacggaaaagcagcacccgatgagggtcccgatgaaatgttccgctttgaaaagattatgaaatgaaacgcacaaatagccccgcacctcattcaaaatgtgcggagctacggctttggcactgcgaaaaccgaccccaataaagcattcccttattttcattccgtttcccttaaaacacggtgcaaaataagggaatcttattttgctgttctcatagttcgccccgtcagaaacaaaaaaatgctgccccaccgtttccggtgaggcatagattatgtactctctttcatcatttttcttttctgccgccgctgttcgttttcacgttcacggcgctgtatgtatttgaattcccgaatgagttccttatatttttccgtgcgcgggtgcgccagcctttgcggtgatgccataaagccgataaattccgctttggcgcagtactgtatagtgccgagcttgatgccggttaaggtttcttcccgtatccattcgtgaatgcgctgcgggctgtggccgacaagctccgccgccgtctgcgtgggcagagcctccggcagctctgcccactgcaattccaaccaccgccgaaaggcttcgcagttttccggggcggcttcaaacatcgggagcggatgccattcggtgcggttggagaacatgccgctcaactccgagaggaaacccggctcggtatccatacgggctttgaaccgcaccgcatcctctgtccgcacccgatatttatgggtcgtgtgtcccgtgttttcgtgcgggatatagttgttgtccatcagatatttcattttccgcgtggagatgtgcagatactggcgaagctcgctcccgctcataaattgtttttcagtcatatataaaatcatcctttccgttagcattaatgcgcccccgacagagcgcatcattcttttgctttattaaagatattgctgataatatcagcgctttcctgtttcttggatttgtccagatgggcatagatatttgccgttgtggacagatcggagtgtccgaggaaggtcgatacattcagcagcgggacatcctgattgataaggatgctggcgaaggtgtggcgcagatcgtggaaccgaatcttgcgcagaccgtattgcctgatcaggtcggcgaaccgctgtgtgatccgattcgggcgtatcagcccgccgaactgatcaacgcagatataatcgtcgtatttgcggttgtagctgcccttgaacattcggcggtacaggtcctgcttttcccgctcctcgcacagcatttcatacaccgggttcggcagcggcagcgtgcggcggctggatttgtttttcatttcctccacaggttcgatgatagtgtgaccttcccgtttgtttgtaatgtgccgatagcattgggactcggcagcccttctgtcttcctaagaaaagccttgctcgctctcgctgcggctttcaacgctatagccctctgcttttctctttttcctatcccgtaatatttcattatctatctgctcaataaagatctccacaaggcttgttgctaaattttgcgtttgcaatttgattttttcttctgtctcgtaaagtttttcactttctttgaatatttctccgatttttttgatgaaatcttccgttatctgtgttatactcttgtactattttttcctacatttattttacactaaggggataagtttgcagtctctttttttcggctgtttttttacagccccttttttcaatgaaattcgttactgcgaaacggttataaaatatttgttttttatacaaaagcagcgcagctgatgattttcagctgcgccgcttaaaatattaactgtttgaagatgtgctgggttctttaattttctttaccttaaactgctttaccgcgtaatcatttaccttgcagtccattttatttgcgtaatcggtgatttccttgtcaaaatcatcatcggcaataatgtggcggctcgcaaggtcaagcgcgtcaatatagtagtcatccgccttaatatcctgcttcacggcaagtatcagccctgcattatcggcaagctcaataagcttaacttcacccgttgccatagcctttacggtgtcgtactgatccgattcataagaagtatccttagcgcctaaaatgctggcatacttatccttaggctgctttttatcagttgaggtgcttgatgtatcgtcgttagagccgttttcttccttataaaccgcctcaaaggtttttttgccgctctttaaatcctcaaggtaagtattgaatttatttttaatcttggtcttttcatcgtcggtcttgcccgaaaagctgccctggagcaggtcagcaataacgaaattatcataaagctttgtcttaacctcgtcggctgctatttcctttgtgccgcccttggaataaaggtgctcaaagtaaacgcttgaatagtaggaatcgagcatatactgcttgtaggtgttctgccctacgccgttcggctcaaagtaagaggaatagccgtaatttgaccaataataatttgcataggtctcggcgttctttttgtcatcctcggaaatttcaagcttattttcctcgcaaagagttttataagccgcaatcttcttaaggttttcaagcgcggtatcttctacccacttaacgaaatccttatcctcaaccttttttgaataataatcaatatcggttttagagtcgctgtccgaaaggctttccttaacttttgactttgcttcggaatcggcgtttataagcgcgcacatataataagccgacgtaaatttgaccttgcctacggttactgccgtttcatcctttttatggcaagcggtaaagctgagcgccattaccgaaaccaaagctgcggcaataattctttttaaatttttcatttttctattcctccataaagagtaaaaatacatattaaactaattatataccaaacgggcttaaatgtctacaaaaaattgtaaacatttgcattaaagtgcttttccaagctctgcggcaaggtctgccatcttctgccctgcctgcatccgcaccgtgtaaacaggcgtagacgcggcgttaagcgaaaatcttgagccgaaatgctccgaaagctttgccaccgcctcgggctttattgagtttatgtgcagtattgcagtgtttgatgtgcccgtaatctcgcaaatatcggcagctgccgctttgctgcgcagtattgccacgtctataagccccataaccgcctgcggcggctcgccaaaacggtcgcacagctcgtcaataacgtcgcttacatcctcgtctgttcttatagccgctatgcgcttgtaaattccaagccttgcgggtaacgattcaatgtagctttcgggtatatgcgccgaaatattaaggtctaccgtgcagggcatatcctctgtttcgggctgaccgttttcttcgttcaccgcctgcgataaaagctttaggtacatatcgtaccccaccgcttccatattgccgtgctgctcgccgcccaaaatactgcccgcgccccgtatttcaaggtcgcgcattgcaattttaaagcccgagccgaactcggtaaactcgcgtatcgcctcaagccgctttgacgctacgtccgataactgaacattccgcctgaaacagaaatacgcatacgcccgccgcggcgagcgccccacgcgcccgcgcagctggtgcagctgcgccaagcccattttgtccgcctcttctattataagggtattcgcattaggcacgtcaacgcccgtttctataatagttgtgcaaacaagcaggtcaatttcgtgctccacaagccgccgccacacgtcggtcagctcgtcctcgctcatctgcccgtgcgctatgcctatatttatatcgggcagcttggctttaagcacccctgcgcagcgctcaatgctttcaacgcggttgtgcaggtaataaacctgtcctccgcggcgtatttccttatttatcgcgtcggttataacgcctaaattgtattcaagcacataggtctgcacggggtgcctgtcccccggcgcttcgtctattgaggacatatccctaagccccgaaagcgccatattaagcgttcgcggtatcggggtggcgcttaaagtaagaatatccacaaacgggtactgctctttcagcttttccttttgcgccacgccgaagcgctgttcctcgtctattattacaagccctatgtttttaaagcttacgtcctttgaaataagcctgtgcgtacctaccaccatatcgagcctgccgcatttaaggtcggctattatttttgcctgctctttaggcgaaacaaagcggttaagcagccctaccgatacgggcatttccccgaaacggcggattattgtgttatagtgctgcattgcaagtatggttgtgggaacaagcagcgcacactgcttgccctcgcttatgcacttgaaagccgcgcgcagcgcaacctctgttttgccgaatcccacgtcgccgcaaagcagcctgtccataggcgtttcgcgctccatatcgcgctttatttcgttaatgcagcgcagctggtcgtcggtctcttcatattcaaagcggcgttcaaagtcattctgcaaatcggtatcggggctgaaagcatagccctttaccgccatacgctttgcgtaaagtgccgttaattgctttgccatatccttaaccgctgccttaacgcgcttgcgggtcttctgccactcgctgccgcctaagcgattcagccttaccccgccgttttcagccgcaccaatgtattttgaaactaaatcaagctgcgttacaggcacatataaaacgtcacttttagcgtattttatctttatataatcctttgtaaccccgccttgggttatgcggttaatgccgtcaaaaacgcctattccgtgcgcctcgtgcacaacgtaatcgccctttttaagctcatcgagcgagcctatctcctgccccgctttatgcttgcgtttgtgctttttaccctcgggcgctataaacctgtgggttattagcataaacttttgcgagggtatttcaaaccctgccgaaagcccgcccggtattaccgtaacgcccgcgggtgcggtatcggcactcagtgtataaacgctttgcaccccgcgctcgcaaagctcggcgtttaaaacctgcgccgccctttgctcgcctgccaaaataaccacgttgccacgaatatcccgcatatatgaaatatcttcaagcagcacctcaatatccccgccccaggcggttgagcgcttgtaattgaagtttataaccgatttcggctttatctcatacgatccgcgcgggaagttttcggcaataatgccgttacctgcgaaaccggaaaattcggttttatcaagctgcagctttgcggtttttgaaaacaaatacccctcttcaaggtagttttcggtatcggctgaaagctgaatttccattgatttaaagcgttccgccatatttccgctttcgcttagcattaaaagcgaatcgccgaaatattcaaacaccgcgcccatggtatcaagcagcggaatgtacctgtcgggcggaattttaacgccgttttcaagcagctccgcgtcctttgccagaatatcgcgttgtttaagcgttaaagcggggttcggtatttccgtttttaatctcgcggctaatttcggcgggtcgaacattacttccgccgcgggggatatttcaatttcgtccgcgttttcttcgcgccgctgcgtttcggggtcaaagtatgaaatactgtcaatttcgtcgccccaaaattcaatacggcagggcttttcggaatttactgggaataaatcaaaaattccgccgcgcaccgaaaactgccccgagccctcgcaaagctgactccttgtgtaccccgcgtttataagtcgttccgccaattccgaggtgtcggcgctgtcgcccgtttttaaggtgaagcgcgagcctttcagcacttcgggctttacggtgtactgcaccgccgcgtcaagcgaaattgtaagcaggtcaaaagccccgtccgccacggcagacagggtgtctattcttttatgctcatattcctttgagtagccgctcaaatcgcctatacataaatcccgcgcggggaaattaaggcatttaagccccaaagcgtttatatcgccgcaaagctcggcggcagtcgcttcgtcgtgggtgattaaaaccacgcgtttccccgtgtgaccgcgaagtgatgccgcgattatcgccttgtgtatgagcgataaccccgtgcagactatcggcagtctgccgcgctcaacctcatttaagagtgacgcgtaatcggggtcttttttcagtacttcgtttattagtttcatattaaccgttgtatttgttcatagcgctgtcaattccgtgcagaattgtttcttccgcagcgcttgccgccttttcaagcgccttttcaaggtctgcgcgctgctctttcggaattttgccgagaacccagtccttcaaatcataattgcggtcggggcgctcggaaacgcctatttttatccgcttaatatcgtccgttcccataagctctataatatcgcgtattccgttgtggccgccgtgcgtgccgccgcggcgaatacgaattttccccaccgcctgtgtaatatcgtcaaacattattataatgttctcggtgggaattttgtaaaaccgcgcaatagcggctaccgccctgcctgagtcgttcatatatgtttgcggctttgccagaataacgcggcagccgcccaaatttatttcgccgtattccgcgtcaaacttgcgcttgttaaaggtcatattgtgcttttccgccagcctgtctgccgccataaagcctgcgttatggcgcgtttcggcatattgcagcccggggtttccgagccccgcaataagccatatttcatttgtctttttgccgaacatttttattccttaaccaataccttttcaatttttcctattactatattgtgcaaatcgttatcgtaccagcgcagcggctctttatcggtaaagcattcctctttcatctgctgaacatacagctttttgcagattataacgagccttgcctcattaaaatacaccgcgccgccgtcaaacacgggggtcagccctgtttcggcggtcttatcggtatcgcgcccagattttgagccgcacaccttgtgtatcgccttgttattgccgtaaaagcttaatgtgaaataatcgtttttatccacaagctccattgtgtagcgctgcgggcggataaccgcggcgatgcagtcgtacccccacatttcacccataaagccccaagaggcggtcatcatattgtatttttcctttgtgccggcagatattagcgcccattcgtcggcaatgattttaataaagttatccttaatatctttcgcatttatttctttaaacaaaattgtcacctcaaaattagatattcgatgttagacattagaccgtagacatattccgcattatgaattacgaattccgcattatatattatatgctttttattccgtttgcgccgtaacgcttgcaaaataatcctccgccgcggcgaattgttcgtctatcagtcgccgtttttcctcggctgcgttatcggatgttacaatattaagtatttccgcctttgtaacctcggttctgcccaaaataaggtttataagctcttttgcgttatcgcgggttttaagctgctcgcagtatttcgccgccgcaaccaccgttttgcctataaccgccgcgccgtactcggtatcgggcgttattcccgcctgttttataacctttgcttcaagtattttaaggggtgcggtggcagcgcctttattttcggcaaggcgcgcgttttcttctttaagcgccgcagccctgcgtttttcttcttcaagctcgtttttcagccttttaatttcgccctcggcggcggtaagcctatcgaaaagctgtatattttgttcaagcaaaagtttttttctcattaaaactcactctccaattattcggtgttctcttcctcaaggggaatctgttcgcgcaaatcggcaatttcgggctttagcttttccactacctttgcgtcgtaaaactcattttcaagcggcaggttctttttctttactcggtaattaacaaagctttcgataaggtaataaataaccgcaaacgccggcacgcctatcaccattcccggcacgccgaacattccgccgcccacaacaatggcgaaaaccacccaaaaagcagaaagccccgttgagttgcctaaaattttcggtcctaaaaaattaccgtcaaacgcttgcaggcaaattatgaatattataaaataaacgcctttcatagtgtcggttaaaagtatcagcgccgcgcagggtatgccgccgaggtacggcccgaaaacgggtataacattggtaacccccacagtaaccgccacaagcatggggtacggcattttgaaaattgtaacgcctataaagcacagcacgcctataatggcggaatcgagcagcttgccgtaaataaagccgctgaaaatgctgtgaaccctttttcccgtgcgcaaaatgcgctcaaccacgctgtttttaatgcaggcgaacattatttttctgaactgccgcattaaaagcgccttattataaagtatgtaaagcgcgaaaatatatcccaccgcaaagtttttaataaagtttacaacactccaaactccgcttgcgaaatacgccgccattgagtttacataagcggtaaaatcattttgcagccactttttctcgtactcataaaccgacattaaaaccttttgcaaatcgctgtttttctcaaattcggtgctgaccttttgggcaaagtcttcaagctgacccggcaaaacctttaccatgcttgaaatactgtcaataaactgcggcactatcatatagaatatcaaaatcaatacggcggtaaatgccgccaatgcgccgaaaacgctgacgccgcgcgcaaccctcttgtaaatattgttttgcagcttaatatttttctttgatagctttaaaagcccgccgttaatagcatttgcaatggggtttaccaggtaagcgattataaacccgattataaccggctctattactcccagcagctttttaagaaaagcgaaaataccgggcaaacggtacataagaaagaaaaacacaacgcaggcggcaattaccaaaaacgccgtaagacccgtgtagaaatatttaattccgaatttttcgttcttcatttttttcagtccttttcttttttatcctgcaaatcaaaaggaaaacaagcgtcgataaggcaattcccagcgccgcgcccgaaaagtctatcataacgtcgcgcacttcgccgcttctgccgggtatgaaaagctgatgaatttcatcgctcgcggcatataaaaggcaaataccgccgctcaaagtaagccgcaaagcgaaaagcaatttttcatagctgatgaatgtaagaaaacttaaaacgcctaaaatcatatatatgctgaaatgcgccgattttctggctaaaaactgcaaagaagcgacaatttccgtctgttcagccgccggcagattatcaaagcccgggtagaaaataccgacaataagccttataacatttccgcttgttcccgatgagaccgcggcgttttgagaagacagcgagaatataagcgccatccataaaaccagcgccgccgccgtgattattctaaacgctgttttattcgccttgataattgcccgcctcccgaaaacttaaaagccgccacctaccggaaaaccgataagccggtgacggctgaaaaaatttattttacttttgtgtaaaatttcataggattaacaaacgcgccgttaaccataatgccaaaatgcaggtgaggtcctgttgaaaaaccggtacagccgacataccctattatctgcccgcgctttacatgggcgccaagcgaaaccgcaaggcttgacatatgcgcatagtaagccgcatactttttaccgtctgctcccttgccgtgatatatggcaacatgatttccgtatccgcctccgcagccgcagcttgagtttttaggataattatgcgggcaccccgatacagccttgtaaacggtgccgtcggctattgcataaatcggaagaccgtatctgccgtttgaaatatcaacgccctggtgcatcctgccccaacgttcgccccaaggtgaagaaattctggtggtggttgtaggccacaggaaaggtccgccgtcatacacgacgttaccgcctccactgccgcctgtactgcctcttaaaatttcattgagtgttttttgcttatcttttaaagcagcgtcggttgcatttttatcggcttgcgcgctttttgtatcgctgtttattttagaaataaccgcttgaatttcgtcactttgcgtttttaattcctgctgcttttgagtaattgtttttttaacagccatttgattttcaagcagcttgttattttccttttgcttttcttcaagcacctttaccgccgctacaatttgctcaatcatttttttatccttagcggaaacactggcggtaagctgcgaaagctctaaaaactgcgaaaaatcgtccgcgcccaaaagcacctgaacctgactgcccgtattgctcatataaatagcgcgcaaacgctttttgaaagcggtcttattgttttcaatttcagtgtttttcttttcaatttccgccttattagcggcaattttagagttaattgaggttatttgcctgttgcaagcgtcaatttcctgctgaacaagcgccattttttgctcgattgcggttttaagctcgttttgcttgcttgcgtcctttttcagcgcattaattttttgctgctgttcgctttgcttttcctgcaatctttttatttcgctgcgaatctgagattccgtcgcggcggataccggagtaatagccacaacggaaaaaatcattgccacagaagtaaaaaacgataaaattttaataagttttgctttcatttttcctcctaaattgccgcaaattcgctgccctcgtgacggagatatttgcttatcataataacgctgccgagaacgcccgcgaaaatgccaatgcctataaacacaagtaaaagccagcctgccacatcggaataatgcacaatatcacttgttccgagcgtgcctataatcgtttcggtcgccacgcggtagcagaagtacaaaagcccctccgctataagcgcggaaaccacgcctattaacataccctcaacaacaaagggtattcttacaaacgaatcggtagcgcccaccgctttcataatgcttatttccagcttgcggttatacatagtaacccttattgtgttggaaactataacaagcgctattaccataagtattgcgattatccaaaagcccgcaatacctattccctttttaatggcagtaattttttccgctaagtcgctctgcgactgaatatcgcttataccgtcgaatttctttatctgctcaaccgtttcctcaaagcgggacatatccttcatctgaatttttgccgcgcccgacatagggttgccgtttttttcatcaaggaatgaaaaatagctttcctgcccttcaagcattgactttttaacgctttcaagaccttcttcgggtgaaacataggtaacggacgctacattatcaagctttgctatttcatcgcaaagcgctttcgcctcttcttcgctgtgaacaatataatcgctctgctttacgccgttctcgtcagccttttcatcacccgaagtgctctcagtaccgctcgtagcagacgaagtggcactgtccgaagacgcagctgccgaggaactgttagatgatttatcggacgaaacatccttatccccgtaaagcgcccagctgtaatccttcatatacgccattacaacgttttgctgctctaaatttcctaccgctttattcacgttttcggaaataagaattgcaagccctattataaccatacaggcaaccaaaacgcctaccgacgctaaggacataaggcggtttacccatgtgtttttaactccctcaccgacgaggtattttacacttcccattttcatcagaaattacctccggcattatctgctacaattcttccgccgtcaagcataataacgcggtggtggaaatcgcgcacaaggttgtggtcgtgcgtaaccataagcacggttgtgccgcggttgtttatctcggtcagtaacgatactatttcataggacatattggggtctacgttacccgtaggctcgtccgcaataataaggtcgggtgaatttacaagcgcgcgcgcaagacccacgcgctgctgctcgccgcccgaaagctgtgccggcatagagcgggctttattaccgagaccaacctttgaaagcgcctttgaaacctcgcggcgaacatctctgcctgaggcgcccacaacgtgcattgcaaacgcaacgttctgaaaaacgttcatggttggtattaagcggaaatcctgaaatactatgcccatagtgcggcgcagcataggcacctgcttgcgcggcattttggtaaggttaaagccgtttacggtaataattcccgtgttagccttttcctcgcgcataataagcttcataaaggtacttttacccgcgcccgacgagccgactacgaaaacaaactcgccgttgtttattgtaatattaacatcctcaagggcgtgcgtaccggtgggataggtttttgaaacgccgcggaattctattatcggcgcagtattcgccggttcttcacggttaaggagtatttcttccatttactgacagttccacactttcaattagtacttaatggggttgctctttaagtatttgttaaccataagggcaattttaaatatgattgcgtggtcaaactcacgcaggtcaagtcccgttatcttctttatcttttcaagtctgtaaaccagggtattgcggtgaacaaacagctttctggaggtctcagaaacattgaggttattctcaaagaaacgctgaattgtaaacagtgtctcctggtcaaggctttcaattgagccgcgcttgaaaacttcctttaagaaggtttcgcaaagggttgtaggcagctgataaataagtcttgcaatacccaagttatcgtaagaaataatagtcttttcggtatcaaacaccttgccgacctcaagcgccgcctgagcctccttaaaggagcgagcaaggtctttaagtgtatcaaccgttgtacctatacccactacaacatgagcgtagaactcgcccgaaatagtatcggcaatggtggaagccagcttttcaattgttttagagtcgattcccggctttgtttccttaacaagcgcaatatcggtttcgttaatgtttataacaaaatccttagacttgtccgggaaaaggttctgaaccacgtcataaatagaaacatcgtgtgtttcaaccccgcgaatgagtattaccgtgcgcgaaacatcggaattaaagtaaagctcgcgcgcctttaggtatatatctcccggcagaatattatcaagtattatgttcttgataaagttgctgcggtcgtatttctcatcataataaaacttgatgtttgcaaaggaaacagccaaaacagccgcatatttcgccgctataacatcgtcgccctcaacaaaaactatgtagtttgttccctgtgttgtgccgaggctcttaaaggtatagccgccgttcacataaacatccgccgagggaaccgaaaaagagtcgatattctcccctattctgcccagctcgctgcaagcaataacagtaaaattttcgtcaataacgccgaaggtgcggtctaccgcgtccttcatctgatggattacgccttgaaaaagacggtttgacatattatacacatcccttaaaataaatagaatattactaatatctatattttacacaattacgggtcattttgcaagtgataatcgagaaaatacataaaaaagttacaaaatcattacaggtgacgaaaatcaggggtatcaaattgtagattatataccaaaaacctttgttttttgcttgacatttccaatttttaatgttaaactcaactaagcttaggagaaaacggtagtatgaagaataaaaataaattcgccggagctgctgcggcgctggcggcaaacacaattttcggtttcagctttatattttcaaaaatggcgctcggcgctgcgcacccgcttataattctgtcggtgcgctttaccgcggcgtttattgttatgagtcttttggcacttacgggtaaattccgcttatcgctgaagggcaagcctaagaaaaagcttttaataatggcgctggcgcagccgcttttttattttatatttgagctttacgggctgagccttgtctcctctgccctttctggcgtgataatcgcgcttgttcccgtggcggttatgcttttatcgctgctctttttgggcgaaaagccgggcttattgcagggcgtatgcaccgccgtatcacttgtaagcgtttcggttatgagcattatttcaaacgacggcaaggaaaaccgaacaacaggcatattgcttttagcagcggcggttttatgcgcggcggtattcaatattttaagccgcagcgaatcagagcgcttttcaccctttgaaagaacatggtttatgtttttaaccggcgctgtcggttttaatataacggcaatagcggttttgcgcggcaaatacataccggagcttgtcaccgccgtcagctcttatagcttttgggtcgcaattttctatctcgcggtattatcctctgtcgccgcgtttatgctctataattattccacaatgctgataagcgcaacaagggcggcatccttttcaaatataataaccgttgttaccgtaatagccggcgttaccatacttcacgagcatttcacacctgttcagtacctgctttgcgcgcttataattttgggcgtttggggagttaatttagatgttagacattagacggtagattttagatttattccgtcatataaaataagcagtgatttaattgacaaattaaaccactgcttacagtctgtagataaacctaaatttctatttttgcggcgtaaacgccgcatttacgtttttccgctgacaggtgcggcggaaaaacaccttgtaagcgaaaaaccgcctattcagcggtttttcaagggcactggggtggtattggcggggatagagtgcagtccgaaaatctttgattttcgagcgagcggtattcccgtccaagagtgtgtcgactttttcgacacactctaagcagtgatttaattgacaaattaaaccactgcttatttgtttacccgaaaaggtcgattatccgctttgcggcttcctttgtttcctcggtatcaccgaaggaggaaaggcgaaaatagccctcgccgcattttccgaaccccacgcccggcgtgccgattatctgcttttcgtttaaaagcaggtcaaagcactcccagcttgtcatatcgttcgggcatttaaaccatatataaggcgcgttttcgccgccgcaataccatattccgcaattatcaaacgctttcataagtgtttttgcgttgccgcggtatacggcgaggttttcctttacctgccgctgcccctcttcggaaaataccgctgccgcgccgcactgaacaatataagatacaccgttggttttggtggtgcggtttctcacccacatatcgttaaggtacataccttttcttttaagcgttttcgggataatggtatatccgcagcgcacgcctgtgaatcccgccgttttggaaagcgagcatatttctattgcgcaatccctgctgccctctatttcaaatatgctgtgcggcagctcgttatcccctataaacgcttcgtatgcggcgtcaaaaatcagaaccgaaccgtttttattcgcgtaatctacccacgctttgagcttttcatgctcaaacaccgcccccgtagggttattgggcgagcagatgtatattatatcagcctttatgttatcatcgggaaagggggcgaagtgcgtccagttatccgacggcatatgaacaattttatgccccgctattatatttgaatcaacatatgcggggtatgccggctcaataacaagcgccgtgttatcgcggtcgaataaatcaagaatatcgccgaggtcgtcccccgcgcctgaggaaataaatatttcgtcgttatcgaggttcaccccgcgccgcgcgtaataacccgcgatagccgttttcagcttttcccagccgcactcgggcatatagccgtgaaaggtctcttttttcgattgatcctctaccgccgaatacatagcctttataaccgcgtcgcaaagcggcagggtcacgtcgcccactcccagccgcagcagctttttatcgggatgcccggcggaataggctttgacacgctgctcaatatcataaaacaaatatgagctttcaagctttttatagttcctgttaggtttcattttaaaccacttctttttatttgccgctgtcgccgtagtttgaaagcacgcgggcggacgggtcgtttacgtcgcagccctcccactccttgttcggcatccagaaatcctttaccatttccgcctgaccaggatatttttcttcaaatatctcgcggtaaagcaaagattccttggtaaagggcgcggcaaaatcatattttttgcacttttcttcaaactctttatcggtgtactttgtctcggcatattcctttaaatagtccaccattgaatgacctaccgcgtcggagaacgccgccttttcgcgcataagtatatcgtaaggtaggtaatcgccctcaaacgcgtggcgcaaaaggtatttgcccttgttgtatttgttcatcttcatttcggggtctacgctcataacgtattttacaaaatcaagatcgccgaacggcacgcgcgcctcaagcgagtttaccgaaatgcagcggtcagcgcgcagaacgtcaaacatatgcagctcgcgcacacgcttttgcgattctttttgaaactcctcggcgatcggcgcaaaatcggtgtatttatagccgaaaagctcatcggaaatttcgcccgtaagcaaaacccttatatcggtagtttcgtgtatcgccttgcatataaggtacatacctatgcttgcgcgtatggtggtaatatcgtaagtgccgagcagcgctataacgtcgggcagcgcttttaaaacatcctctttggttataattatctcgcggtgatccgagcctatgtaatccgcaacctcttttgcgtatttaaggtcgatagcgtcggtgctcatacctattgcaaaggttttaatgggtttctttaaaagttttgcggaaactgcgcacacaagcgaagaatccaagcctccgcttaaaagaaagccgagcggcgcgtcggcgtcaagccgtttttcaatgcccgcgaccagtttatcgtgtatgtttttgcataccgtttcaaggtcgtcgtgacaaaccgtatctaccgccgctatatcgttatagcagataaatttgccgtccttataatagtgcccgggcgggaaaggcattattttatttgcgagtcccacaaggtttttaggctctgaggcgaaaatcggctttccgtccttatcaagcccgtaataaagcggacgtatacctatggggtcgcgcgcggcgataagactgtccttttcgccgtcgtaaattataagcgcaaattccgcgtccagcattttgaacatatcagtgccgtaaagctcatagagcggcagtaatatttcgcagtctgagtcgctttcaaaggtgtagccgcgctttataaggtcgtcctttatgggtctgaaaccgtaaatttcaccgttgcacaccagcttattattcttgtaggaaaacggctgcatacccttatcggtaagccccattattgcaagacggtgaaatcccaaaaatccgttattaagcttttcaattctcgacatatccggaccgcgcgaaacggtcatatcaaagcctaatttaaactcctcttcgggaatacggcttcctatatagcccataatagaacacataattttttcctcatttcatatttttaaatgtgcaaaggcttcccgatttcatcgggaagctgagcgtgtcgaaaaagtcgacacgctcttggacgggaataccgctcgctcgaaaatcaaagattttcggactgcactctatccccgccaataccaccccagtgcccttgaaaaaccgcttattcagcggtttttcgcttataatgtgtttttccgccgcgcatgtcagcggaaaaacgaaagatgcggcgtgaacgccgcaaaaataaaattttaggtttatcgacagactgataccgggttttaccccggttattttaaacttctatgtaatcaaacgctctgctttttaatgccgaaaatcattcttaaaattccgcttaaaagcttaggacttttaaataataccactttcacaaaaagaccccctgaaaatattatcagcaccgtccgcttgaaaagccgagtataataacccatattgcgagcaccgcaacaaggaatttcggcgggcaaaagcagcttataagtaaaccgcaggcgaatgtaagccctataagccccttgttacaattacaaccacagcctcttcgtctgcgcatacagcatccccccgatatacttgtttttctcggttcttaataacagtatatcgcggaaattaaaaaatgttaccgttttcaggttaaaaataaggaaaaatgcaagaaattcaaaaaatctaatgtctaacgtccagtttgccatttttttatatcctttaattcttcaaacagcgccttgtatgattcaaggcggcttttttgtatttcgccgttttcagccgccgcaataaccccgcaccccttttcgcaggtgtgcgtgcaggaggtaaagcggcaattgccgctgtattcatataaatcggggaaacaggaaataagcctttccttaaattcatagtcgccgcccgtttcaagcgaggaaaagcccggtgtgtcggcaatataaccgccgcaaggcatccgcagcagctctgtgtggcgggtagtgtggcggcctctgccaagcttttcactgacctcgcccgttttaagcgcggtatttccgaaaatgcggtttaaaatgctcgattttccaacgcccgaattacccgttaaaacgcttatgccgcccgaaaattcgcttttaagcgcgtctattccctcgcctgtttcggcagatacggtaaataccttaaaacccgcagcgcggtaaatactctcccaacggctgaaattccccgcgtcgcacttgttaaatacaattatcggctctattccgtgatacaccgcaatcgccgtaaggcggtctattatgtattcgttgggcgcggggttttcaaaggaggaaactataaaaagcttatcaatattggcaacaggcgggcgggaaaggaaatttttgcgcggcaaaacagcggtgacaacaccgctgccgcccgataattcaaattccgccctatctccgaccaaaggggaaattccgcttttgcggaaatttccccttgccctacattcatataccgcactgccgtcgtcaatataataaaaccccgacagcgctttaataattatacctgtcaattgaaatcctcgttatcagacgaagaagtatcggcatccagctttttataatcgtcgtaactgcccactctattggcagtaccctccttaaagtccacggttattacctgataatcaagcgcattgcttgaagcagaccttatttttaccgtgtaagtgccgctgtcgcgctttgaagtcacattttcaaaggtatacttgctaagctgggtagcgtcaagcatcttgctttcagcaaccgctacgccgtcagcccaaagcgatacataatactgttccagctttaaatcactcggcagattaacggttatattagccgagaagcctttgttgacatatatcttaacggttgaaccctcggcaatgctgctgccgcttgcgggctcttgcttaataacatagccctcgggcgcatactcatagccgctgccctttgaataataaacctctttaacctcagcaataagctttttatccttcaaaagcttttcggcatccgcctgcttcatagtggtgaccgacggagcgttaacgttctgtatagtcttgcccgagcttacgtaaacggtaatcttggcgttttcttcaacaacctcggtacgctggggagaggtctttataataagtcccttttcaacgtcctcactcggcatttcggttataacggttgtaaagcccgccgccttaagctctgaaacgccggcggattcggtcttgccgtaaacgtcgggcacctttgtggtagactgccccttactgataaacagggttatggtaacgccttttttaagcttctgcccctccgcctttgactgctcatatatataaccgtaagcgtaatcggcgttggactcccacttttcctcaaacttaaagtttgccttgtattcatcgtttgaggttacgtcctcaagtttttgacctacgaacttcgggcaggtaagctcagaacccgtgctcgataaaagtttcggcacaaatattgccgcaagtataactattgcaataaccagcgttacggcaatgcccgccagtatcggaatcatattattcttttccttgggttcttcctcttcgcgctcgggtacctgaacactgtcgtaatcaaacgcggcgggagcgaattttgtgggagaatcgtccacaaaataggaataatcaaaggtgagcgacgggtcctttctgaaagcgcccaaatcgcacagcatttcggaagccgactgatagcggcgctcggggtttttctgcattgcgtgcatggttatctgctcaagccctaacggaattgagccgtttatctcggtgggcagctgcgggtcgcgctgcagctgcattatagcaaccgaaaccgcgctttccgcctggaagggcaattgacccgtaagcatttcgtaaagaataacacctaccgaataaatatcggtcttttcgtctgtgcgctcgccccttgcctgctcggggctgatgtaatgcaccgagcctatagccttatcggttatggtgcgctgttcgctccttgcaaagcgggcaatgccgaaatcggtcaccttaatagtgccgtcgggcagcaccattatattctgcggcttaacatccctgtgcacaatgcccttatcatgcgcgtgctgcaagccctttaaaatctgaatggtgaagtgcaccgcgtctttccagcgcaggctgccctcacgctcaatgtattctttaagggtaatgccctcaatgtactccattacgatatactgtataaggtcgccgaagcttacgtcaaacacctttacaatattcgggtgggaaagcattgcaatagcctttgattcgtttttaaagcggcggacaaattcctcgtttgaaataaattcttctttaagaattttaaccgccactatgcggttttcctgattatcgtatgccttgtatactaccgccataccgcctacgccgattatttctttaatttcatacctgccgtcaaggcgttttcctacaaatttatccatatgtttttatcctttctgacgttactttgtaaccgtgacaaccgttatattatcgccgccgccgttttcgttggctgtttcaaccaatttctcggcaaccgcggatatatcgttattttgaaagactcttaaaatatccttatcttcaaggaaatttgtaagtccgtccgagcaaagcagcagcgtatcgccgtctgataaagtaaggcaatcgctgtcaaccgccacgtcctcttcggcgcccagcgcccttgtaataacgtttttgcgcgggtgaacctttgcgtcctccggcgttatttttccgctttctataagcgactgcactaccgagtggtcacgggtaagctgctttatctcaccgttcacaaggtagattcggctatcccccacatgggctataaccgccgtaccgtcctttacaaatgccgcgacggtggttgttcccataccggcgagttccgtattgtttaccgccttgtcataaagcgatatatttgcgctcacaatggcgtttttaagcgttttttcggtatcggtcatattcataccgctcctgtaagagcgtataacgtactccgaaatatgccgcacggcaagctcgcttgcaacgtttccggcattagcgccgcccataccgtcgcaaaccaccgcgaaaaccgcgtcgtcggttattttaccggcaaagtaggcgtcctgattatcggtccgcacccgtcccctgtcggttttactgaatatctgcaatgctttcaccctcctttacccgttttctgagctgcccgcacgaggcgtctatatccgcccccagcgttcgacgcaccgtagcgttcacgccgtttgcggcaagcctttctttaaaacggagtattttatttctgtccggctttttaaaggaattttcctttaccggatttgcaggtataagattaacgtggcacataattccgcgcagctttttcgccagcatatcggcgcaggcgtcggaattatttacgccgtctatcagtgcgtattcaaaggaaatgcgccttgtggtgaccgcttggtactctttgcaggcggcaagcagctcgtcaatattccaccgcttgttaacgggcattaccgaggaacgtatatcgtcgctcggagcgtgcagcgaaattgaaagcgttatgggaagattatattctttcagcttttttatgcccgacaccacgcccgaggtggaaagggatatatggcgaagacctatatttaagcccttttcatccgataccagctttaaaaaccgcaccgaattatcaaaattatcaagcggctcgcccatacccatcataactatattggaaacgcgtatgttattatcccgctgaaccgccgttatctgcgccagcatttcggaagccgtaagacttcttgtaagcccgtttatgcccgatgcgcaaaatttgcagcccatccggcagcccacctgcgttgaaatacacacggtgtacccgtgctcatatttcatcagcacggtttcaataagctcgccgtcaaaaaggcggaaaacgtatttcaccgtttcgtcaagccgtgatgcatacctgcgctctgtttcggcgcctgcaatatatgcgtcggctttaagcctttcgcgcagcgcttttgaaatatcggtcatttcgtcaaaatcggtaacgcccgattgcagccagtgaaatatctgctttgcgcgaaagcgcggctcgcccatttcggctaagaaattttcaagctcgggcagatacattgaccttatatcaattttactcaagcggagcgtttccctcctttatcagtaacgcgcagtagaacccgtctgttttatcaatatgcggcatatatgtgtgttcatacgctttacggaacatattataacgcataataaacgaatttacaagattttcattttcattttgccttaatgtgcaggtagaatacaaaattctgccgccctttttcacatatcgcgccgcattttcaagtattataagctgcgtttgtgtaagcgtatcgtcaaggcaaatgtctttatatttaatttcgggcttgcggcgcagcacacccagcccagagcagggaacgtcgcacagcactaaatcaaattcgccaagtgcttcatcataaatttcggcatttgccgttttcggctttataatacttgttccgagtctctttgcaccgctttcgataagccttacacgctgttcgtacaaatcgcaggaaattatttcgcccgtgttttgcataagcattgccgcggtaaagcttttgccgcccggtgcggcgcatatatcaagcactctttccccctgcttcgggtcggctatgcctaccgccctttgagaggctaagtcctgcgcgtagaaaagcccctctctgtaaagcttattttccgaaatatcggagcagtgctttaaaataaacgcatctctatctccgcttatttcggcggtaattccctgctcttccagtttttcagccagttcctcggcgcttgttttaagggtatttacccgcacggtaagcggtggggcatcaaggcttgcgattaaaagctgttttgcggtttcggtgccgtagtcctttacaaacgaccccacaacagcggcggggcaggaatattttaccgaaagcgactttatatcgctgccgcagggcagttctgctctgtttcgaagaatattgcgcaaaaccgcgtttacaaagcctgcgtttccgctttcctttgagccttttacaagctttaccgcctcgtttaccgcggcgctgtcgggtattttatccatataatatatttggtaaacagcggttcttaaagtgtttattgtaagcggcgctatttttttcacgggggtttttacaaactgcgaaataatgtaatcaagggttattttgcggtccagcacgccgtaaaacagcgcggaggcaagcgccctgtcagcccctgtaagcctcgattttgataaaacctcattaagcgctatattagagtacgccgcgccgcagtttacccgcattaaagcgtttacggcggttttacgtgcgtcagccattttcgtcctcaatttcggtacccaaagctatgggtctgccgcataaatactgctttgcagtcataggctttgagccttcgggctgaattgtttcaagcgcaaccgcttctttcttgcaagcgacaataagctcgttatcgcttttaagcaccgcgcccgccgtgccgtgcatatttacaacgcggctctttattatttttatacgcttgccgcccgatataaagaaagcaaccggccacgggtaaaagccgcgcaccgcgttgtgaacctcttccgccgtcatatcgtgaaagctgattttcgccatttccttttttataatcggcgctgctgtcgctttgctttcatcctgctttataggggtaacgtttccgttttcaatatcggcaagggtctttaccagtaactcagcgcctataaccgagagccgctcaaaaagctcgcccgcggtttcttccgcgcctatttcggtaaccgcggtttctaaaatatcgcccgtgtccataccctcgtccatttgcattgcggtaacgcccgtttccttttcgccgtttacaatgcaccactgtatgggcgccgcacctctgtatttaggtaagagtgaagcgtgcccgtttacacagccgtatcgcggcagggttaaaatttccgtaggtaaaattttaccgtaagccactactgctatagcatcgggtgcaatatttcttattatcttttccgcctcgccgtcgcgtaaggtgcgcggctgaaaaacgggtattccgtgcatttgggcgcatacctttacaggcggcggagtaagtatttgctttctgcccacgggcttatcgggctgggcgaaaaccgccgcaacggtgtgacccgcgcctatcagcgcctcaagcgttttaaccgcataatcgggggtgcccataaaaactattttcattaagaaaacctcggcttattttttaattctgtctatataaagtattccgtcaaggtggtctatttcgtggcagattgctctcgccttaaagccctcggcggtaagcttaaagggctttccgtttctgtcctgcgcatgaatttttaccttcataggtcgcacaacgtcctcatatcttccgggaatggaaaggcagccctcctgcccctcctggctcccgctttccttatcaattacagggtttataagctctataattccgtcgcccacgtctactatgcagtatcttctcagtattcccacctgcggcgcggcaagccccacgccctcggctttatacatagtttccgccatatcgtcaagcatggtcgctaacctttcatcaaaggtaagctgagtgcggcacaccttgcgcagaatgtcgtcccctattttaacaatgtttcttattgccatacggcggtcctcctatattacggtttcggggttcatatccgccgaaacggttgcgtcctttgtcagctttatatcaagcgcccgccgcagtagctccctgaagcgtttgcccgcgcggcactttattatcattctgtatcggtacttaccgttcacccgcggtacagatgctggcgacggaccgagaattatcattttaacgtccttatattcattttcaagcataccgcgaattgcgcggaatacgtcggttatcgccttttctgcggctgtgcggtctgtcgcacgggatataaccgcgcaaatatcgcaatacggcgggtataccataaggcggcgggtcataatttcttcctcataaaatccgtcgtaatcctgtcgggcggcaagctttattacactgctttcggggttcatgctttgaattacggcaagccctctgtctccgccgcgccccgctctgcccacaacttgggtaagcagtgaaaatgttctttcaaagctgcggaaatcctcgctgtaggtagcgctgtccgcccccaaaacgcccacaagcgttacgttgggaaaatcaagcccctttgccaccatttgcgtgcctaataaaatatcatactcgcccgctgcaaaggcttcaaggtacatagcgtatgaatcggcagccatggtgctgtcggcgtccagccttaaaacccgcgctgacgggaaaaggcttttaagctcttcctccaccttttgagtacccgcgcccaaaaatttcatatgctgcccgccgcactcggggcacctgccgtcagacggcaccgaatacccgcaatagtggcacataagcctgtggttcgccgagtggtaggtaagcgaaatgctgcaattggggcagctcataacatacccgcactcggggcaggaaacatatgtattatgcccgcgcctgtttaaaagcagtatagcctgctttttttcttcgagcactccggtcagtttttcgtaaagcctacggcttataaccgatgaatttccgcttaaaatttcctgcttcatatccaccgtttcaacctgcggcagcactgccccgccgaaacggtttttaagcctgtaaagcgaatatttacctattttagcctcggtaaagctttccaccgagggcgtagccgaggcaaggcacaaaagcgccttgttatattttgccctgaaccgcgctaatgttcgcgcgtgaaagcgcggcgactgctcggatttataggtgtgctcctgctcctcgtcaattataataagccctaaattttcaaacggagcgaatattgcgctgcgcgtgccaacggctataagcgcgtcaccgttttttacccgctgccattcgtccatgcgcttacccattgacatagcgctgtggaaaaccgctattttatcaccgtagcgcgaggcgaaaataccaagcaattgcggggttaaggatatttcgggcaccattactattacgccgcggttatccgctataacgcggtcggcaagctttaaaaaaacctgcgttttgcccgagcccgtaacaccgtaaagcagcgataccgcaccctcgtttttctcatattcggcggtcataccgtcatacgccgcctgctgctcgtcggtcagcgcaatttcggtttgctctgcctcaagcccctgttctataaccgttctgaaaacgcgtttttcatagggtattaaaaagccctcggctataagcttatcggtaactcctgccgatacgcccgtaaaatagcgcagttccttaatgcttatgctgcccgcctcgcgcacgaaattaaatatctcgcgctgtctgggtgtcagcttttcttcgtttatatcgtccgatagagcggcgcgcacccgtttttcgcccgcgtcgtttacgcggcggcggctttccctgtttttgaaaagcgcctctttttcacacatttcctcgagtatatccgcagtaatgccgagcttacgcttgactgcgctttcctctttttcgccgcttttaaaaaggtaatcgaaaaccgatttttcggtatcgttcaaaagcgagcgcgccgaaaaatcctcgttagcggaaaaataatttacaagtcggtaattaagccccgcaggtaaagcggcgtgcaccgcatcataataagtgcagaaataatgctcgcgcaaaaaaaggcatagccccagcatttcacgcgttaaaacgggctgtttatcggtaacggaaataatttcctttaaattatccgtctgagtttcgcaaacgttgaaaatcattccctgtttttttatattgcctttaccgaaaggcacggtcactctgcacccgggcacagcgccgcagttttcggggagcgcatacgaataaagcctgtcatacgcgtttgttgcgccgtcaagcgccacttccgccgcaagccccgtcatacaagctccctcctttttaatcagtcgtttttcgcatctatctccgctgccattttatcaatggcaatgcttaccggcttttcggttgaaaggtcgccagtttcttccatttcctgcgcaatttcgcgcgcgttgtgcgccacgtctataacaagacggtatctgttatcgtagttctttataagcttgcctatattcggatttaacattctgaaagcacctcgtcaataattttggtttgtctgtccgttttcaagcggctgcttaaaattacggacataatatcatcggctgccgccgcaatatcctcgtttactactatataatcatattccacggcgcgctttatttcgctgagagcggaggtaagccgcttttgtataagctcctccgattccgtgcccctgcccgaaagccgccttttaagctcggcaaatgagggcggcataataaatatgctcaccgcctcgggcattttttcgcgtatctgcgccgcgccgtttacgtctacctctattaccatatcctgcccgtttgctattgctctttcaaccggctcgcggggcgttccgtagtagttccctacaaactcgttgtgttcaagcaaacggtcgtttttcagcatatcctcaaacttttcgcgggtaataaagttatacttttcaccctcgcgctcgcccgcgcgcatagcccgcgttatagatgaaatagagaaaagcagctcgggcatttttttgaaaagctcggtcattaccgtgtccttacccgagcctgagggaccagaaa

SEQ ID NO: 2609 - DNA, 23088 bp, Unknown
  16S sequences of unknown bacteria
aaatgagcggatttgaggtgttttaggattgcgagagcatgaaatgcgaagcaatccgtgtatcatagggggcaaaataccttttgaccccaacagcatatcaggaacttcggaaaggggagtgtctgtgcggcgaggcgaaaagagatggaaggatttaagagtatatattcatgtaatcggtgcgttttttgtgtttcttcttttatgtctgagcgcatttttcggtgcggtgaaaaaaagcattgagcaaaatgtaagacagacaattacgacgaatattgaccgtcagagtgcggcattcagctcagatatcacgattcagtatcagtatctggaagggtttgcaggctatttaggagagatcggtgagctctgctcggagaatgtgatgacgctgatgcggaaggtctgcgagaagagcgacctggaacggatcgcgatcatagcaccggatgggacggctcattatagcagcggtgaggtaaaaaatgtcgcagagtgggactattttaagcgggccatgaaaggagagcgttgcctgagtgatccactggaaagtgtcgtggatggcgagacgcgggtcatcctctgtgtgccgatatatcatgctggtgaagtggcaggcgtgcttggcggctcttatgatgtgggcgccctgagtcatatgctgtttgaggatatttacggcggggcaggttattctctgattgtgacggcagacggagagatcgttgcttatgacggaagtgagaaatatcgcagaattcagttagatgacaatgtattttcttattatgcacagatgaccttccttgagggagatacctttgaaatgatgcgggacggctttgcaaaccgcataagcggcagtgtgaagctgggcagggatggagatttccgctatctgagttatgcgccgatcgacgccaatgactggatgatgtgctatatcgttccggagaagatcgtagaggcgccctaccgcacgattacacgctacgaggcaatactgatggggatggtgctgttcgggatggcggcactgctggcttatgtattttgcatgatgctgaagcggcagaaggagctggaacaggcggcacaggtagatggactgaccggtgttttgaataaacaaagcacagagatggcaattgacggctggctgcaggaagcacatcagaaaaagcaggtctttctcatgctggatgtggataagtttaaagagatcaatgaccggtacggacatgcagccggagatgcggcgctgcggcaggtcggacagacactcttacgtttattccgggaaaatgacattgtcggaagaattggcggcgatgagtttgtcgttttgatgaaagaggttaattcaatccgggatgcggagctgaaggcggaggccctgtgcgtactgtttcgcagtctgcatccggaaggatgcccggatgaggtgcatctgtcctgcagtatcgggcttgcggaggtaccggaacacggtggctgttcctatatggagctgtatcagaaggcagaccgggcgctttacgaagcgaagcacagaggaaggaaccgctgggtgcgtcacaggatggaagataccgaagagaagaaggaaagagaggctttttgaaatggcggagatcaggcaggcgctggcacagtgcttcaaggaattgatgcaggagaagagtttccagaaaataattgtaaaggacatcactgaccgggcgaatgtaaagcgtcctaccttttacacgtacttccgggataaatatgatgtggtagagtggatttttatgcaggagatctggcagcctgccaattccttgattgcagccgggtatatccgggaagggctgcgctttatgctgatcagcatggaaaaggacaagcgctattaccgaaaactggctgcattagagggacagaattctttccaggagatttttgtccgctgcatccgtcaggaggttgaacaggcgctgcgggaaaatacatttcatccgtctcatcatctgctgagcgtggagctggtctcggaatacttcgcacgtattttctggttcgtaacagaaaagtggctgaattatgccgaggatgtcagcgcattggaggtgatggaggtatacgagatcctgttctccgattccgcggaaaagcttctcggacataaggtagaaggatagatgagacaaattgcaggacgcgtttccgaaatttgacaaaagaagatgtgtgtcagaaaaaacagacgacagaaaaagattgaatctttcaaaattcgatctttttttttatattaaaaacagcaaaagagagggggcggtgaagatcggaagcgtttgtatgatctgccttgtggcaggtgttgccctgtctgtgtttgaatatgtccttcagatcggagcgactcagagcaatatgggaggaaagaaagccttgcgcatagcagctgtctattccggaatccagctgctgttgctgcttggcggaaccctagcagcagagctgattcgaaatgccggatcggatctgtcactcgaacggctgtggcggacgttgctggtagccctgctgctgttttattcctttttatgtatgcggacggcgatctgtgggaaaggatttgaagaacgaagagaggcagagcctaaaaatggcgtagtcgcaaaatatgcggcgcgggccgggctgcatatgctgctgatcggcatggcggcgtggtatatcagccacggaagcctgtggcagatagtcggcatctggatttctgcgtttctggcagcagtcggcggcctggcttacggctactggtatgggacaaaatggcgccgacagatcagcttcgcaggcggtctgtttttgctgctgacgggtggtctgtttgcggtgctataatggtattgcattgtatttccggagcgatccgcaggtatcatagccggtagacggcattataacatgagtaaagagagaagaggaggaactacaaatgagtacagtacataagatggaacgcgcactggtaggaaaagggatcgacggagtgctgcattatgtgaataaagatccggaagaccggaaaaaggcgttgctaaatctggtcgatgtcacgcagaaggtggccggaccgatgtttcaggacaagagctacgacgctgcacgtgcgatgctttctgatgaaaacggaaaatggtatcagtacgtgaaccggcttctgaatgaactagatccgcatgtgctgaaaatgacagccttaaatcttggctttgaagccgcttattttgggacaaagacgatccgtgagaaacggaaagagctgcagtgccaggtgccgtggctgattctgatggatcctaccagtgcctgtaacatgcactgtaccggctgttgggctgccgagtacgggcataagctgaatctttcctttgaagatctggattccattattacacagggcaaggagcttggcatttacttctatatgtataccggaggcgagccgcttgtgcgcaaggcagatctgatccgtctgtgcgagaagcataatgactgcgcattccatgcatttacaaacggtacgctgatcgatgaagcattttgtaaagagatggtgcgggtcggcaatctctctgtatcgatcagtctggagggatatgaggaagtcaatgattcccgccgtggcgccggatgctttgaaaaggtcatgcatgccatggatctgatgaagcagcacggtctgatttttggcacatcgatctgctacacgagcaagaatattgagaccgtcacaagtgatgcgttcctcgatatgatcatcgagaaggggtgccgttatacctggtacttccactatatgccggttggaaatgaggcggcgacggagctgcttccgacgaaggagcaaagagagtacatgtatcacagagtccgcgagatccgtgggaaagagggcggcaagcagatctttgcaatggattttcagaatgacggtgagtttgtcggaggctgtattgccggaggccggaattacatgcacatcaatgcaaacggcgatgtagagccgtgtgtgttcattcattattccggtgcaaatattcacgaggtatctcttttagatgcgctgcgtcagccgctctttatggcataccgggacggtcagccgtttaatgacaaccagctgcggccgtgcccgatgcttgagaacccggagctgctgcgtgagatggtacataagaccggtgcaaagtcgacagatctgcagtcgccggagagcgtcgaccatctctgtgataaatgtaagaattatgcggaaaactgggccggaaaggcagagaagatctgggaggagaatccgcatcacgtagagagcttccataattataaatcaacttatcaggattgaaccggaaaccgctgaagctgggcggccgacagaatcccgctgatcaggcggaagcatcagaggaaaatgtggcacagaagtgtgcggtcacattttcctctgtttacgtttgactttcgtttcctggtttgctacactgtggacagcaaaaggaatgcagaaacgataaaacagcagattacaggaggaagagcatggaaaaggcatatatatttctggcagatggatttgaggagatcgaggggctgaccgttgtggatatcctgcggcgtgccggtgtggagattcagatggtttcgattatgggacgcaaagaactgaccggcagtcacgggattccggtcgttgcagatgcagtgtttgaagaggtggatttttcagacggtacgctgttcgtccttccgggcggtatgccggggacaaagcgcctggcggcgcacggggggctggcggcacttctgaaagaaaaaaatgcggaaggtaaacggctggctgcgatctgcgcggctccgagtgtgcttggcggactcggtctgcttgaaggcaggcgtgcggcctgctatccgggctttgaggaggcgcttacgggagcagaggtgtcatttgatccggtcgttgtatgcggtaatgtcacgaccagccgcggcatggggaccgcaattccgtttgcactggcacttacagagcagcttgcagggaaagaaaaggcagatgcgctggcaaagggcattatttatgcggtataacgccggaaaacgtaaaaaaacactggcgttttagatattgttatgctatactatctcaatgactgcatagctgtaggggcagtctttttgtgagtgagaatcggaccggctgtttttggcaggctgatctgcggtgaaagctgcagctatggacaagaagcaaagcggattaccggtccgcttgacagttaaaggaggaacagacacaatgagtgtacaggtggaaaaactggaaaagaatatggcaaagctgacgatcgaggtatctgcagaagagttcgatgcagcgattgagcaggcttatcagaaggataagaagaagatctcccttccgggcttccgtaagggcaaggctccgagaaagatgatcgagaagatgtacggcacaggcgtattctatgaggatgcagcgaatatcgtgatcccgaaggcatacagcgaggctgcaaaggagtgcggtgaggagatcgtttctcagccggagatcagtgtgacacagatcggagcaggtcagccgtttatctttaccgcagaggtagcattaaagccggctgttacgcttggtgattacaagggcgtagaagtagaaaagactccggttgaggtttccgaggaggaagtggataaggaagtcgataaggagcgcgagaataactccagaacgatcgatgtagatgacagagcagtggagaagggcgacatgatcaagctcaacttcgagggctttgttgacggtactccgttcgagggcggaaaggctgaggattattctctgacgatcggctccggcagcttcatcccgggctttgaagatcagctgatcggtgcaaagatcggtgaagaagtagaagtaaatgttaccttcccggaggagtatcatgcagcagagctcaagggcaagccggcagtattcaagtgcacggtaaatgagatcaaggtaaaggagcttccggaagcagacgatgagtttgcaaaggatgtatccgagttcgatacactggctgagtacaaggatgatatccgtgcaaagctgctggagaagaagacggctgacgcaaagcgtgagaagcagaacaagaccgttgcaaaggctgtagagaatgcaacgatggagattccggaggctatgattaccgagcaggtaagaagaatggcagacgacttcgcaagaagactgcagtctcagggtctttctatggatcagtacatgcagttcactggtctgaccatggatgctctggcacagcagatgcgtccggaggcactcaagcgcatccagaacagcctggtacttgaggctattgcaaaggctgagaacatcgaagtaagcgatgagaaggtcaatgaagagattgagaagatggcagctgcatacaagatggaagcagacaagctgaaagagctcatcggcgatgctgagaaggagcagatgaagagcgatctcgcaatccaggctgcagttgatatgattacagatgctgcagtagaagtagaggctgcaaaggaagaggaaaagaccgaggagtaatacagatcggttccagtcaggaggagacgaaatgagttttataccttatgtcatcgaacagaccggaagaggcgaacgttcctacgatattttttccagactgctgaacgaccggatcatttttctgggcgaggaagtgacagatgtcagcgcgaacctgatcgttgcgcagcttctgtttctggagtctgaggatccgaataaggatattcagctctacatcaacagcccgggcggatcagtcacggcaggcatggcgatttatgatacgatgaattatgtaaaatgcgacgtatctacgatctgcatgggtatggctgcgagcatgggtgcgttcctgctggcaggcggcgcaaagggcaagcgttttgctctgccgaatgcagagatcatgattcatcagccgtccggcggtgcgcgcggacaggcgacggacattcagattgtcgcggatcagattctccgcacgaagcagaagctgaatgaaattctggctgctaataccggccagccgctggagcggatcgcggcagataccgaccgtgataattatatgacagcagaagaagcaaaagaatatggtttgattgacgaactggtcaaatcaagataaaatgcacggggctgtcgcacaatactggtgacagtcctgtattttgctttacgggaatttccttactttaccgaatcaagtaaggccctgtttcaattgcgcaaagcgataagcagcggattgcgaatgtccgctttacgcttagtaaatatataagaggtggaaacatgccagggaaaaacaatgacaaaatcagatgctccttctgcaataagacagaggatcaggtgcacaagctcatagctggtccaaatggggtatatatttgcgatgagtgtgtggaaatctgctcagagatcatagaggaagagatggatgaagagtatgctccggatggggagtatgcgatcaatcttcagaaaccgatggagatcaaggattttctggatgaatacgtcatcggacaggatgaagcgaaaaaagcgctggcggtggctgtgtacaatcactacaagcgtatcatgagcggaaaatatctggatgtggaagtacagaagagcaatattctgatgcttgggccgactggttccggaaagacgatgctggcacagaccttggcgagactgctgaatgtaccgtttgcaatcgcagatgcgacctctctgacggaggccggatatgtgggcgaggatgtggaaaatattctgctcaagatcattcaggcagcagactatgatatcaaaaaagcagagcatggtatcatttatattgatgagatcgacaagattacgagaaagtcggagaatgcatctatcacacgtgatgtttccggagagggtgtacagcaggcgctgctgaagatactcgaagggacggtcgcttccgtaccgccgcagggtggaaggaagcatccgcatcaggagctgattcaaatcgacacgacaaacattctctttatctgtggcggagcatttgaaggcctggaaaagattatttcttcccgtctggataagaagggcatcggattcaattccgagcttactgaaaaggagaagcacaacgtcggcgaagtactcaaaaaagcgcttccgcaggactttattaaattcggtatgattccggagttcatgggccgcgtaccggtcgtcgtatctttggatgagctggataaggatgcactggtacggatcctgaccgagccgaagaatgcgctgatcaagcagtatcagggtctgatcgggctggatgatgtggagctgacctttaccccggaggctattgaggccatcgcggaaaagacgatcaagcgccgtaccggagcgcggggactgcgtgcgatcatggaaggcgtcatgcaggagctgatgttccgtattccgtcagatgagaagatcgcgacatgcacgattacaaaggaagcggtggaaggtacggcagagccggagctgacttaccgcgaggatgtgcgtggcaggagaagacgccgccttggcgttgtggaagagactgagaccgcataagataaacgcaggcagctgctgcagaacagacgaggacaagcatgtctgcttctgcagcagcttttttaaccgaagcaagcatcatcatagcatgaaaaggagacacaagatggaagaaggaagaagagtaacgccaattattccgctgcgcggcctgacggtactgccgaaaatggttgttaattttgatatcagccgtgagtcatccatccgtgcggtggaagcggcgatggatcaggccaagatgatttttctcgtaacgcagcaggacccggagcaggaccgtccgcaggcagaggggctgtatccgatcggtatagcagcagaggtccgtaccgtcacgaagatgccaaaggggattgtgcgtgtcatggtagagggaatgcagcgggcacgtctcatttccatgcaggaggccaaaggatatctggcaggtgaaatcgagcttctggaggaagaggcatatgatctggaccggaatacggagctggcgatgcagcgggcattgcaggatctgctgaagcgttatgcacagatgaatcagaaatttggcaaggagctgctcggcgcactgctggagctggatgctctggaggagctggtggagcaggtatgtgcacggctgccgctgcattatcaggagcggcagcagcttttagaggccaatgggctgttggaacgctatgattgcctttatcagatcgtgacaaatgagatagagattctgcagattcgcaatgagatccagcagaaggtccgggagcgtgtagacaaaagtcaaaaggagtacatcctgcgtgaacagatcaaggtcattcaggaagagctcggcgaggatacgctgctctcggatgtggaaaaatataaacagcaggcaaaggagctggaggcttctgatgaggttaaggcgcgcatcatcaaagaagcagaccgcctgcgtggtatcggcagcaacaatgcggagaattcggttctgcgcggttatattgagacgctgttggagcttccatgggataaagagtccgaggacaatcaggatctgaaaaatgcagcacggattcttgatgaagatcattacggactggaaaaggtcaaggagcgcgtgctggaattccttgcggtgcgtgtactgacaaagggaggcgacagcccgattctctgccttgtcggaccgccgggtaccggaaagacgtcaatcgcgcgctcaatcgcgcgggctttggataaaaagtatgtccggatcagcctcggaggtgtgcgggatgaagcggaaatccgtggccatcgacgtacctacgtcggagcgatgccggggcgcctggccaacggactgcgtcaggcaggtgtcaagaatccgctcatgctgctcgatgagatcgataaagtgagcagtgattataagggcgacacgtcgtcggcactgttggaggtgctggattcggagcagaacagccgcttccgggatcattatgtggagctgccgatcgacttatctcatgtgatgtttgtcgcgacagcgaatgacctgcatgccattccgcgtccgctgttggatcggatggagatcattgagatcacgagctatacgtcaaatgaaaaataccatatcgcaagggagcatctgattccgaagcagctggagcgcaacggactgacgaagtcgcagcttacgatcacaaaaccggccctgatggcgatcatcgaagcttatacgcgtgaagccggggtgcgtcagctggaacgccggatcggcgagatctgccggaaggcagccagacagattttagaggagaaggcagaagctgtaaaggtatccgagaaaaacctggagaaatatcttggcaagaagattttttcggtcaaccgtagaaataaaaaaagcgacatcggcatcgtgcgcggccttgcatggacgagcgtgggcggcgatacgctgcagatcgaagtaaatacgatgcctggaaagggtgaatttttactgaccgggcagcttggagatgtgatgaaagagtcggcgcgtaccgcaatcagctatgtgcggtctctgagcggacgttatcatattgatgccgagttttttgcgaagaatgatatccacatccatatcccggaaggtgcagtgccgaaggatggcccttccgccggcatcacgatggcgacagcgatcttatcggctgtcacggagattccggtgcgcgcggacgtggcgatgaccggtgagatcaccctgcgcggtcgggtgctgccgatcggaggactgaaggagaagctgctcgctgcgaaccgcgccggtatgcgcaccgtgatcgttccggctgagaacaggctggatgtcggggaaatttccgaggagatcaaacagggcatggagattgtgtatgcggagtcgatgcgggatgtactgaaggtggcactggagcgtgcgtgagaaaggagcagatatggtaatcaaacaggcggaattggaagcagtatgtggaatcacaagtaagcttccggaaaatgcatacccggaggttgcatttgcaggaaaatcgaatgtcgggaagtcgtctctgatcaacagccttgtgaaccgcaaggcgctggcgcgcacgagctctcagccgggaaagacacagacgatcaatttctaccggatcaatcaggcagagtatctggtcgacctgccagggtacggctatgcgaaggtaccacagagcgaaaaggagaagtggggaaagctgatcgagcgctatctgcacggttcaaagcagctgaaggctgtctttttactgattgatatccggcacgagccgggaaaaaatgatgcgatcatgtatgactggatctgtcagaacggctttgcgccgatcatcatcgcgacgaagctcgacaagatcaagcgcagccaggttcagaagcagatcaaactgatcagagaagggcttgcggtaaagccggggacgacgatcatcccgttttccgcgcagacaaagcagggggtcgaagaagtgtgggcggcaattgaagcgctctggaatggagagctatagcacgtaccgatacatacaaatgaaatggcagatgcttccggccatgacaaagagatggaaaatctcgtgagagccgaaattgcggtggcgggcgttaaaaaacgggagccgcagcgcatagatgatgccgcctacggtgtagaagagcccgccggccagcagccaggaaaaggccgcgtggctcagggtgtgaatgagctgaccaaatacggagaggcaggcccatcccatcgcgacatatataatagaagaaatatatttcggacaggtcacccagcagagcttgaagagcataccggctgctgcgataccccatacagcgatgagaagcggatatccggcatccggtgtgagcacgagcaggcataccggcgtgtaggagcctgcaatcaggacgaagatcatcatatgatcaagctttttaaagagcttcagcttcgatccggtcagattcacagaatgatagagcgtgctcgcagcatagagcaggatcatgctcgtcataaagacggccatcgctgcaacagccgtacgggtggaaaaaagtgctgctttaacaagcatcggaatggctgcaaaggcagcgagcagcaggccgatcagatgtgtgatggcactgccgggttcacggattgtaatagtcatgaaaatccctccttataaacgtccaaagcggattaccaaagcgttgcttacataatatgatgtagtttttaaaactacgttctatattgatgaatactaccacaaacagtctggaatgtcaatgattgcagggcgattttttcatattcttttgaccagaatcaggcaggtctcctgctttcgttgcgcaaagcgattgccttgtctaaatgacgaacggtcatacaaaaaatgtcgattttttggcatttgtaccgaaaagctttttcggatagcaatttgtttgacaagcgccgggaaagttgttagactttaaataagtagtgttatccgatataggtctgtgaagatggttcagacgtttctaccgcacgccgttcagttgcgactattgggtggatagagtttgtttatctgcagatgtattggattgtacatctgctttttttgctcaaaaatgcaaaggaagcgtttgccaccagaaattccggatctgacaccacaataattcaatcgaaggagaaaaggaaatgaaaaagtgtgtaaaactgatcgcggcagcatctgtgatcgcaactctcggagcgtgtaccggcgttgcagtcaatgcggaggagacaacggtaaaggccggatttattttcctgcatgacgagaattccacgtatgacctgaacttcatcaatgcagcaaaggcagcctgcgaaaaaatgggcatcgagtatgtagccaagaccggaatcccggagggccaggaagcatatgaggcagcgtgtgagctcgcagacgcaggctgcaacttcgtatttgcagacagcttcggacatgaggactacatcattgaggcagcaagagaattcccggatgttcagttctgccatgcgaccggaacaaaggcacacacagaggagctggacaatttccataatgcatttgcttcgatttatgagggacgttacctcgctggtattgcagctggcatgaagttaaatgagatgatcgacgcaggaacgatcactgcagatcaggcgaagatgggctatgtaggtgcatatacctatgcagaggttatttccggatatacttcttacttccttggcgcacgttcggtatgcccgactgccacgatggaagttaccttcacaggttcctggtatgacgagaccgctgagaaggaaggcgcgaacaagctgatcgaggatggctgtgtactgatcagccagcatgcagactccatgggtgcaccgaccgcgtgtgagaccgcaggtgttccggacgtatcctacaacggaagcacagagagcgcatgcccggagaccttccttgtttcttccagaatcaactgggagccgtattttgagtatgcaatgggctgtgtggcaagcggtgaagcgatcgataccgactggaccggcaatctggagaccggatcagtagagctgaccagccttggaaagaccgctgcagatggtactcaggaagcaatcgatgcggcaaaggcaaagctggaatccggtgagcttcatgtatttgataccgctacctttacagtagacggaaaagagcttgagagctacatggcagacgtagacacagatgcagattatgagggagaccatgaggcagtatcggacggatacttccatgagtcagcagaaggtttccgttccgcaccgtactttgatgtcaagatcgatggcatcgacctgctggataccgcgttttaaccgaatcaagcaagttatgaaacaaagcttctgccgggcatagaagcgcctgacagaacagaaaaggacagtacagaaaccgggtggtgctacatcgcccggtttcgttggttgcaagggaaaagaaaggaggatatccatttggagagtaagacagcagcagtatccttaagaaatattacaaagagcttcggatcagtcgtggcaaatgataaggtgaatctggatatttaccgtggggagattctggcgctgctcggagaaaacggaagcggtaagacgacgctgatgaatatgttgtccggtatttattttccggatgaaggccagatttttatcaatgggaaggagacggtgatccggtcgccaaaggatgcttatgcgtgcggaatcggcatggtgcatcagcatttcaagctgattgatgtattgagcgcggcggagaatgtggcgcttggcatgaagggacacctgaatctgaaaaagacatccgaaaagatccgcagcatctgtgataagtacggctttgatgtggatccggatcagaaggtttacaatatgtccgtgtcacagaaacagaccgtcgagatcatcaaggtgctgtaccggggagccgacatcctgattctggacgagccgactgcggtactgacgccacaggagacggagaagctgttcgcagttctgagaaatatgcgaaacgacggcaaggcgatcattatcattacccataaaatgcatgaggttgagagcctgtctgaccgcgtggccgtgctgcgccgcggctgctttgtcggcgatatggcgacaaaggagacaaatgcacaggagatgacggacatgatggtcggccataaggtgacgttaaatatcgcacgcccggagccggtgaatccgaagccgcgtctgaaggtcgagggactgtcggtaaaagacgaggacggtatttacaggctgaaaaatgtgtccttcgaggcgcgcagcggagagatcctcggaatcgccggtatttccggctgcggacagaaggagcttctggaatcgattgccggactccaggtgactgagagcggaagcatcacttatatcaacgaggatgggagcagtgaggagctgatcggaaaggatccgcggaagatcatggatatgggtgtggctctttcctttgtcccggaggaccggctcggcatgggactcgtcggggatatggatctgactgataatatgatgctgcgttccttccgaaatggccggtcgatgtttacagaccggaaggcgccgaaggatctggcgcagacggttgtaaacgatctggaggtcgtgacgcccgggttatccacaccggttcgccgcctgtcgggcggaaatgtgcagaaggtgcttgtaggacgtgagatttcttcctgtccgacggtgctgatgacggcctatgcggtgcgcggacttgatatcaattcttcttataccatttacaatctgatcaacgagcagaaggaaaagggatctgcggttatctttgtcggagaggatctggatgtgctgctggagctggctgatcgtattctcgtactgtgcggcggcgaggtcagcggaattgtggacggaagaacgaccgataaaaatacggtcggaagcatgatgactcagattggaggtacagggcatgaataaagcgaaggatcctctttttaatattgtaaaacgggatgcgctgccatggtacaagtcgctcggtatccgcctgatcgcgattctggcagcattgatcgtctgtgcgattgtgacgacgatcctgaccggtatcaatccgattcaggtgtatgtctccatctttttaggggcgttcggaacggccagaaagacatggattacatttcagaatgtggcaattttgctgttgatttcgctggcattgacaccggcattccggatgcgcttctggaacatcgggggcgagggacaggtgctggtcggcggtctgacagcggcagcctgcatgatcacactggcagataaggtgccaaacgtagtcgtagtactgctgatggtcgtatgcagtcttggcgcaggtgccatctggggactgatcccggccttctttaaggcaaaatggaatacgaatgagacattatcaacgttgatgatgaattatattgcgacacagctcgtggcgttctatacgattgtatgggagatgccaaagggttccggcaagatcggtatcatcaatcagaagacaaatatcggatggctgccggagatcggcggatcgaagtatctgctgagcattgtagtggcagtgcttgtgaccgtgctcatgtacatttatctgacatacagcaagcatggctatgagattgaggtcgtcggcgagagtgagcggacagcacgctacgtcggcattaaggtcgaaaaggtcatcgtccggacgatgctgctctccggcgcgatctgtggtctggtcgggctgcttctggtcggtggtattaatcatacggttacgacgacgattgccaacggacagggctttactgcggttatggtatcatggatggcaaagttcaatccgtttacgatgatctttacgagctttctgatcatttttctgaatcgtggagcgagtgagatttccacgacatttggactgaatcagtcgtttgcggatattctgaccggaattattctgttctttatcataggatgtgagttctttatcgcgtaccagattcacttccgcaaaaagccggagaggaggatgatcgtaaatgattaatcttgttgcatttattccgcgtgccgttgtacagggtattccgcttctgctcggaagcaccggagaaatcctgacagaaaaaacgggcaatctgaacctcggtattccgggtgtcatgtatgtgggcgcgatcagcggcgtcatgggatcctttttctatgagcagtcggtatctgatcctgcgaatatgaatggcgtgctggcggttctgattccgcttctgtgctgtcttgtgggatctctttgcatgggacttctgtactgctttctgactgtcaccttgcgggctaatcagaacgtgaccggtcttgcgatgacgacgtttggtgtaggcttcggaaacttttttggcggttcactgataaagctttccggaagtgatgtgccgtcgatcgcattatctgcgacgagcggatatttcagcaaatcgctcccgtttgcaggaaagctcggctgggtcggaaaagtattcttttcctatggatttctggcctacgcggcgattttgatcgcgattatctgcgcgtatgtattgaagcacacgcgcattggactgcatctgcgtgcggtcggtgagaatccgggtacggcagatgcggcgggtatcaacgtcacgaagtataaatacaaggctacctgcatcggctgtatgatcgcaggccttggcggactgtactatgtcatggattatgcgtgcggcgtatggtcaaatgatgcgtttggtgaccgcggctggctggcgatcgcactcgtcatctttacgatctggcggccgttcgtgagcatctttgcctcgatctttttcggcgggctttacatcctgtatctgtatctgccgaccggtatggatcatatggaatatcaggagctctataaaatgatcccgtacattgtcacgcttgttgtactcgtgctcacgagcatgcgtaataagcgggagaaccagccgccaagctcactcggacagtcgtatttccgggaggagcggtagacttagaaggaaagaatgagcagacacagcagggttttggaaacaaccaaagtcctgctgtttttatgttacaggagcgccctgtaatttgccctgcgccatcttgtgaaaatggcaggaagctgatatactcaaaggtagttgtgtaaagacagaaaacaagaatgaataatgaaaataataagaaaggaaggcggcttgccgccggtgtgtgatatgaaacgatcggaacagagggtagaaaatacgtggaaaatggaagatatttatgcttccatggaggcttataatgccgatgtacagaaggtgcaggcgcttttgaaggaatatgaggcgctgcagggaacgcttgggaaggatgcggagtatttactgcgggcgctgatgcttgatgagcagatcagcatgatttattcagagctggcagtctatgccaatcagagatatcatgaggatacaggaaatgcggtataccagaagctgacaggtgaggtacagacacttggcgtgcagatgatgcagagtatatcctggtttcagccggagctgcttgcattgccggaagcgcgtctgactcagtattatgcggaggagccgaagctggagggataccgtcggcaggtcgaggaggtcacaagaatgcgcgaccatatcctggatacaaagacggaggagctgctggcgaggatgagtgagctggccgatgcaccggctaatattttttcgatgtttaacaatgcggatatccgctttccggacatcgaggatgcaaatggcgagaagcatacgctgacgatcggaagctacatttcctatatggagagccgtgaccgcaccttacgggagaacgcctttcatgccctgtattccgtctaccgtcagtaccgcaatacgattgcggcgatgtattatgcaaatgcaaagcaggcagatgtgatggcaaaggagcaccattatgacaatgcgatgcagcaggcgctggatgcgagtgcgataccggtatccgtttacgagaacctgattgggacgatcaaccgcaggcttccggcgatgtaccgttatgtggagcttcgcaaaaagctgctcggagtcgagacgcttcatatgtatgacaattatgtgccgatggtggactgtccggatcagaagtattcttttgaggaggcaaaggagatcgtactgcgtggcctggcgccgctaggagcagactatcaggagcttttgcaaaaggggtttgacggccgctggatcgatatatatgaaaatgagggcaagcgtaccggggcttattcatggggaacgtatcagtcacatccgtatgtgctgctgaattaccatggcacactggcagatgtttttacgctggcacatgagatgggacattccatccactcctggtattcgaaccacacacagccataccgctattccggataccggattttcgtcgcagaggtcgcctccacctgtaatgaggcactattgattcatgaccttctggaacgcacggaggatgaggcagagcgtcgttatctgatcaactattttctggatcagtttaagtctacgatgttccgtcagacaatgtttgcagaatttgagcgcgacacgcatgcagcggtacagtgcggcgagacactgacctccgaggcactctgcagtgcgtactatgagctgaatcgcagatactttggcgaggctatggaggtagatgaagatatcgcctttgagtggcagcgtattccgcatttttacacgccattttacgtatatcagtatgcgaccggattcgcagcagcgatcgcgatcagcagcaagatcctctcaggcgagccgggaatcgtcgagaattataaacggtttctgagtggcggaagctctatggatccgattgatctgctgaagctctgtggcgtcgatatgtcttcgccggagcctgtggaacgtgccctggatgtctttgagaaatatctggaaaaacttgcaaaagcttgaaaaatttgattgacttttgaaaaaaaaactgtataaaatatagcttgaatccggcgtatgagagcatcaaaagcggagctcctgcgccgggtttttcttcctgtgagcaagtcgtaaaacggaggccctgtcagcagagatgcagggatggattgtgaatatccgcttgacggttgaacagaactttacaccaggtgatggaacaaatgacgaggaggatttatggcaaaacaatatgtgaaagatatgacaaccgggaatgagctgccgctgcttttgcgcttttcccttccgatgctggtcggaaatatttttcagcagttttacaacatggtcgactcgatcgtagtcgggaattacgtcgggacaaatgctctggcggcagtcggtatgacatcgtcgctgaattttctgtactttgcgctctgcaatggatttgcgaccggggcaggagtactgatgtcccagtattttggcatgaaaaatgaaaaacgggtcaaggatgcgctcggcaattctgtatatctgctgcttggcatgggcattctggtcagtttcgtttccgtgctgttttccagaaatattctcgagcttttgaatacgccgcaggagatttttgacgatgcgctgctctatacgaggatcgtctgcggcggtatcatatcagttgtaatgtacaatgggattgcggcgatgctgcagtcgcttggcgactcgacgacaccactgatttttctggtggttgccagtgtactgaatgtgattggcgatctgctgctagttgtcgtgttccatatgggagtggccggcgttgcgattgcgacgatcatcgcgcagctgctctcggctttggggtgtatcgtgtatgcggtaaagaaaaatccgtatttccggctgacaaaagagaacttccggccggatccggcacttatgaaaaaatgtctgcgcctcggcattccgttcggtgcgcagggcagtctgattgcattttcctgtgtggcactgcagagcatcatcaatcgctttggctcggatgtcatcgctgcatttacagcgacctcccggatcgagcagctcgtgcagcagccgtacaattctctggcgacggcgcttgccacctttgcggcacagaatattggagcaggcaacccggaacgtgtccgcagaggttttcgaaaatcaacgtttctggtcatcgtgttcagcgtgattatgtgcgggatcatgttcctttccggggaagcgtttgtccgcctttttgtcaaagatgcgaatgtcatcgcgattggcggccgtgcgatccggatcacgagtctgttttacattccgcttgggatgatttatattacgcgcagccttttaaatggggcaggcgattcagcctttgcctttgtcagcggactggcggaggtcgtaggcagagtcggcttttcaattctgctcgccggtattccggcactcggctactgggcagtctggtatacgaccggtctgacctggctcatcacaggagccgcctgtatactgcgctatttgcagggaaagtgggaacggattgtgctggtagagaaatagcgcgcggggggacatatgaagataatcggaattgatatcgggacgacatcgatcagctcggtcgtgctggacggggagacagagacacaggtggctgcgaagacgttgccgaatgatacggcacgtgcaggccatagctgggagcgcatgcaggatgcagaccggattctggaaaaatgccggaagcttgtaatggaataccggagggagtggccggacgtgcgcggcatcggtatcacgggccagatgcacggcatgctgtatgtggatgcaaacggatgtgccgtctcaccgcttacgacgtgggaggatgagcggggaaaccagccttatcgggaaggcagcacctatgcgcaggagctgagcgcgcgaagcggctatgagatggcgacagggtacggactaacgacccatttttacaatctgcaaaaccatctggtgccggaacaggccacttccatgacgacgatcatggattatgtagcgatgcggctcaccggaaggcgatatccgatgacacatcctaccaatgcggcgagctttgggctgtttgatatccgaagcggcagctttgataaggcagcatgccgcaaggccgggatcgatccggcgatcctgccggaggtggtgcagggagaatcggtgatcggtcggacggcggacggcatagaggtggtgatcccgatcggggataatcaggccggaatattagggctgtgtgagagcgagcaggatatcgtactgaacatcggtacctccagtcaggtatcaaagatcagcgacaggatcccggaggataggacactggagtgtcgtccttacgtaggggggaagtatctgctccttggagccggactctgcggcggtacttcatttcggatgctgaatgattttttccgtgatgtatgcgcacggtgtggagctacggtttcccgtgatgagatgtttggctgcatgatgacggcagcaaatgaggcgagagaagcagaacaggggacggaggtgctgagcgttcagacactgtttcgcgggacgcgggcgaatccgtccctgcgcggaagcattgacggcatcacgatgacgaacctgacgatggggacactcgtgctcggcttttaccggggcgtcctgacggagctgtatgaagcatatcagaagatggatgcagacccggcacaggggcgtctgcttctctgcggaaatgccttgcgcaacaatccgctgctgcgcagtctctgtgcggaattattcggaagagaagcctgtctgactgaccgaaaggaagagaccgcgaccggggccgcgctgctggcgaggtttgctgcacccaaaagaggctgtcaaaatgctgcagagtatggtacaatggaaaatgtgtgaacagaatggttcgagtcaaaataccgtttgacccaaacatcttatgatattaatgtcaaaagatgccttacggattgtttcgtacttcgtacttccacaatcctacccaatattcgcatatcgtgaagcttgcgctccacttttatgctcatatcggggcgggtcattaagccataaaaccactcctgtgcaagcacatcgtggtttcaggc

SEQ ID NO: 2610 - DNA, 11180 bp, Unknown
  16S sequences of unknown bacteria
tacctcttctttcccatgcgaactccaaactgtctcattctgagtccgcacatccccgtgggtatcggttcactttgacacgaggggccgtgggtatcgtgccatgttggctcgaagggacaccccggcccctctcttcgcgtcatcgtgcgccccgcgaacgtgaggagaaatagagattgcacattgatgacgcatcgggtatcatctaactttgtgtgtctacccaatgcctagttgtgaccatcctttcggattgcaacccagcatcgggcgtattggaactgatgcccagcgcacacggggcatccgcaaagaaagggacatcgcaatgacgatttccaaagagcagaaggccgaaatcatcaaggagttcggcaagaccgagcaggattccggctccgccgaggtccaggttgcactgcttaccgcacgcatcaaagacctcaccgagcatgtcaaggtccacaagaaggaccatcacacgcgccgcggcctgctgatgctcgtcggcaagcgccgtcgcctcctcacctacatcaaggatcgcgacatcgacgagtaccgcgagctcatcaagaagctcggcattcgcgacaacgtttaatttcgtgaacgagaaggcgggcccaaagtgcccgcctttttgctatccgcccgtcagctggagcttgtcgggcgggttgcaccgggcggtatcggccggtgccttgccagggggcatggggtcttctggcagttcccgtctcgcaaggggcgaggcgggcgaagtatggagaaaagtaaatgagcaaagtaacacacgagttcgacctgtacggaaagcactactccttcgagacgggagagcttgcaaagcaggctacgggcgcagtcgtcgtcaagcagggtgacaccatcctgctcaccaccgcggtcatctccaaggagaagcgcgacctcgacttcttcccgctgaccgtcgacttcatcgagaagatgtacgccgtcggccgcatcccgggcggctacctcaagcgcgaggcgcgtccctccgagaagggcacgctcaccgcacgcctggtcgaccgtccgattcgccccggttttcccgatggcttccgcaacgatgtgcagattgtcatcaccacgctgtcgtgcgaccaggtcaaccagcccgacgttccctcgatcatgggcgcctccgctgcgctgatggtcggcggcgcgccgtttgacggtcccgttgccggcgtccgcatcggccgcaaccgcgagacgggcgagtacatcgtcaacccgaccttccaggaagacgagaactccgacctcaacctgaccgtcgcgggcaccaaggactatctgcagatggtcgaggccggcgccgacgaggtctccgaagaggacatggtcaaggccctcgagttcggccagaaggtcatcggcgagttctgcgacgagcagcagaagttcctcgacaagtgcgagatcaccccgttcgagtacgagctcgaccagcccatccccgaggtcatcgagaaggtcgagtcctactacgaccagatggcctctgcgctcaaggacgcggacaagcagtcccgcatcgccaaggtagaggccctcaaagacgagatcaaggcctcctttaccgacgagcagcgtgatgcctggggccgcgagattgccgcagcctgcaaggcgctcgagcgcaaggcgatgcgcaccatgatcatcgagaccggcgagcgcgtcgacggtcgcaaaagcgacgagatccgcccgctgttcatcaagccgcattacctgccccgcgcccatggctcgggcctgttccagcgtggccagacgcaggtgctttccgtgtgcaccctgggcatgctcaacgagtggcagcgccttgataccatcgaccctgccgagggcaagcgctacatgcaccagtacaacttcccgccgtattgcacgggcgagaccggccgcatgggcgcccccaagcgccgcgagctcggccatggcgccctcgcttcccgcgcactcgagccgatgatcccgagcgaggaggagttcccgtacgcgatccgcgtcgtctccgaggtcatggagtccaacggctcttcctccatggcttccacctgcggttccacgctcgccctcatggatgcgggcgtgccgatcaagcgcccggtctccggcgttgcgatgggccttatccaggaggagggcaagcacgtcatcctgaccgacatccagggcctcgaggacttcctcggcgacatggacttcaaggtaaccggtaccaccgagggcatcaccgccctgcagatggacaacaaggccaagggcctgaccaccgacatcctcgccgaggcgctgcagcaggccaagcgtggccgtgccttcatcctcgacgcgatgctcgagcagatctccgagccgcgtgaggagctctccgagttcgccccgcgcatcatcaccatcaagatccccgtcgacaagatccgcgacgtcatcggctcgggcggcaaggtcatccgcggcatgcaggaagagaccggcgccaccatcgaggtccacgaggacggcaacgtcttcatcgcctccaccgaccaaggtggcgagcaggccaagaagatgatcgaggacatcgtcaaggtgcccgaggtaggcgaggagtacgagggcgaggtcgtcaacatccagtcctttggcgcattcgtcaagctgacccccaacaaggacggtctgctccacatcagccgcgtggccaacggccgtgtcggcaaggtcgaagacgtcctgtccgagggcgacatcgtcaaggtcaagatcatcgacgtcgacgagaagaccggcaagatcagcctcgaccgtctggacaagccggatgccccggcaagctccgaggctcccaagaaggagcgcgacaaccgccctggccgtgctggccgcagggagcgcagcgcccagtcgcacgacaaccgtcgtccgcgccgtcgcaaccacagcaacgaggaatagcttcaaagagctaacaccaccgtttacgatagggaggcccgcagcgcacatgcgggcctcctttcgtttgtccgaaacggtgtcgttgcgctcatgtagaatggctctcagatgatgacttctcgactcgaggcgaggatacagatatgggacagaacaatcgccgcagcggctacccacgagggagctcccagcagggcaaccgcggcgcacgcggggcaaatggcaggcacgccggctaccagctctacggcggagacgcgcatggcctgtataactctgggtattcgacgggcggcaggcgcaacaaccgcagcaccatgatctacggcaagcagcgcaagacctggcccaaggtcgtgctcgcgtttgccatcgtgctcatcgtcatcgcgtgcgtctggcagtttgcctgcggcggcctgccgttcttgagcgcgagcgaacagccccaagaccagcagcaggaagccacgcaagagcagcaagacgatcaggcttcggcgcaggacctgacgcgcagcgacgccaacggcacgtatcaggcggggctcgacacctcgttcacgatcacggcaataggcgattgcacgctcggaacggattccgacttcgacgcctcgaccaacttcgtcaccaagtacaacgacacatcggagggctacttcttccagaacgtggcacccgtgctgggcgctgacgacctcaccatcggcaacttcgagggaacgctcaccgagagcaacgacatccagcaaaaggctttcaacttcaaggcgcctgcctcgtatgcgggcattctcaaagcaggcagcgtcgaggccgtcaacgtggccaacaaccattcgttcgactatggccagcagggcttcgacgacacgaagaagaacctcacggcggcaaacatcaccaacttcggctacgaccgcacggccacctacgaggtcaacggcatcaaggtcggcctgttcggcatctgccagctcgacggggcggacaaggcgacgacgctcatgcaaagcgacatcaagtcgctgcaagacgagggctgccagctcatcatcggcatgttccactggggcatcgagggcgagaacgtgcccgaaagcgagcaggtgtcgctggcacatgcggcaatcgatgccgggtgcgacctggtgatcggcgggcacccgcatgtgctgcagggcgtcgagtactacaagaaccgctacatctgctactcgatgggcaatttctgctttggtggcaacacccatcctaccgacttcgacacgatgatgtaccagcagaccttcacgttcaaagacggccagctcgtcatggacgacgccacgaaggcacaggtggacatcatcccgtgctcggtgtccagcagctcgtccatcaacaactaccagccaacgccgctcaccggagagcgggggagtgccgtggtaagcaggctcaacgggttttcgaagaagctttccggaacgcccgtgagctttgacacggaactcgactccagtggtcgcgcgacggtcgccaaatagacgaacgggcgcttttgcattaccatcacagcagcataaattagccgttcaggcgcgatggcggggcaggcgcgatgcaccccgctgttcgtttcttgtggcgaagatttcgtttcgaaagaggagcaagctcgtatgtcgctttccattggcattgtcggcctgccgaacgtcggcaagtcgactctgttcactgcgctgacggaccagacaggtcttgcagcaaactatccgttcgcaaccatcgaccccaacgtcggcatcgtgcctgtccccgatgagcgcctgggcaaactcgcagagatcgtccatccgggccgtattgtcccagccactgtcgaattcgtcgacatcgccggccttgtcaagggcgcgagcgaaggcgaggggctgggcaaccagttcttggcgaacattcgcgagaccgatgctatctgcgaggttgtccgctacttcagcgatccggacgtcatccgccacgagagcagccacgaccccatctccgacgtcgagacgattcgcaccgagcttgtcttggcggatcttgcgacgctcgagcacgcgctgccgcgcctggagaaggactccaaacgcgacaaggtcaacgtgcccaagtacgagatcgcaaagcgcatgggtgactggctcaacgagggcaatcctgcgcgcctcatggagatgaccgacgaggagcgcgagctgctgtacgacttgcacctgcttaccatgaagccggtcatgtacctcgcgaatgtcgacgaagaccaggtcacggcagatttcgaagaaatcgacggcgtcaagccgctgccgatctgcgcgcaggtcgaagcagagctcgccgagctcgacgatgacgagaaggcggagttcctcgccgacttgggcctcgaggaatcgggtctggcgcgcctggcgaaggccgcgtacaagctgcttggtctgcagtcgttcttcacggcgggcgagatggaggtcaaggcgtggacgattccgatcggcgccaaggcacctcaggccgcaggcgtcattcacactgacttcgagaagggcttcatcaaggccgagacggcgtcgtacgacgactacatcaagtacggcggagaggctgccgcgagcacggccgcctacgccaagagggcaaggactacgtcgtcgaagatggcgacgtcatgcacttcaagttcaacgtttccaaataggggagagtaacaagatggcgaactccactgcacaagaccagaaggttctcgtagtcgactttggcgcccagtacggccagctcattgcccgccgcgtgcgtgacttgggcgtctattccgagattgtctcttgcgatgcgtccgccgacgagatgaaggcggccaacccgtctgcgatcatcttgtcgggcggccccgcgagcgtgtacgcggacgacgcgccgtcagttgacccgaaggtgttcgaactgggcgtgcccattctgggcttttgctacggacagcagatcatggccgtcacgctgggcgggaaggtcggccacaccgacaagggcgagtacgggcataccgacatcacgcgaactggcacatcgcagctgctcgacggcacgcccgatgagcagacggtgtggatgagccaccgcgatgcggtctccgaggtacccgaggggttcgtcatcacttctacgacggcaaactgcccggtcgcctcgatggaaaacgccgagcgcaagtttttcgcgacgcagtttcaccccgaggtgcggcacacccagtacggcaagcgcatgctggagaacttcctgttcgacatctgcggattgcaggcgacttggaagatggacaacatcgtcgagcagaaggttgcagagattcgcgagaaagtaggggacaagcgcgtcatcttggggctttccggaggcgtggactcatcggttgtcgccgcgctgtgcgcaagggcgattggcaagcagctcacctgcgtcttcgtcaaccatgggcttcttcgaaaggacgagcccgagcaggtcgaggaagtcttcaccaaacagtttgacgtcgacttcgtgcacgtgcacgccgaggagcgctatctcaaactgctcgagggcgtgaccgagcccgagaagaagcgccagatcatcgggacgcagttctggaaggagttcttcgccgttgcccaggatttggacggcgtcgagttcttggcccagggcacgatctatcccgacatcatcgagtcgggcgcgcgcaagacgggcggcaaggcgagcacgatcaagagccaccacaacctgatcccgttccccgaaggagtgcacttcgacctgatcgagccgctcgaccacttcttcaaggacgaggtccgcgcgctgggcaccgttctggggctgcccgaccacatcgtgtaccgccagcccttcccgggcccgggcctagcgatccgcatcatcggcgcggtggatgccgagaagatcgagatgctgaaagaagcggatgcgatcgtgcgcgaggagatcgacgcgtacaacgagcgtctgttcgaggagacgggcacgcgcagcagcgagcattctgcctggcagtactttgccgtgctgcccgacgtgagaagcgtcggcgtcatgggcgacgagcgcacgtaccagcacccgatcatcgtgcgcgcggtggagagccaagacgcgatgacggcggactgggcgaagctgccctacgaggtgctcggcaagatctcgacgaggattgtcggggaggtgaacggcatcaatcgcgtggcctacgacatcacttcgaagccgcctgcgacgatcgagtgggagtgacctgggcttttgtccatctagttgcaagcctcccgtctagtggcggtggttagcatctagtggtgggaataggacaaagccgccggaacttccgatgagtggaattcacctgcaaaccccgcaatcaagtgattacggggtttgttttattagaaacgacctgcggaaatactctttacacccgtccatctcttacaaaagacggcattagtttgcattaggcgcgaaccgttccgaaaacgtgccaatatcaacggaatgattccatcgcgtttttcggtcgcgccatcctcgaagggccttgagtatagtcatcgtgtagtcaccccgctttccggcgccccaaatctgcgtttgcactggtaggagcgaagagtgacgaaccgcccggaaaccaggtccggatgcttttccagcgggctgagacggcatccggagacgctggagtcactctcgccatgcgtcccagagcccttccccgaacgtttatggaacgctcctgaatcgcagtagttgccggagagtgacaatcctggtgaaaaaaagagggtgcgctcgcgcgctccctcgattgtctctctcgcttgtcctcagcccctgaagtgggccttccaggcctcgtagtcctcctcggaaatctctccggcggagagctggtcgcgcatgcgcttccaggccttcagggcctgagctgctttctgggagcccggcctcgtggggtccggggcaactgcgacgccgtcctccgtgaccacgggcgagagccccagctcccgctcgcagcggaacagcacctcgagtgcgcccctggccccctccacgccgatgtcgcggatggcgtcggacgacacgtcgagcgcctcggcaatcctctcgatctgctcgtcgcccggagttctgatgtcgcgttcgtagttgcggatggcggactcggtgagctccacctcctcggcgagctccctctgggtcatgtcgacctcgtttctgtactttcgtatgcgctcgccaatgctcatgggccctcctggcttctcggatggggaaagcatattacagcacgcaaccgtgcgcaaacgtttgacagcacgatatcgtgctgttattctccgggaatagagagcacgttaccgtgctgttcactcattcggaatgattgcgaggctgatgagatgtcggtgaggatcgaggcgaacggcacctggaccgcacaggtctggtaccgcgactacagcggcgcgaagcgccacaagacgaagcgcggctttcactcggaggaagaggccgagtcgtgggagacggagttcgcgagggacgccgagggcgcggtggactcgaccttcgcagtcttctacgaggtctacgcggccgacatggagccccgcctgagagagcacacctggcacaccaagaagtatatgatcgaggggaagaccctcccgtacttcgggaacatgcgcgtggacgagatagagcccctcgacgtcgtgcgctggcagaacaagctcatggcgtaccgcaacgccaagggcgagccatactcccagacctacctcaggacgataaacaaccagctctccgcaatcttcaaccacgccgtgcgctactacgggctcgcctcgaacccgtgcacgcgcaccacgaggatgggctcgtcgaggggcggcgagatgctcttctggacgagggacgagtacctcaggttctccgacgcggtggcggacaagcccgagagctactacgccttcgaggtcctgtactggtgcgggctgcgcgtcggggagctattggcgctcacgcccgccgacttcgactgggcgcgcgccgagattaaggtgaccaagtcctaccagcggctctccggccgcgacgtcatcacgcctcccaagacgcccaagtcggttcgcgacgtggttatgcccgagttcctggccgaggagctcaggccgtggatcgactcgctcggaatcggccccgactcgagggtgttcacgttcacgaaggcgaagctccaccacgagctcgaccgcggttgcgctaagtcccacgtcaagcgcacccgcattcacgacctgcggcgcagccatgtatcgctgctgatagagatgggcttctccgccgtcgcgatcgcagagaggctcgggcacgagagcgccgacatcaccttccgttacgcgcacctcttccctgacaagccttgggtcggggggtgctgatgtccgctggtgtcgtcttaccccaagctgtcattgcatgcaattggacattgctaccgcaagttgagcaacattcctcggtcgacaaaaacactttcctgcggcgattgcacaatgatcgagagaattgaatgagagtacttgcaggtaagacgcaatatcgacttatgcggaatcgcgcatatggttcttgaaagaatctgtaaatgaggaagaggctgttcagaagccacttatcattatggcagttattgcgtggctcgggtttctataatgacaaccaaacggttcatacctatcagcctgtacgtccggattgaaaagtggtggaggtcgaatgaaaagcaagattcctcaaattcgtggcgtgcgggtgaatagcgggattttctcggatggctttgatgtcaatcttttcaatggcggagacaagcgaagccgtgtatcgattatttttggccacaatggctctgacaaatcaacactcgctcgagagatagacgccattaaatcaggcaatggcgaagggttcttttatgactactcaaatcagatgcttgatttaggggacgtggatcgtgcgcgaataagggtgttcggcgaagagtatatcgagtcaaaaatacgcattaacaaagacggtctcgaggcattcgcgatgcttggtgagcagattgatgcagctgacgaaatcgagcgaatagacgagaaaattagcgatatccgtacagataacgagaagttgatgctggagatcgatgagcttagtggagataaagggtcgatttattccttggagcaagaagcaaaagatgcggttaaaaacggtggatgggagtcgagggtcgaacaagtagaggggacgacgccaaaacttacacaaagacgatggaatgagatactgaaggcatcgacagacctgtctcgcggcgaactggaaaagcaattcaacggcatgctctcagaatataggagagcaagcgatgccggctccggtcatttgcccaagctgtcccaggttgcagctgctaattatgatgagataaaccttctgaacctgttggcaaagcgcgtcgagaacccgacgcttagtgaccgcgagaagcgcatcctcgaactcgtccagagcggccgtcagtgcttggtcgaggaggcgacaagggttttctcccaaccggagactgagatgtgcccgatgtgccagcgtgatatttcgcagcaagagaaggattcgattgttgatagcgtctgcagggtactcaataaggaggtcgacgcgtttaaggaggaacttagcggagccgctttgcaagagattcctcatcaggaaaccgccgaacagataacggatcgtctcagggctgacttgctccaagcggaacatagggtcaatgagttggtgcagaagtacaacgatctgatagcggagcgcatggcaaatatctattctccgatacccattgaaccccttgggctatccgaggctcttcgggatttaaatggaatagtcgagcgagtcaatggggacattactaccttaatcagctgctagtgattaaggtagtcaagtattatttgaacattctaagtaatcaggcaaaacaatgtaaagtaatcccaggggat

SEQ ID NO: 2611 - DNA, 8688 bp, Unknown
  16S sequences of unknown bacteria
acgattacccggaggcgaatcaaaagcgccgcgcgaccgttttgtacgaaatgtacgaccagggctatataaccaaggaagaatacgaaaaagcaaaggccgaagaggttaaaatagtagcctctaaggacgcgcttaaagaaaccgacaataactcatactttgttgacgcgcttattgaccaggtagtcaaggcgcttacggacaagttcggctacgaaaagacccacgccaataagatattctactcgagcggctataaaatttatgccacggttgacgcgaatattcaaaaaaccatggagtccgtattctccgatcagaagacctacggcttaaagggcaaaaacggcgctacgctccaaggctcaatgacggtcatagactataacggccatgttaaagggcttgtgggcggaataggcgaaaaaatcggtcagcgcggctttaaccgtgcaacaagcgcggttcgtcagcccggctccacaatgaaacccatagcggcatatgccccggcaattgaaaaggatattataaattattcgagtattgtgaacgatacaaagaccaattacaacggctggactcccgttaactggtacagctcatactggggtaacattaccgttcagtacgcgctcgagcgctcggtaaataccattccggtctatctggtaaataagctcggcacacaggtttcgtttgattttctcaccaagaccctcggcatcaccaccctcacaaacgaggatgttaatctggcaccgctcggaatgggcggtacaaacggcggaattacctcgttggagtctgccgcggcttacgccatattcggcaacctcgggcaataccacgcccccaccctgttcaccaaggtgaccgatcagcatgacgagatcgtatttgaatatgacagctcacccacaatggctataagcgaggacaccgccaccgttatgaacaagcttctgcaaacggtagtttacggttcccgaggcacaggcgctgcggcaagaaacaccgttaaggatatgaaaatattcgccaagaccggtacctcgaacaattcaaacgacctttggtttgtcggcggtactccttactatgtaggctcatgctggtgcggctatgacgagcagcagaatatttccaatgccggaatcgcgcgtgtcatgtggagtgcggtaatgtctaaaatacacaatggacttgagcctaaggaatttgaagtgagcagctacgcaaccgagcgctattactgcacaagcacaggtctgctcgctacctccgcctgcccctcaaaaagcataggctggtataaaaagagcaacaccccgggaagctgcaccgctcacgcgggagcagcgcttaaaacaccggcggaaatcaaaaaagcggaggaggaaaagaaggctgcggagagctcaaaagccgaaagcacctcttcatcctcttcaacatcatccgcctcatcaacatcatccaaaaccgaaagtaacagataaatttatgcttgattttaaaaaatttgaaataagcgacgcaccgcgtcttttaaagtacacctccgactccgccgagctttcctgcgagggcgcttttgtaaacctgcttgtctggcaggatatttataaaaatatgtgggcggaaaaggacggacatctttttgtaaaatccgaaaagagcggcaaaaatgttttccgcctgcccttcggcaacgaccttaaagcgggcattgaaatgatacaggaatattccgatacggagtatcccgaattttgggtgcaggacggcgcgcgcctttccgaattcaaagagcttttcggagagcactataccttttcagaagagcgtgacgcctttgattatgtatataaccgtgccgatttagcctccctttcgggcaaaaaataccacggcaagcgcaaccatataagcgcgttttcaaagcaatatgactggcgctatgcagcgctcaccgccggcaatgtcaatgatatcaggcaatgtgcaaatgaatggtatgccgaaaacgaggccagggcagataaatatctgctttgcgaaaagcgcggcgttgaaatcatgctgcaaaacgccgcggcactcgaaattcgcggcggtattatatatatcggagaaaaggctgtcgcctttacgctcggctctgcggtaaaccgtgatgtctttgacattcatattgaaaaatcccttgcggaatatgccgagggctacacggtgataaaccgcgaatttgccgcgaacgagcttgccgattataagtatataaaccgtgaggacgatatgggacttgatggattacggcaagccaagctttcataccacccggcggttatggtaaaaaaatactccgccgtaaaaaaggtgacggaatgagcataaacgaatgcagggaaatttaccgcgaggcattcggcagcgacggtgaatttgaaaacagactttttacatgctgctttaaatattgcaaaacgctcagcatcggcggaaaaaccgcatcgatgctttttgcactcccctgcaatattcatagcgacgccgcgcctgtttccgcttattatattttcgccgcagccacaaaaaaggaatttcgcggaaatggatatatgagtcggctgatacgttcgcttgaagccgacaggcttctctttttaaagcccgcttccccctcgcttttcggtttttatgagcggctgggctttcagccgttttccgtctcctcaaatgaaaacagcccttgctttgcagagcctgccgaaggctttgcagcgcttgccgacgaagaggaaaaagcgccgatttcatgcacggcgcttttcaaatacgatcgcaatattctgattgacggtcttttcttcccgtattttatggaataatttcactgctgacggattttttcccggcagcgttaacggcaataattgcttcaatattatcgattataaaccgctgcgcttcaatattataaacaacaacggtatactcccctctctgtcccattcttttttccgtcagaattccaagctccgtaccccgctcggtcggaagcttggtatttttgccgtctgcggtcgttattacctcaagcgcgcctatttcgataagccatgttgtgacggaggtaagcttcagctgacagcagcgctccgaatccgctaatgaatttatatgtttaacaatttcgctgacggttatcggcgttttggaaaatcggaatccttttgcggcctcggagggtaagaaaaacggaactttggcgacttttttcttacttatcgaaccgccgttatcaatcacccgtttcaaaatatcagaaacataaaagagacatcgcgagatgcgaacattattaatgacatcggaatccgcaacacatgttccgtcaatcggattgattccgtttgccagctgatcaatatacgccttagctctttgcattatttcaagctccgtcatttcataatcccctttaataccttattatgggattatgatagcatatttttcataatctttcaatagccgaatgtctcatcaaaccgtttcttaaaatcctcgaaaatctcgaccgccttaaagcgcataatatatttctgcggatgctccgcaatttcggcggatgtcctgcttgtgctgtctgaaagctctgcttcgggtgcagctgcaggtatgcacaccgcaggaaaaacaacgcaccaccagtttttgccctccgccttgccgagccttattataagcgatcggtaattccccgcaggcagcgtgaagctttcatattcgcgcgtttcaaaatagctgtttccgatttccgccgctgccccgtagccgaagccgttagccttaagggtttcttcggcgcattcggctatattgcaaagattttccgcagcccttttctccgcttcattaagacccgccgcacccgagaaaatgtctgccgtttcctcaagaattctgtcgcgcaccaaaagcttcaccgcttgatctgcctcggaatttgaatttgcgattatatgtaaccgcaaaacgttttgtcttaaatcctcgcaggcagcgtcaaaacgggcaaatgacatgactgccgtaaaaatcagtcccataagcaccgccagctccgccgtgttgcgctttgataattgttttctcatttcaccaacatcctttcagcttgaatattggttattttttcaaggtttattcaataaaatgttgctaatttcgccgccgtatgctataatactgaaaaataaaaaaaatctggagggttctgcattgaattccgatatagtaattacaagcgacagcactaccgatttaagccccgagcttaaagaaagatacggtattgaaatatgcccgctcggtgtaacgctcggcggcaagacctatatagacggggtcgatattacccccgacgatatttacgctcatcatgataaaaccggcgagctgccgaagacctccgctaccaatgtgggcgagtgtctcgatttcttcaggaaatttaccgaaagcggtaaaaccgtaattcactttaccataagctcggaaatgtcctctacctatgccaacgcctgccttgcagccgaggagcttgaaaatgtttatgttatcaacaccgaaaacctttccaccggcggcgggctattggttgttgccgcagcacaaatgcgcgaagacgggctttcagccgaagaaatagttgaaaaaacaaaagcgcttgtgccctgtgttgacgcgtcgtttgtaattgacagcctcgaatatctttacaagggcgggcgctgctcggctcttgcgatgttcggcgcaaatcttttaagacttaagccctgcattcaggttaaaaacggcaaaatggatgttgcgaaaaaataccgcggcaaatacgatgaggtattaaagcagtatatccgcgaaaagattaccgattattcggatatagtgcttgaccgcgtgtttataacccacgcgggctgcgacagcaagctggttgacgaaatcgtggcgcttgtaaaggagcttgctccctttaaggaagtgcatatgacccgcgcgggctgcaccgtttcctctcattgcggagcgaatacactcggcgttctctttataagaaaatcacctctttaagcattttgcatagtatatagcaggggttgccatgggatatcccgaatatcggcggcggctcggagctgtctgcaaataaccgataagacccctttatataaattgcccgtgcggtgtaatatccgcatgggctctttttatatttacagttaaatccgactatattcggggcagctgtgcaattaaagccccggcacgaaaaatgacaagcaacaaggcaaaaattcacaatcaccgcaatatgtacagaaggtataatattagaaaaggaaggcttgaaatattcggggtaagccaaaaagcacaagcattttcacagggatcggctgctctgtagcatagttctgttttggatgaacatcgatttctcagaatatgctcagatgcataacgaatacggagtatcctcaagcgctttgtccaaatggctaaagcgcttgaggaagtaaaaaatgagtcctgtcacactaccgaaagctttaatcaacccgctcagaatattgtttgggtatgtgattttacctatgaacgacagccacaacaataaatcctcggctgggttctgtcacattaaccaaaaggaggcgttgtttatgccttgtctgattcttttgctgtctgctttattgacatcggtccaaagtattgtattgtccgggaaaatccgttgacagaggggcttgcatcgactataatacttatcggtactaagccggtgccgcttcacatcataataaaaagcatgagcattttccgaacgcgcatatatatcttttcagcgtccgccgcaggcagcggatttttgcccgttccaagctcaattgtgaagcccgggcggcgaaattcggttataaaccaatccttaaagccgccgccgtctgcaatgccgacaggcacatcaagcgcatagcccgatgaggtagacattatttccgccatttttttggctctgggcggttccgaattaccgtagctccaatatatcacctcgccctgcgaatgaagcgccgccgcctgcctgatatttgcggtgcggcaaagctctgtcagcgcaagagtctcgggctcgctttcgggtctgtagccgccgaagcgcgtgggtgacggcccgaatattccggcttttatctccttatttcttaatttttcccaatcggcatcgaaattatggttgatatccaccccgcgcaaatttgcgttccagtgcttaaagtcgccgaggcaaagccgccttacggtgtctccgagctctccgcaggcatttatgccgcttatacttatttcacaaccgtcgggattaacgcagggaacgaaaataactcccctgccgttcaatgcgcgcgcagcgtttaagcctgctatgtaaccgccgtttttaacggcgtctgccaattcttcgataaacataagcagcactgcagaggttatatgctcgctgccgtggaacgcggcggcaataaggctgtattccgcagccgagccgatcttaagcgcggtaatatccctcccgccgcagctgcgcccgatagtcgtgcgttttataagctcatattcggcgcaaaggttgtctatcgcccttcgccgcgcggaataatcgtaaacaacgggttttataagcctgttcatcataccactctcccgtaaattatattaaaagaggttgattttaatgaatcttgaagaaaaacagcttacaagcgaatacatttataacggcaaaattataaagctccgccgcgatacggctctgctgccgaacggcaagacctccacccgcgaggttattgagcataacggcggcgtttgcgttgcggcgctgaccgacagcgacgaggtgcttttcgtaaagcagttccgctatccttatatggaaatcgtgacagaaattcctgcaggaaagcgcgacggcgcagacgaagacccccttgcctgcggcaagcgtgagctaaaggaggaaacgggagccgaagcggaaaggtttataccgctgggtaagctttacccctcccccggctattgcggagaagttatttggatgtttgccgcaacggggctaagctacggcgagcagcacccagacgacgatgaatttttaagcgtagaaaaaataccgcttgaaaaagcggtacaaatgatactttccggcgagataaccgacgcaaaaacacaggctgcggttttaaagctgaagcttttaaaggacagaggggaaatcgattagatattagatattagatgttagatgttagatgttagacattagatatgcaaagccatagcttctgtacaaacagccgtcttcctctattatccaacgcaaacgaagggagtctattcagcttcacaaattaagattttccgaataatagtttatcatttatgaagttattcttttgtcttaccgtcattcacaaattcggctatatcttctaatctgcaattcataattttacagagaatatctaatgtgtgggtgctgatgttttcgttttttcgcaacctatcaagctgtccggtactgattttatactttttaattaaagcatattgtgtgatttctttttgtttcattgttttccataatttatcatatacaatcaaatctatcaccaatttaattgtatatgataatttttaattgacaattgcccatattcgggctataataaatttatgacggaataataaaacgggggaattaatatgtcaaaattcagttattcatgcgatcaaaaaacggcaatactttcagttaaaaaagctcttaacggcaaggttggaattctaaaagataaaggaacagaacttgttgtcggtgcaccgatgatgactgtaaacatcatatttaataacggtgctgttgaaacgaaagccagtttattcgggaaagcccttttgggaacagttgactcctgtatagagctttccggcgaatttgctaagatatgatagttatagcatcggagcaggaaaacagggtttatgcctataatgaaaaaaaggaaaaattcttaatgaggtaggaacattacataactataccgatagtacggtagtaataacaaaaggcaatacaaaatatatatacaattgtacaggagaactattaggtaaatatccgtatgactttataaactatgataatattttcggttgtataaaatgattttgtgttccgaaatataattttattccgtcatataacaaataagcattgatttaatcagaaaattaaatcaatgcttatttgtttgttattcacccgaaaagatcgattatccgttttgcggcttcctttgtctcctcggtatcgccgaaggtggaaaggcggaaatagccctcgccgcattttccgaagcccacgcccggtgtttctattatctgtttttcgtttaaaagcaggtgaaagcactcccggcttgtcatatcgtttgggcatttaaaccatatatagggtacgttctcgccgccgcaataccatattccgcaattatcaaatgctttcataagtgtttttgcgttgccgcggtatacggc

SEQ ID NO: 2612 - DNA, 23426 bp, Unknown
  16S sequences of unknown bacteria
tgaccacgaagttaaggaacgttctatgaaatattatttcgccgcggacatcggcggcaccaaaacggctatcggactttacgacgaggcgtacaacgaaatttatcacggtaaaattctgacggagccttccgaggggtgcgaaaaacttctcgataaactgtacggcatggcgggacgcctgtttgaggaatatcccgtggcgggggcgggcatcgcctgccccgggccgctggacgtttcccgcggcgtggtcaacaataccaccacgctgggctggtacaacgtgcccgtgcgccggttgttttcggaaaaattcggtgtggagttcgccctgctcaacgactgcaacgcgggcgcttacggcgaatacgtcgtgagaaactgcaaaaacatggcgtatatgagcatcagcacgggcatcggcgggggcatcatcgtggacggaaaactgtacaacgggcagggcaacgccgcggaattcgggcatctgtacgccggcggcaggcatctcaaatgcgggtgcggacgtgaggactgtctggaactgtacgcctcgggcacggcggtggaaagcgaatattttcgccgtacgggcaagcgtttgagcggcgtggacattgcggaacttgcgaacatcggcgacgaggcggctgtgagcatttacgaaaacgttgcggggtatatcgcggaggcggtcgtggacattcaaaaaatcctcgatcccgaactcgtcgttatcggcgggggcgtcgccgaggcggagccgttcagaaatgccgccgcctttcagaagatcgggcaatacggcgtgaaagtcgccttttccgatcaggccggaaagcaggtgctgctcggtaccatccattatattcgcgattttatggaaatcagggggataggagcgaatgaaacaacacaagaagttcttcggcagtgacggtttggaatacgcgctttccgaaccgccgctcaaaaagcgggtgactgtcagttttcaaaaatattggctgatctatttactgatattgcccggcgtggtctcgcttatcgttttcgcgtacggaccgatgctgctgcaatttatcatgtcgtttaccgattacaggctcatcgacggtattttcggcagcgattgggtgtggtttgccaattttaagtcgctgtttacagaacttcccgaaatcggcagactgatcaccaacacgctcgtcatcagtttttattatttcatcgcgggattttttccgtcgctggttctggcggttatgctgttcgatctttcgtcgagtaagctgagaaaggtttcgcagaccatcgtctacataccttactttttttcctgggtcatcgtgtacggtatctgttacggcttgttgtccaacacgggtatcctcaattccatcatcacgggccttggcggcaaacgcgtggattttcttttgaacgccaattatatccgcaccattctcgtcgtcacctatatctggaaacaggtgggctggggcaccatcatttaccttgccgccatgctttcgatcgacgtgacgctctacgacgttgccaaactcgacggctgcggccccatccgccgcactttcgtgatcaccctcccgggcatcaaaaacatcacagtgtttctgctcgttctggctctcggcggcattttgaacggcggcaataccgaacagatcctgctcttttactcgcccgcgacctggtcgaaagcggataccatcggcacgtggatgtaccgcgagggactgagaaatcccgaccagttcagcgtggcggcggctctctcgtttttgcaggcgaccatcggcatgatcctcgtgctcatctccaacaaactgtccacgaaatatgcgaagatcagcatctggtaagggggaaaacatggaaaacaacagggtaggccttttatcgaaaataaaacgcgccatgcgccgcgagcgctggaacgcagagcggtattatcagatttttttatacgtctttatttttctgctttcgctcgtatgcctatatccgctcgtatacgttttgagcgcctcgctgatgagtgtttccgaatggcaggcgcgcggcggcgtgtttctggtgccgcaccgccccacgctggaagcgtataaattcgtactgtcccagcaccagttgtaccagtctttgggcgtgagcgtcgcgaggacggttgtgggcgcggtcctttccgtcgtcacctgcgctttgacgggctatgcgctctcccgaaatgactttttcggaaaaaagccgctgtctgtgctgctctttatcaccctcatctattacggagggttgatcccgagttatctcgtcatcgagcagatggggcttttgaacaccttctgggtattcgttattccctccatgctgggcggctggaacgcgctcgtgttccgccagacgttccagggcgttccccccgagatagaggagtccgccatggtggacggcgcgtcgccgctgcgcatattgtggtccattctgttacccatgaatatgcccacggtggcggtcatactgctcttttcggcggtggggcagtggaattcctggttcgacgcgtcgatgtatatcgattcgtccaacgcgtcgctcacgcctctgcaactctttttgcagcgcgtgtttgcggaacaaaagcccgattcggggcaggcgaccctcttaaacgtggaaacacagaaaatggcggtcgccgtgatcggtatcgttcctatcctctgcgtataccctttctttcagaaatactttacaaagggcgtgtacgtcggagcggtcaagggataaaaaataaaaggagaagatgatgaaactgattcaaaaatgtttggtagtgctattgtcgctcttgttggcgggaagcgttttggcgggctgcggcggccgcggaaattcgcagacggcgaccgacgacatcgtggaaatactctaccgcgggtggaacaatctgcccatcgaaaattcctacgtaaataatccgtacaaggaatttatcgacaaaaaatacaatttcgattaccgtgtttccctttcatcggattttacgaacgaagtgtccaaacgctttgcctcgacaaagacgcgccttcccgacatcgtcatgttcgagacacaggactacgcggcgatgaagagcctgtacaatcagggatttttcatcgaggattacacgccttatctcgattcgctgccgcagtataaggctctgtttgaaaacaatctcgccgccaaggcgaaactgaccgaaaacggcaatatcatcgcgcttacgcgcgaggcgaacgatcctgtgtggatgcacaagatccgcaaggattgggtggaaaaatacgcgaacggcaagattcccgccacggtggacgaactgctcgcaatggcggaaaacgtgaagaaagattccaaggcgggcgacgaaaaatatctgttcaccgccgcgggcagccgcaaggatatcggcgatctccaccgtttccagttcatgttcggcgattacgacgactggtacgtcaaagacggtgaggtgagtcatcccattctggacggcacgcacgaaaagtttttgaagttctgccgtacgctgtacgagaaggattatatcgatcccaacttcctgttgcaggactggacgcagaaaaagacgcttttgcacaacgggcatatcggcatcgactattatacgcccgctatcgccaccgaacagatcttttataataacaacgacgagagccagacgaatatctggatgaatatgcccatgcctacggatacggcgggcgtgacgcgcggcggcgtgacgcaggaaactttccagtactatttcgtcatcaacaaaaaactgacggaaaacgaagaaaaattcgcctccgtgctgcaattcctgaacgatatgctatatcccgaagacgaggcggagcgcaacgagagtacgtatatgaagatacgctggggcgtggacgtggacaattacgagatcggagagggcaaggagatggaacccgttttaagagacggcaaagatacgggattcatcacttattattatcagaagaacccgcagaaccacgcacgcccgaccaacggcgcgacctgggattacggcgtgcccatggcgacgaccaacgacaaagttgtagagtatctgggcgcgaccagttacggacagagcgcgtacgactatatcgatctctataacggcgcgctggaatacaatctgaaaaatcccaatttcaactacggcgaaatggtgaacatcagttcgcgcatagagagcaaactcaccgaccttttgaacgagttcgaaacgacgtatattctgggcacggcttcccgctcgtacgaggaattccgcaatacctggctgcaatacggcggggaaacggcgaagaggacggcggagcagcagttcagggccgcgggcttactcaaataaaaattttataaggggacaggaatatgagaaacaaacttttagtgtttatcttggcgctcttctcgctttcggcggcgttcgcgctcgcctcttgcgggggcggcgggccgaaagtgacgccctccaaagcggaatacgatatcggcgcgggcggcgatctggaatttaccgtcgatctgaacggcggcaaactcacgcgcgtcaaggacgacggcgcggtcgtcgatccgacggaatacctcttcgaggaaaaggaaaacaaactgacgattttcgaatcgtaccttctctacgcggagacgaaggaacacacctttacgctcgtgaccgacaagggcgaaacggaatttatcgtcaatattaccaacaaagtcaagacgagtttcgacgagtccgaccgcggctatgcttacggttcgggcaaggatctcgaaatcgacgcggacttttcgaccgccacggtgtcctcggtgactgcgggcgggcgcaaacttgcctctgccgattattcgtacgacggcgcggcgaaaaaatttgcggtcaagacggcgtttctggatacgctgtacggtgaaacggagatcaccgtcaatctttccaacaaccagtcgtataaattcaaagtgacttccgactgcctgttcgccgccaacttcgacgacgataatattccttcattctacaacgaataccgcaacgcgacgacgaccgccgcgggctggaacggcacgagggcgctgcattggaagggcaacggcggcaatctgatgatcttctatgtggaaaactataattacggtttgcagactgcgttcgaggcaggcaagacctactgcctgtccttccagttcaaaaacaactggacgggcgaaggaaatcccgaaggattcgtgggcatgagtctttccaacactgcgctgttcaatctgaattacctcaataacacggtggacggtggcgtggcgagttgcgacgcaaacggcgtgtggagcgtgaaaatttacttcgacgcgcccgccgcgggacagttcacctatatgtacacgggctatcgtgacggttccgacgcggtgctgttcgacctcttgttcgacaatatcgtgcttctggaagcggaagaccgcccccccgttctcgacgaacgcgacggggaaaagactttttccaaaggacaggagagcgatctgtggttcgacggcgaattcgggctttccaaagtcaagagcgtttctgcgggaggcaaaacgctttccgccgaagactattcggtgctcgcgtcgagcgtgatccttaaaaattcctacctttctaaacttaccgaagacacgcagtttatcgtgacgtttgaaaacgacaagacggtcgctttcaaggtgaaactgggcaaatccctttccaccgtgttcgacgaggacaacgagcgcgagtatctctacggcagcggcgatctctccttcgacgtaaatttccgcggattctccgtactttccgtcaaaaacgggcaggaacttgtgcccgaatccgcgtatgtgcttgcagagaacaaactgaccgtcaaacaggcgtatctcgacacgctgcaagggaagaacgacttcgtgctcaccgtggacaatgcggggctggtggacggtaaagacgaggcggaaacgcacgcttttttcatcacctccaacgcagcggtcaatatcgggttcggcgaatcggatatcctgagttcgggcatcgtcggggcgatcgcgcccgcgaaaaacgagatcgccgacggctgggacggtaaggcgtggaacctctccgccacgggcggcaattttatggcgatgaaggcggcgggcgcggcgtggagttacggttcgtatgaggctcccttcgtggataacacgctctattgcctgcaattcgacgtaaaactcaattcccagaccaaacttgagggagaagcgtcgttcgtcaactttattctccacggcacttctgtcctcgcgtctttccatttcgacgagaacaagacgtttgtgcccgaagcggacaagggcgtcacgttcgtcgaccgcggtaacggcgtatataccgtatctttccgattcacgtatatgttagagggactttcgggcgaagaaggatgcgtgcgcatcgaggcgcagcagtataacgaatattcgtacgatattctctttgataaggtcgtcgtttacgcggtgcctctggcgacttccgcgctctacgagcacggttcgatgcgcgacgtttcctacaacgtgacgtttgaagaagtgaaagaagtcaaggcgaacggagtggcgctcgccgccggtcaatacgcactggaagacggcaaactcataatccgcggcgcgtttgcggaaacgatcgtcggctctgcggagatcgtcgccaccaagagcgacgacgccgaggaaacgttcatacttctttccacgctgttacaggatatcgacttcgagcgcgaaacggatccgggctttatggcggcggacattctgacctctacgcagaacggcgcggtcgaaaacggcatcgagggcaagtcctggcaacttacggcgacgggcggcaacttcatgacatttgcgcccgcggcttcgcagtggctttcggtcaacatgtggcccgctacgatcaccgaattccgcgcgggcgtcagatacgcgctgcaattcgacgtaaaacttctcggacagtacgcgcacggcaccaaggacgcgcccgcggccgcggtcaactttatcctgcacggcaccgatcacgacggcaagttctacttcgatgtgacgacgggcgcgctcaccgtcacagaggatgtcggcgttaccgttacgggcggagaaaacggcgtctacacggtaaaattcgaattcgtctacacgccctcaggacacgaaggctgcgtgcggctggaagcggattcgtggcagaacgtcgactacgatatcctgttcgataatatatccgtaaatcaaatcgtataaataaaacgggcggggaaagcgacgctttccccgccttcgaaaaggaagacttgtatgctgaaaattcaacatttcaccgtagaacacagaatcgagcctttggggctggatgaggagcgccccgcgttttcctatcgtctcgaatccgaccgcaggaacgtcgtgcagaaaaaaatgcggctcgtcgtccggcaaggggagaataccgtgtgggacacgggcatgaccgaaagcggcgaaacgctctatcatatatatgcgggcgcgccgctcgcgccctgcacgcgctacgacgtaaaggtacatgccgaggacaaccacggggatacggcgagcgccgaaacctgtttcgaaacggggctgatgccccgtatatcgcctgtcaaggcacagttcgtcacccacgggttcgaggaagagaatctatgccccgtgctctgcaagcgcttttcctgcggcaaaaaggtgcgtggcgcgcgcctgtacgcctctgcgctcggcatgtacgatctgatgctcaacggcgaacgcgtcggcgatctgtatttcacgccctattggacgagttaccgctatgcgctcgaataccagacgtacgatgtcacggcgcttttgcgggaacacaacgagttggaaatgacgcttgccgacggctggtacaagggggaactcacctggctgcgcaaaaagaatctgtacggcgaccgcctggcgggctggctggaactacacgtttgttacgaggacggcactacggaaaaaatcgtcaccgacgaaacgtggcagtcacgtcaaagcagtatcatatcttcgctgtacgacggcgaatgccagaacttttgtgcggaaaagggagaaacgcgccccgcgcgcgtctatgcgcacgatacgggcattctcgtttcgcagttgaatgaacccgtgcgccgccgcgagattttgaaagtaaaagagatcctgaaatccccgcagggcgaaaccattctcgatttcggtcaaaatctcacgggacgggtggaatttcgcgcgcgcggcaaaaagggacaaaaggtcgttctccgctttgccgaagtgctcgacaggtacggcaacctctatacggacaatctccgcaccgccaaggcgacggatactttcattctgagcggtaaagaacagacgtacgcgccgcggttcacctttcacggtttccgctactgcgaagtgcagggcgcggacggcttaactcttgaagattttcgggcggtcgccatgtacagcgatatggcgcgcagcgggaggctggaaacttccgacgaggatatgaacaaactgtacgaaaatcagttttggagcaaccgcggcaactttttggatcttcccaccgactgcccccagcgcgacgagcggctgggctggacggcggacgccatgatctattgccgtacggcgtgcaccaatttcaacgcctacctgtttttccgcaaatggctcaaagacgtggcgcacgagcagagcaccgaatacggcgtgccgcacatcgtgccgaacccgctcgagcaaacggattccgccgccgccgcgtggagcgacgccgccgcggtcattccctgggtattgtaccgcgtgtacggcgacaggcgcattctggaagaacagttcgggagtatgcgcggatgggtggattacgtggcggcgcacgccgaccgggacgggctgtggaagagcaatttccagttcggggactggctcgctctggacatggacgaattttccgaccgcacgggcagtacggacaaatactttctcgccaacgccttttaccttaattccgcgcgcatcgtatgcgacgcggcacatgtgctaggcagggcagatgacgagaaaaagtaccgcgcgctctatgaaaacctgctttccgccatgcaacgcgagtatatcaccgccacggggcgcatggtttctgaaacgcagacggcgtacgtcattgcgctgtgtttcgatatcgtgcccgaaaatttccgccaagcgttcgtggagcggctctccgcggacataaaacgccgcgggcatttcatgacgggatttttaggcacgcctttcatctgtttcgcccttaccgacaacggcagacagtcgctgaccgatcttatactgcgccgcgataaataccccagttggctgtatcccatccgccacggcgccactaccatgtgggagcgctggaacagccgtctggaaaacggcgatttcaaccccggcgacatgaattctttcaaccactgtgcatacggttcggtggcggaatggctgtaccgccgactcgcgggtatcgaagaaatagagcctggctaccgtaagatacgcatttgccccgtttacagcgcgggttattacgattacagccgcggcaccgtgaccgcgagcgacgaggtcagtcccgtctatatggaggggatcgaccgtgtgaaaggtacgtatgaaagcgtgtacggcgagatcagtgcggaaacagactataaagagggcgttttgcgcgtcaagatccctccgaacacgaccgccctcgtcgttacgcccgacgggaaagagcacgaagtggggtcgggaagttacgtatttactttcgggagcctacggtgatccgctgcgtattctttgaccgcgacggcacgctgggtacgctggacgatgtccgctatccgcagacgttccgtctttttcccgacgcgaagaagacgatagacgcgttaaaagcgcgcggaatgtttgtctttatcgcaagcaatcagtcgtgtgtcgcgcggggtaccgatggcggctacgattttgcccgtgaattttctcttctgggcgcggatgattggttcatctgcccgcacgacaaaaaagacggctgcgcttgtcgcaagccgaaaacggggcttttggacgaggctgtgcgaaaatacggtctgataaggcgcgagtgtgccatggtgggggatcgggagacggatatcgaatgcggcagggcggcgggcatgtttaccgtccttttagacgactcgggcgcaaagctgacggaggcggacgtttctgtgcgttcgctctccgaattattgtatttattataataaaaggcatacccttgcgggtatgcttttaatttaaaatttgtaatataagcggtaccaaaaaccgcccatgtacgcttttaaaagcgcttgcagttcgtctgcgctcacttgccctccgaaagacagagcctgataggcaatgcctttttcgatcatcggatagccgcacgcggcaaagcaatttttctgatagaacgccttgcgtttttgtctttgttctctgttttcgcacggtgcgtcggggtcttcgatggtcaggatcagccgccgcgcgggaaatttttctttcagggcatcgaggatttgcgacccgtatcccttgccgcgcaaatcgccgcgcaccgcgaaataaaacacgaagacgatgtctttatgatatattaaattcaaaagcccgacgaaagtatcttcgtcgtaaatgccgaagcaatcggaaactttctttttcgccttggctttcaaaaagaacagcggcgcacgctcctctttgggaaatgcctccttatacagcgcggaaaaatcccgatagatatttttatcctgtttcgatgaaacgaacctcataaaacgctcctatttgaacaattccgccgatttgaggcagagttgtaaaatttgtttttgcgcggcggtcagccgcttgttgttgcgcatgatcacgttgtacgtgcgcgtaaaatcggcgttttcgatgcgtatctgtctgagcgtgccgtcgcttagaaacgctttgacgatgtgataggacaagatcgatatgccgcccagccccgtaagacactgaatgatcgcctgcgtgctcaccgattcgacggcgggttcgatccgtatcttttcccgcgcgcagtactgatcgaaataatcccgtgcggcgctgcccttttcgcgcagaaaaaaacggtgccccgcaagttcctttgcgctcaattcatcagcggcgggataatctttcgcgcataccgcgacgaggcggtcctcataaaaggggatctcggtgagcgcttcgccggaagcgccgctctcgatgagcgcgaaatccagttcgccgcgcagcaccatctcttcgatgagtctggtctgatgtatcttgatggagatctgtacgtcgggaaaggcgtgcgttatgtccgccgcgatgcgcgggatcatatattttccgacggtgagcgaggagccgaaccgcagtttttcatggctgctttcgcgctttgcgtgttcttcgaaagcggaaaaggcgttgagtaccagacttgcttcgtcgtacatacggctgcctatctccgtgatgaccaggcgtttgttgatgcgctcgaacaattgaatgccgtaatttctttccagttccgcgatcgccacgctcaccgcgggctgtgccatgtataaattttccgccgcgcgcgtgatgctgcccgtcctgcacacttcggtaaatattttcagatgccgcagagtcatgttttctccgatataataaaagaattatgaatttgataacattataatattttacaaaggtttcgtcaagtagtataataaacgggtaatgttttttgcgggagcaaccatgaaagaaaagagaaaaaaatacgcgaccatcttttttacctgtctttatttaagttcgtttacgttcggcggcggccttgtcatcgtgcccatgatgcgcaaaaaattcgtggacgatctcaaatggctggaagagaaggaaatgatggatctgaccgccatcgcgcagtcttccccgggcgccatcgtcgtcaacgccgccattcttttgggttataagatcggcggcgtgttcggctctcttttggcgattctgggcacgatcattccgcccatgaccatcatcgccgtcgtgtccgttttttacgaactgttccgcacgaacgcagtggtgaacgcggtgctgtcgggcatgcaggcgggcgttgcggcggtcatctgcgacgtggtcgtcagtatgtttctcggagaggcgaaggggaaaaagatactgcccatcgtgatcatgctgctttccttttcgctcacgtattttctgaaagtcaacgttgtatatatcattctcgcctgtatcttgtggagcgtcgccgtctttttcgtgcggcgcgcccgcgaaaagaagccgaagggggaaaccaaaaaatgatctactggcaactatttctcgtgttcgtacaggtgggcttgttcagcgtgggcggaggatacgccgccattcccctcatacaggattacgtggtcgaggggcacggttggctgagcatgacggattttaccgacctcattaccatcgccgaaatgacgcccggtcccatcgccattaacagcgccacttttgtgggtatgcgcgtgggcggactcggcggcgcggtgctcgccacgctcggctgtattttgccgtcgggcatcatcgtctgtcttttggcgtttctctatttcagatacagaaaactcacgctggtgcagggaatgctcggcacgctccgccccgccgtggtggggcttatcgctcccgccgcgatctccattacgttgctcgccttatggggcgagggcggcttttctccgcgcgtcgtcgatctcaatctgatctccttttttatctttctgtcttcgtttttcattctcagaaagtataaggtcaatccgatactcgtcatgctcggcgcggggggactgggcgcggtcttctatctgttatagcgaaagggaacgcccgagcggcgttcccttttttactgtgatttgtattttcccggggtggtgcccgtctgttttttgaaggcgcggatgaacgccgccgcgttctcgtagccgatctttgcggcgatctcctcgatcgagaggtcgctcgtctttaaaaagatctgcgcgcggccgatgcggtacgattgcagatactccatgggcgtcatgcccgtaatgcggctgaacaggcgcaaaaaatgatatttcgagaggaaggcgcttccggcgaggtcgtcgagcgtcactttttcgccgtaatgttctgctacgtacccgagcgcgcgctctacgggcgtgagcgctttttgatattcgcagtcctcgctctgctgtttcaagagcatcagaaagagtttttcgagcacgtgcgaggcatacagaacgtcgtagggcaaaaacaattcccgcggctgtacgatctcgcacagcgtcctgtaaaattcttcgtggtctgtgacggacacgcagaaattttcgtttttcgtaacgagcgatgtcagagccgccgccgccgaacccgtgtagtgcacgtacagaaaatgccagtgatcgccgtccgtgccgtacacttgcgcctccgcgcaatcgatgagcatcagcgtgcccgccgtcagcgaatattccttgcggcggtataaaagtctgcctttgcccgcgagcgtgtagatcagaaggtgctggttcatgcccgaccgctccgtccgataggcggaagtacagtaaaattcgccgtacgtctgcacggaaagagataaattccccaccgaagagttatatgtgcacgaatccgaatatgactgcgccgatacgccgctgagtttgatgttgaacatatttctatcttatcatatctccgcgcgtttgtacagcaatatctgcatattttattgcaatttcgggcattgcaagcgctgatgatttgtgatatagtgatagaaagcaaatgttttggaggtcgttatgacgaacagggagcgcgcgtacaatcttttgcactataagagtgtggacaggatgcctgcggtgcatttcggatattggaacgaacttttgatcgaatgggcggagcaggggcatatcagcatggatctggcgaaatcctggtacgacggctcgcccgcagaccatgagttaaaccgcttgcttggctgggatttcaactggtacacgacggtgtgtccgaacaacggactcaatccgcctttcgaatataaaattctggaaacgctgcccgacggttttaagcgcgtacagaaccccgaaggactgatcgagcgtatacgcgaaggcgcgggctccattccggcagaggacgattatcaactcaaagaccgtgcggcgttcgaagagttgtacaagccgaaaatgcagttttcggaagatcggatccccacggaatttttcgaaaaattcaatgaaaacaggggcgacgatcccgtagggctgcatctggggagcgtgctcggcaatatccgcaatatgctgtccgtcgtgggtatgtcgtatatgatctgcgacgattacgatctgttcgcggaaattatcgatacgtttgcggatatgcagtacaaatgcgccgaggcggtattgaagacgggcgccaaattcgatttcgcgcattactgggaagatatctgcttcaagaacggcccgctcatttcgcccgatatgttcgaggaactgtgcgccaagcactataaaaagcgcaacgatctttgcagacaatacggtatcgacatcatctcgctcgactgcgacggcgtgaccgaccgccttttgcccatctggtacgaaaacggcgtgaacacaatgttccccatcgagatcggaacgtggggcgatcagttcgaacctgcgcgcaaaaagttcggggaaggcattctgggcgtcggcgccatggataagaccgcgctgcgcaaggacaaagcggctgtggacgcggagatcgagcgcatcaagcgccttgtcgatctgggcgggtatattccctgtcccgatcaccgcatcatgcccggcagcaaatgggaactcgtgcagtactacgtggacgagatcaaaaaaatcaaagtgtaaagtgtgattgaaaagagcgtaatgaatgttacgctctttttttgttctgaaaatgttaaaaaaagtattgacttttcgataataccgtgctatattttttacacttagtttaaaaaatggagggcgatgatgtattatcggatcgcagttaaggcggaaagcggcctgcaaaaagcggaggaagaattattttgttacctgaaagccataggaaacgtgtcggaagtgaattccggcaccgacggagactttcttatccgggttgtctgtaaaaaaatgcaagagggggatttctctttaaaatcggatggaaaagttctggatattgcgggcaacggattaaatgaagtgttgtgcggcgtttatacggcgctggaagaatacggggtgaaattcggtatttccggcgaggtcatacccgaatccgttgatttttccgtttcgttcaagcggcacgtaacgcctgccgttctgtatcgggggatccgtcagcacttgaattttccgatggatatcagttcgtattcgttgaacgaggccaagcggtatatccgaaaccttgcacgtctgcgctataatagcattactttccacagttatcccggacaattttattgcggaaaatatcagggagaaaaaatatcggcgggtaagtttttttacggggaagtgcagcccgtttcgaacatcgcctttttaaaaaacaatgtttcgaatttaaattatttttgtatcgaagaatcggaacagtatttcaacgacgaagagaaattatccgagtatgcggttttttggcttcgctcggtcatgcaggaatgcaaatcgtacggcatgagagtggttttttcatttgaggtgcgcggggcggacgcggcggagatcgacggcatgatcgcgtgggtccgcaaatcttatccgcaggcggatatcgtagaattggcaacgcaggagtgcggctgcggatgggacgattccgcttgtattccgagcggagacctgcgggaactggcaacgcagttatacggaaaacccatcgttgaaaaaataggccctttgttaaacggcagatacagtcagatgcctctcacgctgcgggaaatgaaaaaatgcatagaagcggcaaagagaaacgaacggtgccgtgttttgatttatgcgacctgtatacagacgttacatgtatgtcgccgcatattgcaggaatacggtgtggaacacgcgtttttatgtgcgcacggcgccaaatatgtggagaaaaatctggatgaattgcttgccgaaggggattctataccaggggtatatagttggatcgaatttgacggaaatatgtttcagccggaaaataaggacggacataatttcgatttgctgcatatgctgcgcaaaaaaagccgagggagccggatacccgaaatctcgttgaatcattggcgcaatgccgaaaattctctttcaattgcctattgtgccgaattgatgatagattgtactccgcccgcgttcttttacgaaaaagcagatctgctttgcggtttatcgcgcggcgggatcgaaaaattatgcgaaaccattgccaaagcggaggattgcgcccgagacgaacttccgaatatcggtttttgcgccgtatattgctggtataatgcagatcgcgagtatttaggctacatatcattgtatgacccgcaaaaactcgaaaaatatgagaaattgctggacgaagcgcgcgccgtcgcggattctctgcaaccgacgggggctgtcggcgaacggcttcgggcgttttggtcgaacagattacgggcgggcgtttgtcacgtacaaacgatccgtgcgctgatgcctctgaatgaattggccaaatgcaaagatcaggattccaaagaaaaaatggcacaggtttgctcttgcgccttggaatacgcgaaaaaatatcttcgcatcacgacggagtatacggcggaccgcggcggtcagggcgtattgatcagttattataagacgatctttcaatatatctatgtgcttcgtgaacgcctgtgcgggatcccggtacctgaaacctacgaaaaaagaaatttggatacgccgcccagtcccatgattcaaaaaaacgttcaatagaaaaaaggagagcatatgctctcctttttttatgaaatcgtttaaaatttcagatttactttttcgatatatccgaattttccgtcaatttttacgggacagagaccgtcggcgcagatatcggcaaagtcaaaccgctgttcgcaaattttcccgtccgtgtcggcgtaagcatattgcccatctgtcaattttacgacggcaagaccgtccgcatagggcgcgatattttctatgctttgttgtatttcgatttttttatcgtccttgcctaatacgaaggcttgcccgttttcgtctttcacgacggcaagcggcgtatcgttgccgaagtcggtcgccgaagagaactgcgcttctatgcaaactttcccgtttcggtccaagtaaccgaacaagccgttttttcgaaagcggatacggtcggaaatacattcgtaacagtcggcggcatcggtcctgaaaaggactttgcctgccgtatcgatgaagacgatcgctcccgattcatctttacattttccaatcatgtttgaaaattcgtgcatttctttatacataaaatccgtcaacaactgcccgtttttgtcgatcaacgcccaattttgttcagcgtcacaaacggccgccgcaccgttttggaagttcgtcgtattggaaatttctttctcgattgtttccccgaacatatttttcagtgtgcacatattggatccgacagcaaaatcgagcagcagattgccctgttcgtctgtataattgaactgcattccgaacccgtgacgcagggtgacgcgcgcaaaaccgtcggaaaacggcgcggcagaataaaattgcaattctatggcggtcgttccgtctaaattcataaaaccgaactttcctgccttttccacgccgatcagatgaggggatgctataaaaatactgtcataattgccgctgaatatcacttttccgtccgtatcgattactttttctccgtcgtcttccgaaacgacggcgtatccgtttgtgtacggcgttccgcttttaaagtgctttccgaaggcaaaatccgattttttatattcggaacacccgattatgattccgttgcataaaagaatcgccgccagacagcatacggctgtacgtagaaattttttcatgagaaaatctcctttgcatgattatctgtatttatagtaccataagagatcaaaggtgtcaatgttctgaaactcagtttaaaaatatttttaaactaactttaaaaaagatattgacaaaacgtatttcatgatttatactatattcacaaaatggaaggaggaagtcaatgaaaaaaattattgcgatcattttgggtgcgctgtgcgcattgtctgttgtcggttgtacgaacggcagaggcggcgcttccaacgaaatctggattgcattcgcagagacgggatacggcagagagtatctggaagactggatcgaagaatttcagaaagcatatcccgaagacaactggaaattcgaactggaaggagatccgcagatgaccgggcagatcggcacgcgtctgagcaccgataatgaagtgcccgatatcttcttcggattgacgacgaactggcagcagtgggcttcccgcgggcttttggctgatctcggcgatgtatacggagcgcccgtagatgacgaaggtactactcttttggatttcatgcggccgggtgcgcgcgatttcggaaaggtgaacggaaaatattacgcaattccctggaacgacagtgcggcgggactcatctacaacaaaaagatttttgatcaatataaattgcaggttccccaaacggtggaggatctgtacgcgctgtgcgataccatcaaccgtttgcccgtgaatacggatagtgacaagacgaacgacatcgccccctttgcctggggcggccaggtcatttcctattgggatttcgtagtgcagacatggtgggcgcaatacgagggcgccgagagatattccgaatacttcaaatacgattcggtggacggttttaaacaggaaggccgtttaaaagcgctggaagttttcgaaaacctggtggtcggaaaggacggcgtccccaaaaacagttattcgggcgcgatgggggattctcatattctttcgcaaatggcatttttgcaggggaaaggcgccatgattcccatgggcgcatggatggaaacggaaatgcgcaagtcgattcccgacggcttcgagatgcttatgatgcctacaccctttatcgcgggcgcgaaaacggacgcgtcgggcaaacccattcaggtaaacgcatcacaggcgggtgatttctttattgtgcctaaaaatgctcccaatctggaaggcgcgatcaagttcatgaaatttattcatacgaaagaaatgacgttgctctataccgaaaatacgggcacagcacgtccctttgactataatccgttggaagcggaaggactgagcgattttcagaaatcctgtttgaatatttatgaaaacagcgtcactgtttacgaattttcgcagagcgtattgtcctggcagaatcttgtgagcaagtggccgggaacgggcagcccgtattccagaatgatactggataacgaaaaggcttctgatctgtacgccgaaatgaactcgtatgtgtctgaaaaatggcccgaatggcagaaactcatccatatgtaattgagaaacgggagaaaagatgaaaaagaaatttttaacgttcgctttggctctgtgtatgattttgcccgccgtcggttgcgaaaagggcaattatacgaaagtcgagcccgattacagcgcgtcggaagatacgcttgcaatgcacataggcggctgggtcgctccgccgcccgtgcagaaagcgggaggcgtggattattgcacgcaggaaaactataacgacgttgccgatttcggcatcaatacgatatacgggctttatgagccttggggattgaccgttgacggcaaaaatgcaaacgaacgcgcgctcgaatataccgaaaaagcgggtatagggttttacgtgcgcgatttgcaggcaggcgccgccttgcaggaaggggacaaagatactttcgatcaggtgttcggaaagtatatggaatacgattcgttcgcgggcattatggcggtggacgaaccgtctgcggcgctgtttcccgaaattgcagctatgcggaaagggtgggataaattcgtccccgataaagatttttatgtgaacctgtttcccacgtatgcgctgccggggcaactgggcatcggcgaaacggaaaattaccgcgagcattatatccgcagatttttgcaggaaacaggcttgaaaatgctgtcttacgatcactatccgctgttggaagacggatggggcaaaggctcgctgacggccgattatctttataacctggaagtttgtgcggaagaggcgcgtgatgcgggcgtacctttctggacgttcttgcaggcaatgagttacgacaacgcgacgcgctgccccacagaagcagaactgcgctggcaagtactgtgcagcatggcgttcggggctcaaggttatcaatatttttgttattggacgcctgcgggtcccggggataatgtgacgaaatccgcttgcgtgacggaattcggcgaaaaaacgcccgtttggtatgcaggacaaaaaatcaacagagaaattctgaatttcgaccatgtatatctcaattacgagtggcagggagtcatgcccgtcctcgccgagggcaattcgaaaaacaaactgttcaatatgatgaaccacgcattggattccgtcggacggatccgttccgtcaagtcggatcaggacgtgatcgtaggggcattcaaggaccgtgcggataacgatgcctttatggtcgtgaatttttccgacccgggcgacgagaaatcctgtaaaaccgaagtcgtaatgaagagcgcatcgtccgccgtcgtctataaaaacggagtgcgcagcgtggcagaagcaaaaggcggaaaattgacgcttgaattggaagcaggcaacggagcgtttgtcgtgcctctgcaataaatgagggagtatcgcaatgccgaaagtgaaaacgagcaccgcggagcagacggagtttaattccgtacagccgaaaaagataaaaaacaatctgagcatgccgcgttcgcgtaaaatttttatcgccttgatgctggcatatcctattttacattttttggtcttttggctgtatatcaacatcaatacatttgtcatttcatttgaacgtttttcatatacgtcgggcaaaaatgttttcgtcggctttatgaactatgaagagtttttccggaatctgagtttgccctcgtcggcgacgctgcgccatgcgattgtcaactcaattttgtatctgcctttcaataacttcatattattgccgctgtctgtcatctgcgcttattttttgtttaaaggagtattcgggcacagagtattccgcgtcgttttcttttttccctctatcatttcgatcgtcgtattgacgatgtcgttttcgttcatgttcaatacacaattcgggccgattgtcaaaattctgcaaaatatcgggttgggggcgcttgtccctcccaacggatttttcggaacgcccggacttacacagggaatggtgtttttatactgcttatgggcgggaatcggatacaacgtagtactcctcacgggcgcgattacaagaatccccgaagaagtgctcgaagcgggaaaactcgacggtatccccatgcgcaaagaattgtttatggtcgtcgtgccgctgatatttccgaccatttcgacgctgttcattaccggaagcatggtcgtctttactctgtttttgcagccgatgctgttggcgaacggcggtccgaacggaaccacatataccgtcgcttattacatcgtcgatatggtaaacaataacaggctggaagaggcggccgccgcgggcattatattcagtatcatcggtataccgatcgtacaactgataaaatggggaatggaaaagattacaccgcaggtggatttttaaccagaatataaggaggaattatgaagaaaaaaaagaagatgttattgggcgcaacgctcgcgctgaccgcggcgcttgcgctcggagcgggaacgttaggcgcgtcggcgtctgtcagcggattcaatgatttcatcaaggaagatttcaacagcggatctctgaacggcgacgtatggcaaacgcccgcggagggtatcgaactgataaatgtcgagccttccttgacttatcggatttatcatcaaaaatctgtctctacaaaggaagaagttaccgtggcggataccgacgtgctcgttgtcgagtacgatatgcagagcattgacgtggaaggcgggttctggggcgttacgtacggcgcgcagagtacggatctgactttggaaaatgccatttgtttttacggcacgagccagattttctttggcgggaccgaatcgaccatcgtatataatgccgatctgaccagtcagcgttggatcgcttggtcgagggacgcggtcacgcggatcgtgatctatcccgacggcgcgcaaaaaatgtatcaggacggtacgcttatcgcgcaggtacaggcaaaagatgcgggcgcggcgcaaaaagtcagaaacggttacctcggtatctcgttcagcggtgcaacttccgaatcgaacgtgacttcggttttcaactattttaaaatcggccatgcggcggtagccgatacggtggaaaccgatgcgatcacctgggatatcgtagatgactctgccgacaaagcggggctttccgatgatttcgtttccaaccagagcgatattcagggctgggtcacgagcgcggctt

SEQ ID NO: 2613 - DNA, 15115 bp, Unknown
  16S sequences of unknown bacteria
cagctgcatcatcgttcctcccgccaaatcggcattctacgtgcgctattatagatttcattgaatgcaaaaggagaggtgccgttcatgttcgggaagtccaggactgagaaatccgcgtcggagcgatccgcgcacgcagatggggcagcgaatggcgcagcgccgcaaaagcccgtcaaccgcgccgagcatggcggtgtcgaggggcatcccgcggcatttgccgcacgcctgaccgaggcggagcgcgagaagctcctcgccgagaacagctggcgcgcccgcgtcctgcgcatcaaccgcctgatagcagggctcatcgtcgtctcgctcgtcttgagcggtctgcagatcggcggccaggcatggcttgcccacgaggggctcgccaacctattcaccggcacggcgaatacaccgggcatcctgtccctcgtctacttcgtcgttaccgcgctcaatctggtggggctcgtcatgctcatccacttcgaccgcaaagacgaggtgttcgtggcgcgcatgatcacgcgcgcgctcgtggtgctgctcatcggcgggctgcttttgtgcgtggtcatcaacggcgtcatccccttcgagatcacctacctcttccagttcctgtgcgccgtcgcctaccaggtctacaacgaccccttcctcgaccgctcgcccaagttcacgaaccccttcaaagagggcagggccgtacgtgcaaagatgtacagcctcgagccggacaagcgcaactacatccccctcaacttcttcaacctgttttggatcttcatggtggcaagcgttgccggcctggcggtggagatggtcttctgcctgctggtcaacggcgtgtgggccgaccgcgcgggcctgctgtggggtccgttcagccccatctacggctttggcgccgtgctcatgaccatcgcgctcaaccgcgtctggtaccgcaacgccatccccgtgttcgtcatcgccgggatcatcggcgccgcgttcgagttcttcgtgtcctggtacatggaggtggccttcggcgtctgcgcgtgggactactcggggacgtttctgagcctgcagggtcgcacggacttcgcgcactttctcgcgtggggcgcgctcgggctcgtgtggatgcgcctcgtcctgccctcgctcatgagcctcgtcgatatgctgcaggtgcactggcgcgcgtttctgaccgtcgccgcgctcgcgttcatgctcgtcaacgcgacgatgacggttctcgcgctcgactgctggtcgcagcgccaggcggggcttcccgtccagaccgagttgcagcagttctacgccaagaacttcccggacgagttcatgcagacgcgcttctcgaccatgtcgatgagccaggagagcgctctcaaggcacagcagaaccttccgaagaactcgtcgtccgacgagctgctctaggctgctcgccagacgtttcggtaccgttgccgcgtgtggcgcacatccgcgcgcgcgtttgctaaactagttcggattgaatcaacgagttagcgaggttttaccatgcgcatcatcacatcccccgatcccctgctccgcgaagtgtgcgagccggtcgagatcggcgacaagtcagtcaagcgcctcgccaagcagatgctcagagaaatgtacaaagacgacggcgtgggtcttgccgcgccgcaggtcggcgtgcttaagcgcatcgtcgtcatagacacgcagtggccgcaggaagacgagaaggggcgtcccatgaagaagaaccccctcgtcttcatcaacccagagatcatcgagcactccgacgagcgcgtgaagaacctggaaggctgcctgtccgtccccggcatcagctgcgagatcgagcgctggtcgtgggtcaaggtcaagtgcttcgacgagaacttcaacgaggtcatccgcgagggcgacggcctgttcgggcgctgcatgcagcacgagatcgaccatctcgacggcatcacgctgttcgagcgcctgagcccgctcgaccgcctggcaaagctcgaggagtacaaggccgctgtggagcgtggagcaaagcccggagaatgctaggggtgatatatgaacgtgattttcatggggacgccctcatttgccgtcccaacccttgagaagctcgcccaggcacccgagcacaacgtgatcgcggtctacacgcgccccgacgcgaagtcggggcgcggcaacaagttgcaccccaccaagatcaaggtgcttgccgagcagctcgggctgcccgtctacaccccgcagacccttcgcagccccgaggtcgtcgagcagatcgccgcgctcagccccgacgtcatcgtcgtggccgcctacggcggaatcctgccggcagagatcatcgagattccccgctacggctgcctcaacgtgcacggctggcgtggcgccgcgcccatccagcgcgccatcctcgacggcgacgacattgccggcgtgtgcgtcatgcaggtcgaagagggtctcgacacgggcaggtaccacacggtcggctccgtcgagatcgcgaacaagaccaccgaagagctcgtcgaccagctgggcgagatgggtgccgagggcatgctcgaggcgctcgcgcagatcgaagacggcgtctacgagtggaccgagcaagacgagagcgaggtcacgtacgccgagaaggtgagcaaggacgagacgcttctgcgcccgggcctcaccaaccgcgaattcctgcgccgcgtgcaggcgtcgtcgcaccgcgcgccgtcacgctgcgtcgtctgcggcaaggtcgtgaccgtcatcaaggcgcatgccgccaacaccgtcttgccgcagggcagcgtcgtgctcgagaagaagcacatcttcttgggcctgaagggccgcgctgtcgagctcgacgtcgtcaagcccgagaacaagcgcgagatggaggccaagcagtggatcgccggtctccacaacgtcgaggacaaaacctggaacgtgctgcccgagtactaccacaagctgccggtctatggctaaaggccgcggaacaagcgggcgcgcgcgtgccgtgcgggcaacccccgcgcggctgcttgccgtcgacatcacgcggcagtgtcggctgcgcgacgcctatgtccgcgagctcgtcaacacgaggcgtaagacaagcgagctctcgcacgaggagttcgactacgcgcaggtcctcagctttggcgtcgtgatgtgccgcggcacgctcgacgagttcatcgaccgcaacctcaacagcccgcatgacatcaagcccgaggtgcgcgactgcctgcgtgtctccgcctacgagctgctctttctgaagaagccctcgcacgcggtggtcgaccagggggtcgagctcgtacgcgccagctcgccaaaggcatcgggccttgccaacgccgtactccataagatggcggcagatgcggaagggtttccctggggggatgcatcgacgagcatccgcgcgttcgcgcgctcctatggcatccccaagtggctcgcgcggcttctcgtgcgccagtacggccacgagaaggctgcggcgatgctcgctgccgacctgctgccggctccaaccttcctgcgcgacaacccgtaccagcccggcgagcgctttgcctcggacctgtccgcccagcacgtggcgtcgctggttccccttgcgggcacggtgctcgagatcggggcggggaggggcacgaagaccgcgctcatgcaggcgcgcgccctcgaggagctgggccatcccacaatcatccacaccgtcgacatccacgagttcaaggcgcggctgctgtccgagcgcatggagcagatgggcattgcgggcgtgacgacgcacgtgggcgatgcgaccaacctggatgcgatcgcaggcctgccgcgcgcgttcgacgcggtgttcatcgacgcgccctgttcgggcacgggcaccctgaggcgccatcccgagatccgctggcgcatcgacccgcgcgatatcgaatcgctcacgcagatccaagctcggatgctgcagtcggcagcctcctacgtgcgcgtgggcggcacgctcgtgtacgctacctgcagcgtgctcgactcggaagacgacgccctcgtccgggcgtttctcgacactcccgccggagcgcagttcaccctggcagagcgcttcgcgagcgttcccgccgaaggcggccccgacggccacttcgccgtcgtcctccgcaagtagtctttcctgaaaacggggtgtccctccgtcccaaaatggcacgatatccacggcccctcgtgccgtttttgagccgtgtgggaggaaatcccactcgcccaaaatcttcataaaaaagtttgggacagcctcccacaccgtccccgcacaagccttggtggcaatacccgcatgacgcacaacatgttgtgttgtcgtggagttttctatgcccaagaccgaacatgtgtgggggaggtggtgggagatttgtgttgaggagtgggtcgttttgggatactattcttcctgcggttctccacaacgaagctttaacgaagtccggagaaccgcccaagtctttttagggctcgaaaggtagaaagttcggatggggtttcgcggtactttcaagcacagcgtcgactcaaaaggtcgagtttcgctgcctgcaaagttccgcaagatgattcccgaagacctcaatatcgttccggttcccaatgaagacttcggcaaggcgctctatgtcttttccgatgaggcgtatgacgcatggatggattccttcttcgaggctgaagagggagggtatgacccgcggagcaagaagcacatcgcgatgcgccgttaccttgacgcgagcacggagctcgtcacggtcgacgcagcggggcgcatcaagctttccgcggagcagtgcaaggtggtcggcatcgacaaggatgtcgtcatcaccggccagggcgatcatatcgagatctgggacgcccagaccttcgacgattacatggcctccatcgatccgtttgcggcttttctgaaggagtagggcagcacgttgacacatgaataccggcatatcccagttttactcgacgaatgcatggaggcgctgaacctgcacgacgggacggtgtacctcgattgcacgttgggtggagccgggcactccctggaagccgccagccgcatcgcgccgtcgggaaccctgatcggcgtcgaccaagacgacatggcgctcgaggcagccgcgcagcgtttgggaacggtcccgctcgattccgagccgatccttctcaagggcaatttcggagatttggacgacctccttttggaggcgcgtgtccccgggatagacgcggtgctgttcgacctcggagtgagctctccccagtttgactttccggagaggggcttttcctacagggaagacgcccccttggacatgcgtatggacccgagtacacaaaccttaaacgcagcagagatcatcaacacctacaacgaagcagatctcgctcgggttcttcgagactacggtgatgagaaatgggctgctcgcatcgctcgcttcgtatgcgacgagcggcgtgagcggcccgtcgagaccacgttccaactcgtggacctcatcaagcgagccatacccgccaaagcgcgacgaacgggcgggcatcccgcgaagcgcacgttccaagcgctccgcgtcgaggtcaaccacgagatggacgtgctgaggcgaggcctggacgcggcgatccgctggctcaaccccggcggaaagatcgcggtcatctcgtatcagtcgctcgaagacaagatcgtcaaggaagtcttcaagaagatgcaggacccctgcacgtgcccaccggatttcccggtgtgcgtctgcgggaagaagccggtactcaaggtagagacgcgcaagccgatcacgccatcggctgaagaaatagaacgcaaccaacgtgcgcacagcgcacggctcagagtcgcaacgaagctggaaacgaactgaaaggactcaactgatggcccaggtagcacgcacgcgctacagctattacagctcagtagccccgaagcgcgaacctcaggccacaccgcgtcctgacgtccgcgtcatccccggccgcagggcatccaaccccgcctaccagacgctttcccagggcacggtgaacgcgttcaagttcctgctcgtcgcactcgcgatcatcgccgtcatcgccggcgtgcgcgtctggatctcctctgccacgctcgcatcgctcgagaacgtcgagtcgctgcaaagccagctcgacgaggcgcagtcgtcctccaacgagctcgagatccagcactccatcctcgccagctcgagccgcatcgagcagcgggcaacggagctgggcatgaccgcgccgtccgatgtcacctacctcaaggtgaccctccccggcaacgtggcgctcaacgccgcgggcaacatctctattgcggacacgctgcaaaacatccaaaatgctgctgcagcaaaggcaaactagggaatagggcgcacggtgggcgagtcccaatccaagaaaaaccgaatattcgaaaacggcatcaagagcagggacggaatccttctcgccctgctcggcctgtttttggtggcgatcatcgcgcgcctgttctacgtgcaggtcgtcgcgggcggcgactacgccgacaaggcggccacggcgcatacgaacaagatcacgctcgaggcaaagcgcggcaccatctacgaccgcaacggcgtcgtgatcgcctccgacgtcgatgccacgaccatctacgccgacccgcagcagatcaccgatttcgacggcgtcgcccagacgctggcagacgtgctcggccccacgaccaacaagacgaaagacgactactacaagctcatcgaccagccggacctctcgttcgtctacatcttgcgcaaggcggatgccgacctcgcgagctcgctcaaggacacgctcaaaagccagaagctggacggcatccactacctgagcgacaccaagcgcgtctaccccaacggagacgtcggaagccagctcgtcggaaacgtcgacgtggacggcaacggcatcgccggtctcgagctcgagtacaacgacctcgtcggcggtaccgacggcgtgcttgagaccgagcgcgggagcaaggggctgccgattcccgacggcgagatctcgcgtaccgatgccgtcgatggcaaggacatcgtcacgagcatcgacatcaacctgcagaagaaggcggaagaggcactgcttccggtggtccaggagtacaacgcgcagggcggttccgtcacggtcatggacgcctcaaccggagagatctacgcctcgtgctcgtatgcgaagaagacctcttcgtcctcgggcgattccgactccgattccggctctaagtccaagtacagcctcgaggtcggcaagctctggagcgcgaccgactcctacgagcccggttcgacgttcaaggctctcaccgcgacgtcgatcctcaccaacaacgccgacgtcaacacgaacaccacctttaccgtgcccggcgcgctgcaggtctacgatgcgacgatcaaggactcccacgagcacggcaccgagaccctcagcctgaacggcatcatcgcgcagtcgtctaacatcggcacggtgctcgcgtcgcgcaccgtctcgagcgaccagctctacaacacctacaagaccttcggcattggccagaacccgggcaccgactttccgggcaccgcgtcgggtagcatcaaggacgcgagctcctgggacccggtcaccgcggcaaacatcacgtttggccagggcgtctcggtcaccggcatgcagatcgtccgcgcctacggcgcgctcgagcagcgcggcaccatgcacacgccgcacttcctgatgagcattcccaacgaccaggccaagaccgacgagctcacctccccgctcaacacgagcgacaacgtcgccgatgcaaacgtctgcaacgaggtcgtgagcatgatgaagtccgtcgtgaccgacggcaccggcaaggacgccgccgtcgatgggttcaccgtcgccggcaagaccggcaccgccgaggtcgccaagtcgtccggcggctacggcaacggctacatcgtgtcgttcggcggatggctcgagggttcctcgagcaacctcgtctgcctcgtgaccgtgcagcagccccacaccgaggccggtggcggcgaggtgtgcggcccggtatttgccgatatcatgtcgtttgccgccgagcgctaccacatcgcagcgcaggcgaactaatctgtccgagacgcatttttcgattcacggggagttttttgcataatcatgacaactagaactatgacggtcgaggaaatcttcgagggcgtttctttcgaggccctcgatggtgccgactcgaccttgcccgtttcatctctggagttctcctcccgcgactgcggcgaggggtctttgtttttctgcgtgccggggacaaaggccgatgggcacgcgtacgcttccgatgccgtcgagcacggcgccagcgctttggtagtcgagcacaggctcgacgtcgaggccccgcagttcctggtcgaagacgcgcgaaaggcgctcgccctgtgctcgtccaacttctacgggcgcccatcgtccaagctcaagctcgtgggcatcacgggcacgaacggcaagaccaccacggcgtttctgaccgagcacatcgcgcaggtcgccggcgcgacgaccggcctcatgggcacggtcgagtgccatgtcggttccgaggtgcgcccgtcgctccacacgacccccgaatcgcgcgacctccagcagctgctctcggacatggtcgatgccggctgcgacgtggccgcgctcgaggtctcgagccacgccatcgacctcgaccgcatcgcgggcacgcgctttgaggtggcggcgttcacgaacctgacgcaagaccacctcgactaccacaagaccatggagaactacttccaggccaaggcacgcctgtttaccgactacgccccgcagacgagcgtcgtctgcatcgacaacgaatacggcgcccgcctcgccgatatggtcgaagagcgcggcggtacgctgctgcgcgtgagtacggccgacacgcccggctgcgatatccgggtcgcaaacgtcgtctacgccccgcattcgacggagctgtcgctggtggtgcagggcgccgacgtgcgcttcacgctgccgctcgtcgggcgcttcaacgtcgagaactgcatcgtcgcgtttggcatcggccttgggctgggctacggcatcgacacgatcgtctccgccctctccagtgcgccgcaggtgccgggtcgcctcgagcgcatcgtgggcacggatgggacggtccccccgttcggtgtgctcgtcgactacgcccacactcccgattccatcgccaaggcggtggcggcggtcaaggcggtcacgcccgggcacgtcatctgcgtgttcggctgcggtggcgatagggatgccacgaagcgccccaagatgggacgcgccgcgctcgatgccgattatgccgtcgtgacaagcgacaacccgcgcaccgaagacccggacaagatcatcgagcagatccttcccggcatggcgggccacgaagaacgctacagcgtcgtgcccgacaggcgagaggcgattcgcttcgccctgcaccgtgcgcagcccggcgatgccgtgctcatcgcgggcaagggccacgaagactaccagatcatcgggacggtaaagcaccacttcgacgaccgcgaggtcgcggctgaggaggctttctatcggcgagattcacgctgcggtccaaggcgagctcatcgccgacacgggtgccgagaagcgccgtgtgcgcgggctcgtctgggattcccgcaagctcatccccggcaacgtctttctggccatgcccggcgagcgcgtcgacggcaacgacttcatcgcgcgcgccatccagaagcaggcgggctgcatcatctgcacgcgcgacatcgacgacaacacgcgcgcgatagcgggggagttctcctgcccgctcatcaaggtcgaagacggcgtggctgcgctcaccgcccttgcccgcgcctggcgccagcacctgggcgcgcatgtggtcggggtgacgggctcgacgggcaagacctccacgaaggacttcttgcgatccgtgttctcgcagcgcttcaagaccgtcgccacccagggcaaccagaacaatgaggtaggcgtccccgccacgatcctcgcggcagatgaggacacggaggtcctcatcgtcgagatggggatgcgcggcatcggacagatcgagcgcctcgtcgacttcgtcagacccgacatggcggtcatcacgaacatcggcgtgagccatcttgagctgctcggcacgcgggacaacatcgcgcgcgcgaaaagcgagattttccgcgggcttcccgagggcggcacggcggtgctcaacgccgacgacccgttcatgcccaagctggtcgagtacggaaagctcgacgagcacgtgctcgtgaagcgctgcacgtacggcacgtctgctgcagcggacgtgcgcgcgaccggcatcgccttcgacctgtccgcctgcgctgagttcgagttgcagctgcccgacgaggaacccgtccaggtcaagctcgccatgccgggtcgccacaacgtctccaacgcgctcgccgccgccgcggcggtctttgcgctcggcatgcgagcagaccagatcgccgcgggtctcgaggcggcgcgcggctcgggcatgcgcatggaggtggagcgctcgcgtcggggcatcaccttcgtgaacgacgcctacaacgcgaaccccgattcgatgcgctcgtcgctcgacacgctctctcacatggactgcacgggcagacgtgtcgccgtgctcggcgacatgggcgagctcggcgaaaacgagctcgagatgcaccgcgaggtcggcgcatcggcggcaaggtcaagacttgacttgcttgtgtgtgtgggtaaccttgctaaaggcattgccgcgggagccgctgcttccgggatggatgccgacaagatcaagtgcttcgacacggtcgaggccgccatcgagtttctgcagcgcacgctggccgaaggcgacctcgtgctcgtcaaggcatcgcgtttcatgggtatggagcgcatcgtcaaggagatagtcgagtaaatgttcagccttttccatgagtttccgacgttccagatttttctgacgttcatcgtctcgctggcattgaccatgatcgtcatgccgctgttcatcaagctgctcaagcgcaatcagatcgggcagcaagtgcgcgccgacggcccgcaggggcatctcgtcaagcagggcacgcccacgatgggcggcgtcgtcatcctgctcatgatgacggcatcgatctttctcgtggggatcccggacgcgcgtctgctcctcgtcttgggcgcgacactgcttacgggcgtgctcggctttgtggacgacgcgtccaaggtggcaaaggagcgctcgctgggcctgctcccgcaccagaagatggccgcgctcatcgtcatctccgtcgccttttgcctgattgccgtcaactacctgggcatcagcccctacgtgacgatcccgtttgccaacatcgacgtcgacttcggcgttttgacgaccacgcttcccatcggcgacgggttcgacatcccgtggctgtacgtgctgctcatcttcctgctcatggctggcatgtccaacgcggtcaacctgcccgacggcctggacggccttgccgggggcaccatcaccatcaccatgttcttcatggcggccatcgccttcatggcagaccagctcgacctcgcggtcttcgccgtcgcggcggcgggcgcctgcgttggcttcctgtggttcaactgctacccggcaaagatcttcatgggcgacacgggctcgcttgccctcggcaccgcgttcgcggccatcgccgtcatcaccaaaaccgagctgttcagcatcatcatcggctttctgttcgtggtagaggcctgctcggtcatcatccaggtcgtgcatttcaagcgcacgcgcaagcgcgtcttcctcatggcgccgatccatcaccacttcgagaagaagggctggtcggagacgacggtcgtcatccgcttctggatcatctgcgggcttttcgccggctttgggtttgccatctacttctggtcgcttctctagggggatctgttcgatatgtcgcagtctgtttgcattctcggtatggggctttccggagccgccgcggcccgctgcgtgctggagcgcggtgacgaggtcaccatctacgccggaggcaagaacgcaaagacgctcgcggcagcgcagcctttcatcgagcggggcgttcccgtcttcttcgacacagaagaggtcgaggggcatttcgacctctgcgtcgtgagcccgggcattccgcaggtctccgcgttctaccaaagcgcgctcaaggcagccgacaagctcgtcagcgagcccgagctcgcatggagcatctctccgcaggactgggtggcggtgaccggcacgaacggcaagaccaccaccacgacgctcatcgcgcacctgctcgacgagtgcgcgggcggcgcgcttgcctgcggcaacacccagcagatcaccacgctcgccgcggtgggcatgcgtcccgccggcgcctacatctgcgcggaggtgtcgtcgttccagctcgcctccaccgtcgacttcaagccccgcgccgcggtgctgctcaacatcacgtccgaccacctcgcctggcatggcgggcagcaggcctatgcagatgccaagctgaagctcttcgcgaacctcggccaggggcagaccgccgtcatcaccgaggaggttccctcgttcgacgaggtcgtgacgtcgctgcgcgcgcgcggcgtgcgcgtcgtgacggtcggcgcccgaagagatgccgactgcgcctatctctccgatgacgggatgctcgcctacgtggacggggccggcgcggcacacgagctggtcgccgcatccgcgctgcagatcaagggcgcccacaacgttgagaacgccctgtgcgcggcgagcgtcgcgctcgatctcgggtgcgctgacgacgacgtccgcgcatcgcttctgaccttcgccccgctcgagcaccgcatcgagccggcaggcgaggttgccggcgtcggctttttcgacgattcgaaggcgacgaacaccgacgcgaccgtgaaggcgctcaccgcgtttcccggccgcaaggtcgtgttgctgctcggtggccgcgacaaggggacgagtctcgacgagctcgtcgccaactgcgccgagacctgcagtgcggtcgtctgctacggcgagggcggccagcgcttctacgatgcgttcgccgactctccggtgaagcgcgagcttgtcccgggcatgcgcgacgcgttcgcggcagcctgcaagctggcccatccgggcgaggccgtgctgctgtcacctgcatgcgcgtcgttcgacgagttcagcggcttcgtcgagcgcggcaacgtgttcaagcagctcgtgcgcgattttgccgcgcagcaggagtagcatgcgcgggaagtctcgggacaagggcgacaaaggcacggcatcgagctcagctgacaggggcaagcggcgcgccaaaagctccgacacccgcactgcgaagggcaaggcggacagcaagcggagcggcaacgtgaagccgagcaagcgcggcagcgtcgtcaagcgcatacgccagtccaggttcatgaaggagccggggcgcatcatgggcccgcggctgctgttcatcgcgagcgtcgcggtgctgctcacctttggcctgatcatggtgtattctgcctcctccatcaccgcctataacgatttccacgacgcggcgtactacgtcaagcgccaggtcatgttcatggctatcggcatcgtcgcctgcatcgtatgcgcgaagatcccctaccgcttctggtgcaatcccaccgtgttcgtcgtgctgtggttcatcaccgtcttgctcctgacggccaccgcgtttggcctcggcgtgagcgcgctgggcgccgagcgctccatcatgatcgcgggcttcgcgctccaacccgcggagttcgcgaagatcgtcatactcatgacctgcgcctcgctgttcgagctctggcacgagggcaagttcgagttcaagcacttcatcggcatactcgccgtggccacgctcgtcccgctcatcctgatctaccgccagcccgacctgggcacggccatcatcttggccgtcggctttttggcactgtgtcttctggcgcaggtacccttgaaacccatcgccatcatcatcggggttctggtcctctacgtcgtgttcgcgtgcgtgacgcagccctaccacctcgagcgcatcatcacgatgttcgacccgtgggtcgacccgcagggcgacggctaccaatccgtgcagtcgctgtacgccttcggctcgggcgggctgttcggcaccggcctcggcctgtcgaggcagaagtacctctacctgccgtatgcccacaccgacttcatcttcgccatcgtcggcgaggaactcggcttcatcggcgccgcggcgctcgtggtcatcttcggcgtgttcatctttgccggtatccagatctcgcgacgcgcctccgacctgtacggctgctacatcgccggctccatgacggtcatggtcggcttccaggcctgcgtcaacatggcgtgcgtctgcggcatcgcacccgttaccggcaaggcgctccccttcatcagctacggcggttcgtcgctcatggcgaccatgatcatcgtcggcctcatcttgtccgtctcggtgcacacgcgcgtcgatgccgagaacgagcagcgtcgcgataacctgcgtgtgctcgatggcgggtcgcacctcgacgtcgacctcgagagctcgtatgcgggccgcgtcatctcactgttcggcgggcagac

SEQ ID NO: 2614 - DNA, 3372 bp, Unknown
  16S sequences of unknown bacteria
ttggcagactcgctagattcaggttctagtgtgcattacgcacgtgcgggttcaactcccgcctcgcgcaccataaagaaagacatttgctttcagcagatgtctttctttatggattccgcctcccgaagggcggtttccccttgctgagaatttcaaactatcgatttgaaccgtctatcgccaaacgtaaaaaaagacacgcagtagacgtgtctttttttagctttatgcaaaatgatcatctgaaccgatttccagtagggaatcggttcagatgatttttatactgaatttcgagtggtatagagcaacagaagaggggggcggcggcatcttctcctgttgcagcaacaatccaatcagtaattgacgcagcgccgctcaaaataagcttggggatgggcgcagacggggcatacctgaggagcttccttacccacgctgatgtggccgcagttgcggcagatccaaacggtttcctcaccggcctggaacaccaggttgtcctcgatgttgcccagcagcttcagatagcgctcttcgtgctccttttcaatggcggccacggactcgaacaggaacgccaaacggtcgaatccctcttctttggcggtttcggccatttccttgtacatttccgtccattcctcgtgctcgccctcagcggcagatttcagattggctgcggtatcgccgatgccgcccagttccttgaaccagagcttcgcatgttctttttcattgcctgcggtttcttcaaaaatcgcggcgatctgctcataaccctcttttttggccttgctggcgaaatatgtatacttgttgcgggctttgctttcgcctgcaaatgcaatccacagattggcctctgttttgcttcctttcagttccatggttttctcctttcactccataccgtatcaaatgtatttctacttttttactatacactgttttcggtgagaattgcaatagaaattcaaaaattttgtgcgctggtgatacaagtgtgatacaattagatataaaatccagggatatggtaatttaccctgttgtttctcaaaggagtcctttttatgataaaaattttgattgcagaggatgagcaggcgattgcagatttgctgacgatgaatttggagcgctccggctatgcctgcacttgtgtggcggacgggctgagcgccattgaagcactggaacgggaaacgttcgacctggcgctgttggatgtaatgatgccgggcgcggacggttatgacgtgctgcattacatccgtcccatgaatattcctgccatttttattacggcaaaagatagtgtggcagaccgtgtgcgggggctgcacgaaggggctgacgattatattaccaagccttttgagattgtagaaatgctggcacgggtggaatctgtgctgcggcgttacaataaagcggcgcagcatttttcactggatggggtggaggtggacatcccatcccgcacagtgaccaaaaacggcattcctgtgaacctcaccatgaaagagtttgatttgctggtgctgtttttgcaaaataaaaacattgccttgttccgggaaacactctaccgccgtgtttggggcggggattataccggcgaaggccgcacagtggatctgcacgtccagcgactgcgcaagaaactggaatgggaagagcacatttctgcggtctataaagtaggctaccgcctgaactgaatccaccggaggcaggctgagtcgcaggagggataccgtgaagttttcgcacaaagtctttttttccacgctgctgatcatagcgttgattttcggcgtaggcaataccatgctgctgaactcggtgttccgttcagcgatggaacgggaagagcgtgtcacgctggatgaaaaccagatgctgcgtttttctttcggcacagcagctgccagtgcagtggccacggcggaaagttatggcatgatggacgcgctttcggatgggaccatccgccgcattggctggacgctggagagcagcaacaattgctgcatccgcatcagcgatgcggaacggggaacgctgtacctcagcaaaagctttcagtcaagccgggatctgatcgggtcgctggaagaaaacggccgcagctggatgtactttttccaggacggacggtactatatgcagtcggcctgctgtgtggaagtggggcaaaggcagttttatctggagaatctgcgggatatcacggcgacgatccagaaacgaaaccgctatttgatgttttatcaactgatgaccttggtactgatggcattttccgccgttgcgatgctgcttctgtctgtctatctgacacggcccatgcataagctctcggtggtcagccgtcgtatcgcaggcggggattatcaactgcgctgcaccgtgacttcccgggatgaaatcggcgccctgacagaggactttaacgccatggcagacagcctggaaacaaagatccatcagctggaggatgcctccaagcggcaggaggattttattgcctcctttgcgcatgaattgaaaacgccgctgacctccattatcggatatagtgatatgctgcgttcgcagacactgctgccggagcagcaattcaaggcggccaattatattcattctgagggaaaacggctggagtccctatcgcacaaactgctggagctgatcgtctatcggcgtgagacctatacgcccgccgccttcgaggcacagccgtggctttctgccatcgcggcggtgctggagccggcgtttcgggacagtggcatttctctaatgttgtcggccgggccgggcgtcatatggggcgaggcagatttactggaatccttggtggtgaatctgtgcgacaatgcgcgcaaagccagtcctgctggcagtgtggtgtctttaatggggacagcggaggaagggggctaccgcatctgtgtacgtgaccatggaagcggtattgcgccggaagagttgctgcgcgtcacagagccgttttacatggtggacaagtcccgtgcccgggcgcaaaatggtgcagggctgggcctggccctgtgtgctgcagtggcgcaggtgcacggcacggcgctagagttcaccagtgcgctgggaaaaggtaccacggtgtcgcttctgttgaaggagggaggaagatgagggggcgtgctctctttttgccggtgtttaccgctgctgcggtgctgctggccgtgtcgctgcctatgggcacactgcagcaatgggatcgtaactatcaggatgtgctgcatcaggagtccgtggatgaggacgcgctggttacgaattataccctcagtggctcggatcgtctgcatc

SEQ ID NO: 2615 - DNA, 1553 bp, Unknown
  16S sequences of unknown bacteria
ggcggcgctggccaagatgggcgtccgcgccttcagcgatgacggggtcggcgtgcagagtggcgatgtcatggaagaagcgatgaaacagagccatgcgctgggtacgatgatcgtcgcgcacacggaagacatgtcttaccgcaagccgggcgcttatatgcacgagggcaccgaaagcaaggcgcgcggggtcgtcggcattccttcagaatgcgaatggaaacagctggagcgcgacctgaagctggtcgagaagaccggcgcacactatcattgctgtcatgtctccgcaaaggagagcgtccagctgctgcgcgaataccgcagccgcggctgtgatgtcagcggggaagtgaccgcgcatcatctgctgctgtgcgaccgcgatgtggtcgacgccaactggaagatgaatccgccgctgcgcggcgaggcagaccgcaaggcgctcatccgcggactgcaggaaggcgcgctgagcctgatcgccaacgatcatgccccgcacagcgaggaagagaagaagcgtccgctggaagccgcgccctttggcatcgtctcgctggagacggccttcccattgctgtataccaagctggtgctcaccggcatcgtgagcctgaagcagctggtgaactggatgagcacggcgccggccgagcgcttcggccttgcgcgccgcgggcgtctggaggaaggatatgcgagcgacttcaccctggtcgatctcaacgaagaatacatcatcaaccgaaaccatttcctctccaagggaaggaacacgccgttccacggctggagagtaaagggaaagatcaaagcgacttatgtagacggaacatgcgtatatgaggagggcaagcaatgaaacgattactgattctggaagatggcagcgtgtatgagggcacggccttcggcgccgatcattttcaggtaggagaactggtcttcaataccggaatgagcggctatcaggaagtgctcagcgacctgtcctattgcggacagatcgtcatgatgacttatccgatgatcggcaattacggcatcaaccatgatgatttcgaaagcctggacccggcggtattcgggttcgtggtgcgcgagtgctgcgagcagccgagcaacttccgttcggactacacgctggatgagtttttgaagatgaagaacattcccggcatccagggcgtcgatacccgcgcgatcacccgcaagctgcgcaccagcggcacgatgcgcgccatcatggcggatgaaggcgttgacgtggaagagatcgtgaagatcctgaagaacaccgagctgatgcatgatcaggttgcccgggtctccacgcgcaatcctttcccgatccccaaccgcggacgccgcgtggtgctcatggacttcggtgccaagctgggcatcatccgcgagctctctaagcgcaactgcgatctgacggtcgtgccgtatgatacggatgcccagagcatcctcgacctcaagccggacggcgtcatgctcagcaacggccctggcgatcctaaggatgtgcctgaggc

SEQ ID NO: 2616 - DNA, 12798 bp, Unknown
  16S sequences of unknown bacteria
aacgcgccctttcctcccaaaacaattcgttacgagcgaggagcttaaagatacaaaatttttccttttcaaacgcagtaagcaatctcgtcccaaacggaagataattataaagaatgcaatcattatctctcgcgtaatcccctttataagcccgcccaattagtcaagaaaggtccgaacgcggcggcgaggcattttaatatgacgatcccgccccgtttttcatccgttccgtcccggaatcgagggcatcggcgtgttcgcaggaaaaaaatatcagacggattccccttggcgttctcaaattaattgaccatacaaaaatgctttttgattataataagtcataaaaaataagtattttacatattagaaaaatcttgttataataagtgtgaaagaatcgaacggttctctcgcgcttatttttcgcatggggataaaaaacgacgcttgaagatatgcgcaggcgatagaacgtcacaaaggcgcggatacaaacgtctatcgggaaggaaatctcgcccgtcggaaaaagcggcgacttccaagacgacctcgggcgggcagtatcgtccacggggaagaacgcagccgcgccgtcacgggtgcgagcgagccgcccggctcgggatttgcggagaaagaaattttataagggcagcggcaagaaaaatcgctctttttaaagagaatttttattccctcttgcaatttatcggaaaaagttatataatgaaaatactcttttccgcaactcgataaaaatcaggaacgctttatcgggtatcgcggtcaccgccgcacaggcgaaaagatcggcgttttttaggcttcgacacgggcgccattcccgaagcgacggaacaggaaatttatcgttatgcgggagcctgcgctttctaacggcatccactgctacgatttggatttatcgggcgatgtcttggcgtttgaacattgaaaaaactcagcgctccacgcagacgatcgcatcgactgcgggcactgcaatcggcgttgtctttatgtcgatcaaaggaaacgcataaaaaaatcgcagcgtattttgagaaaaaaataaaaggagaatataaatcatgtcctatttaggcgaagaaatcaaaaaattggggttcgggctgatgcgtctgccgcaaaaagacggcaaaatcgatatcgaacagacaaagacgatggtggatatgtttttggacgcgggttttacatacttcgacaccgcttgggcatatgcgggaagcgaagacgcgattcgtcaggcgctcgtcgaacgctatccgcgcgacaaattccgcctcgccacgaaaaatgccgcttggagcaactgtaaaacacgcgaagacgccgtttcccaatttgacacctctttgaaacagacgggagcgggatatttcgatttttacctccttcacaacctcggcgaaagccgtacccaatatttcgacaaattcggtttatggtcctgggtacaggaaaagaaacgggcaggactgatcaagcacgtcggcttttcctttcactcgacgccgcaggaattggaaacgattttgagggcgcaccccgaaatggaattcgtgcagctgcaaatcaactacgccgattgggaaaatcctgccgttcagtcccgcgcctgttacgaagtcgccagaaaatacgacaagcccgtcgtcatcatggaacccgtcaaaggcggtatgctcgcctctccgccggaaggagtgaaaaagatactcagcgtggcggagccgaattcctccgccgcctcctgggcgattcgctttgccgcggatctcgaaggcgtgattacggtgctttcgggcatgagcgatatcgcacagatgaaagacaacatctcttatatgaaaaattttacctctttgacggaaagcgagcgcgcgacgctgaaaaaagcgcaggaagaactcaaaaaaatttccctgatcccttgcaccacctgcaactactgcgcgaaagtctgcccgaaaaacatcggcatctccggcacctttacggcgatgaattacctgagcttgtatcaagataaagctttggcggcaggacaagaaaattggttagtcggcaggcatcagaaagaacgcgccacccaatgcatccaatgcggcaagtgcgagcaagtatgcccgcagcatatttccatccgcaaagagctggaaagatgcgcaaaagaactctattaaaaacaaaaaaaggagcaaaaaatgatagaaaccatactcgtcagaaaaaatctttctcttaaaatgaggattaccgtcaaaactctgatttccataggcatcgtggcgctggccgtcgttcttccgcagctggtgcatctcgcgctgggacagtcgggcggcgtacagtggctccccatgtatcttcccgttctcctcggcggctgtctgctcggcacttggtggggactgggcataggaatcgcctcccccctcgtcggctttttgattacctccgcgttcggaagccctatgcccgccgcggcgaggcttccctttatgatggctgaacttgccgttttcgcttccgtttccggactgttttccaagaagatactccaaaacgcctggatggcttttcccgccgtcttgctggcacaggtcggcggcagggcgagtttccttctgctcgtcgccgtttttcaaaatatcgcgccctttacggtcggcgcggtctggtcgcagattcaggcggggcttttgggaatgctgttacaggcggttgtcgtcccgtttctcgtaatgggtctgaaatttcttttggacagggacaaaaagaatgactgatctggaacaggcgaaactgaatttaaacggacatacgctttccctctgtaaaggcgaaaaccgtatcaccagcgacaagcgcggcatttctccgatggtgaacctcctttgcgggaacgtttctctaagcggatggtcggctgcggatctcgtcgtcggaaaagcggcggctctgcttttcgtctatgcacaagtcaaagaagtgtacggaaaagtattgtccgcggaggccgagaaagtcctgaaagagcacggcgtcccctgttcctttgaaacgcttgcgcctcatattatcaaccgaagcggaaacgacatctgccctatggaaaaactcgtcaaaggcgtcgaaaatcccgccgtcgccttggaaattctcaaaaaagctttatatggataagcacgatactcaaagaaagcgcaaagaaaatctttgcgctttttctgttatggagaacggtcctgccgcaatttgcccccgacgctgcgataactttgcccgatagaaaaagcaacccgaagataccttcgatccgcttttttcaatgtttttcccttttagccgacctgataatagagtatgagaaaaataaccgaaattgcaataaacgcaccgcctacgacgaacatatagagaacatttctctttttttcctttttcgcctgtctgtactcgtaaaaatccttgtatttacgtttggagatatcttttcgcagagcgtcgaagagcatgacgaacgcatagccgagcatatcgaacgcgccgccgttgccggcgagcataatcacgccgatacaggcaaagcatatgcccgtcacgaaaaaagcgtcgcacaaaatctgaaacactttcacggcgtccgtttgagaaaagatgtttttaaaacacaggatgacaaaagcaagcgcaaggcctaccgccgaggctatcgaataccgcaatatgttctttttcataatcctctatctctcgcttcgatttcggctttatattttccgaattccgcgtcgttgcagtagatcatatgtccgggcagaatttctctcatcacgggcttatctacggaataatcgtgttccgcaatgggattgtaaacgattctctttctgcccttttcatattcgggatcgggcaaaggaatcgccgacaacagcgatttcgtatacggatgaagcggatgttcgaaaagttcgtcggaggaagcgagctccaccaatttaccgaaatacataactccgattctgtccgaaaaatattttacgaccgacaaatcgtgcgcgataaacagtatcgtcagtcccagctgttcccgaaggttatttaaaaggtttatcacctgtgcctgaatggaaacgtcgagagccgaaatgggttcgtccgctatgatcagttcaggattgagtatgatggcgcgagcgatgccgatacgctggcgctgcccgcccgaaaactcatgaggatatctgcccgcgtgttcggcgaccagtcccacgagatcgagcatcttatacacttgctcgtcgatatactttttatcccttacgccgcgaatgatcagtccctccgcaatgatctccctcaccgtcatgcggggattcaaggacgcgatcgggtcctggaaaatcatctgcattttgttcatgatcctgtcttttttggcaaagcgtactttttcttgcagttccttttccaaagcttcttttttcccctcgtcgctttccgcggcaaggagaggctcgtattccgcttttacgctctgcgcctgcgcctcggcatagagcttattgcagtttttgtgatcgtatacggcggatttgatattttccgtctgcgcctttatgacggcgtgatacgcttcctccgcctttttcaattcttccgcatattcgggattgatctccgtgacgccgctctttttatccttttttataagggcgttgatctcgcttgatttctttctgtattccgcagcagcggcctttacggcgtctttataagagcgtgtgcccgcgcagatgcgctgccctttaaagtagacgttgcccgaagtgatatcgtataaacggatgatggaacgccccgtcgtggtcttaccgcagccgctttcgccgacaagaccgaacacctcgcctttttttatctcgaaactgacgtcgtctacggctttcagttcctgtccgggaccgattttaaaatattggcaaaggtgttcgacttttaaaagaacttcgtcattcttcttttccatcgctctttctcctcgcttgtttcatcctcgctattctgtccgtaacggccttggggggatccaccctgggggcgttgggatgcagcagccacgtcgccgcaaagtgcgtatcggaaatcttaaacatgggcggttgttcctcgaaatctatctgcatcgcgtatttatttcgctccgcaaatgcgtcgcccttgggcggatagatcatattcggcggcgtgccggggatggcttccagcttttccttcgtatccaaatcgggcatggatgacagcagcgcccaggtatagggatgcgccggcgaatagaacacgtcctgcgccgtgccgatttccacgatcttgcccgcgtacatgacggcgaccctgtccgccatattggcaaccacgcccaaatcgtgcgtgatgaagatgacggagagctgtctttccgctttaaccttattgatcagttccagaatctgggactgaatcgtgacgtcgagcgcagtcgtcggctcgtcgcagatgagaatatcagggtcggcggagagcgcgatggcgatgacgatcctctggcgcatcccgccagagaactcgaaggggtactgtttgaatctctttgcgggatcgggaattcccacttccttcaaaagtttcagcgcgcgtatcttcgccatactccgcgtaactttatacgcgacacccgacgccttcgctttgagataatcgataatatcgaccgttttgccctcgaaatcgggaacgaccgtcgccttgacgtccgcttccaatttacgcttcattctcgtaacgacgctgatgatgtccgcttccgccgcttccagatcgacgagatttttttccgaaatctcgtaatcgggcgttttcccgcccgccgcttttttgtcgtaccgcgctttttgcgtccgataccttttttcttccttctcgtttctgacaatcccgttgaaatagagctccaccgccgatttcagactcgaagcaaacgtatacgaaagattgtcttttacgacttccagcctgtcgatcgccttttccacggcctcgacgatccgctgcgcagattctttgatctcgtttctgtcgagagtatccttttcaaaggcgttcaattccgcttcgatgatcccgatcgcggtcttttttgcctccactgacctctcgtaagaatatcggatgccctctttcgccagacggataaagtcgagcataaagttatcgtcgagatatttgcgcaaaaagacgttcagctcgggaatgggcagatcgggcaaaggatctttggaaaaggtcacgtaatatcccattgcaaagaaattgggcatgggataatcgaccgcttccgaaagaatttcctttaccttttcgagcgctttgcccgcggcggcaaagtccgcttccgcgtctttcgcctccgcccggttgaacagacgccgcagcagatcggcagccctttttacgaaaggaactttcacgatcttttttatctcgctaaggagcgcgccgagttcgtcggcccgttcgcatacgacgtatttttcgaaactgcgggaagcgtaacgaagtatctcgttgatgtccctgcgcaagtctttataagccactttttcgatgcggaacaagacgtcgtctatttccgccaaagcgtcgttcgccgcttccttggctctgttgtacgcattttcgagttcgagatgtttatactcgaacttatcaaaatcgttacatttatgcctgttttcctcttttatgaggctatcgtccttcgcgccgcgcgcctcgtccatgcatctgttgacttccccgagcgtcctgttgaactccctgcgcgactctctttgatttatcttgcctttgatgagcatggcttcggtgagttgttttcccacgcgcatgatgggattgaggctggacatgggatcctggaatatcatggcgattttgtcgccgcggatcttgtgaaaatcctcttcgctgattttcatcaaatcctgtccgtcgtagatgatctcgccgccctctttgatggcgttgcccgcgagaatccccatgatggcgcggttcgtcaccgattttcccgagccgctttctccgacgatggcgagcgtttctcccttgtgaaggtcaaaacttacgtttcttaccgcctgtacttttcctccgtccgtcctgaaagaaattttcaacgcgtttacggagagttttacttctttttcttccattgtcatccctccgttcctctcaatgaaggattaaacgcatccctcagaccgtttccgaacaagttaaagctgagcatgagcaaagccaggaaaatggacgggaacaacgcgatatacggcgccgtggacaaatagctttgccctgcggctatcaacgtgcctacactggtaatattgccgctggaaagattgatgattccgaggtaactgagattggtttcggaataaatcatagagggaatcacgagcgcgcagcttgtcaccaacgtgcccaacgcattgggaaagatatgtttgacgattagccttctgtccttggcgccaagcgtccttgccgcaagaacgtactcctgatttttaaaccgataaaactgcattcgcgtcgtagacgccatagcgatccagcccgttaggaaaaatgccaaaaacagcaccagcacttggctggacccgcccatatgcagttttaaaagggtgatgacgatcatcgtgggaaccgccgagagaatatccgcgaatctctccataatgaggtctgtcttgcctccgtaatatcccgccaccgctccgtaaatggctccgaccagcatatttaccaaagcaacgccgataccgaacaggaaagagaatcttgcgccggaagagaggcaagtcaaaatatcctgccccgttcccgtggtcccaaaaacaaagtagggttcgctgattccgtcttttgcaacgtaactatgctgataaatataatattcataataattgaccctgcactcgacgccggaagaagtgggtcttgcataggcatagtaatacgtttctccgtccacctcgaagccttcgcttccttcgatccgcattacggatgtatagtcgtccgcggcaaagccttcccgataactccaatataccggaatgatattgccgtcctcgtcgtaaacgatctgcgtctttgtagttcccttcgtcttgaaataataattcgcgtcgttagaatcctgataagcctgcggtctgtccgaaagctttacggtgggatagatgacctgaattcccgtttcgtcctgataagcctgcaaatcggcatattgctccatggtcatgttccggtaaatcatccccgtcttgtgataggtatccagacggtatttgtaaagtccgttgtcggaaatagagtatttctgatttttaacggcgttgtgccccgtttccaatcccatggcataataatagtcaaacgtaatcttgccgtccgctcggctctcgcagccgtcccaaaaggaagtgccggcaaataatttactcttggggagcgtgcacacgaaatatgtatccgtataattcacttggtagggagtacaaaagggagtaatcaacgaaaacaggagcaaacagatgatgatgatagcgccgacaagcgcgcctttatttttacaaaagcgcgaaaaggcatcgtgcatatagctgcgcggtttcgtagcgagctttttatcgtgcacgaagtcgcccgcagaagcaaaggcaaacttttctttggggatattgacgaattgtttattttccattttacttggcccccattcttattctcgggtcaataaaaccgtaactgatatccacgatgatgccggcggcaagccctacaagagtataaaagcccgaaagcagcatgaagaaatcgtaatcctgatagagaatagagtcgagatacagtctgcctactccgggaatagagaacatactctctatgatgagcgacccgcttaatacagacacgaattcgccgagaatcatagggaagataggcaccatcgcgtttctcagcgcatggcggaacgtcgcctgtccgcgggtcagacctttggtgcgcgcaagcaacataaactcgctcgtaagcacttcggtaagctcggcgcgggtatatctcgcgtatcccgcaatcgaacccagacacagcgatagcaccgcgggcagcatggatcgaaacatctcccaactgaaatagtcgtatcccgatttcatcgtcagcggaaaccagccgagcttaaagcagaatacgtactgaatgacgagtcccagtacgatcgacggaagcgaaataagcaggatgacaaagacggaaatcacctgatcctgccatttattctttttaagagcggcaaaaatccccagtcctaagcctatgggcacgcctatcaccgaggaataaatattgatgagaactgtgggaggcagtttttccgtgaacacatcccacaccggctgattgcggtattccgccatagaaactccgatcccgaagtccccttccacaaaaatccgtttcaagtagtagcccagctgcaccatgacgggaaccgtgtcgaaactatacattttcgtcgcttcgtcatatacgacgtttcggatatatcccctggcttccagctgactgtaaataatgtttgcgtcctgcccctgctgtaccgtcaccacgataggcaaaagcttaatcaggacaaaacacataagcataattacggcaaacgtcatgagcaataagcccaatctttttaatacgtatttaaacatatacataagcaatttctcccggatgtgatcgtattaatatctgccggctttccgtttcttctaaaatgggtcggcggcaatatggaatttttaccgtacgcttacaataatcccttttaaaagagtacgcaccaaacaatatgcttaaaaacaacgggaggggcggaaatgaatcccgtcccccgccgcaaaattcgtcactccgattttaattcgtctttttgtattcgttggtcaaatcgttgttatgggagcttacataagcgctccattcgctgtccgtataattaacgaccatgtatctgtaaccgccgaagcccatgaacgtattatactcctcgctgatgttagagaatttggcgccaagcagcgtcgcagtatattccgaagtcgtgattatcgtgtaatatttttcgagcgtgatttcttccagtttcgcaagaagctgcattctcacttcttcgggaatcgcacccgcgccccaattatatttattggtttgtccgcggctttccgcaatgccgttcagacagcaataccagttatagatgctcatcgtaagctcctgacctgcccccgcatagctgcccttcggcatggtataagtcagcatttccgtttcggtatcccaccaggtggagtacatcaatccggcctcgggatcgatatagcactgcaagaatccttccggatcaaacgcgcccccggaaaagcccgtacccgcagcgatctcgtaagcgcccgatttgaaatcgtttgcccaaccgctcccgtaagaggaattgaacgtcacggtgattttcccttccaaagacgtcccttttacaagctcggtaatggtttctttaatataattgtaattccgccttgtattttcgttatcggcagaagtcccgtaaataaactcaatctgcttggaggaatcgtaaccgtaaacctcgttagtcgtaagctcggtgtaagcgctctccaccagctgtctggcaagagtgggattgtatccgttcatcgcgtcgtaagcgtcttcgtaggaagcgtaatttcgggtgccgtccgaccaggtgccgtccgaattttcggtgaagccgtaaactctcaaaagcgcttttttagcgtattcggtatctctgtaaacgccgccgttttcaacgtcgtaataataactcggaccgagcagaccgtagcaagacctatgggacgtataacaggttgcgttatagtcatctctatcgaggaagagagaaatagcctttctgaaatcgtctatcgccaggatggcgttattgcgcccgttgttcttcaacacattgagattggaatacaaattgatcccgaacgtaccggtacccggcgtatataaggcatacttggaatttctgtaatcgtctttatgcgttacgtccaaaccgatatcgtcaagcgtgccgttgaggaatcccatccactgcgtgttcaactcggagatctgttcgcattcgatcttggtgacgttatactgattggcattatccgccaaaccgtaaccgaaccaattatcgtttctttccagcgtataagatttaccgccctgaaactgcgtcagtttataaggtccccagcttgcggaagtcgccaaagaggaattataattggtcgtccaaagagtggaaccgcttgcgggttcctgcttacagctctcgtaaagatctttctttaccagaggaagactttgaaggctatatgcggcaagataggaaagactgccgtcctctttcaagcactgaatgggactgtcgaggcaaatgacgagttcgtattggctttcgctgtaaagtccgacgtcttcaaacttcgtattcatatgcgagttttcgacctgcatatataagtcgtcgtcggtcagatacgtcccgtaataggcggcaaaaatctgtttgccggaaaaagcgtcctcagcctttcccgcttcccaggcagccgcggtgtcgtatacggtttcatcgcttatagaaacatattggggacattcgttgccctgtgcgtctacatagccttgcgcgccatagaattcccaggcgtcgaaatacaccgtattacccgcatcaatggccgcctgcgcattatcgtatccctgcgaaacgatcgtttcatacgtcgtcttagtggtgctgtaaagataattccgcgcatttttgattacgatgttattataataggtagacgcgcgcatattgaaaaaggcgggatccaactgctgctgcatcgaatatacaaaatccgtggcatcgatcgccgtgccgtcgtcccactttaagtcgctgcggagcgtgattttccaggcgtacccgccttccgatttctgttcggcggtataattccattttgcgtcgacggaagaagtaacgtcctctaacttagtcgccgccgaatagtttacgctgaatccgccggaaacgattgcgtcggcgttgactcttccgtccgacttgaactttccgcctttcgtttcgtcgaacgcataatcatactcgaaaaaggaactcgtaagatattgcaaaatctgagtgtcgttattgtcctcataggtcaactcgttccagttgctgggcataacaggcgtataggtacgataggtgcccttctttaagttagcatcggggatggtagaatcgctgttatctccttttccgcaaccggccaatccgcctaccactgcggatgccataaacacagacatcgccaataaagcgactttgcgccattttttatccattttttgacctcctaaaattaatatccgttttatcgtcatcctttatatccttcggctttcccgcccaaagacatcgcggaatagttctccgcttcgcaactccgacaaaaagcgagagttaccttattcaaggaatgctgtcaagtatttttgtaggggcaagcgtaccgcttgcccctcccg

SEQ ID NO: 2617 - DNA, 4063 bp, Unknown
  16S sequences of unknown bacteria
gtgtatccgatcgagccgacttcttctataaacgtcggcttgctgccgagcgattcaagaaacgtcgcgcggaccgccggatctatcgccgggcgcatcgtgttgatcggatctattgacgttttgctgaaaatctgataaggatgcgtcgtgttgacgtcaattatctcactttgttcacgtatattaaattcctgattcaattccacgtcataatgcgcatacccggagacgacagggcgggtcggatccgactcgcggatcgccgatgttatcgcctgcgcccagacgtatgactgatcaggcttcgcgccgccgagaccgtaattcgggcactcgttgccgagatcccaagcctcgatggcttcccgatccgcgaaacgcttcacgaaataacgtacgaaccgtatctcccacttgatcagcgtcggatcggtcagaaaattcctgccctcgaacgccggcggagcgtaaaatctgaagctcatatgtccggtaagtaaacctactattaattttacgccatatttttcagcgatcgcgcaaaattcgtcaaaatgacggcacgcctcctcgctgactcccgcgcgcccagcctcggtgtccggaagcggccgctcatcatcgcccattcggagctcgtagagctggctgttcgcccaaatcgcgtgcagcggctgaaacaccggccaaagaaggaacatccgcagatgcttcacgccgtgctccgacagcagtttcaggtcgcggtcgaccacgtccgcgcgccagtccgaccacatatttatcgccgcgtgcgacgcccagtagttcgcgccgatgtagaaattcccatctttcatgaaatcgttcatttactcgcccgccttttttaattatattcatattatttttatgatttgtagctattgacgattcatataacatcgtcatcaaaaattatcagatcaattttccatttcctattgtattatacaccattttgtgttataatgcaatgagcggacaggattttccgggtgagctattccgcacagatacggaggggagatttcatggaattattcactgaaaagagcagaaaaaaagatcagcgctcagtcttcggcgcgccgtcgaccggggtgccggtttcggcggtggaggaccgcgtcgtcaggcaggagtgcgcacggttctcaagagaactcatgctcacactgctttcggagctgacagaggatgaaaaacggctcaaatccgccatttgcgggcagaacaacagactccccgaaaacatggaaccgccggcaatctccgccgccgactacgattacggcgcgttcaggtctgaggaaaacatcttcgctgagggaaacgtcgtccacgttctgcgtcatctcaggtacgaccggcacgagatgcactcgcacgacttctttgaaatcgcttacggagtgagcggaaacggtctcgtaacgctcgccgaccgtaaaattcagctcggcgcgggggacatcatcttcttctcgccggggaccgaacataagctgaccgccgactcggacgacacggtcatactcaaaatcatcatgcggcgcggcgatttcgactgcatttaccgcgacgttctgcgctcagactcgccgctctcggcgtttttccgcgcctcgctcgagaaaagcggcggcgggtggctgatgtttcgcgccggaggggacgatgaattgttggatattatgctgaaaatgcgtttctcggaggtgcggcgcggcagggtggacaacatcctcaaggaagccctcgcgatgcaggtattctgtattttagtgaatgatcacgcggaaagcgcccgcgtttccttcgggagcgacgtcaccggaaagatcatcatccatatcagctcgcatttcgaggacataacgctggacgagctctcgcgcgtcttccatttcaccccggaatacatctcgaaacttgtaaagaaagccaccggaaagtccttcacgtcgctcgtcatcgggctgaagctcgcggcggcaaagcggctccttatctcgacagacctcgaagtctcggaaatctaccgctcggtcgggttcggctgcaaagagttcttctacaagaaattccgcgaagaaaacgggtgcagtccgctcgaatggagagaaccgcaccgtcaaaatcatgaaattaccgcagaatcgtaaatatattatttactttttgtaacgagtcagcatataatcggcgtttttcacgtcgtcccacgacagggttctgccccagtgaaccgaataattgtagttgccctcggcaatcgtcacgccgttcgcgtcggttccgatcactatcaccgagtgcgtgtcgccgtttatgcgcaggatatcgcccacgcgcacggtattttccgcgtcggacaggtcgtaaacctgccttgccgggaggtcgccgaacgccgcgtcgctgagcatgaacgcgaagccggcgcagccgtagccgcccaagaaaatcccgcctttccattcgtagtagtcagcgttcgtccacggcgtcccctcggggtaatccgacttcagcgcgagcatcgccgccgctacgtcgtttatcgcgagggcgtcgtatttttcgttctgcgcgttcaatttttcggaaacgagcgttatcagctcagccgcgaaagccctagtcgcgggagaatcagggtagagaacgccgtcgccgcggtgcccgtggacatatcccgcgccggtcatcgtcataacgtcatcggaagcccaatccgacaaattgcccatatatgtcagcgacgccgtgttccaatcaagcacaatatccatcacgtcgcagaaacgccgcgctattacaagcgcctgctcctcggtcacgacgtcatccggaccgaaaaccgtgtccgaatagcctttcacgatgccgttctcatccgcccagccgacgtacggcgtgtaccactgactatccggaacgtccgaaaagcgcgagtgagccgacatatcagccttaattccggcggtcctgccgaggatcgtcacgaacatcgcgcgggtcatcggcgtgtcgggctcgaaggttgtcgcggatgttccgttgaatatgccgttttcattcacatattgtacgtatttatagtaataatcgttcgccggaacatcggtgaacgggttgctccacgccgccgcggggagcgtgaaagtcataatgaggagcagggaagtcagtaacgcgcaaattttcttcattatttatattcctttctaaagccgaaagcctcacggcacttttcgtaccgtgaggaatcgtagtcttttgttttttaaccgatgaacacaaccgggatgagcgccgcggtcggtctcgtcgcgctcgttatctcgcagataacgcggttcgtgacctcgaccttctcgcccgcggtgatctcgaacggaatctccaccgtgtcgggcgtgtagcgggtcgcggaaccgagcacgtaatcgtgacggacgccggaaacggtccagccctccggcaggtgccatttcagctctatatgcttcggagccgggatcttattctttacaatgaaacggcacttcacggtctcgccgggcgcgatatccggcgtcgtgtcgtagaccacgcggcactcgccccagacgaactcgtggttgaccgacattccagggatcgagacgagctgcttcgagaagctgtcgtcccagaagcgcgcgacatccttctcatcaaagctgtcagcgtcgccgaggcacgcgttcgcgttgttctgcgcaaggacgatcggaatctggttatagacctgacttgtgagctcggtgcaggtattcgggagtccccagatcgagccgcggtctatcgcgaccgacacgatgttgtcgccgaggtacttcttccagtcctccgggatgcccttcgtgccgttcaggatgccgaaaatcgagccgagagtagcgcccgtgcagtctgtgtcgtcgccgcagtctatcgccattatcatcgacttcttgaagtcgccctcgccccaaagaagaccgagcatcgcgaacgcgacgttcgccggtgc

SEQ ID NO: 2618 - DNA, 13072 bp, Unknown
  16S sequences of unknown bacteria
gaagttaaaaattataggtcggacagcacttaccccacattttataaggcagggagaaaatcatgttattttacggtaagacagatgtaggcagaagacgtgccgttaatcaggacaactttataataaagaaatattcacccgacgtgctgcttgccgtagtgtgcgacggtatgggcggtgcgaacgggggaaacgtagcctccgcacttgccgccgaaacctttgccgcacgtgtagatgaatacgagaaaaagcacaaggaattcttcggaatgagcgaggaggatattctcgaccttctctccgacgccgcaacggaagccaaccgcgcagtatacagacgtgcctcgggagacatttctctttcgggaatgggtactacgcttgtcggatgcataatttcgggcgagcatgcgtatgtggtgaatgttggagacagcagactttatgtggtaaacggagacgagataactcaggtcactcacgaccactcatatgttcagtacttcatagatcaaggaaagatgacagtcgaggaagccaaaaagtcgcgcaacaaaaaccttatcacacgcgctgtcggaatcgagaaaacagtgggcgcggatcttttcagccacgatatgcctacgggaagctgcgcggtactctgctccgacggactctcgaaccttgtcgacccggatgagataagcggcattgtcggaaatataagaagctccgatgacatcgaaaaggcgtgcagtgagcttatagacgaggcaaacaggcgtggcggaaacgacaatattacggcagtcctcttgtctgtttgatttcggagagctcacattatgatggaattatatgaaaaatatgtcggacttgtcttcgataaccgttatcggatagagcgcgtcatcggaatcggcggtatggcaatagtttttaaagctaccgaccttcttatgcggagagttgtcgcagtaaagatactcaaggatgagatttccgaggatgagcagagcgttaaaaggtttgaaaacgagtcgcgcgccgtttccatgctttcgcaccagaatatagtgaacgtctatgacgtctcgacaagggaaaacatcaagtatatcgtcatggagtttgtcgagggcatcacgctcaaaaactacatggagcacagagaggttttaaaccttcgcgagataatcagctacacgacacagatactccgcgcactcgaccatgctcacaaaaagggaataatccaccgtgacataaagccgcagaacatcatgcttctgaaaaacggcgtaataaaggtcatggatttcggcatagcaaagctcccgaacgcggagacgattacaatgaccgacaaggctatcggaacggtgtactatatcagtcccgagcaggtcacgggcggtgagatagacgcgagaagcgacctttactccctcggcgtaatgatgtatgagatggcgacgggctcgcttcctttcacagcggaaacaccggtgtcggttgctctcatgcaggtgaacgatacgcccactccgccgagagagattaacccgcacattcccctcggacttgaacagattattctgcgcgctatggaaaaatcccccgacgagagataccagagcgcggaagaaatgctcggtcagctcttaaagctgagagaaaacccgaaaatcatatttaaagaaaacaaaaactcaaagaacgcaaaggcaaagcaggcgaaaagcgacggcgcacctaagcctaaaacaagccgttcaatgttcccgataatcatgggagtaacgctggcgttcatagtcaccgcgggaatatccggctattaccttgtcgataagctgttcataaacggcactgccaacagctatatcgagatcccggttgagacattcgcagacggttactactccaccgagcttgaggattggttcgcaaagagtgagagatacaccctcgccgatgtgatatacgaatacagcccgacagtcgaaaaaggcaagataatatcgcaggaaccgggtgcaaacgaagtaaaaaagattctccccggcaagcagaagtgtgagataacgctcacggtcagtctcggagaaaaaacgataacgcttgacgactacaccgcgatagactaccgtacagtggaagccgctctccgtaaggaaggactgaaggtgtcgcttgaatatactccgagcgatgtgtatgaggtaggtcatgtggtaaagaccgaaccggctgccggaaccgtagtagccgaaggagagagcgtaaccatttatataagccaaggcgttgatgttgtgaagacgatggtcccgaatttcgtaggactcagcgaagcgcagactctcatacgtcttatggaatacgaccttaccgtcggcgatgtaacatatgtaaaatccgatatgacagccggatctgtggttgagcagagcgttacggcatggcttgaagttccgcagtattcatccgttgacttcaaggtgagcggcggcgcgtcatattccggaaacggtaaaactctgccgagcgtatccgacatgaactccgctcccgagacaactcccgctgaaaccgagccgaccgtggacgagactgagaataatggcgacaattactatgaggaaaccgaaacagctccctccgacaacgaggacgactggtttcaaaacgacaactcgggatttgtttcaagcggcggcggaaatcttttcaaaggctctgaatgatgaacaataacagcttcagaggaatcataacccgtggagtaggcggactttacggagtaagaatcaaaacaaacgacggatatgctcccgaagaggtgctgtgccgtgcgcgcggtgctttcagacatgagcaactaacccctactgtaggagacgacgttgcagtgaagccgctcgcggactacaatccggacgaaataaagcaggaagaagacgggcacgacaagcacaagggaaaggcgaaggacgtgcaggttgactttgtaatagatgaaatcctcccgcgcaggagcataatgatacgtcccgcactctccaacctcgactacctttttgctgtaattcccgcggcgtctcccgaacctgatttgctgactgccgacaagctcaccgttatcgcggaaaactacggaatcgagacggttgtagtcataaacaaagccgacatcgcgccggagagagcacgggagatagccgagatatacaaaaccgccggatattccgttttcatgctgagcgcggcaagcggagagggcgtaggagaactgatgaactatataaagtcagtctctgcccagaaggacggaagagaacacgtcagcggcgcatttgcaggtgtgtccggggcgggaaaatctactctcatgaccgcgctgttcccccatcttgagctgactaccggcaaagtctcgcgtaaaaccgaaagaggcaggcataccacgcgccacgttgagctttatccgatagagcttgacggaaacacgttctggctcgcggatacaccgggattttcaatgctcgatttcacaagattcaactttttcccgtacgacgagcttgcgggcagcttccgtgagtttgacgactgcataggaaagtgcagatacacaaaatgcacccacctgcgtgaagaaggctgcgcggttatcgaaaaaatgaacaacggcaaaatatcaccatcaaggcatgacagctacgtcaggatatttgaagagcaaaggagtgtacctgaatggaaaagacgatgaatgacagaaaaacagctctcgttataacgggcggatactgcaatgtcgaagcggcgaaaaatctgctgccggaatctgtcgacctgaaaatcgcggctgacagcggatatatgacggcacaaaagcttggtataactcccgacattacaatgggagacttcgactcatacaaggacaagctcccgccggagatgaacacgcttcgtgtagcctgcgaaaaggacgtcaccgacacaatgctcgcctgcgaatacgcaaaggacaacggatgcagatatatcacaatcgtcggcggtacaggcggaagaatcgaccactcaatatcgaacgtgttctacctcgaggacctcagacggcagggaatccgcgtgaagctgaccgacggagagaacacggtgcaggtgatccttgacgagacggtgacggtcaaggcagacggcgggtacttttcgatattcgcgcttgacaaatgtactgtcaccgaatacggatgcaaatatccactgaacaacgccactttggtaagacagcgcccgtatgcggtaagcaatgaggtcgatggagactacgccgttataaaaatcgagggagcggcgcttcttgtcacgagcaaacggtaacgaaatatggtcggactgtatatactgataacaaagctgcatttcggaggttcacgatgaaagtagtagtatggaaaagtccgcgttttgcgataccgtttttcaaaaaactgtttaagctcggcaaaaccacaaaataacatctcgcccggaacaaggttacaatgctttggttcgggcgttttatttacggaaaacataggcgggttttatttttatcttcacgggaataatagaatcgggtaaaaccaaatttaatattcagtgaggtcggcgtgaaaacggaagcaagcacaaacaaagtaaacgaaaaaaacaactccacggtagagctgctgtcggagatgtaccgcaacgtcacgatgggaagcgaaaatctcgtgtcggttataccgatgataaaggacaaattcctgctctcgaacgtgacaaatcagattgaagaatacgcctcgtacacacgtgagacggaaaaacagctgagaaaacgctcgatagacccgaaagagccgaagctgataaaaaagctcatgtcgcgcggcggtattgcgatgaacaccatgtttgactcctctgattcccacattgcggagatgatagagaagggaacgagaatggggcttgactccctcgtgaaaaagcgtgaggaaatgtcggctgtgggatgcgattctgacgcgcttcacctctgcggggcaatagaggactttgagagacgcgagaccggcaaaatcaaggactttataaaataaacgacgtaaattaatcatttaatctgaatgaaatgacttgaatctcgcaccgctttcatgtataatgtagccaaacaaacataacggaggctgcacttatgtcagacaacaagaaaaactgctaccttttcgtccatttcagagaaaaatccacaccggacggcgaacaggtctatttcggaatcagccgcgacggctatcactgggaagaagtctacggaggcaaaccgattctttgggcaatgcacggcgacttcggagtacgcgactgcgccatagcacgctacggggataacaaattcgtcatagctgcaacggatttgagccttgcctacggtatgagaaacaaatacaaaggctcgtggggagagatttgccatcacggcagcgaaaaccttgcattctggtactccgacgaccttgttcattggtcggagcagacgcttatccctataggaaaagaaaagtttggatgccgctgggcgccggatattacctatgacagaaagaacgacgactacgtgattcacttctcggcgtcagaaaaggcaaacaactacgaaatggcgattttctattcgagaacaaaggatttcgtaaacttcagtgagccggagcttctttacagatatgaaaagggcggcgttatcgactctgcgatttatgaagaaaacggcgtttattatctgtttgtcaaagccggagatccgagccgcaacatcatgcttcgctcaaacgagcttctcgggcattacgaaagagtttacacctttgacgaagaaatcagccgcaatcagcctaatctctatgaagcggcggctgtatataagctcagcgacggaaaatacgccctcatgctcgacttctacggtgcgcgcggaaagaagcagggttatgttccgtttgtcagcgaagacatttcaaagggcgtgttcctcagagacgaggaggacttcacattcccctacagattcaagcacggcacagttctccccataaccgaagaggaatacgagagaatcaagacctttgactttgatcccgactaaatttaatatttcgcggtttgggtattattgtgcctgagccgcgttttgtttgtgtcaaaaaatgtctgtaaattatgtttttctgtcgcatgaaatttgtttgatttattgtaaaatccggtacgatagtgtataatatgatagaatgtgaaattacagaggattatatggaatacaggctgatagatacgcactcatggagcagatacgagacgttcagacatttctacgatgaagttccgtgcgcggtgtcaatgtgtgacgatattgatgtgacggagttatataaggcttgcaagaaaagcggagtttcgttctatatcagtgtgctgtacgcagccgcatctgtgataaacgtccatgacgaattcaaaatgaaagcggtggattctcccgaatacgagtttcccatgcccgccgtgtatgacagagtcgatatcgcgcacaacatctttcacgaaagcggagaaagctatacctcggcgttcacggtgtacaaaagcgactttgccgaattttcaaaaaactgccgcgaggacatagaaagagcgaaaaggtcgaatattcaagcggttccgtgcggagagaacgtgtttgaagcttcgtgcattccgtggcgtcactttacatctgtcggggttgagacggaactgtattcgctcctgccgatagtgtgctggggaaagttcagggaagtgggcgggcgtgtcatgatgccgctgtccgtgcaggtgaaccacgcctcggctgacggattccacatagcgagatttatcaacgaaaccgaaaagctgtgcggtgaaattgcacgaaaaatcgcaaataacatgatataggaaaaccgaatgagactgtttgttgccgtaaactttacggaagaatttaaaaatacgataatcgaataccgaaacaagctgcgtgagttcaaggacgacccgcacataaactggacgactgacgaaaacctgcacctgacgctcgcgttcatcggcgaatacaaggacgcggacaaagtaaaagctgcgctcgacactgttcagttcaagccgttcaccataaagacaaacggatgcggtaatttcggctcgctgagatgggtcggaataactgaaaacgccgtgaagctgtcggataaggtgcgcattgctctcgatgaattaccgtatgacgagaagccgatgaagccgcacgttacggtagcgagagaaatgatagtcgacagacgagaggtgaatatgctgccgaaggtaaagcaggcgtcgatgaaaattacgcgaatatctctcatgaaatcggagaggataaaaggtaagctcacctacaccgaaatttacacaaaagaagcggaggatatttatgaataacacaaatcagtacgatattatcataataggttcgggaccggcgggatatacggctgcaatctacgcgggaagagcgggatatacctctgccgtatttgagaaaatgtcgcccggcggacagatgggaataacctcgagcatcgaaaactaccccggatatacggaaattgacggcttttcactcactgaaaagatgatgaagcaggcgaaaaagttcggtgcggttataaagaacgaggaagttgtttcggcagagcttagcggcgagataaaactcatcaaaaccaaaaaggaagaatattccgcgagagtagtaatcatagctacgggagcaagaccgagatatctttcagttcccggcgagagggaattcacgggacgcggagtttcgtattgcgcatcgtgcgacggtatgttctacaaagggaaaaccgttatagtaaacggcggcggagatactgcgatagaggacgcgatgtacctctcgaatatatgcgaaaaggtcattgtaatccaccgcagaagcgagttcagagcgtcgcagcatggggtaaacaaagcccacgaaaaaaagaacatcgagtttgtcatggactccgttgttgaagaaatcacaggagagagctgcgttgagtcggttaagataaagaacgtcgttacgggagaggaatgctctgttccgtgtgcgggaatattcatagcgataggaagaatccccgagaccgagcttttcggcggtcagatagaaaccgacaaaaacgggtacatcgttgcgggagaggattgcaaaacctcgcttgacggagtttacgctgtgggagacgtgagaacaaaggcgctgagacagatagtgacagcctgcgcggacggtgcaaatgccgtaaaatcagcggaagaacttttaaccttaagtgagtaaaactaaaatataataaggtagaaatatgaaacacggatttattactctttctgccggagttcccgaggtatcggttgcggctccgacaaaaaacgcggaatccatatgccgactcattgatgaagcgtacgaaaaaaacgccgcggttctgacacttcccgagctttcggttacgggatatacctgctccgacctgtttttctccgattcactcataaaaagcgcggagagagcagtcgagagcattatcgagcacacaaaagacaaaaaaatgcttgtgttcgtcggagttcccgtctcggcacatggcaagctctacaactgtgcggctgtaatatcgaacggggagcttctcggacttgtaccgaagaccaacataccgaactactccgaattctacgagctgcgccacttcacacccgcgcccgagactgattctgtcgtgagattctgcggatgtgacgtgaacttcggcgtgcatcagatattctcgtgcgctgaaatgccgtcgctcagagtgtctgccgaaatctgcgaggatatgtgggtggcggacgctccgtctactcatcacgctatggcaggagcaacggtaatagtgaatctctccgcgtcaaacgaaacagtctgcaaggacgcgtacagaaaaatgctcgtaacgtcagcgtcgggtaagctcatctgcgcgtatgtctatgcagacgccggagtcggagaatccactacagatatagttttctccggtcactccatgatagcgcagaacggagctgtgactgccgaaactctgcccttcgcgggagaatacggcaaaagcaggataataacatccgtctgcgacctcatgcaccttgaacacgacagacgcagaatgaacaccgtaaagcccgaatacgccgaaaaatacactgtaacggagttctcgcttgacataaaagataccgatatcacaggaataataaacccgcgcccgttcattcccggaggacgtgaggacaaaaaggctgtctgctcccgtatcacggatattcaggctgccggacttgcaaagagaatacgcgcgtctcatgcaaaaggctgcgtagttgcgctctcgggcggacttgactccactctcgcgcttctcgttaccgccaaagcctttgatatgctgggaatgagccacaaagccattacaacggtgacaatgccgtgcttcggtacgacttcaaggacgcgctccaatgccgagataatggcactcgagcttgatacctctttcagatgtattgacataaaagaagcggtagacatccacttccgcgacataggacacgacccgagcgacctctccgtagtctacgaaaactcgcaggcaagggagagaacgcagattatcatggacatagcaaacgccgacggaagccttgttatcggtacgggagacctctcggagcttgcactcggatgggcaacctacaacggcgaccatatgtcaaactacggagtaaacgcgggcgtaccgaaaactctcgtgcgtcatatcgtatcatacttcgcggatgaagcggaagagggcggcaaagaatccctcgcgcgtgtgctgagagacgttttagctactccggtaagtcccgagcttcttcctgcaaaggatggagagatagcgcagaagaccgaggacatcgtaggaccttacgacctccacgacttctatctctaccactttatgagatggggtgaaacacccgacaagataatgcgtgaggctgaggcggctttcgcggatgagttcgacagtgtgacaataaagaaatggctgaacatattcctccgccgcttctacacacagcagttcaagaggagcgcgcttcccgacggacctaaggttggttcagctgcactatccccaagaggagactggagaatgccctccgacgccgacggaagcgaaatgaaaatataacaggagaaacaaatgaaactcggaataatcgccgctatgaaggttgaagcggaaaaaataatatcctccatgacggagaaaaaaacggaagaatacggcggcgtagtatatacctccggcaaaatcggcggaaacgaagtcgtctgcgcagtctgcggtatcggaaaggtattcgccgcgatgtgcgcacagattatggcagtcgtgtacaagccggaatacatcataaactcgggcatagcgggaactcttacgcataacctctcgataggggacgttgcaatatcgaccgacgccgtgcagtatgacatggatacctcggtagtgggagatcccgtcggaatgatatcgggcattaacataataaaaatccccgcttcccgtgagcttggagaaaaaatagcgtctcttgcgcacgagcatggagtcaagacatacatgggaacgatagccacgggcgacagattcatcggcgacagcgaaacaaagcggaagataagcgaaatgttcggcggaatcgcgtgcgagatggaaggcgcggctgtcgctcaggtatgctatgtcaacaaaattccgttttgcataattcgtgcgatatccgacagcgcggacggcgaagcacttgacgattatcccgcatttgccgaaaaaagtgcggatatttcagccgatatagcgataaaactcgcgaaagaactttgacaatactctcgaaaaggagaatacataatgaaaaaataccagaactttacccccgcggagctgaaacccacaggttggctcaaacgtcagcttgagcttcaggcggaaggactttccggaaacctcgacaaaatatggcccgatatccgcgacagtaaatggataggcggagaccgcgacggttgggaaagagtaccgtactggctcgacggatttgtaccgatggcatatcttctcgaagacgaggacatgatcgcccgcgtaaagaagtacatcgacggcattgttgcaggtcagtgcgaggacggatggctctgcccctgtactcttgaagagagagctaactacgatatgtgggcgttgttcctcatcgacaaggttctcatgctctactacgactgctcaaaggacgagagaatcccgaaggtcgtttatgactcgctgaagaaccttgcggagcacattaaggtgaatcccctccgcgactggggcaagacaagatggttcgagtgccttatcccgattattgcgctatacgaaatctaccccgaagaatggcttcttgaactcggacgcgagctgaaaaagcagggaacagactacaacgaaatcatcaagaatcccgcttacaagactcctatcaatcagtggctgtgggacactcacgtcgtaaacatgggcatggctctcaaggaaggcgcgctgtcctctctgtttgaaaagaacgaaggagacgacacaaactccgaagctcttctcgaatacctcttcaagtatcacggaaccgcggtaggtcattttacaggcgacgaatgcctttccggtatctctcccatccagggaacggaatgctgcggcgtagttgaggctatgtactcgtatgaagtcctcttcggaatcacgggaaacggcaagtgggcggacagacttgaaactctcgcattcaacgccctccccgcaacggtaactcccgatatgtggggacatcagtactgccagcagacaaaccagatagctgtcgtaagaaatcccgaaaaccacaaaatatacagaacaaacagcggcgagtccggtctttacggtcttgaacccaacttcggctgctgcaccgctaacttcaaccagggcttcccgaagtacgcgctctccacattcatgaaagccgataacgagatagctgtctgcgcaatttctcccgctgtggttgaaacagagatggacggcgctcacgttaaggttgagtccgacactctctatccgttctccggcagcgtgaactacatagttaccaccgataaggaagccgaattcacactcacactccgcatcccgtccttcgcttcttccgctaagatagacggcgaggaagcacagccaggctcttccgttgctcttacaagaaagtggagcggcaagagcgttgtcacacttgagcttgattttgaggttaagtttgagcttcgcccgacaggtatgtacgatgtccgccgcggtcctctggtttacgcgctcaagataggcgaagaaaagaccatgctcgaatacgaaagagacggcgtggagagaaagttcccgtactgcgactgggaatacagacccacaaccgattggcagtacgcgtttgcttcagaggacgttaagttccacgaagaaggtaaggtcggcaactacatttttgaacccgaagacgctcccacatggcttgaagttcccgtatacagcatcgactggggctatgaggacggattcggatacactgcacgtcacgaacctcgctctacctgcccggtagacagaagggtaaagaccgtaaagttcatcccctacggctccactaacctcagactcaccgagctgcccttcgctgacgtaagataaggaagcctctgatttaatgttatttttgcgacaaaagcccctatatttcagccttttatcgcaaaaatccgatt

SEQ ID NO: 2619 - DNA, 10369 bp, Unknown
  16S sequences of unknown bacteria
gacgtgaagagcttcaagctctccacgctcgacggcaagaagcccttcgagtcgaagccaggccagctgggcatgttttcgttcatctccgagggcgagtcgatgttctgcatcagcgacaacggcgacgactacgtggagttcaccgtcaagaaagtgggccgcgtgaccgagcttctgcacgactgcgaggtcggcgcacaggtgggtctgcgcgggccgtacggcaactggtttccgtacgagtcgtgcaaggggcgcgacatgctgttcatcggcggcggcattggcatgcctcccgtgcgctcgtttctgcagtactgcgtcaagcaccgcgaggactacgggcacctgacgatggtgtactccgcctcgacgtatgacgacctcgtctgcaaagacgacctgttcgagaactggaagctggtcccgaacatggacgtgttcgtaagcgtgtatcacggtgacgggaagcacgatctgcccgaatcgtacaccgccccttaccttgaaagcctgaacctgccggtcacggaaaacagcgtcgccgtgctgtgcggcggtccctcgctgtaccgcacctgctcggaaagcctgctcaagatggggtacacgcccgagcagatcgtcacgacgctcgagatgcgcatgaaatgcggcgtcggcaaatgcggacgctgcaatatcggcagccacttcatctgcctcgacggaccggtgttcacccgcgccgagatcgacgagatgtacgaaaccgcgtagcgagaagcgcgcgtccgagcgcccgagcgtgcccgctctcgcgcgtaagtggattgctgagagaagagcctcctgtggggattcgcgttcctgcaggaggctctttcatgtggttggtcgcgcgggccagtcgcgcggcctattcgtagctcacgccgctgctctcgagctcctcgaagagctcctcgggcgtcatgacgagcgtcttcgcgtcctcgtagcccgtctcgcggcgcgtgagcagcacatcggccttcaccttctgggcggccatgtccaccaggcagtcgtcgaagttctgttcggccaccttgaccgcgttgcggatatcctcgccgtcgagcgcgcagacgctgaagagctcgaggctcgcgccgaaggcaggaagaatcgcctcgtcggtgcagatcgtcgacagcagcgtgtgcgcctccacgtaggactgcgcgtacacccacagttccgcatctcccagaagcgccatcgcggcgaggcgctgggcggcccctttgaagcgctcgtcgttgtcgaagaagccgagcagcacgctcgtgtcaagaaagagcctcatagccatccctcctcttctcggcgatgacctcttgcagcgagcgtccgtcgagcagcgatgtgtccgccaccgtggtagctgccagcagctcggagagctgtttcttttgttccttggtaagcttgcgcctgccggctttgagaaggtttttcttggggagttcccggtgttcgagatagtactcgtacgcggaattgacgagctcggtcggagaggagccgttctccttgagcagggccgtcacctgctctttgatctccacgggaacgcgcgcggtcaccattgcatccatgtcatcacctcgaacgaaggctgtcgtctgctctattgtatttctgtattacggttgcttcaagacgtccgcgataacttggtaggaagagaccagccgctcgagactccatgcagcgttcgccccgctcgtggacggtaattggtgcgcgggcatccccgtcatcgggagctggtagcgcttgtaatacagggacgctttcgcccccgtcgtgaacaccgtgcgtatcggggcgaccgagagtattcgggagaggtcgttcgggacgacgtctcggatgctcgagtccgatgcgcccacgatggtgcagctttcgatgacgtcccacatggcaatatgatggcgcagcaggaatgccatgcgctcctgcgtgctctgcggcacagtttcctcgccgagcacgcgtgcgagcacccgccacatgcggttttgcgggtgcccgtagaagaagccgacttcgcgcgattttggcgaggggaagctccccaagacgagcacgcgcgaggtggtgtcgaacacgggcgggatggtatgtgtcacggcaattcgttccatgggggcatcatagcgcgccccacccctactgcaccatgcacgaaaacggtggcagtgccacacatctcgcgattcccgcacgtaaacggtggcagtgccacatatttgcgggaagtggtacgcaaaggaaacgggaaccgtgtcccagcacatcgctataatcggggcagcacgtgcaatgcgtctcttttcgttggaggaaccatggaccagaaggtgtacgaactcatcaacaaccagatcaacaaggagctctactcgggctacctgtatctctcattcgccgactactacgaggacgagggcctttccggctttgccaactggtacttcgtgcaggcgcaggaagagcgcgaccacgcgctaatcatgcgcaagtacctcctcgacaacgactgcaaggtgacgctcaccgccatcgacgctcccgacatgaccttcaccgaccatatcgcgcccatcaaggcggcactcgagcatgagaagtacgtcacgagcctcatcaacgacatctacgccgcggccgatgccgtcaaggattaccgcaccatgaagttcctcgactggttcgtcgacgagcagctcgaagaggaggcaaacgccaacgacctgctcaccaggatgaagctgttcggcaccgacgccaaggcgctctacgacctcgaccaggaatacgccgcacgcacctacacacaggcagccccgcttgccgcaaactaacgaatagaagcgcgcgcatgcccgacgcagacgaagctctcacgaaacgccatgtctatcaaaccggcatcggccccgtctgcatgtccgaggcagagcatgccgcgtaccttgaggcacgggaagagcaggagctcagaaaggagctcgaagacgatgaagcgaattgacaagaccgtttacgaggcgcagggaagcgccatcgagggcgacgtgactatcggcgtcgacaccggcatctggttcaacgcggtcatccgcggcgatgagggccacatcttcatcggcgaccgcagcaacgtccaggacaacgccacgatccactctgaccctggatacgacgtgagaatcggcaattacgtctctgtgggccacaacgccatcgtgcacggcgcgtccatcggcgacaacaccatcatcgggatgggcgcgattgtgctcgacggggccaaggtcggcaaaaactgcatgatcggcgccggcgcgctcgtcacgcacggcaccgaaatccccgacaactcggtcgcattcggctctcctgccaaggtcgtgcgcgcgatgacggacgaggagattgccgccaacaaggcaaacgccgtccgctacgtcaaccatgcacgcgacgcacgcacgggcgacctcatcgaggcgatttccccctcgggcgactagcgcgcaggagcctcgcgaaagagcacatgggtgcccggcggccagctttccgccgggcatttttcatgcgctcatcccagcaaaaaagcgctcgtggacatgcggtgagacgttcgtccagaaatcgtgaaaattgctcatgcaatcggacaaattcgacaaaactcacgctcaacgtgcaaatgttgcctatactgctaacaacacaggccgagcggtgttactatcccgctggcttaaaccgcaagagaaggatgtgattgaatggcactccccaagatgaccgacgagcagcgtgcagaggccctcaagaaggccgctgagacccgcgcccgccgtgccgaagtcaaggagcaaatcaaggccggcaagctttctgccaagaaggcctttgacaaggttgacgacaacgcaatcggcaagatgcgcgtgaagcagttcatcgccgcattccccggctacggcaaggcccgcaccgaggctctgatggaagagatcggcatcgacgagaagcgccgtctggccggcctgggcgatcgtcagaaggacgccctcatcgaggctctcgacaagtagtcggcacccataccagatacgcaaagccctccgcatcgtttgatgcggaggactttttcatttgccgtgaataggtattcggctactctcggcagctgcggcgcgcacaggcactgcaacagggcctgcgcacgcttagttttctcagatgcggagctgcctattggccctgcgctttgtacctggcctcggtagcttccttgaccggacgccaccagtcctcgttgtcctcgtaccacttgatggtctgggcgagtcccgatgcaaagtcggtgtgcttgggacgccagccgagctcgcggcggagcttggtcgagtcgattgcataacggcggtcgtggccaggtcggtctttgacccagtcgaagtcatcggggtctttgcccatcccttccaaaatggcatggagcacgtcgatgttgctcttctccccatcggcaccaatgagataggtctcgccgatgcgcccacgcgtgagaatctcccataccgcgctcgaatggtcctcggtgtggatccagtcgcgcacgttgaggccgtcgccgtagagcttcgggcggatgtcgtcgatgatgttggtgatctgacgaggaatgaacttctcgacatgctggcgcgggccgtagttgttcgagcagttcgagatggtcgcgcgcacgccgaaggtcctcacccacgcgcgcaccagaaggtccgagctcgccttggtggagctgtacgggctgctgggacggtacggcgtctcttccgtgaagcgtgcggggtcgtcgagcgcaaggtcgccgtagacctcgtcggtcgagatgtggtgcaggcgcacgtcgtgcttgcgggcggcctgcagcagcgtgtacgtgccctcgacattcgttctgaggaacgggctcgggtctgcgatcgagttgtcgttatggctttccgccgcaaagtgcacgcagcagtcgttttccgtgaacaggcgatcgaccagttccgcgtcgcagatatcgcccaccacgagctcgcagcggtcgggatcgatgccgtcgagattcgcggggttacccgcataggtgagtttgtcgagcacggtgatgtggacctcgggatgatgctctgcaacgtaatggcagaaattggacccgatgaagccggcgccgccggttactatcatgttcttgggttggaaggcagattcagtcatttgaactccacgttatgttgttcttacaagtgctcgattatactagagagctgcattgctgacgttttcggaggtagtttcatggcgaaagaacagggaacgtacgtacgcgtgcgcatcgtcaccgacacgtatggcctgccgctgtttcacatccagcaggtcaacatcatgaacgagctcgtcgacgggaccgattccacgtacgagggaaacatgacgctcaacgcggccctcgaccgctgggcgaaggaccacgactaccccgctgcctacgtcgccgaatagctcacgctcggaacgcgcgacgcaggcgcaatatgatgggacgctaattcgacgagacgaactcgttcgcaaccgaacccatttcgtccggaacatccccgatgccgccgaacatggcatttgccgtggtgctgtcgagctcatcgaccgtccagttgccgtcggtcttcgtcagcgtgattgtcccctgagccgtgacggacttctcggcgagggcgtcgattgccgtgctcagttcagagaagtactgggcgacgatgtcctgttgtgagggaacggttccggtgctgagcgccgaggcgtagacgttttgcaggtacgacctcatcgagctggtgaatgcacctttgatgtcgtaggtcgtgaacgtgaccggaacgctcgcgtggtcgccgttgacggtcgcgtcaccgagcgcgtagtcgaaatcgcacatcttgttgagcagcttgttgacgaccgcttgctcgtcatccgtgagctcgacgtcgatgccggccgcctctttgatcccctgctcaatcgaagtcttgagctcggccatgttcccttcgaaatcctgggcctttatctcgtcgagcgtcgcggtcgtcacgtcttgtggcgaggcagaactacaaccaacgagcgagacagcgaggatgcataccgcaacgatgctcgcgataagcgcgataacttttctcatcgcatctccaatcgcacgaaaaaaacgatgtaacgctcaaagtatatagaacgctccacgtgcgatcgataatgaccatggaatgagcaccgaccctgccgtcagccagcggggtcggttctcagtggctctcagccagcggggtcggttctcagtggctctgatagcagatgcagtccgctagcagatggaatggggtcggttctccctggctctgatagcagatgcagtctacgaacgggcggacgcgccctcgagttctttgagatgttcgagctttgccgccgccatcttgtcgagcttgcacccacgtgcatacgtcgcccagttgaccgcgagaaaaccgaggttgagatagtagacgaccaggacccagttgatgcttccagaaagatacttggcgatgatgcccgcgacgtagccgagcgtgatgagcagcaagaactgccagctcgtaccctgcgccgtgcctgccttgtacgccttgtacgcattaagcggccaagaaagaccaaagcaaatcaacattaccgcttcgaggaccgaagccatcgtagaccatcccctcagatgtcgttttcacatacgagcggagtctagaatcctctatcgataccgtctaatatattgttattagtattctcatgcccaatttgcatgatttgaggatagcatggaactcacccagctccggtatttcgtcgaagttgccaaaaccgagcacatgacgagaagcgccgaccacctgcatgtcgcccagcccgcgctcacgaggtcgatccaccgcctcgaaaaggagctcggcgtccccctgttcgagcacgtcgggcgcaatatcaagctcacgccctacggcgagcacctgaaggagcgcgcactgcccctcgttgccgaactcgacgacatcgagcgcgacatgcagcgcttctcggaggcgcacgagcgcacgatacagctcaacatcggctcgggctcgaacatgatcttggacgtcgtcatcgactaccgccacgaacacaacggatcggagttccacatcacgcagcgcgagggacgcgacgccggagacgtcagaaccttcacgttgatgcccgacgaggacaagcgcgccttcgagacggacaacgccttgcttctcacagaggacgtcctgctcgccgtccccgtgcaaagcgagctcggcgacacgatcgcgcccgcagagctcgacggccagaacctcgtctgcctcgcaggaagccgcaagttccgccaggtctgcgacctgctctgccagaagcacggcatcgagaccgtcgtcgccttcgaaagcgacagccccgccgtggtgcagaagatgatcgggctcggctcgggtgtcggattctggccggcgcgcagctggcccgccatcgacccagcacttgcccgcctcgtgcgcatcgattcagacgatttcgagcgcaccatcgtcatcgagctcgattcatcgcagctcgcaaccagagaggccaaacgcttcttcgaattctgtcgagagcacctgtcctgaacggcaaagggggctgtgggaaaacccacagcccccttcaagtgcagtgaaccaacacgcgcggcattcgcagaaaactagcgagagatgagctcctcgattgccgcctctccgcagtatcccgtactccgtgcaacgacctgcccatctttgaagaagaggagcgtaggaatcgacgagataccgaactgacgtgccaggtacgcctggtcgtcggtgtcgacggtgccgagcttgatctcggggtgcagcgcctcgatatcctcaaggacgggcgcaagcatctggcacggcccgcaccactccgcccagaagtcgagcaagacggacacctcgctgttcgtgacctcctgctcgaagttataggctgttatctcgactgccatcgcgcgcctttaggtctactgaagtgcgaacttctcgaggccggccttgggcagtgcacccgtctggcttgcgaacggcttgccgtccttgaacaggatgagcgtcgggatcgccgtgataccgaactggctcgccagacgcggctgctcgtcggtgttgaccttgccgaccttgatctcgggatgctccctcggaaatctcctcgacgatcggggagaccatctggcacgggccgcaccatacagcccagaaatcgaccagtaccggcttgtcgctctcgagaacctcggactggaaattttcggatgtgacttcgaacgtggccatttccttctcttttctcgtttgaccgggcaaaacgcccgtttgcttatcgtcggtgacgactttaccacgcggatggcaacggcgcgtcaacgggcagcgcccgaaaccatgacggattcccgaaactcgggcgctagcgagagaaaccgccacccccgccgccaaagccaccgcctccgccgccggaaaatccaccgcctccgccgccggagaacatgtccgaagcgacatccttggccgtcgcggcatcgatggccgcttgcgcggacgcgaacgtgttgtcgaatgcatcgtggaagaaatcgccggtcgaggcaccagtcggccccgccgcatagccgtacggggtgtgataccagtacacggtgctcgcaaacgcggcatcgtcccaaatgtcgggattgatctggctgagctgctcggcgacgcggtcggacacgccgaacagataggcatacaccatcagctcaccccacaccttcgcatccgtggggaccgccttgtcgagcgcggtgaagtcctcgaaccacttcttgagcgcctcgcagcgcgcgtgaatctcgacggcgtcgcgcgagcgacgcggcatgaagaacgagaaggcgaacatcacgacgcacccggggagcaatcccagcaacggcgcgaagttctcgagaaacaccgaggcaacagccgcaaccaccgcgatgccgaccgagatgagcagcatcaggaatttgtagcgctcgccctcgagctcgaagtacctgtgcttgcccacctcgtcatggacagcggattcccagcgcttcacgccgtccatgaactgctcggcatgctctttggcgtactcttgaagctcggacagggtaaacgtgttcccagaaaaatgcttgaacatcgcgtcgagggccttgcagtcgatgcgcccgagccccgcggccttgtcctcgtggtaggtgaggcggtaggtcgtctccactttgtcgccgagaatcttgcgctgcctgacggactgctccgcgtcgatcgagaccacatgctggttgccgagatgcatcatggtaacaatgaggtcgttggggtcctcttcgttccagcgccagatcctgccgacgactgccgggtgcacgcccttggcaggaacgtcgcgccagtactcgccttggaactcgggcttgtgctctttgccatggcgcctgaacatcacgatgctcgcgacgatcagagccaccgacagcagcaacggaacgacgagcaaaagcgcgctcgcgatgcgcttcagctgggcttctcgctgccaacccgcctcctcttccatgatgctgtcccactggctcgaggcatgggtctttgcagaagggacagatggggtccacgaggacggaaacgcaacgcgcatctccgcgaacgtgcccgactttaccctgggaatcgtgtaggagatcgtcccgtcgtcgttgaaggccacactgccggacaggtcgccatgaccgtaggcgatgacattgctgccgcccgaaaccgtctgcccagaaggcactggcagcgtgagtgtcgcgttggcgttgttcgtgtcgacgtcccagccctcggggatgaactgccagtacaagacgctgcagtcatcgtatcggtcgaccgcgttcgtgtaggtgtagtcgaacacgaacgtcttggtggcgtcggaggtattgctgaatgcatagagcgtcttcttctcgctgtcgtacgagtagtacccgctaccgggaccgcccatcgtgcgccacagcgtaacgaatgggacctcggtcaggctgctgcgggttccgtctgcatcgaccacggagacg

SEQ ID NO: 2620 - DNA, 4637 bp, Unknown
  16S sequences of unknown bacteria
cccgccccggaaccggaagccgccccggcggaaagtccggaagaatcggaggatatcccggcggaaaagccaaagcgccgccgcggcctgagctggctcttcggcgcgccggacgaagacgaggaagacgacctgggcgctgcggaggctgcccagcagccggaaaacccggcggcagtcaaagcgccggaagacccggccgccctggacgcgcagcccatggaagaatcggaaccggcggaagcgccggaagaaaagccggccccccggcggcgcagacgcgctaccgtccccttccagacctcccgcctgccccaggcagacgcggtgcaggcggcaagcgatgcgacagatctgccggaaaatttggaagacgagctggagtacgaggaggcagcagcggacgacgcgcccttacatctgcccttcctgggcaaaaagaaagcgccccccgcgccggagccgacgctgacggcccacgagggctgccagcgctatgccaagcgcctgcggcattcggacctgtgggtgaagctggccggggcccttgcctgccttgccctgtttttcagcgcgtattacagcctggattggaattttatcgcgccgctttcgcagatcacgtcgatcgcttggtgcgtcaatgttttactggtcctcagcgctctggtctgccgggatgtcatccgcaccgccatcgcaagcgcaaagcgcaggcaatttgatctgaatttcctgacaagccttgcaagcctcgtcgctctcgtcgacggcgtcatcgccgcccgccatcgggtcggctacggcgcgacggcctgcatcctgctgtttttggcccagtggagcctgcagctgcagcggcagggcatgttccgcaccctgcgggtcctggataaaaacgagatcacgacgggcatcgtccggtcggaaaacgtcttccataataaggccgcgctgttcgtggccgactgcacgccggaggagtttatggcccatgttgaaaagccatccctctcggcgcaggtcctgcagatctatacacccctggcgatcttgctgacgctgattttagccatcgccgcccaggccaagcacgcagcccagttcctgcagtgctgggccccgatgctgctggccgccgtgcccgctgtgggcctgctgtgctacagccgggcctttgcgacgctagcgcgccgcctagcaaagcggggtgcggccctgtgcggttggtacggcgcctgcgccatcggcaaccgcgccgccgtcctgctgcatgacgacgacctcttccccccgaaggcctgcgagcccaacggtgtcaagagctacaacggctacaccggtaaccaggttatcggctacgcccaagctgtgctgcagaaggcaggcagtgggcttgctgcctgcctggacgcactgctgacccaagaaggcggtcgccggatgcaggccgacgccatccgcctgtatgaatccagcggcatcggcggcaaatttggcatggataccgtcctggtggggacgctgtccttcatgcgccgcatgggcgtgcatatgagcgcggagacgaaggtcaagcgcgcgacgtacgtctccgtcaacggggagctggccgggcttatcgccatccgctacagcacatccgcccaggtgcgggacgccgtcggcatcctgacccggagcggccggacgaagcccgtcctcgcgacgtgcaatgtcacgatcacgccgaagctgctggcgcagaaattccgcattcccgccgaccgcttcctcttcccggacctgcggcagcgggcggagctcgccgcccggaccgccgacccggagagcaccctgtgcgccgtcctggccaagccccatatcgccgcctttgctgacgccgccgtcggcggccgcattttgcaaacggtcgtcaaggccgggctgctcatggccatcatcagcggcctcatcggcatctgcgtgctgggcgtcctctccctgacgggggcgattgcggcgctgtcggcgtcgtacctggtgctgttcgatctcatctggcttgtccccgcgctgctgctgacaggctggacccggagctattgacggcgcttttccgccgccgcggcgtttatttggcgcctatccggcgtctattggtaaaaccgccccattttttgtgattttctgattgcaatgtgccactttttcatatataataattttgttgcggcatatctgctgccttatatgtgcgatatggggcgctgccccttgaaaggagaaacaatttatgtacactgccaaggacattcgtaatattgccctgctgggtcatggcggcgacggcaagtctgctctgtgcgagagcatgctgttcaacaccaaggcgatcacccgtctcggcaagcgcgctgacggtaccacagtctccgacttcgatgacgaagagaagaagagacagtactccatcaagacctctgtcatccctgtcgagtacaagggctccaagatcaacgtgctggataaccccggttactttgacttcgccgcggaagtggtgcagtcgctgcgtgttgcggatgccggcctgatctgcctgagcgccaagtccggtatcgttgtcggcacggaaaagggctggaaatccctggcagacgcgaaccttcccgcaatgttctatgtctccaagctggatgaagagcacgccaactattttgccgtcctcgacgccctgcgggataccttcggcgccagcgtcgttcccctgtccttccccattctccatggcgaagaggccgtcggcgttgtcgacgtgctgaccaagaaggcgtatgacgccagcggcaaagagattgccctgacggctgacgcggaagagaagattgaagagtacatgatgagcatcaacgagcaggtcgcggagacggacgaagagctcatggagaaattcttcatggaagagcccttcaccgaagaagagctgtgcaagggcatcaaggccggtctgcagcagcgcagcgtcacgccggtcttctgcggctgcgccgcatctggcctgggtaccatcgagctcatcgaaaatatcattaagtacgccccgaaccccgccgagggcaagcccatggtcgccgtcgacgaggacggcaacgagtccgaagtcaagctcgacccgtccggcagccccatggccttcgtgttcaatacctttgccgatcagtacggcaaaaactcctacttcaaagtcatctccggcgacatggaggatacgctgaccgtcgtcaacgcccgcactggcgataacgaaaagctgggcaacatgttcttccccaagggcaaggacaacgccaagaccagcaaggtctgctgcggcgacatcggcgtctttacgaagctcgcctccgtccgtaccggcgacaccctgggcctggccggtaagacggtcaccatcaagcccatgcagtacgacacgcccaactaccggatggcgatttatgccaagacgaagggccaggaggacaagatcgcttccggcctgacgaagctcaacgaggaagacgcgtccttcaccttcggcaccgatcccgagacgaaggaaatgatcatcgccggtgtctgcgatattcacctgtccgtcatcatcgcgaagctgctgtccaagtacaaggtcgaggctgagctgcgcccggcgaagatcgcctaccgcggccgccacaagaagcagtccggcggccacggccagtttggcgatgtctacatccgctttgagccccagtccgagacggaggacatggtcttcgccgacgagacggtcggcggctgcgtgccgaagaacttcatcccgtcggtcgaaaagggcctgcgcaactgcatcggcaagggcgtcctggccggttaccccgtcgtgttcctgaaggcgacgctgtatttcggctcctatcacccggtcgactcctctgatatggcattccagacggctgccggcatcgcctacaaagaaggcctgcccaccgccgcaccgaccctgctggagcccatcggcgaattgaaggtctatgtccccgatgccaacatgggcgatatcatcggcgacctgaacaagcgccgcggccgtgtcatgggcatgaacccggacccggacaacagcggctggcagatcgtcgaagccgaagtccccatgggcgaaatgagcagctacgccatcgacctgcgctccatgacccagggccgcggcagctacgccatgaactttgtccgctacgaggaagtcccgcagatgaaccaggccaagatcatcgaggacgcaaagaaggacgaggagtaatccccgcctaggcgagacatgatcctcgccccaatcccttcgcaatcaatgcacaaacagcccccatgcccgcggcactgccgccagcatgggggctgtattttttgccgctggattcggtcgcgctgaattttccaggccgtatttccacggctgcattttccatggcccacgccctgattcttgcaaatttcccattgcatccgccgcgcatccaagtgcacgtgggacgcagcgaagtgacgcgcaaatgcatccaaaacgcacgcaattgcaacggaaacgcatccgattgcaaccgattgacatccgtttgcaacggattgcaaaa

SEQ ID NO: 2621 - DNA, 9627 bp, Unknown
  16S sequences of unknown bacteria
gtggtattggcggagcataacaaccgactgccgcctgtggcggattaaaggagggtgttatggcgccgcggtcaaagaaaattcgcgctccaagcgaatattttctttgggtaccgcaagagtagggagtgcagccaaaaatctttgatttttgcgagcagcattcccgccaagagcgtgtcgaaaaatcgacacgctcaactatatgtatttgtgctgcgatttgcgattaacgcccaatatcccgcctattaccgacgacagcataagaataacaaaacggaacagcgtgttctgcgtaagtccgccgcggtttatcatcagcgatataagcgttaaaacacaaaaaacaattccgccgaccgccgcgcccgtaagccagccgcggcttccgttttttcccgaaagataaaacgccgccgcaaaagcgcccgaagccgccgaaagcgttgcaaaaagtgcggaatacttaaagcccgccgcaaaaatatacattatgagcgcaaaaagcattaccgccgccgcgaaaaccgccgcaaacagcagcaaagccttgattattaaaccgattcttccgctctttcccgttaaaaggtcttttttcatagaaattccctcccgaataattatattcgggagggacaaaatgtattacttattattttgtaaccgtgtcgtcatgaaccgtaagattggtctgtaacgcccagcgagcaatcgtaagcttactgtggtcgcttgcggactcaattacgatggtttcctctttaagagaaataaccctgccgtaaattccgccgatagtaacaatttcatcccctacctggagattatcacgcattttcttttcttctttttgttttttgcgctgcggccgtatcataataaaatacatagcgccgaaaataaccgcaagccatacaatcattaaaatcatgctctgcgggccgttcgcagcggtgtttgttgcggcactgtctgccaaagttataggattaaaattcatttatttttgccctccaaaaagctattgaatatattatataccatattccgttttattgcaagataattttaacaaagtccgcggttcaggtggaattaccgcgttattcctccgtattttcttcggaaatctgcttactttccttgtatatttttttataatcggtcgggtcgtattcctccaggaaggcttcccattgctcattggaaatatcgtcggaattaaggctgtaaagcgcgtaaagattatccaaaacctttttgtactgcttttcggtcttaatgcgtgctcttactgcaatcacggttgtaacagccattaaaattacaagaatcaaaagcggagcgaaatgccgccaaaaataagagaccttaaagcccattacgccgagcgaatccttcatgagagcgccgaaaacaacaatgagcataatttcgggcaaggcgctcaataagcccgccgccaatttaaagcgcgtaaagctcaggcaaaatcccgcgattataagcacagtgcatacaataaccgtaataagcgagtttaagatacccttaaaattatccgttccgagctttgttaccagcataccgcatataaacagcagatttatacccatagtgtaaataaaaagcaaagtatagctgactctcagcgccttatacagccttccgtctgttttggcatatgtaattccgtgcttttcctcaaccattctgacgcgtcttaaaacgctttcctgcattttcattatttttcgccgcctttttcaatttcaaaggaatcaattattttttccagcattttaaaattctttttcatatacgagggctgcgatgaaaaggtcacccagaaaaattcatcgctttccttaaactcaacatagcagaaatactggtaaattttcgattccttatattctgcggagtaaagctcggttgttatcttcttatctgttgatgagaaggcaggcgtatgctccaccttttgaacatttatataacgctcggtgttatccttcgattgctgcgacagaatatcgatgatatttgtaccgcttgcaaaatcggagcggtaatagccgaagattcccatgccgaccgaatcgtttccgcagtaccagtcaagctcggtatccttattgtcgtccttccagtcagccggcgttctgaatttcagattgaatttttcgaccttgaattccttttccggctccgcctttgcgccgacaagcgcagtatcggaagaggtctgtcccgcgccgccgcacccggcgaaagccaaggcgcaaacgagagccagcaaaattgccgccgcttttttaattttcaaaccgttcatcccctacagttttattttccccttaaaattctctgcaccctcgggtgaagcatatgcatataaaccgccgccgagcgcgaaacggcaatatcgtaaagcacaaacacagcattgccgagcagcagaaaaatatactcgctgtattttccgaattccccgaattcttcaagggatactccgaaaaggcgggcaaaaaccgcataaaccgcaatgattgccgcattgaaaaccgcaagctttaagacccactcgacaatgcggcttttgcgcctgtcaaataccgcctttaaaataggataatacccgaaaaagcagatatacaaaagcttgccctccggctctgcaaacagaaatacaagcaccgaggcggcggcatacgcgccgagcgcccatttgtaccccgcttcgattaccgcgaccattataaacagccccgcaacggcgggcaccgcgtaggtcaaatacggaaaataggaaagcagcataaagaccgccgacagcgccgcgagtattccgcagagtgtgattttaaccgtttgtttcatatcagcagcagggtatcaggtcgccgcccatacactcgcagcagcaatcggtgcaaataagcccctggcacacatcgcacgcattgcagctgccgtttccgccatagctgcggtaggggttatactgtcttccctgctggcgcgcggcattttgcgccgcattttggtattcgggattattcgggttcattcttgcagccgttgaaaagcttgtaaacgcctggtcaaaccagccgcggcggtaaagcactgtgccgtttaagaaataccactcggcatcacgctgctgcggcggtacgccgtcaagcacctcctgcgcctgctcaagcctgccctgatttataaggctgcgcacctcgggaaaggatgaagccgcatttgcgttatacgcgctgccgcccgatgtctgccccgcgcggcgggagttcacaatctggtcgtaggcgtcgtttatttccttcatcttttcacccgccaagtcggaaagcgggttatcggcgtaattatcggggtggtatttcctcgcaagctccctgtaagcctttttaatttcctcatcgcttgcgttttcggaaacgcccaacacctcatacggatttgtcatttttgccaagctcctttttgaatgtatcctcaagtcccaaatagattatatttccgagcagggatctgtattttttaatatccaacagttcaaacgccttgcccgcctcgttagcgcagaaatagagctgcggcgttattcggttttttgcatattccgccgggtcgccctcgcatgtataggaaaggcagttgtaagaaccgcttttaatatcgtcaggtaaatcacacgccgcgtcaagcaaatatatatacctgcctatgcaatagcccatgcggtcgagcacccgtttttgcgaggggttctcactgcaaagctgcaaaattttcgaaagtaatagcgcagtggggtcggcagcagcgtctaattcgcggcagcctgccttttcaagcgctgtttgcgccgctatataatctgaaattatcttttcaagctgcgggaactttttcgcggcttttttatttgcccttttaaaaagcggcttaataataatataccctattttcttaattcccttttcatcggatatattatccaaaagcttatagtagcacattatcattgccgccgcggcgggcatataaagcggctcgctgtttttgcagtagttacacttttttaaggggttgaaaaagcacctgccgcgttctacggggtcgcagccgtcggtcatcgccatgttaagcaacgccaaaaaagtgaaatcatagcttaaggtgaagcgcgaccacaagccatactcccgccccataagacggcaaagcgagcaataaaccgccttgtaggtctcgtattccttgattttaagctccggcttgcaagcccttacatacccgaacaagcattttcaccccatttgtttcattttatacgctgaaaacgcacgtttggtgaataatgtgtaaatttaaagcagttttttcaagaactttcccgtgtaggatttttcgcatgcggctattttctcgggcgttcccgcacacaccacagtaccgcccttattgccgccctcggggcctaggtccacaatatagtccgccgttttaataacatccaaattatgctctattacaagcacggtgtttccgccgtccacaaagcgctgcaaaacctctatcagcttatgcacgtccgccgtgtgcaggccagttgtgggctcgtcaagaatataaaccgtcttgcccgtgctgcgttttgaaagctccgccgctaattttacgcgctgcgcctcgccccctgaaagtgtggtggcgggctgacctatcttaatatagccaagtcccacatcaaaaagcgttttcagcttgcggtgaatacgcggtatgctctcaaagaagttcataccctcttccaccgtcatttcaagcacatcgtaaatgctcttgcccttgtaaagcacgttcagggtttcgcgattgtaccttttgccgccgcacacctcgcacggaacgtaaatatcgggcaaaaagtgcatttctattttaagaataccgtcgccctggcaggcttcgcacctgccgcccttaacgttaaatgagaacctccccgcggtgtagccgtgggtctttgcgtcctttgtggaagcaaaaagctcgcgaatatccccgaaaacacccgtatatgtggcggggtttgagcgcggcgttctgcctatgggcgcctggtctatatttattaccttatcaaggttttccgttccctcaaagctcttgtatgctcccggtatcgtcttcgcgtggttaagcctgtttgcaagcaccttgtaaacaatttcgtttacaaaggatgacttaccgctgcccgaaacgcccgttacgcaggtgaatgtgccgagcggaattttaacgtttatctttttaaggttgttttccgccgcgccctttatttcaaggaatgtgccgttgcccttgcgcctttttgcgggcacgggtatttttctgcgccccgtaaggtaatcggcggttatagagtcggtgcacttttcaagctcgggcacagtacccgaaaatactatattgccgccgtgtatacccgctcccggtcctacgtccacaatataatcggcggcgcgcattgtgtcctcatcgtgctccaccacaataacggtgttcccaagatcgcgcagctttttaagggtggctataagcctgtcgttatcccgctggtgaagccctatgctcggttcatcgagtatataaagcacccccataagggatgagcctatttgcgtggcaagccttattcgctggctctcgccgcccgaaagcgtaccggacgcacgcgaaaggttaaggtactcaagcccaacgctttcaaggaaggtgaggcgttcgcgtatttcctttaatataggctttgcaatcataccgtcgcgctgaccgaaggtaagggtatttaaaaaggcaagctcatcggttaccgacagatcgcaaaattccttaatgcttttgccgccaaccgtaaccgccaaatactcgggcttcagccttgcgccgcggcaatcggggcaggggcgctcggtcatatagctttcaatttctgcgcgtgcatagtcgcttgtcgtttccttatagcggcgctcaaggttatttataactccctcaaacggagcttcgtactgaccgccgccgaaggtgccgctgcgctttagtttcaactttacgccgtttgtaccgtaaagcacggcgtgcttaacttcatccgataaatccttgtagggcgtgttaatatcaaagccgtagtaatcggcaagcccgttgtaatacattgtggcaatgctgcccgaatcggggtaaaaccaggagtttacaccccagcccgaagcgcgtatagcgccgtctaacagcgattttgactcgtcgtttataacaagctgcgggtctaccttcataaaaattccaagccccgtgcaggtggggcaagcgccgaacggactgttaaaggaaaacattgtaggggtaagctcgggaatgctgatgccgtgctcctcgcaggcaaagctttgtgaaaattgcagttcttccccgcctatcacgtccacagtgaccgtgccgcccgaaactgccgcggcggtttcaatgctgtcagcaaggcgggagcgcataccgtcctttaccacaagcctgtccaccacaatttcaatgctgtgcttcttattcttttcaagctttatttcttcggataaatcgtagatattcccgtctattctaacccttacatagccctgcttgcgcgcgttttcaagctcctttgcgtgctcgccctttctgccccttaccactggcgcgagtatctgaattttgctgccctcgggcagagcggctacccggtccacaatttggtcggttgtctgctggcatatttccttgccgcacacagggcagtgcggaacgcccacacgcgcgtataaaagccttaaataatcgtatatttcggtaaccgtacccacagtagagcgtgggtttttcgaggttgttttttggtctatcgatatcgcaggcgaaagcccctcaatgctctcaacatcgggcttttccatttgacccaaaaactggcgcgcataggaggaaagcgattcgacataccgccgctgcccctctgcgtatatggtatcaaacgcgagcgatgatttgccgctgcccgaaagccccgtaaaaactatcagcttatcacgcggcagggtcacgctcacatttttaagattgtgctcgtttgcgcccttgattattattttatcgttagccatgttttatcccctaaatgccgagtatggttattgcaatgttaaagtaaatgaaaagcgagattgcgtccactatcgtggttataaacgggcttgccatgaccgccgggtcaaagccgaccttttttgcaagtatgggcagcgtgcagccgacaattttcgccacaataacggtgaaaaataatgtcaggcacacaaccgctatttcggctatctgcttgccggggtcgaatgaatggagcattaaataatccaccaaaatcattttaacaaagttaacaagcgccagcgccgtgctgcacaaaagtgccacgcgtacctctttccatattactctgaaaatatcgcggaattcaatatcgccgagcgaaataccgcgaataatggtaacagaggactgactgcccgagtttccgcccgtatccataagcataggtataaaggctatgagcgcgggcagcaccgtcagcttttcttcaaaattggatattatggcgcccgtaaatgtggcggatatcataagcagcaaaagccacggtatacgcgccttaaaagtagaaaacacacccgttctgaaataggtgcggtttgacggcaaaatagccgccatcttttcaatatcctcggttgcctcttcctgtataacatcgatagcgtcgtcaaccgttacaatacccacaaggcggttttccttgtccaccacgggcagcgccataaggtcgtatttttcaaactgccccgcaacctcttccttatcgtcaagagtgttggcatatataatgttttcgtccatgatgtcagacagcacgcaggttttgctgttcaagagcaaatccttgaccgtaactattccgagcaaatggcggctgcggtctataacatagcaggtatatatggtctccgaatcaatacctatcgcgcgtatgcggtcaaacgcctgctccaccgtcatatcctttttaaggtcaatatactcggtggtcataatgctgccggcgctgtcatcggggtatgccagcagctgattaatcattttacgggttttggggtctgtctggcttaaaatacgctttgccaccgttgcgggcatttcgtcgataacgtcaacggtatcgtccataaacagctcgtccataacctctttaagctctgtatcgctgaacgcctcaataagcagctgctgcatatcgggatccatttcaacaaagacctctgccgcaagctctttgggcagtattctgaaaataaccggcagctcccgctcggggatatcctcgcatatctgcgctatgtctgcagggttcatttccgaaagcagttctcgcaatcgcgcgtacttcttcccgtctatcaattcaaaaatgtcttcttcctgcatgttgatatcctcctttttgcggtatttgccaaatattaggctgacgggagtcagcctaagctttaccttatttgttttaattcaagttcctcaagcggttttaaaccgagtgaaattgcgaaatcatacgcatttttctgcatttcagtgttaagcagcatatcgggcgagtgtgcgtcgcaccctataattacatcattcccgacttttgcggcaattttaaaaaatctttcagatggatagtgccgtttgcccataagccccagcatgtttatttcaagcggaacgccgagcgcttttgccgcctcgcaaagccgctcgttttcggtgtagtaccagtcggcatccgataagcagagaaacacatcggggtgcgcaatatagctgaaacagcccgtgtttatgccctctataacctcgtcaacatattttttaagcatttttctgtcgctgctgcccgagcctacataataaccgccgtcctcattttccaaaaagtgctgacccattatcatatagtcaactccgtgttctgtgcaaaaccttttaagttcggggaaaagcgacgggaaatactccgcctcaaagccggtgtatagctttattttcccgctgtattcctctgctaaattcttaatacagcttacatatccgggcgcctcgtcgggggtcattctcatgcccgaaacatagccgcttttaaaaaactgcggagtatggtcggaaaaaccgagtattttcattcctgcggcaatcgcgttttcaatatactcgtgctcgtctcccacggcatgcctgcagcgtaccgtatgcgtatgataatttgctttcataaactcgcccactttcaatctaccaattatacacccatatgcttaaaaaagcaagttttaccgaaacaaaaatgtcagggcgattgtacagtcgtcaatgataggttacacttttctcaaaaaaatatgatgaaaactacattgagtaagactttggatgtttggaggagccgaaggcgac

SEQ ID NO: 2622 - DNA, 13173 bp, Unknown
  16S sequences of unknown bacteria
tcggtatcgtcggtagcgctgtatgcggcctttgcggcaggggttgcaatggcaaaaatcatgtcaacttcagaagcgaccatgttctttgcgaagcttgcgcagtcggaatcggcggacgcgctggagccgatctgataatctatttcaaaattgagacccgacgcatccaacgcctctttgattccctgatagcagttgtcaagggaagggtggctcatatactgaatgactccgatttttaaggttttgtcggtacttttaacatccgacgcggaattttcactttttcccgagcaggaggaaagggcgcatacaatcataacaaccgaaagaacaagtgcgaatattttataagcttttttcatttttaattacctcttttaatttaaataaatttgattttccgatttaaaagaggctccaccatcgctttgataacattttcataaaatcactcctaaaaaataaaaacccgtcccacaaaaacatgggacaggaaatttcctgcggtaccacccaaattcgcaaattactttgcgcactcaacgtactgcatacgtctgcgatgtaacggtcgcacccgtcgcacctacaccgaaaagtcggttcggattgccctcataagtccattcgccgctgccgcaactgccgaaatcacaccgccttcggctctctttaagcgctttgcatcggttactcctcttaatcacaggtttaaggggtttgtttaattttcttcactttagcacactaaaaggcgtttgtcaagagggaattaaaaaaaatattaaaaaataaataaaattacatttcgccgtattgacagcgggcatataatgtgataaattaaaaatagtgaaagtgaggtgaaaatatgggagcagtcagtctgcataaaatcgacttcaaaaagtttcttcaggccattgatctctgcaagggcgatgttttcctcgtgacaagcgaaggggataagctcaatcttaagagcaagctttgccagctcatcggtttgaccgagatcatcgaaggcggaaagatcgacgaagccgaaatagtgtgcaccgaccccgaggacgacagctttttgttccgtttcaatctttacggcgacaaggtgcttgaggataaggaggacggtaaataaaaacagggctttcggcgcttttcttgcgctttaagtcctgctttttttaatcattatcggctttgcgcggcttaatattatgcaagggatttgattccgaagcatttttcagctcctgtcccgacagatgagtataaatctcggtcgtgttcaggttttcgtgcccgagcacatctttaagcactctgatgtccacatggccgtactgatacataagcgttgccgccgtatgacgaagcttgtgaaccgaaagaccgcgtccggaaaggccggccttttcaagatttgtataaaccatgtgttggacggttttgcccgaaattcggttgccgtttcggcttatgaacaacgcgtttttgtccttgacgccgtcgtgcggacgaaccttgaggtattcgtttaaagcctcaacacaggcgtcgttaagataaactatgcgttctttatttccttttccggtaattttaagggtgttttcatcccgtatatcgctgaaatttatgccgcaaagctcggaaagtctcagtccgcagtttaaaaaaagcgttaaaatacagtaatctctttggcggttcggtccgtcaaccgattgcaataaattaacagattcctccaacgaaagatatttcgggagggatttttttgttttaggtgtgtcaagaagctcaagaggattttcatcgataagattggctttatttttcagatatttaaaaaaagtgcgcagggaagaggactttcttgcccttgtggccgcattattgtgccgctcatcaatgcaataattcataaattcatatacatcggaaagagtaaccgatttaatcatatcaatgtcaacgtcatcaataggaattttgtcaaattcttcctttgatatgccgtgaaaaaacttgaaaaatctgaaaaatgtgcgaagatcggtataatattcctgcacggtaagcctggatttgcccttaacaacggtcatataatttaaatagtcccgaataatcggtgcagtatgtttcatttcaaaatcaagcttttgattcaaaaaaatcacatccgaaaaataatacaataaaattataacataaaaagcttaaaaagaaaagcgcaaatgtacggcaagaaatctaattaggaaaacatagaaaagataagatcaaataaaacagctgtaaaaacaaattgagagacacacagtaaaacattatccaaaaattttgcatgacaaaaaataaagccgacatcacttcagttgataccgacacaatccgtataataataaaatcaattcagcacaatatagattgacgctaaagaaagacattgacagacataaaaagcacacaaaaacgactaaacattataaattataaaagattaatccatcataacttaatgactaaatgttataaaactgccttaaaaccgttaatcacaacttttccgctcccctcaattatacaaaatattcattttgtataattcgggctatgcccacgcgcctctgttcacctccttaaaaaatagtgctgtccataaagctgtaataagccgcccaagcccttttcttttcctcgggcgtttcagctttccgcgccttgaagtacaaagtctttttccgctcctgcgcttttcggcgttcgttatcgtcgcaaaggtcaccgagcatttcaacagcctgttcatagcaaccaaactcgatataattctgaattttcatcaaaatttcttttcgaacggaaacacggtctttatactcggtcgccacgataatcacctcaaaaatcaaattataatttatgggaaaacaaatccgccgccgatgtcggttaaggggccttgtgacatttcaaaaaaggcaactccgtgacacatacaaaaatcctttattctttttccgtcgggatggcatgaaagactgccgtttaaggcaagagagtctttatcaagcataaaactgcagccgccgataaagccgcagtcatagcccttaagttgaatgcagtcgtttgtcacaagaagtgtatcaattccgttgtttttcagcgcctcataaattcccttatcccctgtcacggcggcagtttccgatattttaagaacagaacaatgggtatacccctgcttacagtttatcgtttcgattcccgatttttcggtctcgtttaaaagctccggagaaagaaattttttcaacccgaacagctttttattaaaacaaacggcattaagcgcaacatcaaacggatattctttacgattcggaaaatctgttttaataacctttacgcctcgagatttcaacatttcggcagtatcgtgttgaaaaccgttcaccacagcgcacttttcatttaaaaaagttatattcatatcgggatgaaaggccaaagccggctgaatcagcggattttgccgagtatacacaatttcatttacgcctttagatttgagaaaatcttctatgcctgttcccggagcaataattgcggttttacttttcattgtcttaacttgtcggaaagtttgtttatcaaataaggaatttgcgactcgaaatttaatccgtagcgcggttcggttttcgcttcaaaggtctttttaacggcattcgcggtaaactcaaccgcaatttttccgctttcataaagacttttcccgcttaaaaccgcggcggtaagaacgcttgcgaacacatctcccgatcctggatagttgacgggaattttatcggaaaataaaaattcggttttcccgttttccgattcaagcgaggcgcagccgagctttttaccgtcaaagctcacacccgtaagcacgacctttgcaccgaattcgctgtaaagccccctgacaagctcctcgacgaactcctttgaataaggcgggcacttatattccctgcccaggaaaaaacatgcctcggtaatattgggaacaataatgtcagccgctgaacaaagctttttcatttcggttataaatccgcagtcgaaggttgtatacatttttccgtcgtcggccatggcggggtcgacgatttttaaacacgatgagccgaaaatgttgaaaacttcaagcacaatatcgacctgtttttccgagccgagaaagccggtgtaaattgcgtcaaattcgataccgagactttgccaatgccttgcaataggcaaaatgtcgtcggtaaggtctctgtatgtgaagttttcaaaacctcccgtgtgggttgagagcacggcggtgggaattacggccgtttcaattcccgcggcggaaataatgggaagcgcggcggtaagcgaacattttcctatacaggaaatatcatgaattgccaaaactcttttttgcttttccattctctcccgcccttatttcttattgtaataggtataaaacgccgtaacggatttgcgctttccgtcaaccattccggtaataacaacgccgttgagacttaaaagctcggaaacggaggccgtctctctcgggcaaacaaagacgtcctttccgtcacagttaacggcaacctgactgtcggtgacgataaggcgtcctccccttccgatgatttcctcaacattattttgatcacgggaggagacatatttaatgagctttccgtcaattcttttgagaaccttttcggtatcgtcttttttctttttaaaaaacatttgcaccccgtccgctcagtttaaatgtgaatatatttcactttttcttattcccgtttcggctgccgcatttttcgccgcagaggacgccgaaagaccgtcgctcatataatccttggccattttgaccgcatcctcaagggtatattcctctcgcagcgattcgggccgacagcccgaaacaataagaacaaactcgcccttcggaggattttgagaataaaattccacagcgtcctcaagagtcgtaattttaacctgttcatgaatttttgtcagctctctgcaaatggagatttttctgttcccgaaaaccgaaagcatatctttaagcgttgacaaaagcttatgcggagcctcataaaaaaccatggtgcgctgctccggtttaagcgagtttaaatgttcaaatctgctcttttttgaaacgctcaaaaaaccttcaaagcaaaaccttccgccgggaagtcccgacattgcaagggcggtgacaacggccgacggtcccgggaccgaaacgacctctattccctcttcgtgacaggcgcaaacaagctgttctcccgggtcggaaatggccggcatacccgcgtcggtcacaacggcacagtcctctccggcggcaattctgtcaataatgaccctgccgtggccgtttttgttgtgctcataatagcttatgagcggctttttaatgtcgaaacggttgagcagcttaagcgtcacccttgtgtcctcggccgcaataaaatccacagaggagagtgtatcgattccccgctttgacatatcagataaatttcctatgggtgttcccaccacataaagctttccggccattatgccttccccttcatggcgtaatattcgccgtatatttccttgatttcgtccgaaaagtccccctgcgggttttcgataacaagaggcttttcaacaatcaatccgcctgcggcgccctttttgccctcaataagaaacaaattcggccgcgtaccttcccgttgatgaaccatgcgcagtcttttaggttcgataccgtgaaggcgcatggaagccataacatcgcaaagccttgacggccgctgacacatacacagcctcccgccggtattaagcaggcaggctgcggcggacattatatcatcggtattgcacattatttcgtggcgcgcaatcgccacctcgcgtctttcgcatcgaagtccgtcgtcctttggtttataaggcggattcatcaccagcgcatgatacttctctgtcaaagcgagaatcatcaccacaagctcaaagctgcccgcaggcaaaaccccgtcaagagactttaaatcggcattgtgaaccctgagcttgtccgtcagcccgtgcttttttgccgcggcgtttacaagctcgcaggcctctttctgtatatccacggcatcaatagtgctgcaattgccgtcacggcaccatatgagtgaaattattccgcagcccgttccgagttcggcggcctttgttctctttctcggctgagcaaagcttgcaagcaagaccgcatcggtgccgaacgtgtgaacgtcgcttgtaaaaacgctcattccgccgccgaggaactgttctttgacgctcataaaggttttgcggcaatggccgtccaaccgcgctcgcggattattttaagcacctcgaattttcccttgagattttcgagcacatcattttctcttgtgtcgattattccgctcataatgtaaattccgtccttgtcaaggaatttaagaatatcgttattgagcatgattatgacatcggcaacaatgttggccgtgacaatgttgaattttccgctcaccttatcggtaagatttccgcagataaattcggttttattgtcaacgccgttaagcttggcattttgctcggctgttttaaccgacagctcgtcgatgtcgactccaagagctttttgcgctccgagaagcacgcccgcaacggcgagaattccgcttcccgttcccacatcgagaatttccgaatcggggccgacatattccgacaaaagctcaagacaaagccttgtcgtttcgtgagttcctgttccgaatgccataccgggctccaaaataagctcggtgcggcttttgtcagccgtttcgggctcccacgcgggccttatcacaagcttgttcccgatatttatcggcttaaaatattttttccaattctctgcccagtcctcataaaggcacatggagctgtccaccgaaaaatctattccgttggccttatacatttcggaaatatatgaaattgtctcggcgggattttcggtttcgtcaagataaatatggatttttgcaaccgaacggtcctttttgagaagctcctcgtcaataaggtctatgtgagcaatctgctcaacattctcctcaagattcgtgtaatcctccacataaattccgccctttaccgccatgttggcgatgtctccggcaatgtcaatgtcctttggagaaattgaaaaaacaatttcggtataatcaactttttccatatcagtatataaatcctatctttttcattactttgccgagggttttgtttgcaatcttttcggccgaaacggcgccgtttctccacgtttcctgaagaaagtccctgtttttcataagatcgtcaaacttttctctcacgggacgaagctcttccacaacggcctcgccgactgcggttttaaaatcaccgtagccctttccggcgaattcgtcggttatggcctcaagactttttccagttatggccgaataaattcccataaggttattgactccgtccttgccctctctgaaggcaacctcggcctcgctgtcggtaaccgcacgcttgaattttctcataatgtcctcgggcttgtcgagaattgccacccatgcgttcacgttttcgtcggattttgacatttttctcgtggggtcctgaagagacatgacccttgcgcccaccttcggaataaatccgtcgggaatggtgaaaacatcgccgtatatgttattgaaacgggcggcaatgtccctcgtaatttcaagatgctgcttttggtcggctccaaccggcaccaaatcggccttgtaaagaagaatatcggcagccataagcgaaggatatgtaaagagtcccgcattaacattgtctgcgtgcttggccgacttgtccttaaactgagtcattctggacagctctccgaattgggtatagcaggaaagaatccacgaaagctgactgtgggccgcaacatgagactgtataaacagcaggcttttttcgggatcgacgcccaccgcgataagcaaagcataggtttcaagaatttgctttctgaaagcggccgtctgctgccttacagtaatggcatgaagatcggcaaccgtgtaaatgcagtcatattcttcctggagcttgacccaatttctcagcgctccgagatagtttcccagcgtcagcataccgctgggctggatagcgctgtatataagtttcttttccttttccattttactttcctcaattcattgaatttaaaacacttgcaagaatatcaattcccttaacgatttgctcatcggtcggcgtggagaaattaagacggaagctgtttgtctttgccgactcgtcgttaaggaatgccgtgccgggaacaaccgccaccttgtgctcgaccgcctttttaacaacatcaagcatattgaatttttcgggaagctccgcccagataaagagaccgccctgaaccttattatagctgacattcgggcaaaccttttcgtcaagcagaccctgcataagctccgccttatgcttatagattttgcggattttggcaaggtgaccctcaaaatcatatttgcacataaactcgtttgcaacggcctgagcccagatatttgtgtgaacatcctcggtctgcttgcagacagtcatttttgcgattatttccttcggcgcaattgcatatccgaccctcattccgggggaaagcaccttggagaaggagccggcatataccacgataccctcttcgtcaaagctcttgatacagggaatgttttccccttcaaaacgaagctcgccataggggttatcctctataataattacgttatgtttaagggcaagcttgtaaagcgccttgcgcttttcaagagacatgcaggttccgctgggattttggaaattcggaatggtgtatataagcttggcattcttttcgctgtcaagagctttttcaagcgcctcgatattcattccgtcggcttccatgggtatgcccttaaggttgactccgagagaacggaaggcattaagagaaccgacaaatgacggatcctcgcaaattatcgtgtcgccgaaattgagaaaggccttggcggtcagctccataacctgctgggcgccggaggtgattattatgtcgtcaaaatccctgccgacattaaatttgtctttcatatatttcgaaacggtggaacgcaaaggattatatccttcggtgaccgaatactgaagcgcaagaatggggttattttcaagaagtttgtcggaaatttctctgacctgctcacagggaaaggcctcgggagcgggattgcccgccgcaaaggagatgagctgcgggtcggcggtggccttgagaatttctcttattgccgacggctggagattgcttactcttttggaaaactgatagttcatttttatccttccttatcctacaaattcatgtataagcgaaccgtcgggcaataggctgccgtcggcgggggctatcttcatataatcaccgtacatttcggccgccacggagaaattttcgtcctccggctcaacggtggcaaggagctcgagcatttgatttctgtatatggccggctcaaaggggtggagcgagtttatggaaatgtcggctgtgtctttaaaaggaaaaagatatttttcctctcccattacaacgcccgtccacatatggagagtgtttttcacgtcggaattgcggaaatttttgtcccttatcatacgtcttgacagacgaatttcccgcggggaaagcagcaaattcggaccgtcgtatataccgtcctttacgctgacataaattttaaaaatattttccgaaggaagttcgtccaaaatcatggaattcagagcgtgaattccttcaaaaaccgcaataccgtcctcgggaaggtcgagcgggattttctcatccttgggctttcccgccacaaaatcgaattccggcatatcgcaatgtccgtgctttataaggtcaccgatacactttgtcatttcctccacgttaagagcgtttatcgactcaaaatcgcttctgccgtcgggaagcttcggaaccttgtcctttccgagatagaaattgtcaagagaaacggtaacggcctttttgccgagatcgttaatatatttttccacaaaatgcgccgttgtggtttttcccgagccggaaggtcccgaaagcataacgattttatttctgtcgtcggacgcaacggagtttgccacatttttaacaaacgcacggtaatttctgtcgcttgtcttaatatactcggctgcgttggtgtgaataagctcgtttatatcggtgtattgaagagttgtttcaaaagggaaatttttcataaaaatcacctgccgtatcctttctttttaaaatttcctcaaaacggtttatgtattcataaggatatttaaaattaaaaattctttcgatatgatttccgctcggagccttcaaacggctgaccgctcccgcccccaccgcaagcacggtgtgaagctcgttcatcatgtaaatattatagagacagtcgtgcccctccctgctccaaccgacattttcaagatttccgaggcatttgctctgtcgataaagataatagggagaaaaccccgcattttgcagcagcaaagtgcttttttcaaccatttcggaagcggttttactctcggcggaataaaccgcagcaccgttttccacatatgatgaagaacgtttcatggcaagggtgtgaaccgttatattttcgggggataggtcgattattccctcaacgctttttaaaaatccctcgacggtatctcccgaaagccccgcgataaggtcggtatttattgtatcaaaaccgacggattttgcaatgtcataagccttataaaaatcgtcaacggtgtgctttcggccgatattttgcagtacgcggtcgtcaagcgtctggggatttatgcttattcttcccacgccgtgccttttaagcgtatcaagcttttcctttgtcacggtgtcgggtctgcccgcctccaccgtatattcggcgacctgagaaaggtcaaagctttgctcgatttgagacaaaatcgtctcaagctgagccgcagacagttgcgtgggcgttcccccgccgaaatagaccgtggaaagcctcagtccgattttttttgcgacctctgccgtttttttgatttcttcggtcaaaagctcaacatatttcggcacaagcttgccggcatttgccaccgagcgggaaacaaaggaacagtagtgacagcggctcggacaaaaaggaatggaaatataaaggctgaaggaattcccaaagcttttgctttttgctttcttttccgcgtcggccgaagctttgcacagctcgatttttttgccgtccacaagatattcgtttttaaaaatcgagcaggcttcgtctgttcccacgtcttcggcaaatgaacaaaaaagctttgccggacgaactcccgtgagaattccccatgcgggagaaaaatcacaaagctcggaaaaagcgccgtaaagcgcccttgctgccgcaagctcaagccgcttttcataagcatcggaaacaatcggcaaaacggcctttttctcactttttttggaaaaggcggttgctttgcaggttataacggtctgtccctcacactctgaaaactccaccgaagcgcaaagctcggagctttcgggtttcggcgcaggatttattttttccgacggaaagaacaggcggcaaatattttcaagctcatatttatactcgggacgccccaaaaagaaatccatcaaatactcatcgctcttttcataaagggattcatgcttctttccacatcgagagtcgacggctttccgtgaccgggaaagacctcaaaatctcccttgatattataaagctttttcagcgagtcaaccattttcggcgtgcttcccgtgggaaggtcggttctccccaccccgagacggaaaagggtatcgccggtaaaaagcgcgtcgccgcattcatagcatacacagccgacggtatggcccggcgtgtaaatcaccttaaaggtaagctcgcccaaggaaatttcgtccccgtcgtcgcaaagaatgtcggccgaaaccgggtgctgctcaagcccgtggcgctcggcgagagaaaaagccgggcttgaaaggcatatcgcatctctcttgtgtatgaccacctttgctccggttgcctcctttatgggcgccaccgaaagaatatggtcataatgcccgtgggtcagaaaaatatatttaagattatccttaagcgaagaaatttcgtccacaaagcttttgtgagcaaaggatgcgtccacaagcgcagactcgccgccggcatcgtcggtcacaagatagcacttgttgtccatatttcccaccgtaaaagtttttacagtcatatttttctcctttagttacctgttcgctccaccgaaaaaacattggaaattttcccgagctttgcaatgatgtttttaaggtgctcggttccttcggtacttattgtaataagaatttcgcagttgccgtccttaagttccctcgcgttgacattgtgaagaggcactctcatgttgacaagagtgtttgtcacatcggcaagaagcgactgcctgtcaaccgccaaaataacaacggtggctttaaatccgtcgccctgcctgttcgcccaccgcgcttttatccagcggtcgggctgttcgcaggaagaaatatccttgggaacgttcgggcagtctctcttgtgaattgacacaccgtggcctcttgttataaagccgataatggaatctccgggaagaggctcacaacagcgcgcaagctttataagacagttgtccacgccctcgaccacaacgccctcggtggatttgacaagcttcggcgaaacggtggaaagaacaggcttttgcgcttccggcgtcggcttgtaattccgattatattcatctttcattcgcggtataagacgggaaataagaattcct

SEQ ID NO: 2623 - DNA, 10691 bp, Unknown
  16S sequences of unknown bacteria
ctcgtgccgctggtcgcctttgatgcacagtgccgccggctgggccatggcgcggggtattatgatcgttatctcgtgcagacagacgccctgcgcatcggcgtcgggttcgcgtgtcagaaggtggacgcgatccatgcgcttccccatgacatcgccatggatctcatcgtgaccgaagaagagatcctctctcgagcttaaaacagcgccaggatcgctccttcggcgctgttttatgatggaaagtgagacagagatgatcgcggatctgcgccattacatggaaatttggaaaaagggacttgtcaaaaaagaaatagtctggtattatatacaggcactgaggtgatacgcctcggagaaatgatgcgcccatagctcaactggatagagcgtttgactacggatcaaaaggttgtgggttcgattcctgctgggcgcgccattttttatgtaaacgggacgtagcacagcttggtagtgcacttgatttgggatcaaggggtcgcaggttcaaatcctgtcgtcccgaccaactaaagaaacggctggatagcttagctggctagagcatccggttcatacccggaaggtcgtgagttcgagtctcactccagccaccatttgagttggacccttagctcagttggtcagagcatccggctcataaccggtgggtcgtaggttcgagtcctacagggtccaccagaaaagaaagatggaggaatacccaagtggttgaagggtccggtcttgaaaaccggtaggtcgtgagagcggcgcctgggttcgaatcccagttcctccgccatcagaaagacatcgcgggatggagcagtctggtagctcgtcgggctcataacccgaaggtcgttggttcaaatccttctcccgcaaccaaaaggtctcgtagctcagtcggtagagcaaaggactgaaaatccttgtgtcgttggttcgattccgaccgagaccaccattgaagaaacagcaggtgtcatcatctgcttttttttcgtctgctgttcatggcggcgcatgatataataaagaaaagaattgagggatgaatatgactgtcggactggagccttaccagctgcgcagcttcctgctgctcagcgccgtaggcgctttgctggagaagaaccgctttgcaccggtaaaggcggaagcagaggggatacgcaggcagaaggggctgctttgcgagatcagaggacgcgccgaatggcatgatgtggatgatgtctatgcgttcatggcgccgatgccgtttggagagacgctgcgactgtgcatgcaggcgcgtttctttgaccgccgcatcagcaagccgcatatgcgtgagtttatcggcatcatgaaggatgtgggcgaagtctatctgaatcagcgctttctggatgcgcatgcgatggagaagcatcgggaccagggcatcttcttcgccatgaacggctttacgccggaagcggagcatctgggggcggcgcatggcatacagaccatttcctatgcggatcagccgctgatgggcccgatcgcttcggatatcgcccgtctgtcttccctgatcctggagacggtctcgttttacgatcatggagagatccatgccttcctcagacagctgcgtcatcaggcagcgagcggggacgagcagctcgccgcgcggatgagcgcgcgttatggcgaggaactgggcgagcagatgcgtatgctgcatgctcacctgagcgagatcaggacctcgctgatcgctacggcgaagggcgggacatatctgcatgtgctctctgtctctgcttttccgctcgatcagtttctgcatacggatgagggcagctgtcagatccatatggagaagcatggccggggtcgtcattattactttacggtcaatgatacatcggcgcgcttttatttcacttgtcctgcttacctgaatgtcggacggctgctgggaacagccgccgtgcagcagcagtcgctgttcgcgcaagagccgcatgatcagggatttctgcagctgtgtgtccgcgatgagggcatcatgcgctttctgcggcttcagatcgatccccgcctgtgggtggattgacgcgcctgcagccgtaaaaggttaacaaatgcaggtttctgtgttattctaatctatatcgcgaatactatatatgatgacagaggtgaaacagatgaaaaagagtatatggaaacgaccgggatggtacttcttcctggtgctggtcgtattgtcgatcgtaacgctcgtacaggccggcatcctgggcgtgctgcctgtgcagtatctggccatcggcggcgtggtcgtcgcgttggtggatgccctgctgtacctgatgctggtcagcccgcgcatcaacaaggtgaaccgcgtgctgggctttatcttatgtgtggcgatcatcgcggtgtttgcggtgggcaatgtctacctgttccgcacgaataccgtattggacaatatctcgcatgagggacagcagaaaaacgtgatttcggtcatcgtcatggataactcagatatccagcggatcgaagacatccagggcgcgatcggcatggcgaagcgcatcgatacggaaggcacgcaggggctgttgaaggatctcaaggacaagagcaacctgacgccgcagaccaaggaatacaactcgctggcagatctggcgaacggcttatatggttcggactgcgatgcgatcatcttgaacgagtcttaccgatccatgatcagcgatgaagataaatatgaggattttgacaaggagacccgtgtcatctattcctacacgtattacacggagatccagcagacgacgaagaacgtcaatgtggcggaagatccgttcacggtgctcgtgagcgggatcgatacatacggcgccatcggcacgacgtcgcgcagcgatgtcaatatgctggtgacagtgaacccaacgaccaaatgcatccagctcgtcagcatcccgcgcgactattatgtgcagacgcagtgtgacgaaggcagcggatgcgccgtaggcgagatggacaagctgacccataccggcctgcatggcgtggatacgaccaagcgcacgctggaaaacctgttcggcatcgagatcaactatacgctgcgggtgaacttctccagcgtggaagagatcgtggatgcgctgggcggcatcaccgtgaacaacacggatggctatgccttcagcatcggcggctatgacttcaccaaggacatgctgcagctgaacggcgagcaggcgctgatgttctcccgagagcgtaaatccttcgctgagggcgacagagagcgcggacgcaaccagatgcgcgtcatccagggcatgatcgacaaggcgacttcttccgccatcgtgaccaactacatcagcttcctgaacgcggtcgagggctcctttgagacagatatgagcgctgaggagatcaagacgctggtgcaggcgcagatcagcaatatgggcggatggaacgtcggcacgatgagcgtggatggcacgggcggcacggatttctgttatgaactgcagaacaatgcctatgtcatgtatccggacatggacacggtggaggcagccgtgaaggccattcaggacgtgcagaacgggctcaacccgacaagcgatcagtaaaagagcaaagcgagatgccttctgttgggagggcatctttttgtgcgcggaacgatcagccgtgacaaagcggacatggatctgcgcgcggtttccagaaaccggaaagcaccatgaggataatgacagtttacgcgtatttaacgtcgtattctttgactttacggggcgcagagattacaatagataacgatgtgtcttgggtaaggatggatagaaatgatcaactatattttgaaaaatccactgtataaaaaatatcgggaactgctgatcagcctgatcgatctacttatcgtcgccgtttcctatttctgcgcatttttcatcgttacgctgaatttccgtttttctgctatggcggagctgacggttttttcactgcttcagggtgtcgtgctcctgttggcttgttactttgtcagttttatggcgttccgcatcaaccgcagcatgtggaagtacaccgggccaagcgaagtgatgcatatcgtggccgcggtgatcatggcgatgatcctcacgctgctgctgaggccgctggtgccgatccgtacgcaggaagtgcgcaccatcgtggtcaccggcatgttcgtcatcctgctcatgtgctgcgtgcgcctggcctacaggctgctcagacggcgtgaagcagaagtcaaccgcacgaagaatgcgctgatcatcggcgcgggagacggcggatatatcctgtgccgcgagatcatgcagaaccgcagcatcgacgcgcacgtcgtcggtttcgtggacgatgcccgggtcggcaagatcgtctatggcaagaaggtgctctgcgatacgctgcacatgggaaagatcgtagaaaaatacgaagtgcagatggcgctgatcgcgatccccagcgcaagcaccaaggatatccggcgcatctatgaactgtgccgcggtctgaacctggaagtcaagatcatgaagaaaggcgactccatgctggaaagcgcagatgccaaaaggcgttatcccgtggaggacatcaacatcgaggatctgctcggccgcggtgagatccatctggatcagcacgaggtcagctcttatctcagcggcaagaccgtggcggtgaccggcgccggcggatcgatcggttctgagctttgccgtcagatcatgaagttccaccctaaggagctggtcatgatcgacatcaatgagaattcattatatatgctggaacaggagtttaaccgtgcccgcatccatcatcgcctgtatgaggatatcgtcgtggattcctatatcgcttctatccgcgaccgcatctccatcgattatatcttttcgacgaagcagccggatgtcgtcttccacgcggccgcacacaagcatgtgccgctgatggagaccaggccgatggaagccatcaagaacaacgtattcgggaccaataatgtcattcagtgctgcatccgcaacaaggtgccgcgcttcatcatgatcagcacggacaaggcggtcaacccgaccaatgtgatgggcgcgaccaagcgcatgaccgagatgatcctgcaggccaacggcgacaacggcgtcaccaagatggcggcggtacgcttcggcaatgtgctgggctccaacggttcggtcatcccgatcttccgcaatcagatccgtgaaggcggtccggtgaccatcactgaccgcaatatcacccgttatttcatgaccatcccggaagccgctcagctcgtcctgcaggccggctattatgcggatcgaggagagatcttcgtgctggatatgggtgagccggtaaagatcctcgaccttgcggaaaagatgatccgcctggctggtttggagccgtataaggatatcgatatcatggagatcggcctgcgccctggtgaaaagatgtttgaagagctgcggctggatggagaagacaccgaacgcacgaagaacgatctgatcttcgtcaaccatgtcatgcgcatcacccgggcggagatcgatgagaagctggatgagctcgcccgcatgatcgcggacaaggtgcctgagccgcagctgaagcagcgcttgctcgagatgatccacgatcatgaaaaacaagcggagaacgcatgaggagggcctatgtaccaggttggaagcttctgttttgacatccgcaatccccatcacgtccctgtgccggacaatctgaagcgattcgagacggaacagggaacgccggagcatctgtaccggctgacgctggtgaaccatgtggaggtaaaggaaagcgagttcatgttgaacaaagacaacatgaaggtctatgtggatgagcatgtgcataagcgttatctctttttgaagggtgacagcagaccttacgcgctctgtcagaagcctatcgagcacaatgccacgctcgtctatgtcgacgcgcactatcttccgctgtttccggccgatacgatattcggctcgatactgtctctggaaaagcggatgtacttccataacagctttatcctgcacagcgcttatatctgcgtcaatggcagagccgtgctcttcacggcgccttccggtggcggaaaatccacgcaggcgaagctctgggcggatcatcgcggtgcacgcacgatcaatggcgaccgcaccttattgtgcaaggaggacggcgtctatcaggcgtgcggatggcctatctgcggttcatcccagatctgttacaacgagcagtatccgctggcctgcatcgtggtcgtcgccaaggggaaggaaaacgaagtgatcgagctggattacaaacagcgcgtcaaaaagctgatcagcgaattgacgatcaattatcactatgccgattttgtcaatgcggccatggacttcattgacaatctggccaagagcataaagatataccagctgacctgcgacatcagcgaagatgccgtcaggtgcctggaggaacgaatgagacaagaccgattgatagaaaagagggaagatcaatgaagaaaatgaaagaatttatcctgcgcgaagtcgctgatgaatacatcctgattccgaccggaaagacgaccgaagaattcaacggcatcatctcgctgaccgagaccgccgcattcatctataaccatattgaagaagcggactccttcgaagcgctgatcaatatgatcacttccgaatataacgtcgataaggaaaccgccgcaaaagatgcatatgtcttcatcaatcatatgatctccaccggtcttgtcgacctcacagaccgagagaaaaactggtaaagaaagcccggaccaatttgatatggcccgggttttctttcgcaataaaaaagagacggaggaccgtctcagatgtgattgagatttaggagtggttaggacgctcatgtgtacggatgctgtccattgttgccacatgaacatcgtcaaaattataaaccggggttgtttcttcttcccaatgaccccaatcaaaccatccttgaacatcccatacccaatgacgacctacaacaaatgcgtttgcttttggctcaggggacgattgaccagtaactacaaattcctctctgcaagctgaattgtagtatttgtattggtctattcctttatcgtagatcccattaccgtttgtatccatatatacctcgccacttatgttacaatttcctgaatagcatgcagaaatatattcattcgcagcgaacacttcgctctccatcatcggtttcacatagttcttcatctgtcgattacccctttctatgtctcaacttttacaaataagattatactagtcttacttgtgtttttcaaccatattctgagaaaatgagtgaaataccattaattgggaagaaaaggacgtcaaaaaaggcagttttgtatcaaattcaccaaaatgatgtagataatttcatgaaactttcataaattgaacatatgttcataaattgattgacagaaacaagacaccttgcaccatccaaaattgtgtacggtttctgcttgatttggcttttaaaaatgtgcaaaaataaatggtttaaatcttatatatcgatgcaatatcagtgtttatgctaaggcatcaataaggaggaaattatgagcatcagaaaaagaacaagcaaaaaagcaccagatggttattcataccaggtttatttcagttatcatgaccggtatacagatgaaaagaagatgtttaccaaaagcggattctatacttatgaagatgcgttgtactatgaaaagaagatgaaaatcgaattggatcagaagcattacatgtgcagtggccaaaaggtcacgatgaatcagatcttcaatgagtggctgaatttggaagcatcttactattatcaagacaacaccatcatcgattacaagaatcgttattacaagcatattgagcagcgtcttggttctgtgcttgtcaatgaagtagattttcgattattgcagaattacttcaatgaaaatgaacagatcggtatggcgacaaattacaaactgaaagaggtgttaagtgtgctctttaagttttccatcaaatgtgggtatatttcatctaatccattaaattatgtccgtatttcaggcaaagactccgcgcgttcatcacaagcaaaggtatatactgataaagattttttcaggatcatcgatgaactgcaagccatcaacacttatcgaagccgtgtatatattactgcactttatattggcagatataccggaatgagaatttctgaagtgtttgcactggataaagacgatttttgctttgcatcgtctacaatctgtgtaaataagaaaatggtctatgcgaataaaaaacaaaccgaacttaaggtgtgcaatgagatgaagtccaagacctctaaaagtattctcccatttcataaagatctgaaaacgatcatgtttgaatggtttgatgttcatcctcaaaaacacgtcatcagtgatgaagatggttcttatatcaacccaaagcagctggaatataccctttggaagatatcaaaacaactgggaattcattttaattatcatatgctgcgtcatacgcttgcttccaggatggcagaaaagggtgcagatatgaaggcagcacaagaaatattgcggcatgccaacatctctacgaccatgaatatctatacgcatgtgaatgaaaagaacaaagaaaaagcattgtataaagcattccctatacaacgcgttaagtaagagaagaaactgatgtaatcaaacagctttttttgcagaacgcaattccatagccaatacattgcaaatatccttcatcaaggatttcatcgatataccttttatctatgatctgacgggcagttctttcgctgtccgcttttaaagaacgcattgtttcagaatgtttgcattctatcacaatacaaggatcatcgatcgtttctccataaatcaccaggtcaaaacggccatcccctgcttctctgtttgacttaatgtgatatccttgaagcaaaccaaccagaaaaccatgataaaagttctcatgattgtcaaaataacttaaactgtggtaaagcatttggttaagcaaagactgtgcttggtttacatcatgatgctttaaacaatgcacaaagtcattgcggcgaactgatgtgaagttttggaaataacgaacaaaagtatttttaaagatttcgtgaacctcaaggtttggcaagcaaatttgataatctgctccttctttcccaattgcctttaaataaccggtcatcaacataaaactatagatattttggatatcatccatgtcacgataagtaagatcttgcttgatatgtttaacgatacttttgccttttatcaattcttcaaattcagatttcatttgttgatctgcctgttgaatatactgatatacgatatcattactgcttgtatttccccagaaagttgaaggactcttatcttcagaagtaagcagtttgttcacatatttcaatacgctccacggattatagatttccgtatttccaaataaatagccgttataccaactttttaccttattagaataagcggataactgataagcgtttaataaatcattcacttcatcttgagtaaatccaaaacaacttgatgccgtttcatccaatacagaatagacagaaaaattatttaaacctgtaaagatgctttctctggctatacgcaggcatccagtcaatatccctttttcaagataatcatttgttttaagtgaagaactaaacacatttcctaggaaaacaaccatcttgtcatagtatccatgcaaatatgcagattgcaaaggaacatcgtattcatcgataagaaggatgacctttttatggaaatgatgacaaagacactgcgtcagaaacttaatagcaagctgcaattcagattcatcggcattttcataaagcaatttatttaatctcttcttttcgatttcagtaagggcatcactttctgttaaaaaagagaatttcattgcgatttcctgaatcaaaagactgaacattctgatctgcatttcataggtgcggttttttaaatctttcatactaatgaaaataacaggatattgattttgaaattgcattatctttggatattcagctatctttaaatgtacaaagagatatgcattatcccgctcgcaaatagaaaagaaataataaagcatgctcagtactagtgttttaccaaatcttctcggtctagtatagatgacgatcttctctttcgctaaatcacttatcaaatcactcttatctacaaaataatactgttgatcaatcaattctttaaagttttcaatccctatcggcaatggtttcatgacgatcctcccaagagtattataacaagattaagaaagtatgaaaaatttattaaataataagcttagtataatcttatttgtaaaagttgaggaacagaaaggggttaatcgacgatgaaagactatgtaagaccgatgatggagagc

SEQ ID NO: 2624 - DNA, 32759 bp, Unknown
  16S sequences of unknown bacteria
cgaatcgggattgtcgaaaacgcagttggtgcaggagcaggcgggacatacgttgcggcaggcgttgcagcgaatgcacttggaaagctcgcctctccagaactcaaagcgttcgtcgggtgtcatggcttcaagctttgcaacggtgtcaaagcggtcgcccttccaggaatcgtcgatttctctgtcgacggtgatcatttcgtcgtatacgacgtgggtcttgcggcaaacggtgcagcggtcgagaagagcgtctcttcttgctacggtcttgtcgccgtagagagtatgtaccgtcagggtgtctccgtcctcgtcgaccgaggtgatacccttgattcccatggcgcggattttttcgatgtcaagctttccgccgcagaaaataccgataacgtgggtcttttctctgtcgatgcggtgctcttttaaaagctcgttgaagctgtaggtgtcgcagggcttgaggaaaacggcaattttgccttcctttttggtctcgttaatgagatatttgctgaggtttgcgccgcaaaagccgctgtaaacaaagtcggaaagctcatccttggagccgaaaacggcgggggtgggatcatagaaaaactctcccgctttccaaccgagcacgcggtttacggtaccgttttcaaggagttccccggctttttcaatcattttatcaaagatttcttgcatctcaggtcctccaatctcttattaggtccaagctcggtaactgttttgacaaagtcgttcataacggtggaaaatcttacgccttcggcggccgaaacccattcgacgcgtgtacggcctctctcgattccgaggaagtcgagcatgctgaagagcagggtcatacggcggcgggcataatagtttccggtggtgtagtggcagtcgccgggatggcagccgcacatgataactccgtcggcgccgcgctggaaggcgcggagtataaacatggggttgacgcggcaggagcagggaacgcggattatcttgacgttggcaggataattcagtcggttggtgcctgcgaggtctgcgccggcgtaggaacaccagttgcagcagaaagccacgattttcggtgtgaattctttattctctatttgcatatcgcgtctacctccgccataatttgtttgttggcaaagcccttgaggtccattgcgccggacatacaggcgaccgtgcaggcgccgcagccctggcagacggcctcgttaaccgaagcgacacgtctggtttcggtttttccgccgcccagacggaattccttgtccacatagctgattgcgccgtaggggcagacgttcgcgcaggtggaacagccgttgcacatcatttcgttggaatgggcaacacaggggttgcaggtcagcttatccttggaaagcaggccgataaccttggcggctgcggccgaggcctgtgcaaccgtttcggggatgtccttcggtccctggcatactcccgaaaggaatacgccggcggtggggctttcgacgggacggagcttgggatgagcttcggtgaagaagtcgttggtgtccatgctggcggtcagcatggtggcgaggggacgggcggatttatccggctcgatggcggcggcaagcacaaccatgtcggcctcgatcttgatttgttcgttcatgatgaggtcggaggcctgaacggtcagctttccgtcgtggggagcgacctttccgaccatgcccttgatgtagtgaacgccgtattcctcaacggcgcggcggtaaaactcgtcaaagtttttacccggtgtacgcacgtcgatgtagaaaacgtaaacgtcggtgtcgggatatttttcacgggtgagcattgcgtgctttgcggtgtacatacagcaaatcttggagcaatagctcttgcccttgctttcgtcgcagcgggaacccacgcactgaacaaaaacgatggtgtgggggtgggtcttgtcggagggacggagcagcgtgcctccggtaggtcctgcggcgttcatgagacgctcatattcgagagaggtgacaacgtcggggctctgggaatatgcaaattcgtcatatttgtcgaccttaatgggattaaagccggtggcagccacgatggcgccgtatttttcctcgacaaattcgtccttctgggtatagtcgatagccttggcctcgcagacggtggagcacagtccgcatttgccgtttttaagcttgaggcaatagttggggtcgattctcgcgaccttcggaacggcctgggcaaagggaatgtagattgcggtgcggttgtcaagtccgaggttgaattcgttgggaaccttcttcatgggacatttttcggtgcaggctccgcagccggtgcagatgtcctctttgacatagcgggcctttctgcggattttgaccgagaagttgcccacaaagcccttgacctcttccacttcgctgaatgagtagatttttatcttctcgttctgagcggcctcaaccattttcggggtcagaatacaggcggcgcagtcgagggtcgggaaggtcttgtctatctgagacatttttccgccgatcgtgggggacttttcaacgatgtcgacctcatatccggcgtcggcaatgtcgagagcggtctgtataccggcgatacctccgccgattacgagagcgcgcttggttacggggctttctccgggggtgaggggagcgttgagatgaacctttgccacggcggcgcggccgaggataatggctttttcggtggcggtggccatgtccttatgtatccaggagcactgctcgcggatgttggcgatttccaccatgtaggggtttactccggccgaagcggcggcctttctgaaggtggcctcgtgcatacggggggagcaggagcagataacgacgcctgtcagaccgtattccttaatggaattcttgacaaggtcctgacctgcctgagagcacatatattggtagtcggcggaaaaaacaacgccgggctctttaccgagggtttcggcaacctttttaacgtcgacggtggcggcgatgttactaccgcaccagcagacgaatacgcctattctttgcattgcgcttttcctccttacttactgtattttctcatggcgctgacgatggcctgctgaggcagatcgtcgttcaaaagcgcggggatttcatcctgcttcatgtggttttgaccctgctggcggatgaccgcaagacggacggcctcgacaaatttcgccggctcgacgcctctggggcagcgctcaacgcaggcaaggcaggaaaggcacatataaaggctctttgacgccataagcggctcaaccttgccctgctccaccattgccacaaactgatggggatgatattccatttcgtcatatgcgggacatgtgcccgagcacttgccgcatttcatacatttgcggggattgacaccggcaatgcgggttatctcctcagagagctgtttattcattttcggtgccctcctttacgccgagagcctcggcaagaatttcggtgaaatatttgaccggaaggccgttttcactgttgtggttgaggttatacatacaaaggggacatgccgtaataagcatttcggcaccggctccctttgccgactcgtttatctgagcaaccttttttctgggcagagcttcgtcctccatggtcacatatccgccgcagcactcgttgcggtagggataaaccacgggagtggcgcccagcgccttgatgaaatcctcgataattgtggggttttcggggttgtcgaaagccatttccttaccgggacgaagcaaaagacatccgtaataggcaccgatttttttgcccttaagagggttcttgaccgccgccttgagcttgtcaaagccgaccttgtcacggagaacctcgaggaagtgataaacctcggtttcgccgttgtagggcgtttcaagagcaaggtaattgtttgccttgagattcatgttttcatcgtttgccatggcggcgttggtacgcttgatgacatgatgacaggccgagcacatggtgaccagcgcctgatttttctcccttgcggcaacaagagctctcacggaggaaagctttggagcgatttcgtcgcttcccatggggtagacgccgccgcagcactgccactcgggcagttcttcgagctctatgccgagagcctcggccgaaagtcttgcatatgtatcaagatcttttgccttgtttctcagcgtacagccggggtagtagctgtatgtcatagctgaaaatcattcctttcccttttataaagagccgcggagcgggaggccccgcggaatatttttgtgttaaatcaatcagatcttaagaccgccgatgacattcttgaggctgtcggcactcttctgaagaagggccatttctccttgggtcagcggagcggggattttgcacttgatacccttgttgttgacaatggcaagggtggacaggcagacgtcgcttatgccgtattcgccgttcatcatgctggaaacggtgagggcggtgtcgacgctggagaagatgcaacggacgatctgagccgtgacaatggagacggcatagtaggtagcgcccttgttcgcaatgacggtgccgccggaatttttaacatattcccaaattttctgacggtcaacgggaggaacggcaacctgattgtcgaagaagcaatcgtgatactggttgatgttgatgctggaaatggtggaaatcgaccaggggatgaaggaggtgtcgccgtgctcgccgaaaacataggcgtgaacgttcttctggcttacattataatactcggcaaggcttgtgcgcagacgggcggtgtcgagcagggttcccgaaccgaggatgcggttttggggaatgcccgaaaccttggtgaaaacataggtaagaatgtcgaccgggttcgccaccaaaacataaatggcgtcgggcgcatacttggtcaccttgggagcgatttgcttgatgatgtcggtgttgatctgagaaagctcaagacgggactggccggcctttctcgcaacacccgaggtgatgatgacgatgtcggcgccctttgcgtcggcataggtgccggaatagatgttggtgggggagcagtatgcggtaccctgacgaatatccattgcttcaccgaaggctttcttttcattgatgtcaatgaggacgatctcggcagccacaccggtaacggtgagggtgtaggcgatggttgcgccgacgtgtcctgcgccgataattgcgaccttgttgctcataatatcaatcctttactttttttattatattttaaataatttaccgctaaaaataccttgatgttgcaaactttggtataatttgcttaaggcttataaacggacaaaggacggatagaccgccctttgcaaaaagcctttcggcttatttcatataatgaaccttgggttttactgcagcggcctgctcttccttggctttgttgaagttttccttgacctgggtgaacatattgttgccctcggtgtcaatggaaacgatcagcggaccgaattccttaacgcggcagatccaaagagcctcgggaacaccgaagtcaagccattcgacgtcctcaacctcttcaacctcctcggcggccataacggcgcatccgccgggcagcacgcagtgaagagcgccgtattttttacatgccgcggcggtgttgtcgcccattccgcccttaccgatgatcagcttaacgccagtctgctcgataaaatcggcctcaaaggcttccattctcatgctggtggtggggccgaccgagaccatggtgtattttccggtcttttcgtccttcttgacgatggggccggcgtggaaaatggcatttcccgcaaactcgtatttttcggggataataccctcgcggacgcggcgggcgtgtcccgagtcgcggcaggtggccatcataccggtaagataaatcatatcaccgacgcgaagatctttgatgtcttcggtctttatgggtgtagtaataactttcttttccatttcaattctttcctttcgctcaaaatgacttagatgacagcgcccttgtgggtgatcatgtcgcagttgccgtccttgtcgatggcgagggtggcgcggcgatgagcccagcagccggtgcttaccgaaacggcaagggtggcggggtgacggcaaatggtttccacgttgaggccgaggagactttcgcttccgccgaggccctgaggacctacgccgattttgttaatggcgtcggaaaggatgttctcgaattcggcaaccttgggattgggattgtggcttccgaccttgcggagaagagcttttttggaaagatgggtggcggttgtgatacatccgccgataccgacgccgatggcgaggggaggacatgcgtttacgccgcggtcggtgacaatgtcaagaacaaagtcgacaatgccttcataaccctttgcgggcatgagaacggccgatttaccgggaaggctgcatccgccgccggcaaagtaaacgtccatttcgattttgtcggaatcgggaacgatggtccactcgatgtagggaacgccggtgccgacatttgtgccggtgttgtactcgtcgaaggtctcgacggcgttgagacggagaggagtctgctgagtagcttttacgacagcctggttgataacgtcggtgagaacgttaaggtaggggctgaaggcgcctgcgcggacatagaggtgaactatgccggtgtcctgacatgtggggcgcttgacctcgacggcacgcttctggttgccgatcatgatgtcataaagagttattgcgctgggctttgtttcgttgtctctcatttcctgaagacgcgccataacgtcgtcgggcaggcggatggacgccataccgacaaaattagccacgtgctgaatgagctcatttttctggttttcggtaatcacaatcatcattccttttaattggtatgttgaacctttgccgatggtaaaagagcaaaaagcctaatcttcgacaaatatattacgttaaaaagtttaccacaccgccgaaaaaaaagcaatagcgaaagtgttatttttttaacaatcatttatgttttttcgtgaacactattatgtaatttttatataccctcttgaaggaacggggggattgtgataaaatcaagggaaataatactttgaaaggtgtgtttttatgattctcgttgctccttcggttctttcggcggattttgcgcggctcggagccgattgcgataaaatgaaagaggcgggcgccgacattcttcacttcgacgttatggacggaatgttcgtgcccaacatttccttcggtattccggtgctcaaatcgctgaataaatacaccgatatgcccatagacactcatctcatgatagacgagcctcatcggtatataaaggaatttgccgctgcgggttctgactatataaccattcattacgaggccgaaagcgacattgacggtaccctcgaccttatacgggagtgcggagccgtgccctcgatttccataaagccgggcaccgacgcccgcgtcattttcccctatctcgaaaaggtgggaatggtgcttgtcatgtcggtggagccgggcttcggaggtcagagctttatgccctgcgccgttgataaaatcgccgcgatacgcgccgagtgcaaccgtctcggactttgtgacatgaagatagaggtggacggcggaatcggtcttgaaaccggcaaaaaggtcatcgaggccggcgccgacgtgctggtggcgggaagcgctcttttcggcgcagacgacccggccgcctttgtaaaagaaatcaaaagcttttaaattaaaggagtctctataatgaatattcccttttctcctccggatattagcgaatccgaaatttccgaggttgtcgacacccttcgctcgggttggataaccacgggacccaagaccaaaaagtttgaaaaacagataaaagaatttaccggtgccgcaggctgcgcctgcctcaattcccagaccgcctgcggagaaatgaccctgaggcttctcggcgtgggggagggcgacgaggtcatcgttccgtcatacacctataccgccactgcaagcattgtctgtcatgtgggagccaccctcaaaatggtggatgtaatgcccggcacacttgaaatggacagagaaaagcttgcaaacgcaataaccgataagaccaaggtgataattcccgtcgacatcgggggaattatgtgcgactatgacagcatttatgaaatcgttgaggtaaaaaaatcccttttcaccccgaaaaacgatattcaaaaggcattcggccgcataatcgtcatggccgacggagcccattctctcggagcggtcagaaacggcgtaaaaagcggcagccgtgccgatttcaccaatttttctttccatgccgtcaaaaatctcaccacggcagagggcggcgcggccgtttggcgtcacatcgacggcattgatgacgaggaaatctataaaaattatatgctgctttcccttcacggccagaccaaggacgcgctgcacaaaagcggtatcggcgcatgggaatacgacattgtggagccctatttcaagtgtaacatgaccgatattatggcttctctcggtcttgcccagcttgccagatatgacgggctgctcgcccgccgccggcagataatctcaaggtataacgaggcctttgccgacgagaggtttataacccccgttcacaagggtgaaaacttctgctcaagcggacacctttaccttctccgcataaacggcgccgaccacgaaaagcggtgtgaaataatccgcaaaatgggggaaaagggcgtcgcctgcaacgtgcattataagccgctgcccttgctttcggcatataaaaagcgcggctttgacattgccgactatcccgaaagctacaagatgtatgaaaacgaggtttcgctgcctctccacacgctgcttaccgacgagcaggtggagtatataatttcctctttaaaggaaatcgtcaaataaaaacaaaaaacaaagcagaaacatttcggaccgaagctgccgatgtttctgctttttttgtcgaaaaatcccgatggcgattctgttttgaagaattataccttgccgtaaaagcaaagggtgttgtaggggaaaataatcttgccgtcccgttgatatttttcaaaaatcatttcacagccgccgacaaattcctcaaaactttttccgtcttctttgggagcaaaagacgaggaaagctgccttttaataaaatgctctcggtcaagtgtcacgtggtttttaaagcaaaccctttcgggagcgctttcaaagaaatcggaaaatgccgtcccttcaaaatcaaacccgtttgacgagcccttgaagtcggggcaaagacatttaaaaagggcgttgcagtcacgaatcacggggctttctttgtccttgttgttccatacgagaacgacaaatccgttgtcctttaaaattcttttacattcctttttgaaggccgatttgtcaaaccaatgaaaggcttgggcggcggtgacgatgtcggcgcttttgtcggcaagagtcgtgttttcggccgtcccgtttatccatgtaatgtcgctttttgcggcagccgctctcatgtcggggtttggctcgacggcaagaacctttttcacatacgggcaaagcgccgccgaaaaaattcccgttccggcgccgatgtcggccgcaaccgttttctcggatattatttgcttttccgtaagataatcaaaaagtgcggcgggatatgacgggcgggcaaaggcataaacgtctcctttgccgttaaatctttcggtgctcattatgtttgtacctctaaaacaaaaattaagtaaaacagccgcccgaaagaaacgtcggacggccgaaaaatcaatagttctccgctttaagacggaaatagcttctcggatgggcgcagacgggacatacctccggcgccgcctttccgatgtgaatgtggccgcagttggagcactcccaaaccatgtctccgtcgcgggagaaaacaagacttccgtttacgttggcaagcagctttttataacgctcctcgtgggtcttttcgatttcgcccaccttttcgaaaagctcggcaatgtcgtcaaagccctcggcccttgcctcttcggcaaaacccttatacatatcggtccattcgaagttttcgcccgccgccgcatcggaaagattgtctgcggtgccgtttatgcccgaaaggagtttaaaccaaatttttgcgtgctccttttcgtttgccgcggtttcctcgaaaagctgggcaatctgaacaaagccttcctttttcgcctttgaggcataaaagtcatattttgttcttgcctgagattcgccggcaaaagccgccttaagatttgcctcggttcttgagcctttaagttccataaataacactcctttaaaagtaataataattactatttttattatagtcccttttttaaaaaaagtcaagccctttttatatttcttcgggctcaagattttcataggtgcagaaaacaaattcatggccgttttcttttatggggtcgctttcctttgaaagtttccagttcggttcgcggtcgagattttttataaacacgtcggccccgccgtcgtcggccaccttagtaatatatgcggttttgcagaaattatagagagcgttgtaaatttccgctccgcccatgacaaaaacatcgccgtcgtttttgtcgatgattttaaaaagctgctcaaccgaaaagacaacctcggctccgtcgcagcggaaatccctgtttctcgtcagcacgatgttgcgccgatttttgagcggccgcccgccggggagggaaagcagagtttttctccccatgacgacggtttttcccgaggtggtttcgcggaaaaatttcatgtcggaggggagggaaaaaagcaggtctccgccctttcctattccccagtttttgtcgacgcatactatataattcatgttatttcctccctgcggttttgataaagatttcgccgcgctctttccagtcggagcagaaatttccgcccccttgggcaaaggcttttgagccgccgcccttgccgccgtaaagaccgtttaaaatttcacaaagatatttgcagtcaaaggggctgttctttgcggcaccaagcacataatttatgcggctgttttcggcaaatacgagaacggcgcagtcggctttttcgcaaaccttgttaagcagcgttcttgcctccttttggccgacgttttcgagaaaggaaacggcaaagccgtcttttgccgaggagacaatctcccttgcccgaaattccgacaaaagcgaggttttttccttaatggtgaggttaagctcggatattttttgcttcatgtcgcatatccgctcgggaagactcgaaaattccgaggaaaacatttcggccgagcgccttgcgatttcggtttgtttttcgaaaaattcaaaggcgcgctttccgcaaagaaaggtcaggcggctgcccgaacggttcttttcggccttgacgacctttataattcccaccgttcccgtaaaggcggcgggggttccgcagcaggtgcatatatctcctccgacgatttccaccaccctcgggcggtctccgcccttttcggagatttttcgcacctttttgttcttaagctcgccgagagaggcgtagtaggtttttatgggcagattttgatatatttgattgttgcaaaattcctcggcctttttgatttcctcggccgaaacctcccgttcaaggtcgatggtggcaagttcggaattcatgtgaaatccgacgttttttatgccgaacagatgccaaaaggcataggacagcatatgttcgccggtgtgctgctgaatgttgtcgagacgaagggagccgtccaccgccatggtgtattcctttccctcttcgagaggcaggctgcaaagatgtattatctcgccgccgtcaaagaaggtgtcgaggacatccgcctttccgatttttcccctgtctcccggctggccgcccccttcggggaaaaacaccgtcacatcggttttgacggcaaatccgccgtcggtttttttgcagctttccacacggcattttccgccgagcagaaaggaatcgttttcgtaaagcttttcggtcactgttttgtcccccgttatgtgttctgttaaaattataaacgggcaaaaataaaagtcaagtaaaatgtcaccgggagtcggtatcggaatagaatggtagtgaaggctggaaaggaggaaaaactaatgtgcaacggtaatttcttcggcaatgcttccaactgctggatcattatgctcgttctcttactgctcctcggttgcggcggcagcaataacaacgactgcggctgcggttgcggctgtcagtaaaacttaaaaagggtgaagaacggttttttgccgttcttcacctctttttgtaacacaggcgggacaacctccgtacaatatatcggaagcattcggaataaatcgcgtttaagatgccaaagataggtgtgaaaacttcggccgaaaggccgtgcggaggtgtttttatgcaggtaaaacggggagatatttattatgccgatttaagcccggtggtgggctcggagcagggtggaatcagaccggtacttatagttcagaacgacgtgggaaacaagttcagtcccaccgttattgccgcggccataacaagccaaagccaaaaaaccgctcttcccacccatataaaaatcaattcggcaaaaacaggccttcaaaaggactcgatagttcttctcgagcaggtcagaacccttgacaaaaagcggctcaaaagccgcatgggcgcgctggacagcttttccatgaatcttatcgacaaggccctttcggtgtccttcggtctttaaaaattatttttccgaacgctatttaagctcggcggtgaattcgattttgttttcaccgattttttttgcgccgatttcgcccttatgtgcctcgcaaatgctccgcgcaagggaaagaccgattccgaaaccgccctttgacgagcgtgatttgtcccctcggtaaaatctgtcgaaaagctttgaaagctcgccctcgtcaatttcatcgcaaaggtttgagcatttgtatgatgacgccttttttgctcttttaagtgaaaaatcaacgggagagccatccgacgaatatttcacggcgttgtcggtgagtatggagacaagctggcgaacggagtattcgtcgccgcggtatgttatcccgtccttaatgtcggcgtttattttgtgaccccgctcggccgcaaaatcgcaaaaggagtcgacagcctctcttgccgccgaggaaatgtcaaaatccgacatgaccggctgaccgccttcgtcggcctttgcaagggaaacaagcgagtccacaagctttttcagcttgtcggtctggtaaagcgccttgtctatccacttttgcttgcccacatccatttcgagcacggtcagcgaggtgtttataacggttatgggcgttttgagctcgtggcttgcgtcggttataaattgcttttgccgctcgtttgccttgaccaccgggtcgacggctttttttgaaaaaagcacaatacccagatatgcgagggcaacgcaaaaaactgtggcggcggccgacaaccaaagaatggtctttaccgaccgcatttcgttttgacagtcgagaaaaataaccatgtttttgtcgtcgccgtttttgacgatatagtatttgtaattgtatccgcttgtatatccgaaaccttctccgtgccgcaccgcaatgtcaagatattcgccgatgtcgtcttcggtgacggcggcgatgttttccatgtttgacatgacgagggtgccgtcgtccttatagcggagcacaaaatatcttgtggaaaagggcgtttccgtgttgaagtgcccgccgggagggtttgagggtccgccgggaggaacggttcggtttgtgggtatcgtgccttgattttgatatatcatggtcagcgtgtcgccgagatttttgtcggtggagataaaatcggccgcattaacgataacgcttaaaagaatcatggcaagcgccaccgacagggttgcgattataataaactttttacgcagctttttaatcatgccgttcctccaaaacatatcccagacctcggttggcatatatcgacaccgccgaaccgacggatttcagttttttgcggagatttgaaatgtgaacccaaaccacgtttatttcggcttcgctgtcccagccccacacgcgctccataataaggtcggccgacagcacggtgttcgggcggcgcatgaacatttccatgacctgaaattcccgtcccgaaaggcggaccgaatttgtgccgcagctgagcagccccgagcttatgttgagctttaaatcgccgaaggaaatgacggttggtgtaaagtcctcgcggcggcaccgaccgctcgggaacctcggttaccggaaaggtgaccggtatagacggcacgaagatcaccctttcgctgggcgaaatttccgagagcgaacagggcggcgggcagggaggaacaccgcccgaaatgccgagcggagataattcttcggaacaaaacggacagcctcccgaaaaacccgacaatgacgcaaacggcacacagaacgctgcgcctcaaggcggacagggcggaaacatcgtctttaccgaaagcggcgaaagccttaccgtcgacctgaaaaacgccgagatcaccaaagacagccaaagcattgatgtgagcgaccttgccgagggcgattacctcacggttacctacggcagcaaaaatacggccgaaaaagccgaggtctatacctcttccggctctgcgcccgcaggcggcggacagggattcggcggctcgacggctgtaacgcagggtgacagcgccaacacgctgaccgaggacggaagcttttcgggcagcacctatctctcctccggagacgatgaaaacgccttgagaattgacggggcaacagtcactctcgacggcattacggtggaaaaatccgccggagcaagctccgacaccgaaaacggcgatttctacggagtcaacgccgcactgcttgcaacaaacggcgcaatcgtcacaatcaaaaacgcaacggttaattcttcggctcagaacggcaacggcgttttcagctacggaaacggaacaaccgtcaacatttccgattcgaaaataaccacctctgccgataattccggcggaattcagaccaccggcggagcgactaccaacgcaacaaatctgaccgtaaaaacctcgggcaactcctctgccgccatacgttcggacaggggcggcggaacggtcaacgtcgattcgggaagctatgagtcgaacggatataattcccccgcagtttattccaccgcaaatatcacggtgaaaaacgcgtcactcaccgccaacaattccgaggcggtcgtggtggaaggaaagaattcggtaacccttgaaaactgcacggtctacggaaacatgagcgacacaaagggctcaagctcggatgaaaacgtgcacaacgttatgatttatcagtccatgtcgggtgacgccgatgtgggaacctcctccttcacgatgacgggcggaagccttgaatcaaacaacggcgatatggtctatatcaccaacaccacctgcaatcttaccctttcggaggtcacccttaaaaacaacgacacctcgggacggctgcttgtcgtcagcggaaactcggcctccaagggttggggaacggccggacaaaacggcgctcaggtgacttttaaggccgaaaaccaaacactttcgggcgttatcgaggttgacagtatttccacccttgacatgaccctttcggcaggcagcgttttcaccggaatgatcaacatcaccgaaaacgcgcagggcggttcggccgtttcgaacaacgccgtcgtaaccgtcgaaagcggcgccgtctggaatctcaccggcgactgcaccctgacctccctcacaaacaacggaacgatcaattttaacggacacaccgtgacccttgccgacggaaccgttctttcggcataaaagagggcataaacaagcatttcgacccccgcggcagacagatattgccacgggggcttttattgcaattttctttaaagtgtggtaaaataaaccgattatttgatttgacgaccctttaaaggagaaaaaagtggcattttcaaaaaaggctgataaaaaaataaataaactgctcaaaaaagcgggacttgacgccgacggctgcgtcatgtttacgagcggcgacatggacgtcgactgcgaattcagagaaagctggtttttgttcgacggccgcgagctttcggcggtttatcttccgaaattcacgggggtaaaaacctttgcgggctatccccacagggaaaactatgactatccttcggaaaacgagcttgaaatcgaaaaaatacccatggaaagcatagaaagactgtttaccgtcgatcttgcggcgggagttttgctttgcggggaaattgacggtatttgccgccgtcttgccgtgttttcggcgggagcgggcgcgggagcgagaaaattctgcgaaggcttcgaaattctcaaaagcggaaaggcccttcccgaggatttctataaggaaaaggaaaatcccgagttttgcgaaaagtgcggaagcccttacatagacagagaacggaggatctgccccaagtgcaccgacacgaggagtcttttcttccgcaccatgtcctattttaaaaattacaaggcggcaatcgtgctgcttgttttgacatttcttgtgtcggcgggggcaaattcgctgctgccgtatctttcgggaacggtctattttgacgacgtgctcgggaaaaaatctgattttacgggcttttggagccttgcaaagggcgattttttctcgctgcttgtgctcatgtgtattgcctttgcggcggtaagaattcttaatctgctgctgaccattgtgcaaaacgtcattgtggccaaaatcgtgccgagggtggttcgaagcataaaaagcgacattttcgcctcgcttaaaaacctgtccatgcgatttttcacaaaccgcacgacgggttcgcttatgacaagggttatgagcgacgccaacgaggtgacggggcttttcctcgacattcttcccgcaatcgtggggaatttggcaaacgttgttctcacggtgattttcatggtggcgctcaattggcagatggcggtcatgacccttgttctcactccgcttcttgtggttataagcgtcaagctgcatccgcggctgtggcatttctacggcaagcgccaccgcgccgaacgatcaatgaattcaacccttaacgacagtctcacgggcgtgcgcgtcataaaggccttcggtaaggaagaacaggcgataagaaacttcgaaaacaaaaacgcttttgcgggcaaaaccgaggtcgacatagtcaaatacgaaaaccgatataatgcggtttacacctcggttcagagcgttatgcagctgggcgtgtggggaataggcgcctatcttatactcacgggaaccgacacccgtatgtcctacggcgtgcttgccacgtttatagcctatgtggcgagtcttgcgggaccccttgactttatgtcgaacgttttccgcatggttgcttcctccatgaacgcctctcagcgtatttttgaaattatcgacgccaaacccgacgtcaccgaaaagcccgacgctctttcccttgaaaaccccaagggcgaggtggaacttcgggacgtgaccttttcctatgaaaagggacaccccgttcttcacaacatttctcttaaggtcgaggcgggggaaatgctcggcatagtcggccgctccggcatgggaaaatccacccttgtcagtctcatttcccgtctttacgaccccgacagcgggcaggtgcttatagacggtcacgaccttaaggatctgacctttgacagtcttaaggggaccgttgccatggtctctcaggaaagctatatatttatgggctcggtggcagagaacatcgcctatgccaagcccggcgcgtcaaaggaagaaattcttgccgctgcggcagcggcgggagcccacggctttatatgcaaattccccgacggctacgacacgctcataggttcgggcggccgtcagctttcgggcggagagcggcagcgcctttcccttgcgagagccattcttgccgacccgaaaatacttattctcgacgaggccaccgccgccgtcgacaccgccaccgagcgcaacattcagcttgccctcgatcggctttcgaaaaacagaaccacaatttccattgcccatcgcctttccaccctgaaaaatgccgacaagctggttgtgcttgacggcggacgtgcggttgagcagggaacccacgagcagctgatggctcttgagggaatatacttcaagctgcagcagctccaaagcagagcgctgtctctcgacgcacaggaaaggagaatgtaaaatgtttatgccccctccgcctcctccgggaggtcatagtggcggcgacgtcataaaaaacgaagagcttttgaccgaagaaatgctcgagctcaagttcttaaataaagacaatgcgagctttaagcccactcccggcggctttgtttctcttgaatttgaggggaaattttattcccgcgtttattttcaccgcgcctttcccttttccgctcccgacgaatatatttcggtgagagaaagcgagggcaaaaacaaggaaataggcatgataagaaatttaaacgagctcggagagacccaaaagcttgtgaaaaagcagcttgagctgagatatttcacacccaagatcacttcggtctataaggtcaaggaggaatacggctattcctactgggacgtaaataccgaccgcggcccctgccgctttaccgccgacgcaaacggcgtggtaaagttgtcggccacccgccttatagtgaacgacgtggacggaaaccgatttgaaattcccgatgtttcggctctgtcgtcaaaagagctgagaatgatagacctttatatttaattaccttcgaaaggaaacttatgcgccttaattttaaacagaccgacgggtcgaaaaaagcgcttgcggcggtaaatgccggcgacgttaaatattttgtgccttatgacatagactctctcggtaatttttgctccgacggctttgtcgcgctgaccgaaaaggctctttacgtcataaagggcgatcgggtcgagcgcaccttcgagcttgaaaaatgcggcgacatacgctgcgagggaatggtcgactgcgggctgcttgtgattaacttcgacggcgaggattttgccgccgccaagttctccatgaagcatgtggcaagatatgcttatgtcacgagagccgcccgcctgctcaaaagcggcgacctccacccggtcgaaagccttgaaccggaaaatatatgcgaaaaatgcggcagaaccactcccgacaccggctcctgcccccattgcgacggaaaaaaccaaagcataaaaagatttttccgcctttgtaagccctatgcccctcggctgtgctttatctggctgctcatgctcataacctcgggactgacgctttatcagcagcaatggcagcgcctttttatagacaacgtgcttgtacccgcaagcggcaccaagggacaggtaataacctttttcgccgtgctttttgcgattgtggtcgccacgcttctcataaacatctataaaaaatatttgggagtgctgctcggctctcgaatgagcatggatctccgccgccgtctgttcaccaaaatcgaggagctgtccctttcttttcaggacagccgaaagcccggcgaccttatgaacagggtgaccggcgacaccagggaaatccgcgatttcatggaaaacaccttcacgggaatgtttacctatataattacctttatcggcgcccttgtcatcatgctgtccatgaacgtccgtcttaccctcatttccatgattttcgtgccgctgatgtggattcttcacaagctcttttggggcaagatacgccgaattttttccagtcagcgcaggagagaggacaatttcaattcccgccttcaggatgttatccagggaatgaaaatcgtcaagtgcttcggaaaagaaaaatacgaggccgagaacttcgaccgcgttgcgggagaaaacgccgaaattcaggagaaaaacgaggtgttttgggcaaaatttcagccctttctcggctttgttttaaacttcggaacccttgccgtgctttatttcggcggagtcgattccttaaagggaacaggcttttcggtgggcgaaatggttcagtttgtgggctattcgaatatgctgttcggacctctcgggtggtttacctggctgcccagacgtcttatgcgccttgaggtcagcatgagccgtatcgacgacgttatgtccaaaacccccgacataaccgtgtcggaaaatcccgtcagaaaaacgcccgagggacgtgtggaatttaaaaatgtcaccttcggatataaaaactacgagcccatactcaataacgtttcctttaaggccgaaaagggcgaaatgataggccttgtgggcgagtctggagcgggaaaatccaccgtcataaatctgctgatgcgtctttacgacaccgatgagggcgaaattcttatagacggtgtcgacattaaggattacgaccccgaaacccttcacggtatgatgggcgtcgtgctgcaggaaaacttcctcttttcgggaacgattttcgaaaacataagattttcctgtccgaacgcttctcccgagcaggtcatcatggccgcgaaaaccgcgggagcgcacgattttatctgtaaatttcccgacggttataatacctatgtgggcgaaaagggacaccgtctttcgggcggcgaacgccagcgcatagccattgcgagggcgattttgtccgaccccaaaatacttattctcgacgaggccaccgcaagtctcgacaccgaaagcgaatttatgattcagcgcgccatcgaccgcctcaagtcgggacgaaccacctttgccatagctcaccgcctttccacccttaaaaatgccgaccgcataatcgtcatcgacaatcaccgagtggccgaaagcggcagccataagcagcttatggagcacgggcgcatttacaagggacttgtggaggcgcagcttgaaatgcacgccgtcagggaatgagtttgaaagccgcgtcggcgggtgtgtgccgccccgaaggcaaaatcggcagagaaatttaacgatgctctcggcgaagggcttaaagaaataataaaaagtccttgcatttgccgacaatttaatgtataatcttaaggcacgccggtgtgatggaattggcagacgtgccggactcaaaatccggtggtggcgacaccgtatcggttcgaccccgatcaccggcaccaaaaaagcgattcgtcttgtttttgcaagtcggatcgcttttttatgtttattcgtttgctgcgtcggtttgcgacaggctgccttgaacaacgtcgtgttcatttaaataccgattcacggcgttgagcacggtttttttgtcggcgctccaaagaggagcaatcagcagtttttttggtccgtcgccggtcaggcggtggatgacgatgtttttcggcaaaagcttcaggcaatgcgcgacggtttcgatatattcattcatcgacagcgttttgacctttccctcggcataaagacgggcaagggcggtgcccttaagcacatggagcagctgcagcttgacgccgtttatcggaagagacgagatatgctgcaccgttttataaacatcctcctcggtttcaccgggaagtccgattattatgtggacgacaacgtcgacgttgatttttcggagctttcggacggcaccgtcaaatacgtcgagagtgtagcctcggtttatgaattttgccgtggtttcgtttgccgtttgaaggccgagctccacaaaaacaggcttgattttgtttgtttcgtcaagaaggttcagcacagcttctccgaggcaatcggggcgggttgctattgacagggcggtaatgtcggagcggtttgccgcctcaagatatatcttccttaaataatctatggggccgtaggtgtttgaataggcctgaaagtatgcgatatatttaccctcgcgtatctttttcgaaacccgtggttttgccctttcgatttgttcggctatcgacagggaaggacattcggcaaagtctcccgagccgccttccgagcaaaaaatgcagccgccgtaccctgccgtcccgtctcggttggggcaggagagtcccgcattcagcgacagcttgtataccttgcagccgaaacgctcctttaaatatccgttaagtgaattgtaatacatattgttctccgagtgaaaatatgtgtccattatatcaccctttttaaaaagactcaaccgtgtttcggataaacgagccgcccgaaaaaaggcaaaaacgccgcggggcttcccacggcgttcctgcgttttgccttacatcccatatcgttcggtaagaaaatcatccacaagctcgtcaagaaccgaaaggtcgaactgcgccgcagacagccttctcccaaaggcctcaagagcggctctgtcgtcggaaatgtcttcgacgacacgggttttaccgtcaaagcttacggaaataccgaatgttacggcgtttttgatcagagggtcacagggatgacatttgataaggcggacaatgtttctttcatgctttttcataactcaaacctccgtaaaacctctttgtgaatttaaatcacaaacatataatatcattctttggaaaaatgtcaatagtttcggtgacaaaaaatcaccaaatctgcattttgcacataaattcgttagtcaattccttgtatttgtaagataatttggtcaaaacagacaataaattcatttatagaaaaataaaaacaatgccgaaagggaaaataaacagggtgcggcgacaaaaaacgccgatgttccgacggtgtttaaagctcttgacattcgcggtgtttttgaatataattataaggattaaactccgctttcggaggctttttgaaaggaagattttacaatggcaatcaaagaaatcaaacttactgccgaaggtcttaaaaactatgaaaacgagcttgacgagctgaaaaacgtcaaacgaaaagaggtctcggagaaaataaaggttgccctttctttcggcgacctttcggaaaacagcgaatatgacgaggccaaaaacgagcaggccaaggttgaagcccgaattgccgagcttgaggccatgctcaaggtcgcaaaggtaatcagcgaggaggaaatgtcggccgacaccgttcacctcggctctaaggtcaaggtttacgataaggaattcgacgaagaggtcacctatcttatcgtcggcaccgccgaggccagcccttccgacggaaaaatttccgacgaatcccccatcggcaaagctcttctcggggcaaaggcgggaaagaccgttcatgccgagactcccggcggcgtcgccgagcttaaggttttggaaataatcaagtaattggagaatatatatgtcagaaaataatcagaacaataataagaaggaaccgtccttaagcgaggttcttaaggtcagaagagacaagcttgccgccctttgcgaggcgggagaggatccctttgtaaagaccaaatatgacgtcaccgactgttcgaaaaatataaaggagaatttcgacgctctcgagggcaaaaccgtttcgctgggcggccgcataattgcccgccgtatcatgggcaaggcaagctttgtgggacttcgcgacggcgagggagatattcagctttatgtcagcaaaaacgacgtgggcgacgaggcctacgccgcatttaaaaaatgggacataggcgacgttatcggcgtttcgggctttgttttcaaaacaaaaacgggagaaatttcggttcatgctcagcatatcgagctgctcgccaaatcacttttgcccctgcccgagaaattccacggacttaaggacaccgacacccgctaccgtcagcgttatgtggatctcatcgtcaatcccgaggtcagagacacatttttaaagcgttcgcagatactgcgtgaaatccgcgcctatctcgactccaagggattcctcgaggttgacactcccattctcgttcctcttgaaatcggctcctcggcccgtcccttcaagactcaccacaacaccctcgatatggatatgtatctccgtatcgagaccgagctttatcttaaaaggctcgtcgtcggcggcatgaacagggtctatgaggtgggacgtatcttccgcaacgagggcatggacaccaagcacaatcccgaattcaccaccatcgagctttatcaggcgtataccgattttcacggtatgatggaccttgttgaggagcttaacaccatgctggccgaaaaggtctgcggttccaaggtcatcacatatcagggtaagcagatcgacatgggtcattgggagcgcctgaccatgatcgaggctgtcaaaaaatattcaggctgcgattataacgactggaaaaccgacgaggaggcaagaaaggcggcggccgaaaagcacgtcgaggtgcccgccgacgccaccaagggtaccgttcttgccgaattcttcgatgcgtttgtcgaggaaaatcttattcagcccacctttatatacgattatcccgtggaaataagcccgcttgccaagagaaagccgaacgaccccgcatttaccgagcgtttcgagtatttcatcaatgccaccgagttcggcaacgccttcagcgagcttaacgaccccattgaccaaaaggagcgtttcgaggcgcaggttgcagccaaaaaggccgccgatcccaactgcaattccgaggtggattatgattatgtgaccgccctcgaatacggtatgccgcccacaggaggtctcggtttcggtatcgaccgccttgtcatgctgctgaccgacagcccctccataagagacgtacttcttttcccgacaatgaagccgttggactctgataagaaggttgaaaaggttgtttcgactcctgcggcggctgctcaggcggctcctgaaacccccgaaaaaattgatttttccaatgtggagatcgagccgctgttcaaggatttcgtggattttgataccttctccaagagtgatttccgggccgtaaagatcaaggaatgcgaagccgtgaagaagtccaaaaagctcttaaagttcgttttggacgacggaaccggcgtagatagggtcattttgagtggtattcacgaatattatgagccggaagaactggtcggtaagacctgcattgcaatcaccaatctgccgcccagagcaatgatgggtatcgactcctgcggtatgctcatttccgccgtgcatagtgaaaacggcgaagaaaagctgcatctgctgatggtcgatcctcacattcccgccggcgcaaagctctattaagacgatgtaaagatgtaccgttttaccaaatagaccggatgtacttcatttgatgcaaaattaagtgcaagcaggaaaatcgcataattggtgcaaaaagtgggcaattccaatcgggattgcccatttttaaaacaaacagaaatacaaatcggaagttatcaatctgtcaacctgttttcttcgccccagctgcaaagctgatcgaggactttcatcaacgactttccacgctcggacagcgaatactctaccttgggagggatctgcggatactcctttcgcacaatgagctgatccgcttccagttctttgagattgctactaagggtcttatccgtaatcgttcccagatagcgtttcatttcattgaaccgtaccggctcaaattccatcaggcaatacaaaataaccatcttatgcttgccgctgataagggacatggtataactgaaaccagtgtcggcaaagttcgcatccttaatatatttttccatacaggacatatttacacttcctttcaagatagtacctgtctttattgacagtacttgtcttttctgattcatgatattataatagcaatatgatagtgcacagtcaattcaaaatgcaaatggaggttgttattatgaaaaaagaactgggagtaaatccttatctgtttccaatgcctgtgctgatgatcgctacctacagtgatggtgatgtggtcaacgtaatgaatatggcatggggtggtatctgcgccgataacatggtttctctcaatatcgaggaagatcgcaagacctcagaaaatatcaaaaagcacggtgcgttcacgctgagcattgcggacattccccatatcgaagccgctgatttctttggcattgccacggggaacaagatgccggacaagttcgagcgaagtggtctgaccgctgtgaaaagtgaaaaggtagacgctcccattgtgcaggaatttccactgacactggagtgcaaagtcgttgaagacaagatggaagtatatggtcatcatgtcatcggtgaaattgtcggggtgctggcagacgagtctgtgttggacgaaacaggcaaggtcgatgccacaaagctgaatgcctttgtattcgaccagttccgcaacggctactatgccatcggtgagaaagtcggtcaagcatggcacactggcacagcgctgatgaaaaaataaagatatgccaaaaagccccttgctgcagaaatgtagcaaggggcttgtagttcaataaatctttcaacagatgaacgaaaggtcagctatgtctataacaccattcgtttgacgagaccaaggccgagcttgagagaaatcacacggcctattccaacgccgtccttgacggagaggaaatatactacgcgttttacagcatggattcggccagttggacgctgcttttccttgtgccctcgtcctatgtcgccaccaacaccgttgcgcttataaatactacggttcacatcgtgctgctctttgccgttattatgcttgtggtcacgtctgttgtggtatacatcattctgcaaattcagaaaaaccgcaccgtcgcggcggaaaagcaaaacagagccgagcttgaacggcttaatgccgaacttgccgaggccagcaaggcaaagagcgaattccttgcaaacatgtctcacgacatccgcacccccatgaacgccattgtgggtatttcaagccttatggaaagcgaaaagggagtttccgacaagctccattcatatattcaaaaaattcagatgtcctcccgacatcttctcggactgataaacgacgtgcttgacatgagcaaaatcgaggctcacgaggtcaccctcaattccgagccggtcagccttgccgaacagatagggcaggtggacagtataatccgctctcagactcaggaaaaagggcaggatttcataatccgcgttcataaaatttatcacgaatatcttatcggagacagtatacgtctgcgccagatatttataaatctgctgtcaaacgccgtgaagtatactccgaaaggcggaaaggttttcctcgatttgaccgagcttccctgtgacgatcccgacaaagccaaattcctcatttcggtcaccgacaccggctacggtatgacgccggaattcctcgagcacgttttcgagccctttgtccgcgccgaaaattccgtcaccaacaaggtgcagggaacgggactcggtatggccataaccaaaatcttgtcgaccttcagggcggcgacatcaaggttcaaagcgaggtcggcaagggcagccgcgtcgacgtcacgctgacctatcccatcgacagaaaccgcgaatgctttgtggacgccgaaaacatactcatcatttccgacgagggctttcttgtggacaatgtcagagccgctctttcggcggcggatgtgaccctttttgctgccgacacggtggaggccgcttccgaaattcttgaagaaaacacaatggacatcattctgcttgccggaatgttgaaggacagaactctcaacgaaacggtggatttcctgcgggaaaaggataaaaaggctgtgctgattttctgcaccgattatgcccagcgtgaacaggtcgagggtcagctttccaaggtgggagtcgacggatttgtgtcccgccccttcttcctttccactctcatggccaccgtcgaccgcgccgccggacgtcaggttgccgaggtcaagcgttcccgttcgtcgctcaacggcatgagatttatgtgcgccgaggataatcagctcaacgccgaaattcttgaggccattcttaagatgaacggagccacctgtgtgacctataaaaacggcaaggagcttgtggacgcattcgagtcggtaaaacccggggagtttaatgccgtgcttatggatgtacagatgcccgttatgaacggtcttgacgccacgagagccataagagcgggcaaaaaccccttgggaaggaaaatccccataatcgccatgacggccaacgcctttgtggaggatatacgggattgtctcgaggcgggtatggacgctcatatcgcaaagcccattgacatagatttgcttgaaatagccatgagggctttttacccccccgaaacgtccaataaataaacgaaagtaaaaaaacgccgcctgcgaaaagaaattgccggcggcgtccgttttttatctgtttgcaaaaagtatgtcctgagccgtgttcagcgggaaaagcgaaagctcgtttccctcaaggttttcgcttttaaggtccacggcgttaatgcggttgttgccgtaggtggtgtaataataaatgcccttcgaggcgtttatacagcttgtgtatatcgttatctcatatttatttgggccgacttcacagcatcctctgacctgctccaccgagccgagaatgtggaaaaactggctcacgctttgctcctcgctttctcccgaaaccgaattaagccgtgtaaatgccgcccgcacaaaacgggaagaggaggaaaggtctccgggaagccccaaggcgcccatgcccctgctgtatctttcaagaccgagcttttcggaaaaacggttttgggggtcgcggggagacaaattcatataattgttaagggaaaaaagctgctgctcaaaggggggattgttggtcagcacccccgcggggttatcgaacaccttaaatccgtcggctctcgactcgacggtgatgcagcgttcgctgtcggctatcatccaatgaagctgagccgcgggaagcttttcggaaaagggagttcccgtgagatttatgtcaaaaagcagcttttcggcctccctgaccgaggtgcagtttgcaagcacaaaggggataaattcatattgagcaacattcaccttgccgtttgtcggctcggcgtagcgggcgttgcccacaaaattaagtcccgccatgcacagccccttttcgttcgccgcgtcataaaaaagcggaaatccgtcggcaatgtgagccatgcctatcatggcataatggttgtcgctttttcccgaggaaaaatcaaaagggaagttccgcggcaccgccgctatctgttctccgtaggaaaattcatagtcaagggttcgccccatgtaaaaatccttggttttataggttgccgccgtgcacataagccttccgcccttcttttttctttattataacccataagacggtctttattttgcaaataggaattaaaggcaaaaaataattgacattataacggttgtagagtttataatagaaaggacttaaaaggaaaagagagaaaccgatggaaaaaaatcttacaagcggcagcgtatttaaaaatgtggtttatttttcgctgccctttttgctgtcatgttttcttcagaccctctacggcatggccgatcttttcataatcggcaggtatgagggggtcgagggtacggccgccgtttcggtgggctcgcaggtaatgcatatgctgacggttatgattgtcgggctcgccatgggaacgacggtggcggtgggacgtgccgtgggagcgaaaaaccgtgaggaagtttcgaaaaacatcggaaacacaatcacgctctttttggcaatttcggcggcgctgaccgttatactcatgtttttcaggagcggaatcgtgtcgctgctgtcgacccccgagcaggccgcagcgggcgccgtttcctacctgaccgtctgctttgcgggcataccctttataacggcttataacattatcgcctcgatatacagggggctgggcgactcgaaaagccccatgtatttcatcgccgtggcctgcgccgcaaatatcggccttgattatctttttatgggcgcctttcacatgggcgcggtgggagcggctttgggcaccaccctttcccaactgctcagcgttattgtttcccttgttttcattacaaaaagaaagtcggaaattcctttcgccgtcaaatatttaaagcccgacaaaaagatggtgcttgcccttcttcgggtgggagtacccgtttgccttcaggacggttttatacaaatttcctttattattatcacgattatcgccaatcgccgaggtctgaccgatgcggcggcggtgggaatcgtggaaaaaataatcggatttatgttccttgtgccgtcgtccatgctgtcggccgtgtcggcgcttgcggcgcaaaatttcggagccaaaaagcccgagcgtgcaaagcagacccttaaatatgccattgcgatttccacagggataggcttttgcgccgccgtggcggttcagtttgccgccgagcctgtcgtgtcgcttttcacgtcggaccttgccgtgataagggcgggaggacaatatttcaggggctatgtctgggacagctgtatcggaggaattcaattcagcttcagcggatatttctgtgcctgcggccgttccgagctttcctttttgcataacatcatttccattgtgtttgtacgtattcccggggcgtttctcgcctccaagctctttgccgacacccttcttcccatgggctttgcctcaacggcgggctctctcgtgtcgacgattgtctgccttatcgcctttgcaattatcaccaaaaacggcgccgaccccaccgtcagagcccgaaagaaggcggcggcatgagactttttcaaatcggagaaatggcaaagctgtttcacttaagcgtcagcagtattcggcattatgaggatttggggctgattcttcccgaaaaaaccgacgaaaacacggggtatcgatattacagcacccgtcagttcgaggcatttaataccgtgaggtatttaagggcgcttgacatgcctctttcggaaatttccgattttatgaaggacagggacgtggacaaaatcgagcaaaagcttcgcgcccaaaagctttcggtggaacagaagcttttggagcttcgccacgtggaaaaggagattgaaaaacggctggaaagccttgtggacgccaaaaactcccgccttgacgaaatttatctttcctctcttgccccctgccgaatgtttttcaccgaaaaatcccttgaaattaaggattaccgagacatcgagggacccaccatccgcatggccgagcttgaaagcgaggctgtgatctttctcggaaaggtgggggtgggaatatccgccgagcatcttgcggcaggcgaattttcaaaatacgacggaatttttctgctgcttgacgacgaggacaagttttcgggaaaggtcatgacccttccaaagaccaaatgcgtttcggtgcgtttccgcggcagccacaccgaggcggccgagcagtataaaaagcttatgaattatatgaatgaaaacgggctttctccctccggcttttcccgcgaaatcaccctcatagattacggatttaccaccgataaagaacaatatgtcaccgaaataagtattccggtaacctcccgaaaggcttgaaattgcggggtgaaatgtgctataatgcttgaaaatccgaaaggcggcgagggcatgacctttaagcagaaaatcgaaaatttctggtaccactacaaatggcacacgataatcaccgtttttttcatcatcaccgggcttgtctgccttgtgcagtgcacctcaaaggaaaagcccgacgaccaggcgctgctctacgtcaatcagaatttgcttgacaacgccgcaaacgccctttcggaaaagctttgcgattataccgaggattataacggcaacggtgaggtgctttatcgggtca

SEQ ID NO: 2625 - DNA, 3610 bp, Unknown
  16S sequences of unknown bacteria
agaacggtcttctggatgaaacccgttttgatctggatgaagagggcaagctgcgcgtttactggaaggtaaacgactacggcatgcagatgatcaacggctacatcaagtaagcgttctgttgtctggaacaatcatattataaaagaaaaaacagcggtccaaacaccccgggccgctgtttttttcttttgcgcacagatgtgctgtgatctgtgccaaatgatctatttgtattcaggctgtttgccgtgcttcaggatgtcttcttttatatggcggaacgctgcgtcctcgccctgatccttgagcacggtaagcatatccagcagcagcgctgcggtgttgggatggatcatatagtgcccaacggaacgcatataatagtcgtacgggtcactgtcgcggtacgcactgccgcggtatgttttgctggcggccacacggtcgcagaacatctcggccacataacgcacaggcatttccaaaccggccatccgatggcccgcctgaggggtatagtcgatccagtattccaggtgatgcctgttgcgccccttgtgatgcagccaggcggaggaatagcctttgtcctggcgttcgccgtcgttggggctgtgggtgccaaaatagtattttgcgcccacgagaaattcggtgggggaatatttgctcaggtcgtgggtcaggccctgccagtaaagccccaggcggaaacagcctttcaggaccagccatttatggtgcgtaacggttttgaagtgcttaatcggatgcaagcggattccccctttgctatatagtgtactacggcactacggtactgtgcaagaaaaattcaaaaatgccgcgggaaattacgcggcggaaaacggctggaacaggacggttttccgctgcgtttttttcttttctgcgcttgggaggcgcggcatattgacggacaagggtgcatatagtgaaaagacacagcgccgaagaaggcagaggaaaggtgagcgagagatggaagagtatacccacgaaaatgaagtcctgctgacgggcacggtcctggaaccgccggagtattcgcacagcaatcatgctgagcgttttgttcgcttcccgctgcaggtactccgcttatccggccaaacggatgagttggcggtgttggccccggagcggctgctccggcggatgacggtggaggcaggggggcgcatcagcgtggaggggcagctgcgctcttataataataaatccggccagggcagccggctggtgatcacgacatttgcgcgcgcgctgtgccggggcggggaagaagactgcaatgagattcgcctgagcggtgttttgtgcaagccgccggtgctccgctgcaccccgctgggacgggaaatctgcgatttgatgctggcggtcaaccgcagctatggccgggccgattatatcccctgcattgcctggggagggctggcggaggaaaccagcctgctgggtgtgggcgatccgctttcttttgaaggacgggtgcagagccgcctttatcataaaatgacgccccgggggcaggaagaccgcacggcttatgaagtgtcggtcatgtgtttgcgatagaaaaatagaaaaaagaaaccggctttttcttttgcgtttttgcatttttttgtactttgcaggtcaaaattgtgcgagccgggaaaagggggctgtgttacaatatcggtaagccaaagcgccctccggcagggggagcgccgctcagatctgcctgccgggagcgcttgaagattctggggttacaaatgagaagggatgtgtttgcagatggggaaggaaattgcggttctgctgggcagcccccgcagaggcggcaatacggagcagatggcggacgcttttatccgcggtgcagaaaaggcggggcaccgagctgtgaaaatttatgccgcagaccggaaagcggactgtgttgcctgcggcggatgctattcctctgaggatcggccttgctgccggaatgcggatttcaatgaaattgcgccggtgctgttgcgcgcggacggtattgtattcgccacgccgttgtactggtacgattttccgggtaagctgaaatgtctgattgataatatgtattgcttttatgcagcgggtaaggatctgtcgcacaaaaaggcggccattctctcctgcggcgaggaaacgggcaactacatgatgtttgacggcctgcagcgcagtttcgagttgatctgccgggttgcgggatggagcattgcggatcagatctacgttcccggtgtgttggaagtgggcgctattcagcggaccgacggcctgcagcgcagcgaagcgctgggcgggcattttttcggatgaacataaaaagagaggccgacagcatcggtctctcttttttggctctttttgttttttaccatttgaccatggacgccacgctgctgtcgggatcttgggtcagcgctttgaggttgcggcggaagcggttgtaacgattgtagcagtaatcgagaaaatcctcgccgctgtaatgccggaccaaggcccagatcgaccagagcagatcctgcgccatgatgaagcagcggatctttgccatttcctggcggctggcgccggcggaaccaaagtaataggagaaaaactctgtgatggcagggccggccagacgggattcgccgatgtacatggcgatgtcccaggtgggatcgttcatgccggaatattcccagtcgatcaaatagggctgccgggtaacggtgtccatcaggaagttttccggcacggtatcattgtggcacgggatggattcaaacgaagagacggttctctcaatgaaatggaacaagtgctccttgagatagggatagtcggaaaacagctgtccatccaggccttgtatcagatgctcgtatttgcgcagctctgccgtccagtcaaacgtgttggagaaaggctttgggctggcatgggtggtcttgagcagggcggcaacattgcgcaggcattccgaagaagatggatccagcgcggcgaaggtgtggctgtgctccacatattcgctgatcttgatgccgctgtgctcgtcgaaatagacgcatacggaattgatcccgagctctgaggcaatgacgttgttggcctgctctgcagggcggttaagcatctgctctgtcattacgccgggttcgcggataatgtatagctttccgcggatacgcatgatgtaattgtaattggtcagaccgccggcgaagtgggacttatcgtacaagatggtgggatcgtgaaacacttcgcgcagcgtgctttggaccagttgttcacgtgtattcataaataaaaatcaccaaaaatcatattttgcacctgggacgctcgagcggcggggagcatgccacatataggacaaaaaaatacaacactttctttgtaattgcctttaatataacaaattggtaacaaaataacaactgttttcgaaaaataaatgcagaatattctgactgtttcttgcaaaaaaacgcagataaggcaatgctcttgtggaaatgtgctaaaactggtcaaaattgcagctgaaaattgacaaaataca

SEQ ID NO: 2626 - DNA, 4178 bp, Unknown
  16S sequences of unknown bacteria
ttttaatttttattttcttaaaaaaccctcaaaaacccgaacgctggacacgattatgacatcccgccgctcggcaagggacgatgtggccgaatgtctcattttatctatttcgtcgtttatggccgagtccttttctatataggtatcggtcccggggatataggcctcgggctgataataatcgtaatatgaagcaaaatactccaccgcgttttcggggaaaaattctttgaactcgctgcaaagctgagccgcaagggtcttgttatgggcaagaacaagcgtcgggcggttgaccttttcgatgacgtttgccatggtgaaggtttttcccgagccggtaacgccgagaagcacctgttccttataacccttttcaattccctttacaagcttttctatggcctcgggctgatctcccgtcggcttatattcggatacaagcttgaatttatccatgatgcacctccgcctttttcgctcaaaaatcgctattatagtattataccacaacatactccgctctgcaagtgcggcaacaggttttacaatcggggaaccgtttaaaacactcttgctttttgccgtccgacgtgttataatatcactcgatttataagctgctgccgagtagccggatgcaaagcattcgtttacacatcgttaggcctttcgaagatgtgtatgcgggtgcttattttttttggagggtatattatgataaaaaattatctttgcggtttttcaaagggcgagattttgctttggtgctcgtcgtccgcctttattattctgtccttctgcctgtttgacaaggaaaattatctgacgcttgcggcgtcgcttgtaggcgtcacttcgctcattttcaacgcaaagggaaacccattcgggcaatttctgatgataattttcagcctgctttacggcataatatccctcaccttttcatattacggtgaaatgatcacatatctcggtatgaccatgcccatggcggtatttgcccttatctcgtggctgaaaaatccatataacggcaacaaatccgaagtgaaggttaactcggtgggcaaaaaggaaacggtattcatgtggcttgcggccgccgtcataacgggtgttttttattttatactgagagcctttaacaccgccaatctcataccgagcacggtttcggtgaccacaagctttgtttcggtgtatctggctttcagaagaagtcccttccacgccttggcatatgccgcaaacgatattgtacttattgttttatggacgctggcaagccttgccgatgtgcgttatatttcggtaacggtttgctttgccgcctttcttataaacgatttatacggctttataaactgtggaaaaggataaaaaaacgccagcggtcgcagtccgaagcatgactcgcagcaccctttggctgccaatctttttgttgacaattccttgttttaatgttaacatcacggtagaaaaagggggttttttcatgaccgaaaacgagaaaatgcttgcgggcaaaatatacgaacccttcaacgacgaaatggtggcgcagcgcagccgtgcccatgagctttccatgaaatacaatcagacctttgagggcgacgaggagataagaaaggaaattctcgacgagcttatccccaaccgcggcgagggcgtttatcttcaggggccgatttactttgacttcggcataaacaccgtgttcggcgaccgaagctatgcgaacttcaatctgaccgttctcgacatctgccccgtgacaataggacacgacgtgtttatgggtcccggcgcttcgctgctcactccccttcatcccctctgtcacgaggacagaaatccttatttcgacgaaaaaatgggaagaatgaccgagcgtgaatacggcgctcccattacaatcggcgacaactgctggattgccggaaacgtcacggtgtgtgcgggagtaacaatcggagagggctgtgttatcggcgccggaagcgtcgtcacaagagacattccgaaaaacagtcttgccgtaggaaacccctgcagggttataaggcaaataaccgaagccgaccgtcttaaaaatcatcccgagctttttgccgacgacgatttcgaccaagtaaaatagccttaaattcaattaaaattcaaagaacaacggttgcaaatggccgttgttcttttttgatttcaagagaatttttcgggaaagtattccttggaagtgtgtcactttgttgttcccaaatgcggtgatataatttggaaaagaacaaatcgaggtgaatcggagcggatgaacaacaaggaaaaattcaaaagtgaaaatttaaacggtgcttacggcgagctcgcaagcctgataggaatagaggcggttttgaaaatccacgcaaaatatcgcggaacaagtatgttctttccggtggagcttttcaatcggaaatacatttcaaatcaaattgtcagcgaatatgacgggcataacataaaacagctggccaccaaatacggatatactgagaaatggataagaaaaatcataaaagaaaaccttaaggaggagtaggtaaaatggagcaaaatcaaaaaaagccgataaagattacaagcaagcagctgcttgtttttaccgtgttccttgccgttgcggcggtcgtcatttacggggtctcaagcggcaaaaagcaaagcggtaaggtgcaaaaaagcacccttcccctcacagaggaaaatttggtcaacgactgggaacggtcggagggtgaaaaaatctgtcggttgggctttgaatacggcaacgaattttattattcggaattttcatctgccgaaaaggcaacccccgagcttaccgtctgcaatgcgacatataaaatcggtgaaagcgttattaccatgacctatgagcttgaccttgaaacccacaccgacacctacggcataaatcttgccgaggacgggctgactctcacggccgtccaaaacggaggaacgcttcttgcgggaaaatacacccttgcgggcgacggcacggtaaattctcaaagctcaaacagcgctcaaagcgccgacggctctcagcccgagcaaaacgccgcagcgaacccgtcagcagtttcatcggctcccgataacggagcggctcttcaatcggctcaaaatccgtctttcgattggaaaacggtctacacggattatattcgttctttgggagactcgtggcaatatacccttatttatcttgacggcgacaacatacccgagctatatgttcaaggcgcaagcgaagcagacggttccaaaatctgcacggtttacggcggagagattgcaagtcgggaactcggaaccttcggcaattactatatccaaaagagcggactgattttgaccgcaggaggacacatgggttcctattacgacacggtctactgtttgcaaaacggcgattttatcaaaaaattcgacggtgcatacgaagtcgacgacaacacggtttattttgacgaaagcgattataaatataaaatcggcggggcaacggtgtccaaaagcgaatatgaccgtcaaaaaaacacggttttcaacgattattacgcaacaagcctcgacgcgtcgcttatgaatcgatctcaaattctcaattacattttatatatttagtttataacggtttcggccgttttaaaaaattcaaggaggaaaaggtatgaacaaaaaaacgttgttccaaaacattaccgcaattttcggggtggtcggaattttatcccttgtgctgccctactatgtcatttcggcgtcggcctcggcggcgggttcaagcggagaggcctccgaaacggtgaacggcataagctttataaccgacggcggcgcatggggatatatctttatgatatgtcttgccgcgatacttgttttcaactttttaaaacagcttgagcagtttaaaaagcttgtcaacataatcggctcggggcttatgattctttcgctcttttcggcgccgtcggcgatgtctgttatgggcgggcagtcggaatcggtatcggtcaacatttccgtcggacacggaataggcttttggcttgccctcatatgctcgctgggcattgcgggagttgcaattgtcaactttttaaatc

SEQ ID NO: 2627 - DNA, 6617 bp, Unknown
  16S sequences of unknown bacteria
gccaaatcctcgtttcggttgacggctgccggtcgctaaccgcctgcggcggttgtgcccactgggcacgcgcttcctctcgccgcccttaaccccggactgcgcgcctatggcgcgcagggtgctcgggggacatgctggttagccgtaaagctaccgccgctcggcgacaagcctcgcggctcgcgggtttggtgtggctccctgttagttgaatagaaaagaccgccattcggcaacgggcctcatggctcgcataaaaagccagcgtggatttgaaaccccgctggctttttgcgtttcaggaaactctaatacatgtcgaaatatccaaactgacattatttgagtacggtttatgccaaccacagaataaaaatcaagcctgtttttccgcgctgtgctatcatcccggtcgcaccgaagcatcccaagcatcgccgtttgagtttgcccagcgccacctgcggcgaaacagagcggcgataggcagcgaagggaaaaaggcccgcctattttgacggcggaaaaaggcgagcacgagcgcgctccaagagcaggtggaagctgcccaacttcattgcgcgcgacattgcgaccccgccgccaaaatgggcaatagaagcctttttcccggcgggtgagcgtagcgaactgtcccgaagggaagcgtggccccagtggggccttgggcgcagcccaaagcgacccgcagggagggtgggaggcgagcagagcgaccggcagggagctatgcgacaccggacaccccgtgctcgaggacagccccgaaggggctaccgcagaccgaagcttgggccgagagggagcgtgtgcccagtgggcacaactgccgaaggcagttagcgactgacaggcctgagcaaatacaagggccgggcacggcagtgcccggaacgccgatatttgcgaattacgcacagcggggcgggccgcctctgtagtcgccgtgccgctggctttcttttgcacacttttctttcgccaacgaaagaaaagtgtgaacgccccatagggctgcaagctctgctcccgcgccggagtcggcgcgtcagtcccccggcagggaaaaagtcttgcgcctgcgggcgcaccaaagggcttccctcggggcaaacaatcggcgcggttcgcactgccgtgcgctccgcttgttgtttgcctgaactccgggtcgctaaccgccttcggcggttgtatccactggatacccgcttcccttcgttcccctttggaaaccttcgggcaccaaagttggcaagaaaccggagggactgtaactatcgctctcgcggacaaatattcgctttttgaaaagaacaaaggggggctttcctcgaagtgcccctcactgccgtgagctccgctgtcagcgcttcaactgccacgcagtgcagaacccctcgccgaccggctgcgcaccagccctcaaaccccgtttttctccttcaccccgtccccgaacctgtccagcgccatcgccgccgcaaacccggccagcgcacaggccgcgcaggcgatcccctgcgatacgctgtcatagtgcaggggtacgatcatcagcgtagacgcgcacaccacgcccagaatcacgtgataaaccagtgcatagtgggtctccagcaggtggttcacaaaccgggcggtcagaagcgccgtcaagagaatgccacacagcagcggcagaatgcatccccactggatctgcacaagcgaaggaaaggccccgccctttcccagccagaaggcgaaaacatccttcacccacgtggcgatggaaccgatgcccgctgtcataggctcatacagccccatgaaaatcaggatggacgaggacgaaagtcccggcaaaaccagactcagcccccataccgccccgcagaagaaataccacccgctgtttggctgaatggccgcagcagaagaaaacttgaacaggctcaacaaccccagcaggatcacaaagctcaacacgaacgcccagccgcagcgggcgtttcgaccttttaaccccgcctcccgccagagagaagggatcgtacccaggatcaacccgaagaacagacaggtcacgatagccgaatctgccccgaaggccagctccaccaccttcgacagccctacaaacccaatggcgcagccgatcagtacgggaataaacagccggtagtactgccggaacgccttgcccggatgggatagaagcgccatcatgggctgatagatgccgaacagcacgcacatcacgccgccgctgacgccgggcaagattgcgcccacgccgatcagcgcgccatgcagcacgtgcatcagccattgaccggcgatcattttcgttgtttcgctggaatgagccattctttttttcctccttcattggcaaactgcccggtcatcatagcatacccgcggcagttttcccataagtccgtggaaaaacagacaggttcttaacctgtttcaaaattttatgaagataacgccgctttttctttgatgacccgtttatttacggtttcttcacaggtttgcagtgagttcttcatgcgggtcgtgtatgatagactgggaaagcgtatcggcgcgccgcctttttttcggctgccggaattatggaaggaaagagtggaacgcatggaaaacgcaaagaaaaagagcagaaagaaaaaagtgcttatttgggttctgatcgtcctgctggcgctggccgggggcgggtggtatgccatgaagcggatgagcgacgcgatgcagaccgccgccagcgctcagaatacctacaccgtggcccgcggcgacgtgtccgtcaccatcaccggcagcggcaagctggaaacgcccgatacggcggatgtgaccctgcccgtgggcgtgaaggtggataccctgtttgtgaaggagggcgattcggtcaaggcgggcgacgtgctggccgcgctggacggcgattccctgcagtaccgggcggcggagctgagctccgaactggctgcgctggatcagcagctgggctcccgcaaaacccgcagccgcatcactgccccggtggaaggccgcgtcaagtaccagcccgccgccgcgggagacgatgtgatcgaagccgtcaacgagtacggctgtctggcgatcctttccaccgacggcagtatggaggtgcgccttcagaccgacgcggctctgtccctgaacgacaaggtcactgtccagtgggacggcggctccgccgagggcacgctggtcaatcggttgggcggcggctggctggtaacgttcagcgacgaaaaggctccctatcaggaaacggcggaagtatattcggactccatgctgctgggcagcggagtcatggaaattcacgcgccgctggcgattttcggcaacggcggcaccatttccgaggtcagctacagcgtcaacacccgcgtctatgcgggcacgaccctctttacactggaaaacgagccggataccgacaactaccgcaaggcactttccgaccgcaacgaaaaggccgggcagctgcaggacatgctgattctccagaccagccgcaacgtggtcgccccggcggacggcacggtgcagctgatcggcgtggaggaaggcaaaaagaccgcctctgccgacggctccggcgatgtgaccgcctttacgctgggcagcggcggcgcggtcaagatgaccgtggaggtggatgagctggacgtggccaaggtgcaggtgggtcagagcgcggaggtcacgctggacgctttctccggggagaaattcgccgccgaggtcagccgcatttcccgcatcggcaagtcctccggcagtatcaccgtgtatgagacggacctgctgctgaccggggacgaccgtctgctggagggcatgaacggcaccgccgtgattctgtccgaacggaaggaaaacgtgctgctgatcccgctgggagccgtccacgaggacgaaaacggctcctatgtgaaccgggtcagtgcggacggctccacggaacgggccgccatcgaaacgggcctgtccgacggcagcaacgcggaagtcctttccggcctgaacgagggcgacgagatcgcctacacccccgcctccaaccggagaatgttcggcttcggccccatgagcggggcgggcttcggaggggtgcagccatgacggaaaacgtgcagacaaagcccgtcattgaaatgcgggatatcaccaaaatttatcacatcggcggcgaggaagtccgggcgctggatcacgccaccctgaccatccgggaaggggaatttgtggccatcatcggccccagcggcagcggcaagtcgacgctgatgaacatcatgggctgtctggacaccgccgacagcggcgaatacctgctggacggtcagcagatcgagcactattccgaggacgagctggcccgtatccgcaatcggaaaatcggcttcgtatttcagagctttaatctgctgcccaagatgaccgcccaggaaaacgtggagctgcctttgatctatcagggcgtgagcgcggcggagcggcggaagcgctcggccgaagtgctgcgccgggtggggctggaaagccgcgccgggcacaagccaacggagctttccggcggccagcagcagcgggtggccgtggcccgggcgctggcgacggagccggcgctgatcctggccgacgagcccaccggcaatctggactccaagaccggcaaagagatcatgagcctgttctgccagctgaacgaagcgggcaagaccattattctcattacccacagcgaagccgtggcccagcaggcccaccggcgcatccgcatcatggacggccatgtgcgggactgcggcgacgagaccgaccccttcggcactgccgaagtatcccccgaaaaggcaggtgaggacgcatgagcatccaatgcctgaaaatggcgtgggaatccatcaagagcaacaaaatgcgctcctttctgaccatgctgggcatcatcatcggcgtgaccgcgctggtgacgctggtctcgctggtgaatggcgccacaggagccatcaccagtcaggtggagtcgctgggcaacgacatgctgatggtcacggtcatggatgataaatccgcgcccctgcggctggaaaatctggaggagatcagcaggctggacggcgtgcgacaggcgtcccccagcggctccatgaacgcccgggccaagcgcggctccaccgagacctctgtcagcgtctacggcgtggtgcctgcttatgcggatattcagggtttggagctggatcgtggccgcttcctgaaaacggcggatgtggacaaccgctcctatgtggcggtgctgtcccacgatctgcacgagaccctcttcggggacgaggacgggctggatcagttcatcaccgtcggcgggcgcagcttccgggtggtgggcgtgctgaaggaaagcgactccatgatggtctccatgatgaacagcggcacgctgtatgtgcccttcacggtggaaagccgcatggcgggtcagccggacatcatgtccttctacgtttcctcctccggcagcaccgacgacgcggagactgccgtcaaccagtatctgctgcggcgcttccagcaggatgaggacgctttcagcatcctgaatatgtccagcgtttcctcggccatggataccatcaccggcaccctgtccctgctgcttggcggcattgcggccatttccctgctggtgggcggtatcggcattatgaatatcatgctggtctccgtcaccgagcgtacccgggagatcggcatccgcaaggccatcggggccagccggcgcagcatcatggcccagttcctgatcgaggccctgctcatcagcctgctagggtgcttcttcgggctggcgctttccggcggcatactggcccttgccaccgcgctgaacagcaccatcgttttcagcatgtcgccgtcggtggtgatcctggcggtggtgttttcctccggggtgggtctcattttcggcctgtacccggccaacaaggcggccaagaaacaccccatcgaggccctgcgctacgaagggtaagagtcaagcgggacgcggcgaaacgctgcgccccgttttttctgtcagcctggaagggaaacagacgggtttcggcgggaaggcaagctgggcaaatttgccgcccggcacaagtcccatccactggccgtaaggccctcctaaaagcttgccgcggcttctcaacgattcccccaaccccttcccatctttcaggcaaaacgtctttcggcgctctgctcagtatgtcaaaaaagtggaggtgcaggaggcactgctgccactcaatcgtcgcagggactactgccgtagtccctgctcgtttcgtgtcacacctgcgggtcgctaaccgcctacggcggttgtgcccactgggcgacggtgaacttttcaaattctatttgaaaagttcagtctgccaaaggcagaccgggttgcccgagggcaacccgccttgcgccttccctgcggtgcctgccgggtttttagggcggcgagaaggagcgggcatccagtggatgcaactgccgaaggcagt

SEQ ID NO: 2628 - DNA, 23098 bp, Unknown
  16S sequences of unknown bacteria
tgctgctgggcacgaagggcggcaagcactaattcgttaatagctttcgccctcaacgcggaagggctgaaatcctgtgggaaaattgtatgctcgaaacacttaatagcgtcttcaatcgtgacgttcgtcgcttcttcaatcgtcatcttcgtccgtctcctttcacgtcagcgcagccaaagcggcaccaggtcaagcctgggcttcccgtcgtcgtattttaatccgttcatagatttgtcctttctggtcaccatttacggtgtcctgcaccacttgatttttggtgatacgtcaatatttttgcgtccggccctgcaatcctttccaccggacgtgcgtgacacctcaaaccatccgtccgcttgatatatagtccccttatgtcccgcgccggtggacgaatacgcaaccagccctttgatttgcggataatgcttgcggatatattttctcgccattgccaacgcccggctttccgtatatggctccgtgtcgtctacgcagtacatccgcgttagacacaatacatttcgttgatcctgctttgggctgggatttctgccccacatcattccgccaatacgctgacttgtatcatcctggatttccatccggattattgctcctgctggcgcagagtgcaaataatgatgttctgctatccatttatcaagctctttgctgtgcacaatgttaattttcatcttttcctccatttctgtaggataccggtatcctctcctaccggcagctaccccggcgggtttatcgcgttactctgtctttcagtcgctgcttgcggcaatcgtcatagtgggcgcatacaaacgccccgcacgaaaaacatctgtttacatcagcaggtgtggcaacacgcagccaaaaacaatcgtccttgtgcttgcagttgccgcagtaatcctgccggtgacagctgctacatgtgcttaatgccatatcacttctcctccacggtgatttctgtccgcattttttcgcgcaccatccgcacaaaagcctcatcgtgcgtcattcgttcaatgcactgcacagccaacgcgaacaactgccgatagtcgagattctccgcatttagcccagccaatatcgcctttatgtcctgaccggttttcaggcaattgtcgctgtattccttgtacacggccatgtattgccggtgcgcctcggtaaactcctcatgtgcccggcgaatatcctgcttccgaatgcgaaccagcttgctgtccgcgccggtaagctcataatccgccttgagcttggctaaactctcatagcatagccgatccggcagcgactggaaaggcggcagcccttctccatgagcaaccaaatggtgaatctcctggaatgtcattcagccaccccccctcagatttcctcaaaatcggcatagcctgtcggcatgttttcccatccataccgcttagggcctccatcaaacccgctggcgcttgtaatccgcttggactttttgctgtagtacagctctaccggctcattcgctttcgtcagccgaccaaataaccgatttttggtcactgccagcaagctatcgcattccggcgatttatcatcggttttcttcccgtttcgggaatagaccagaaccgaatccacacggtttgtaatatccccgctgcccgctacgtcgtcgtttgtgaagccctctttgcttttgcgcgggtgtgccaccaatacaaccgcaatgtcgtatttcacagcgattttttttagtctcctcacaaactctgactgcgcctggtaaaggttatcggatatgcctgcgtccatggccgtcatcagattatccacacaaaccagcttaacgccatactgccggacaacctgctcgatggtatcggttaggttttccaactcattgccatccacggcgttgttgtcgtatatgtaggcccgcccgcgataccaggcgtttattttatccaacaccggatttgcgatgtgatatcgctcgtcatcgaacatatccaggtcggtcgtgatgttgtccggccccgccgcctggaaatccagccagcgcttgaaatggtaatcggccagctctccggaataggcaaacacgccatatccctggtggagcgcttccacaagaagctgagacataaaggtcgatttgccctcgccgcgtttgccggtaagaagcaccacctgtccgaaaaacaacccgccaataatcctgtccaactctggtatacctgtttgaatgcgcggcagcttgtatatatccaccgcctgaacgtccgccaattccttgacgtgagataccggcggggcctgggcgttttccaccgccttacgaaccgcacccgtcccatatttccgaagaatatcgttagcgtccttctccccaagataatctgccgcctgtaccgccttgactggattgggaagccgcttttgcaaggtatccagcagcgtaatctttccgccctcgcaatcgccgaatacaacgacctcctcaaactttacaatccagtcccacacattctccaaaaatgtgaaaccattgcagccgtttggaacgctgaccgcattgcttattccggcctcggccaccgacaggctgtcaatctgtccttccgttacaaccagtcgcccaaaatctacgcattgcgccatgccaaacaggataggctttgtgtctttctcgcaccactccttgttcttgtgcctggctttatcaaaatccgtccggcgatattttaaaaaccgcaggatgctgttctcgtcgtaaaacgggaaagccagaatatgctggtcatcctttacggtggtcactttatagcgttcggttaccgcctggctgattccgcgagaggccagatattcaaccgccggtttccgtatctcgaacgggcgctggggaagctgcctgtatacgcggcgcttggcatcgccaaaatccagggcgtagccaaagtctcgcgccatctctacaaagtgtccggactttccacaggtgcttcggaaacaatgaaaggtgccgttctccaaattcacggaaaaggtttcccggtcgtgaccgtctccgccgcagtatgggcaataccgaaagaacagttccccgcctttctcccgcacattggcgctcaacttggaggccagcccataaacgtcatccgccttgaacgcgtatcccactattcccgcatcctctcccagatggtcttctccggcgcggcagacgacggcgcagcagcgccggaagtcgtcgcgctttcttctttatcttcttggctttctttatctttcttatactgttgccctttgcttgccccttgattgcccgattccgtgcctttttgcgtgccctttttcgtgcccttcatttgatagttatcgtaatttgatattgaaaatacagtgaatttggggtatgcagttcgtgccacttcccctgtctgttcaaggtgctgcgaggctgtccgaatttccttaattgtgagatgtaactcttttgccaattttgagtaggaagaaacacgggaaccgcgcttaatatcaacgccgtgccagctatcgtcctcgatgctggcagtcaaaagcagatgaataaaaagccgcatagtgttcggctcatcataccattcccactttaaaatttttcgatgcaacttaataaatccgctctccagcattacagcgcccccttttctaacagtgccttgacctcatagcgcagtatccgggcaatcattttccctgtggtggtcgcccggcagaataccggcgtaagattgtatctggcgcaccatgccaaaagagaggcagccagagcgtccggtttcatccgacttctgtatgtcccctcatacaccttttcccacgtggcattttccaccagcaaatacaccttggccccgtcctctttggcccgcaggaattcccgctcaaagcgctgccggccggacgtaaagcacccgcacaattcatccaggttcatcttacgctccacgcataccttttgggccgcgctggcgggcgtcccgtccggctttatcacctcacaggaataatcgccataatccagcttgcaccgcctgaaagggcgttctagcccctccaggcgggcgcgcagagctgccgtatcctgttccctggtatctaccagcacggtcatgccggacaacatgcggtctatttcaaaatgtgagtatgtaggcatggcggcaccctacagcttgaaaggcagctcgtcatcgtccagaatttcttcaaaatccataccgctggttttcggcgccgctttttctgcaagcggtttactcttcggcattttaaaccggttttggcgcacatcgtcggcggtaatcatggtacagcattccgttgtccagccggaattcccgttcatttcccattccttgtcgcggaacagcgcgcccaccgttttccctttaagctgagtttcatcccaatcccaatgaaacccggggttgctgtcctcaaacgcaaaaataaccccgccgaattttttcttcgtccatccgtccatttcgctgccgtcgtccttcggctcgttcagacggaacttgccgcgccacttcttttcctcgttgggattattcttgtaatccgccgcaaaaaaaccggcataagcgccctcgataacatcaaaactgatttccagaacgtccccccaggtataatgctgctccgcaacatccagaacctttaccacatacccacctgccgggagaacctcccgcgccgcctgctttttcgcttcaaatccgctgaactttttcatggtctattcctccgtgtttttcaaattgtaatactcccgaatagccgtatccacggccttcaggtcgttgtctatataggtgtcttcaaataacccgataggcgttttcaccgtatcgctgccgctgttccgcgtggaaaagagataccggccatcctgtacgctggttttaagaacaaccgtgaacataccttctacggttattttttcatccagcaacttgccgatggtcttgaatttctcgttcccattggcgtcccgctcgatgtgcccgagaaaatacaccagcacatcctccggcagttcgtcgatcaccacgtgcaccagcgtccagaagtctaccgcgaattccgtaaacttttggtagccggtttctctggctctgcgcataaaagcattgctgagcaaatactggcagtcgtcgatcaccaatacctttttgaggctggccttgagggctttctcgatcttcaggtaatcgtcggatttaaaggtctcgatggagctgcggaagggcagcggcttgccgcagacattcacgacgcccacttcctccggcttaaagttccgcaggctcgcacttttgcccgtcccgctctcgccgagcaccaaaatggggatccccatgtgttccttcctctctggtctcaaaaataatcgggcatctctcgccgatgcaatgaaatggatccaatatccattcgcctgtaaggcggcaggaatatcgcttgaagttctcttcgtaccgtaaaaacagcgggcaccactgacagcacaccttatcctctggaaagtgtatatccaccacgacttgtccgttggtgtaaaacaaaaccgcattatacatcgtaggataccggcctctccaggcattcttcctcgctgtcccagataatccaatcatctgaatagaaccagtccagcatgtcccggtcaaattccgccagaaattcccggctgatattgtcccatccattggctgggtcaatacctatttggtcatacatcaggccgcgcgcgtcggcgtcgccatagatgtactttccgacgttcttcccgattccttcataaaccctattggtcgcgataaagcccatttgacaatccccatttccttttgtataataggggtgtacaatcggtacatcccctcatcacctgccgcctcgacgtgttccagcacgtccggcggctttctttatgcccccggctatcccgcacaacgctaaaccagtcccgcccatcagcagaatcggcaccggcttccactcggtagcgcaggcggccaagcaaaccaggccaatgccgacggtcagcaggatgccgcgtagaatttgcattatgttgcctccttcaaagcgtctaatattcgcatcaacaccagcggaacgctcagcggtatttctccgcgccggtatttaataagcagccgccggttgatggtatatgtccatcgatttttactttgctgtttggccgcgccgaacgggcaatcgccgtcctggcaccagagccttatgtattgcgctgtcggatcaccgccaaggaacgcggacgcttcgtcggggcggacctttggcagagacaataattcatcttcggtcaatttgattcacctccttgaacgcctccccaccgcgggcggctttttcatgctctgaccttggccagcgtagcaacgatgccttcatcttcgtacaccaggttaagaacccgccattttccgctggaaagcagttcgttgatttcagcctcaccgtgaaccgtgcgcaattcacggatgttctctagattcatgttttaacctccatttattgccttttattctgtcgcgtggtaaaattgtcgaagaaagggggtgaaatttatggctaattcaaaaatcgttacctatgatttgcgtgctcctggaaaaaactacaacggtctgtacgaaaaaataaagtcctatacagcatgggcgcatatccaggaatccgtatggtatatttccactccggatagttgcgtcagcgtacgagaccacttgaaaacagaaatcgacagcaacgattcactgtttgtagcagaactgacaggcagcgcggcatggacagggttaaacgataagacaggcgcatatctaaaagagcatctataattcctgcgaacagcacatggattcgttcgtgtgctgtttctttatccggatttccgtaacgttttcgtccaggcacgccttgatgacctttgctatttcatcggcagaaccaacggtttcaaaatttttcccgtaattctcggcatcaactgatatattcaccctcactcttttcacctcctccgccctatcacgagcttttccaatttgtgtgcatttcccacatcatgggataagtcctctttatcggacacctcctttgatagcctttgattatcatctcgacaaggagtgataattttgggaaaaagaattacccgtgcaccgtcaatctggattgttcaaaggattcgagatcctcttgccggattcggtagtcccgtcccaacttgatggcggtcaactttttcttgcggatccagtcccagacagttagaactttgacgccataccgctgtgccacctgctcgcacgtgtacatttcggacatactacacctcctctctttgtgcaccttgttagttgtgtttacttcggttttgtgatattatgaatttacgaggttcacaattcacaaaccagtgctagctatgttttacgaggtacattcataatatagcacggtttttcgagtgtgtcaatcaatttttagctctattatccgagctatagcataattggataaacacacaaaggtgggtgcaatattatgtatgaaatattcgaaaagcttttaatggagcgcggtgtgaccgcttataaagtggcaaaggcaaccggcatttctacaggatcgatgacagactggaaaaaaggcagaagtgcgccaaaagtagacaagcttcaaaaaatcgctgactacttcggcgtatccgtagactatctccttggcaacgaacctaaagaaaaaacgcccgccgaagcggacgttacctttgacgatttcacctatgccatgtatggcgaggccaaggaactcacggacgaagataaaaatatgctgctggaaatggcgcgtatgttaaagaaacggcagcaggaagggaaataggctgctgcccatgaatattgacgctctcatctctctgtataacgaattgcagagagatggcattcttgtctttgagtgttcccaaaaatcaactaaagctgtaacaattaggaatcaactcgggtgcggtatttttattgataccaatcatatcgaaaccgtagccgaagaactcagtgtcctggcccatgaatacggccactgtgccaccggggcaacccatgctgtatgtagcccgcttgacttgatagaaaagcacgaatacaaagcggacaagtttgcatcacacaggattctagacccagcggaaatgaagatggccatatctgaaggctacaccgaagtctggcaactggccgagcggttcggtgtcaccgaagattttatccgccgggcggattatatttataggtgtgaggggcttatagaataaaaaagaccgctccgagctgccactcgaaacggtcggcgtgaatagaacccacagggcgtgaattttctccacaactatattatacggaattgtcataatttgtcaattcctgtgcggaggagtagaaatgagtataggcaaaagcagcggagataccatagccgatataaaggatatggtagccaagtaccaaagtatcaagcagagcgaaacagaagcaaatgaacccatagagagcaaaattgcagaggataccggggcgcaagaagaatttaattcaaattcacaggacatctctgaagcacaaatgtatttaaactggcttaggcggcaaaaaatcaaatcagttgtgacgactatatttagcataattggaattatatccgggctaattggaactatattctttttttcggggaaccgtagtattacatacatatgtgcggctatcacattattggacagctttattcaggtgactattggcgaacagaaaaattttgcaacagaattagtcactgttattattgggctgatcgttggcttaattacaaatataggcatagctgacggaatatccatatcactatgtattggctgtttagctctcgcaatcttaggttggtctctacagttaattgcatatttgaagaacaagtaaaaagaccgcccaaggcccccacctcagacggtcagttcagaaaggagatagtcattcaggagcacaccacaaaaagaaatcacttaaaattataagctagcagcccacacgatgaatatgttgcgaaaaagcgtaaaaaataggaacatctatataattactcgaatatcattaataaaaaggcttgattttataaatgatattgttataattagtatacgcttataaaattaagccaaaacaaaccatacgctttttagggaggctagcaaatgaaatacgaaccgttgaataaaatttattataaagaccaggaaaactttgaaaaaatttatcaatccagactgaacggggactattcgataactttggatttttccatccatgacatgccagcatttttcgtgcaaactcctgatgtttccaggctgctactacaaatatataagatggaacgtaaaatatttgctcttcgctctgctctcccgggagtagcgttaaatcaatttacaaggcgttgtttaatcgatgaaattgttttaaccaacagcattgagggggtaaatagtaccaggagagatattagcgaaatattagatgatctcaaaaaagaggatagaaaaaaaagatttcgcggtttggtacaaaaatactcaatgcttcaagacaacacaaatatagcacttgcttcttgccaggatctccgcaatatttatgatgagcttgttcttgaggaggtacgtgaggaagatccgaaagatgttccagatggcgaaatttttaggaatggacctgtatatgtttactctggtacgcaaaaaacaatccatacgggaacttaccctgaatctgcaattatctgcgccgttgaaaaagctttgaattttttaaatgatgaaaatatagagattttaatccgcatatcaatatttcattatcttattggttatatacatcctttttataacggaaacggtaggctttcccgcttcgttagcagttatctgctctctagagatttagaaccattgttaagctatcgattgtcatatactataaaggaaaatataaaggaatactatgacgcttttaaaatatgtaacgataaaaagaaccgcggggatttaacaccattccttctaatgtttttaaatatcgtttatacagccaccaaccagttacacgaggctttgataaagcgatttaatagtctttctatgtatgctgatgttatgagtaaagtctcatatatttcaagtaacaacgaaatcgagaagcttggatatttgctcattcaagccgaacttttttctgaaaaaggtatatctacccaagaacttttagagtgtattcaagtttctagaatgacattgagtaatcgcctaaaaatttttagcgagcatcatcttctgctctgtgatagagatggaaagaaaaactactatcgtattaacttggaaaccctaatgcaactggctaaattaactgaataaaaaaccgccccactccgacggcaatcggaacgaggcgggcaccgtcggccagatggccatacagtgtggcaataaaccatccacattgtaccatctggccccgggaaaatcaagtcccgggcatttttatgcccaattttaagggggatggtatagaatggcgagaaaatccataaagcgcgagaatggcacaggctccgtgtacaaacgcaaagacttaaagcggaggccctgggtggcggtcgcaccggcggaattaatccgtgatgatgatgccaggaaagtcaacgccaagcagatgataatcggtcattatgccaccgcgcaagaggccaaagacgcgctggacgaatatagacgtaaccccaccaccaagtacaatattacgcttgcggaactgcgtgaggaatggatgcctgtatggtattccggtaaatccagtaagctgtgcgcgggttatgattcatcctggaagcatttggctcccctatacgataaaaaggtgcgtgaaatccgcaccgccgaaatgcaatctatcattgacgggcttcaaaaagaacgaactgtaaggcgctataaccgggatataaccgttcccgctatgacatactctggtttatcgaaaataaaaatattgcttggcttattatataactacgccatgcaaaacgatatagttaacaagaactacgctcagtttctaatcctacctaagaacatcaaatcggctaaggattgcttcaacgatttggagttggagaaaatccgcaaggctgtgggaacaattccatatgccgactggattctggtgatgatttataccggattccgtatatccgaattcctcggcctaacaccagccagcgtccgcgaagtagatgggaacaaggtcctcattggcggtatgaaaacagaagccggaaaaaacagaaccgttccaatacacccgcgcatcgctgatatcgtcagcgcccaagtcaaaaaagacgggaaaacgcttttttgccgcgatgacggtacaccgatgccccaaaaatatttccgcgaaaaatgctatattccagcgttaaattcaattggtgttcgtccattaaatccacacgcaacgcggcgcacattctctacaatgatgtccgctgcgggtgtgcgagaggaagatatgattgctttaatgggccacgccgatttttctgtagatgtagaccactacataaggcaatctgcgaagaccttatcagaggctataaacaagattggatagaggcaaaaacccgtagtaaccccgtagtaacgtccatctcaaaccttgccagacaacaaaaaatatatagaaagcaaaacgcctgcaaacccgcatgaatacagggtttacaggcgttttgctcatggagctggtggacggattcgaacccccgacctgctgattacaaatcagctgctctaccggctgagctacaccagcgagtgaaacgagatggtttagcgtcgccggcagagccctctacacggctgagctacaccagcgagtgcatataacagaaagcatatggaaatttgatacatgggcggcgaaaagggggcacattttttcgcgttcttccgcacagaatcgcggaaaaccgttccagcttgtgcgccggaacggttattactatagcatatccgcactttttctgtcaagccttttccatctcgggcgcggcggcgttccggcggccggtgtggacgatgggcttccaatccgtccggggatggaggagggccgccacggccatccagcccatggggatgaggaagaccgggaacagcagaatccccctgccgtagattttcagcggcttatgctcgagcaggacggtcagcagagccagcagcgtcataaacacccagccgccggcgaacgacgccaggcaccagacgatccgcgccccgagggcggcgggggtgaaggccatggccagcaggccgaaaagacccgacaccaccagcagcgtgcaggccggggccgccagcagatacgccgtcatatccacggcggccgcgaggcggggcccgtcccctttttggcgatgaaacagggatttcaggcaggcgggcaggtagcgcatgcattggacgctgcccaccagccagcggaaccgctgccggaaggagacggcccaggttgtcggctgttcgtcataaaaaaccgcgcgataggccggcacgatctgccggccggccagtatctgctgcagggaaaactcgctgtcctccccgagggtctgggtatgccagccgttctgggcgatgcacgaccagcggaaggcgaagccggtgccgcccaccaggcagggcaggccgctgttataccgcgcccggtggaaaaaccgcatgagcagcagccagtacaccgcgtagcaggagctgacggcggattcgtcgggattggtggaatcccggtagccctgcgtcacatcggcgccggtgcacagcacgtcgttcaccgcggccaggaacccaggatccaccagattatcggcgtcgaaaaccgccgccgcatcgaaccgatccccataatcctcccgcagcttgtcaaaggcccaggacagggcgcagcccttccccacccgctgcgcgtcctcccgctcgtacacaagcgcgccgtggcgggcggcctcggcggcggtgccgtcggtgcagttgtccgcgacgacaaacacgctgaagcagtcgcggggataccgctgggccatgaggctgtcgatgagggagccgatcaccgcctgctcattgcgggcgcagacgaccacagcgaagcgcagacgccgctcctcccggacgggacgggccagcatgggaaacaggccgcgcaggccccgcagcaggtgccacagggcgacgggggccgcgagcaccgtcaggcccgccgcaatccaccagcatatctgtccgaacagctccattccgcgccctcccaaaaaaccgcatgttgaccacttccccataaaaaaggcggaccgtataccgccgcggggaatggccccgtatggatctagtataccagtctagtcccagaaagcgccaccaaaatttgcgatcttttttcttaacgaattcttaaatcgtgcaatttttggaaatctgcacaaatgtccggacagaaaacagacttagggggccgcgcgggtgatgagggtggcggacaggccctcccccacgggatcggacacgctgaaggccagccgggtgctgccgacggaaccgtcggcataggtcagctccacctggatttccaccccgttcaggagacggcggaaggcctcctccacctcctcttcggaagcgtcccgccgggcggtcagcgacagctggaggctcagctgcttatgggccatgagctgattttcataggcaaagcggatcgcatcgcccaagggcgcgtagccccacgccccggagggggtgcggttgaccacatccaccacctgggcaaacgcctccaggtcggccgggtggctcaccgacagccgcctttcgaaccagccagtattggtccggtaggacaccgcacagatcgcctccccctcgcacaccacctcaaagggcaggtggattttatacagggagagatcgccgtccagggcggttttgccgatcatgctggccaggccgcagtcgacggcgggcaggttgaccgcctcgttgggggacaacacctgcgcctgggaggcggaggaggccgatcccgccgggctgtaggccttcatgacaaagccggtggcttcaaaggttccgcccggctcccccggcagggaggcctccgggccgcccggcagccggccgggcgaaagcagcagcgccagcaccgccgccgcggccgacacccccgccgcgccggcccccagggccgcggccaagctgcggcattcccgtttgggcagggcggccttttcccggcccggctcgtccgcccgggcgagcaccgcgtccagcaccgcgggcgtttcggcctccaccgcccggcggagggcctcattcagttcttcgtttgcagccatagcggatgttcctcctttcccgccggttcctccgtgtcctccagatgacgcttaagcttcttcatggcgttgctgtacttccagcggacggtggcatagggcttttccagcacggcggcgatctccttgtgggaatagccgcccacggcgaacagcatcaccacctgccgctccgtttcgtccagatagcgcagcagggcctcgagcaccagcctgtccagcaccggcgccgcctcgtcggagccggtcaggctctccgcccagtcgcccagctccgccgaccgccggcgggtgcgcagcagcatcaaggcgagattccgggtgattttcagcacccaggccctggcgtcggtaccgggccggtactgcccggcgcagtcccacacccgcagaaaggtgttctgcatcacgtcctccgcgtcgtcccgcacccgcaggatggacagcgccagaccgtacaccggggctttcagccggtcgtacaggcacgcgaaggcggccctgtccccggcggagacggcggccatccagccgtcgaaaagctgcctatccccctgtgtttcctccacgtccgccgcctccttaccttattatcagtacaatgccgcaagcccgtcgattgttggctgtgaggcaaaattattttcaacgcgcggcccccagttgacgggctgaaaaacgccaacggcgtttttccgcgggggggtatcccccctgatccgctgcacggtttctttcctctgtgggggggtgaaaaacgccaacggcgtttttccgcggggggtatcccccctgatccgctgcacggtttctttcctctgtgggggggtgaaaaacgccaacggcgtttttctgcggggggtatccccccgtcatactatattaacatatttcacccggaaaagcgctataataaagccctaacgtgccgccctcgagcggctgagaggtgacaacaatgggacattttgtggaattccaggatgtgtgcaagtattacaccatgggggaacagcggatcaccgccgccgatcatattaccttcaccatcgagcagggggagttcaccgtcatcgtgggaccgagcggcgcgggaaaaaccacggtgctgaacatgctaggcgggatggacacctgcgacgaggggagcatccggctggacggccgggaaatcagccggtataaccgccggcagctcaccgaataccgccggtacgacgtggggtttgtgttccagttctacaacctggtgcagaacctgacggcgctggaaaacgtggagctggcggcggaaatctgccgggagccgctggacgcccgggaaaccctggcccacgtggggctggaggaccggctgaacaacttccccgcccagctgtccggcggggagcagcagcgggtctctatcgcccgggccctggccaagaacccgaaaattctgctgtgcgacgagcccaccggcgcgctggactacaagaccggcaagaccatcctccagctgctgcaggacacctgccggaacaccgggcggacggtcattgtcatcacccacaaccaggccctgaccgccatggccgaccgcgtcatccgcatcaaaaacggaacggtgctctccaacgagacgaaccccgatccgacgccggtggaaaggattgagtggtaggcttgaaacggacatatcgcaaggtcatcctccgggaggtgcggttcagcctcagccgcttcctggcgatatttgccatcgtggcgctgggggtgggctttctggccgggctgctggccgccacgcccgacatgcgcctgtcggtggacgattactatgaccgcatgaacatcatggacgtccgggtgctgtccaccctggggctgtcggaggaggacatcgccgccatccggcaggccgacggggtggagcaggtggagcccggctacaccgccgacgtgctgaccaacgccatggacgccgaggacgtggtgacccgggtgcacagcctgcccgccggaggatccgccctcaaccagatcaagctggtggccggccggctgccggaaaagccgggcgagtgcgtgatgctgaaaaccaagaccctgaccggcgtggaggagggggacgtcatccccctgtcggcggagaacgacgatttgaccgacgtgctggccgtggagggcttcacggtggtggggctggtggaaaccccgtattacatgtccattgagaaggaaaccagcaccgtgggcgccggccacgtgcagctgaccctgtacgccggcgaagacagcttcgcctaccctgcctacaccgaggccaacgtgttggtcaagggcgcgaaggcgctcaacgccttcaccgacgagtacgaggccgctgtggacacggtgcagaacgccctggaggacctggggaaaacccaggcggtcgtccgctttgaggaggtcaagggcgaggcggaggacaagctggccgacggcaaggaagaatacgacaaagccaaggcagaggcggatgagaagctggccgacgcccggggggagctggacgacggacggcgggagctggccgacggcgaaaaggccctggccgacgccaagaaaaagctgagcgacggcgaaaaagaactaacagacgggaaagccgccctggccgaggcgaagcggaagctggccgacggcgagaaggaactggcggatcaaagagcggcctacgccgccgaaattgctgacaaggaaaaggccctgcgggagggcgaagacaagctgaccgcaggaaaggcggccctggccgacgcgaagaaaacactggacgagaccgccgcgcaaatcgcccaggcggagaaaaccatcgcctatctgctttccatcggccagacggagcaggcagcggccctccaggcccagctggacgagcagcgccctgcctatgaggcggggctggcggcatacgaccagcaggccgggacgttggcggccagcgagaaggagctgaccgccgggaaggccgccctggccgccgggaaggcccaggcggagaaggcctttgcggcggcgcagaaggagctggacgacggggcggcggagattgcccggaacgagaaaaagctggccgacgcccagaaggagctggacgacgggcgggcggaaatcgcggccaacgagaaaaagctgaccgacgcccggcaaaagctgaccgacggacaggcggaatacgacaaggccaaggcggaggcggacgaaaagctggccgacgcgaaggccgacatcgaggacgccgagaagaaaatcgcggatatcagcgagccggagtggtacgtgctggaccgaaacaccaacgtcagcttcgcgagcttcggcagcaacgccaccaaggtggaggccatcgccaaggtgttccccatcttcttcttcctggtggcggccctggtggcgctgaccaccatgacccggatggtggaggaggagcgcacccaaatcggcgtgctcaaggccctgggctacacccggggggccatcgcctttaaatacctgctgtacgcgggcgcggccagcgtcctgggcagcgtgttcggcctgctggtggggttccaggtcttccccatggtcatctggaacgcctaccgcatcctgtacaccctgccggagctgttcacccccttcaacgtgccctacgccctggccgcctccctgtcggccatcgcgtgcaccatgctggccaccctggccgcctgcatggagtccctgaaggagaacccggcgcggctgatgctgccccgggcgcccaaggcgggcaagcgggtgttcctggagcggatcacccctctgtggtcccggatgaaattcacccacaaggtcacggcccgcaacctcatccgctacaagaagcggttcttcatgacggtcatcggcatcgcgggctgcaccgccctgctgctcaccggcttcggcctgcgggattccatcggggacatcgtgggcaagcagttcggcgagctgtaccaatacaacctgacggccagcttcaaggacgaggacgcgccccgcgcggacgagaccgtgaaggcggtgctcgaggacaagagccgggtgaccgactacctgatgacctaccaggaaagcggcgatctctacgcggggaacaagacgacggaagccaccctgtacgtgccggagagcaccagccgcctgcccgatttcatcgtgatgcgggagaggaaaagcggcaaggccgtgccttttgacggcagcggggtgctgctgaccgagaagcaggcggaggctctgggcgtgaaggcgggcgacaccctccgggtgcggaacgccgacggcaaaagcggggaattccgcctcgccgggataatcgagaactatgtccagggggcgctgtatatcccgcgagagctgtacgaggcggccttcggtgcgccggcgttcaccaccctcatcggccggacggcgggaaacacccaggccgaccgggacgcggtatccgccgcgctgctcaagtccgaccaggtgcagagcgccatgttcaccgacgacatcaagggctctttcgcggacatggtgagcaacatcgactacatcgtcatcgtgctgatcatctcggcggcggcgctggcctttgtggtgctgtacaacctgaccaacatcaacatcaccgagaggcagaaggagctggccaccatcaaggtgctgggcttctacgacaaggaggtgtcggcctatatctaccgcgagacggcgatactgagtatcatcggcacactcgcggggctggtgctcggcatcttcctgcatgccttcgtggtcaagacggcggaggtggacatggtgatgttcggccgggaaatcaaatggctgagctatctgctggccgcggccatgaccatgttcttctccttcctggtcaatctggtgatgggccggaagatgaagaaaatcgacatggtggaatccatgaaagcgggcgaataggataaaaaggcgcgtatggcaggagccatacgcgcctttttgttggggggggattttgggctcgccgtatgccgagaggatgggccggttggagggctgttccgcgggcgagcgatgcttgcctctacaggaaggcgtcgaattggacagacaggccctgccaggggcctaccgcttggccatggccaagaaggcctgatgcaccgccgggttgcccgacagctcggggtggaaggccacgccgatttgattttgataccgcaccccgacggggcggccgtccagggaggcgaaaacctgcgccccctcccccacccggatgataccgggggcgcggatgaagaccagcgggtaggcgccgacgtccgccacctcgcccatagcggtgaagctgcccagctgccggccatagacgttgcggctcacggcggcgggcagggtggcgagatggggggcctccccgcccggcagctcctcggccaggagaatgaggcccgcgcaggtgcccagcaccggcaggccctgccggatccgctcccgcagcggctccagcagctccaaatcccgcagcagggcgcccatcaccgtgctttccccgccggggagaatcaggccgtcgaagggggcggcgatgtcctcccggttccgaatttcaaagcaagaaacgccgagggagcgcagcatatgctcgtgctcgataaacgcgccctgcaccgccaatacgccgatgcgcatcatttgccgcgctccgccatgaggagggtgatctcctgctcgttgatgccgaccatggcctcgcccagatcctccgacagcgcggcgatgagcttggcgtcggtgtagttggtgacggcccggacaatggcggcggcccgcttcgccgggttgcccgacttgaagatgccggagccgacgaacacaccttcggcgcccagctgcatcatcagggccgcgtcggccggggtggcgacgccgccggcggcgaagttgaccaccgggagcttttgatgctcatggacgtaccgcaccaggtcgtagggcacctccagctccttggcggcggtatacagctcatcctcccgcagggcggccaggcgggcgatttcgccggtcattttccgcatatggcgcacggcctgcaccacgtcgccggtgcctggctcccctttggtgcggatcatggacgcgccctccgcgatgcggcgcagggcctcccccaaatccttcgccccgcagacgaaggggacgcggaaggcggttttgtcgatgtgataccgatcgtccgccggggagagcacctcgctctcgtccacgcagtcgatttcgatggcctcgagcacctgggcctccgcgaaatggccgatgcggcattttgccatgaccgggatggacacggcctgctggatgcccttgatcattttgggatcgctcatgcgggacacgccgcccgccgcccggatatccgccgggatgcgttcgagcgccatgaccgcgcaggcaccggcggcttcggcgattttggcctgctccggggtggtgacatccataatgaccccgcccttgagcatctggcagaattgtctgttcagttccacgcgattgttttccatacaaatcggtcctttctggggccgagccgccgcggcgggcggaaacgacccatacaatttataacattttcagtttatcattgcaattgtatggaatcaatcgtataattgtcatgcatacaattttctaggagggatggcggatgccggtcaattcctttgacgattaccccatggcgtggaagccggacaaggcccggctggccgcgccgttttaccaatccatcgccggggcgctggaggaggacatcctgtcgggggcgctgcccgccgacacccggctgccgccccagcgggagctggcggattttctggacgtgaacctgagcaccatcacccgggcctacaaggtctgcgagctcaaggggctgctgtacgcggtggtggggcggggcaccttcgtcgcccccaacgcccgcaccaagaacctgccctttcacgagaaggcgccggaggcgttcatcgagctggggatgatcaagccgttctatcaggtgaacgccgccatcctggaggcggcgcgggcggtgctggagaggccggaggccacccggctgctggaatacgggcaggcggcggggaattcccaccagctgacggcggccgaggtttggctgcgccgcttccatgtgcaggcgcggccggacaatctgctgatcgcggcaggctctcagaacgcgctggccatctcgctgatttccctgttcaaggcgggggacaaaatcgcggtggatccctatacctatcccaacttcatcgggctggccagctttctgcacatccagctggtggcggtggagggggacgaggacggtatgaagccgcaggcgctggacacgctctgccggcagagcgggataagcggggtgtacctcatgccgtcgtgcagcaatcccatgggaatcgtcatgcccatggagcggcgggaggcgctggcccgggtgattgagcggcatgggctgatcctggtggaggacgacgcttacgcgttcctgctgccccgggagttccggccgctggccgcggccatccccgaccggacggtttacatctgcggcacctccaagtcgctgtgcgccgggctgcgggtggcgttcctggcgtttcccgaggcgttccgcgcccatctggcctccggggtgaccaccatcaatctaaagaccgtgtccttcaacgcggagatcatcgcccagcttatcctggacgggcgggcggaggaaattgtggagaggaaaaaggcgctggccgccgaacgggccgcggtgtaccggcgggtgttcccccacgatgacgggcggcccgcgtttttcaagtggctgcccctgccggaggggatggacggggatcgcctcgagcaggcggcgcgggagcgcggggtgcacctgctcgcctcccgccggttcgcggtgggggccaggcggccggaggcgttcgcgcgcctggccatatcctccccgcaaagcgaggaggagctgagccgggggctgcggacggtcaaggagctgatcgaggagggtgccggggcgcggggaggcctggatattctggtataacccgagaaatacggggctggcgcgacggtcgagccgcgaaaacagccggttttcttgacaggccggaaaccgggaggctacaatgagggcatcccaaaacggaaggacgatcgccatggaaaccaccactggtctgaacaagcagaccttcgccgccttcatcgccgccaagcgcaaggcggccggtatgacccaggaggagctggcccggcagctgtacgtcacccacaccaccgtttccaaatgggagcggggggtatcacttagataaagataccacaccaatcccacgctggcttttgctcaaccgatacagccggagggctggataacaagaaaaggcggtatgcg

SEQ ID NO: 2629 - DNA, 32759 bp, Unknown
  16S sequences of unknown bacteria
gtttttgggaataatatttatttttgtctatcgttgttctaacctaattttacattgggcgaaaactcgataggtattgaggtttctgttggaagacttttcgaaagcaaaatcatatttccattgggccaccgcgttctcgattatcgtcggtgacctcgatcttctatttaagcagaagcttaatctgaatatgacccaagcgtgcgtcgtcacagtcatcgcatcccatcaaggtgggatcccaatgaccgacctcgctcatgaatcccacctcaagtcaaacacgtgcactgcagcagtcaagcacctcgacgataagagctacatcagacgcagctcgaccgactctgacaagcgcaaggtgatcatctttctcaccccggctggcgacaaggcctttcagaaaatcatgggcgtggtgaaaatctatctcgaccatatccatggcattcttacaaaagatgagctgaaacgtcttcaatacccggtcgtcagctactcagagtacatgaagctctcaggtttcgaagaacccttcgccaccgaagcttcttgtctgattaccgctcgcttcatcattattgcgatgtcgcgctgctgcaaggaattgggccttaccttcaatgaggcccgtcttctctgctaccttgagtacgcaacaaagggaaagcacctgagcgatatcagcaaagaactcagcattcgccaaaacatcctcacgctttgcacagacaagctcgaaggcaaaaagctcgtaaagcgcaatgtcgacaaagacgaccatcgtgccacgaacatcaagatgctgaaagaaggtcatcggctcgcttctcaagttgctgagaacattgagcgttacgtcaagaccaatgacttgaaaatggatgaggaaccgcctgaaggtatcaagcagttcctcatcaagagaattaacgaatcttaagttacatgaccttcagcagatcgtagattctctgaaggtcatcttcgtctctgaactcaatctcaatcttattcttaccacccgtggtctttacacgcacaggtgtatctagttgcttcttgagttctttggcaacgaccttatacgagcgaggcaacggtacccgtttagctctctctatttctccattgccaattaaccgggcaatattctctgcttcacgtaccgaaaggttttctttttcgattttctcagcaagcgcgatacgcttttcttcatcaggtatggaaagaatcgcacgggcgtgtccagcactgagttttccgtcataaatcattgcttgtacgacttcaggcagatcaagcagtctgagagagtttgaaattgtagaacgtgatttcgaaacggcctccgctacctcagcgtgtgtgagtccaccagccttcataagctctttatacccgcgagcctcttcaattgcatttagatcacttcgctgcagattttcaatcagagcaacacgaagcgttttttcgtcatccatatctacaacacgggctggcacttgttccacacctgcaatcttgcaagcttgccacctgcgttctccggctattatctgatacttgccctgccaggggcgcacgaggatgggttgtaacaaaccctcttttttaatcgaatctgctagatcggccaattcgtcttcattaaagttcgttcttggttgattggggtttggaacaatctcagcaagggagatctcatcttgacttccgctggttccggattcgatcgttgcatcagctatcagcgcatttaagcctttgcccaaaccgccttttgtttttctcgccataactcccccactgctatttgttcagcttgttataacgtttgatagcttcttttgccaaatctctgtaagctaccgcacctttgccatttgggtcatattcagtaatcggttggccgaatccaggtgcttctgagattctcaccgtgcgtggaatccttgttttaaagactttctcgccaaagaacgactcgacttcatctgcaacctgctttgccaatgaagttctgctgtcgaacatcgtaattacgacaccaaagatctcgaggtttgggttgagccttttcttgaccatgtttgttgagtcgataattttcgacaacccttcaagcgcatagaactcacactgtatcgggataataagctgatcggctgctgtcagggcatttactgtgagcattcccaaagaaggtggacaatcgattaacacataatcgaagtattcccgaacctcatcgattgcttcttttaaacgcgattctcgagcaattacctgtaccagctcagcttctgcacctgcaagcttgattgtggctggaatgagccatacgttttcagtttcaacttcaactacaacctgctccgcactcacatcgtcgtttagcagacaatcgtaggaacagtattcgcagtttgtcttatcaaatccgaggccacttgttgagttaccttgaggatcgaggtctaccaagagtactttgttacccttctcgcctaatgccgcagcaaggttcactgaggttgtcgacttccctactccgcctttttgattgattattgcgagaacgatgccgggtttacttggatttttacgtttcttcttcttgtaatccacttgattcctcacagaaactttgacgcttaagagctcaatctctttacttcgaacattttttcacagatagatttgtgttaccagatatatttgtttcacgtgcaatatttcttgttctgatgttctcagtctacatgcatagctcaattccttcttgtttcacgtggaacaactatattgctctcttctttttagcaacctggtaggtttcacgtggaacattcgcttgaattgtatatgtatttagctaacagtgttgtttcacgtgaaacaacactgttagctaaacatgtatatcagaactcgcaacaacctaattggggtactggattgatgcaccgttcaaaactgtattgctgtttgctataaggagtagccatcagtcttatgttctataaatatgtgacgtaagaactgaaaggtgacaacaagaacgcttgatcttccgaagcgtttgcttagacgcattttatatcatcactgtcttaatccagaaatttggaaaccacagaagagcgatgcctttgaaacagtaagtcatatcgttctcatcagatttgatccttgagctgtgaaatgcatgcatcaccgtgaaattaccttggatagttccatcacagtaatccgttaccagtatctccctagcttgacctgaataattattcttcacatcaaatcatagctctcacacttgcttatcaacagcatgaagacagcagtttacaaaactacttcttttatctcattacaggataatgtttcacatgaaacattcataagttaaaaagaatccactgactgaattccatggttcgtggatttcagtcagtggaaaatgtctaagagttgaattgttaataccccaagggcttcttatgagccatgccagggcgacggggcagcttaattgaaggagagccattcttttcaaacacatacacacttcgagcaacctcatctggaccaagggagaacgctcgcttttcaatcatctgtaaaccaagttgttcagatgcgatttgagcagctttctcatcttctaaagactctgtgcccctcattgcaatcagatgcccaccagaagctaatagcggacttgcatattcctcgacaacactcaacttgtccacggcacgagcaacaactgtatcaaactctccaaagcgctcggcacaaagctcttcactcctcattccaagagcctgaacttgccccgtaagacttaactcttcaacgaactcctgcacggccagtgcttttttcttgaccgaatcgagaagaatgcccttgcgccctgaagcgatggcgagtggcaggccgggaaaccctcccccggtacctatgtcgcaaaattcccccgagctgtgcatgaattctggatatatcgagagggaatcttcaagatgtagaacgaccgcatcttcaaatgaatcaatgcgcgtcaagttaagaactttgttcttctcgataaccagcttcaaattggtgatgagtttgtctgtaatgtcttcgttgaaatcaagtttcaaacgaagaagggccgcatcaacagcggccctctcttctgaaatgtgtttcatagttccttcggtagtttaaatggggcgtacaaccacatacctgttgggctcttctcctacagaatacgtttccacgcgctcgtcgtcacgcaatgccatatgaaccaggcgacgctcatacgggttcataggccgcaggcttatctcgcgcgactgacggtcggcacgagaagctgcggaatatgcaagcgactcgatcttctgacgctgacgatgcttgtagctttcgatatcgatggtgaccggataacggtatccgagcttgcgatgcgtgatagaagagacgacggtctggagagcctcgagcgtgtgcccgcgacgcccaatgagtaccgcaaggtctccacctaccacatcgaggatgatctcgtcctcgtcgccttcgtactcgttgatttctgcaccctgtgcattgaagtatttgagtaccgactggagcgcctcgattgccgcgtcggcaacctcgtcaagctgctcttcggtaacttcgttcgaggcttcttgttcctcgacagccgcgttcgtgtcgagctgctcttcagcagcatcctctactggttcgatttcttcttcgctcatggcattccttttgaaacgtaggggttccaaacagacaaagcagcccggagcaggatgccccgggcattattctctataaagtctaatgctttttgcgcggacgctttttgtgctcgcgcctctcgacatgcacctcgaccggtttgatgaccttctcttcggccttctcgtcatcatccttgagcttgcggtttgtgatgagctgctggaagaagccgaaggcagaagacagcgcccaatagagcatgacgcctgcaggcgagatgaatgccatccaaatgaacatgatgcccatcacgccgagcatcatgccggtctgcgacctgttctgctcgttctggcgcagctgcaagatcataggcgcaatggagaagccgatgaacagcagcatctggagaatatacggaacggcatacatggcgcccacagcccatgcgtccccaacggtctgagtcaggttgggcaggatatggtagaacgtgacgcccaggtcctcagatgcgaagtcgccgatcttccagcgcagcacctggaacaggatgatgaagataggcatctggatgagcatgggaaggcagccagcgagcgggttgaagcccgtctcctggtagattttcatcgtctcttcttgaatcttctgctggtcacctgcgtacagggtctgaatctcctgcagtttgggctgcaccttctgcatgtcgtagctcgatttgaactgcttgcgctgcagcgggaagagggcgagccgaatgacgagggtcacgatgataatcgcgaggccccagtcaccaaccaggtgcgcgagctgagctaacagccacgcacagccatttagaatgctatcccacatatgttggtaatcctctcaacgatggatataacgtcaaataccgtctagggaactgggtcgtacccgcctggatgccagggatgacacctgcagattcttttgatcgcaagccaggaccctttgatgaagccgtatttctgaagagcaatcatagcgtattcggaacaggtgggcacataccggcatgtcggtggaaacagcggcgacacgtatgaccgatagaacctcacgagcgcgagggccaccgtacgtggcgcatctttcaggtttgccacacgcccctgcgccatcagagcaccccctgctcttcgagcattttcctgaactgcgtcacgaccgcatcatgtggggcatagctcaccctgcgacgcgcgatgaacaccacgtcgtagccgctccacggagccccgagctcttgggcaaccgcccgcatgacgcgcttgcaccggcttctgaccggagccacgccaagcttttttccggcgataaacgcacagcgcccccgctgatttgcctcgccggggagcaccagcatgctcgccatagacgaagaagagcgccttccactgcggaataggcgctctacttcggatttagactttatcgtgcccttcaaaagtactcgatccccaacgaatcaagctcaggtacgttagacagtcagcttcttgcggcccttggcacgacgagccttgagcactttgcgaccgcccttggtagccatacgggcgcggaatccatggcactttgcgcgcttgcgcttgttaggttgatacgtacgtttcattgcatttcctcctaggggaaattccccttcatctacagacaagccttagcattctaatatgcggcttcgaattgagtcaacagataaatcaggagaccggagtttctcatcgctctccactaaaaagtgcgaaaattgtggaaaaagtggaaaacacgggaaataccgcaggtacacagtggaaaactttgtgcacgaagcggcgcgtctgggcggataactgacagcatataaacagacgttcctcatttccgcaggtcaacggcttgcaattactatttccacaaacattcggccaatcagaaccctgtggatttccactttcacccgaacaagttttcgccttgattttccattttccatgttgcatggaagcggttttccaagggacttttcaccgacttggggaaaacactggcttttccacatttttcccaacccacgaaaactttttccacggctatgacctttgcttttccacattcccttcagttttcaagcggttttttaccgttttccaccgtgtttttcccacttttcgacgagttttcaacacacgtggaaaataatgtggataactttgaaaagccaaggtcaaatgctgttttcactttccactttttcacttttcactttgggaataaatgggattttgctaccctacagacacggcaactgttaatttgtttgtggataactcggttttttcacgttgaggatgaaaaggggtatttgaacatggccgacgaagacaggggagatgcgctgctcgtccccacgcggatcgccgtctacgacgatcttctcgcggctccgcgcatcgtcgacatcgagccgagcgacatcgcaagctatatagagcacattgcggcaaagacctacgagctcgcgcaggcgcaggggagcagcatcccctacacggtgatccgcgaggtgtgcgagaacttcatccacgccaagttcatggagccctgcgtctccatcctcgaccatggcaacacgatcaggttcaccgaccaggggccgggcatcgacgacaaggaacgcgcccagcaacccggcttcacctcggccacgtccgagatgcgcaaatatatacgcggtgttggatcggggcttccgcaggtgagggaatacctcaagttctcgaacgggcgcctcatcatcgaggacaacatcaaggcgggcaccgtcgtcaccatcaccgtcgacgacacgctccacaagccgacgcccgtcgtgtaccgcgagaccccctcggaagccgcgcagcgccaggcgcagcaggaggccaagctcgacgagcgcgaaaacgacatcctcatcttggcaagcgacatcggcctcatcggcccgaccgaggtcaaccagcaacttggcatcagcatctccaccgcccaccgcgagctgaagaagctggaagacgcagggtacctcatgaccgccgaaggctcgcgcaagcgcatgctgagcgacaagggcttcaaacttctgaacggacaggtgtagtcacatggacaaagacgagatctggaaagccgcgctgacgctgcttctgagcggagtcagcgaagatgaccccaagcgggttttcctcaacctcatcacgcccatcggcatcttcggcgaccagttcgtcttcaccgcgcaaagcgcgcaggtggagtcgtgggtgaagaagaactacctgaaagagatggaagagaagctcgagatgctcgccggcacccacctgaacgtgggtatcgggacgactggcggccccgcgcccgaagcgcatcccgagcagcaggccgccgccgttgcgccggcgccgatgcaacaggctgccgcagctccgagctttccggtcgtgcaggctccacagcccgagcccaagcagccagactggatgaacgagttcgtgaaccccgcggaccttcccggcgccgcatccaatacggcacccgccgccgacgagacgggggcatccttgacctgtccatgaccgccgccgacgagacggtggtgcgcgcacgctcttccataagcggcgacgaggcgctgttctccaagtgcacgttcgacacctttgtcgtgggcaagtccaacgagttcgcgcgcggcgcggcgctcgccgtggccgagcagccgggcatcgcctacaacccgctgttcatctatggcaactccggcttgggaaagacccacctgctcgtggccatcgccaactacgcaatcaagaaccatccggagctcacgacgcactacgtgtcggcaaaccagttcctcgacgacttcgtcgaggcggtgcagacggcgcgctgggcaaagttcaacgacaagtaccaccgcgtcgacatactgctcgtcgacgacgtgcagtaccttgcgggcaaggacgagagcatcaaccagctgttcaacatcttcaacgagatggtcaaccagaacaagcagatcgtgctctccgcagaccgtgcgcccaaggacatcgagatggacgaccgcatgcgtagccgcttcatgtcggggcttttggcagacgtcaagccgcccgactacgagacgcgcctggctatccttaaaaaccacctctcgcgcgcacagcacaccaacttctacggtgacattcccgatgacgtcctgtcgtacctcgccgaggcttcgacctcgaacatccgcgagatggaaggggctgtgaacaggctcgtcagcaacatgacgctgctgcgcaagagcacgatcaccatcgacgaggcaaaggaccttctgcaggacttcttcccggacacggcaaaccgccaggtcagcatcgcgaccatccaaaacgaggtcgagctgttctttgggatcagccacgaggacatgatctcctccaagcgctcgaagggcatcaccacgccgcgccacatcgccatctacctcgcgcgttttctgacggaggagtcgctcgagtcgatcggcaagaagttcggcggcagggaccacaccaccatcatgcacagcgtgaacaagatagagaacgaccagaaggacaaccgggtgcttttcgaccaaatagagcagctaaccattagaatcagggagcgcagctagaccgtggcgagcctgtgggcaaacacggtgaaaagcggtgcaaaacctgttgaggcgttcttgacaactggaggcacggcaaaagtcggtggaaagcgagggatggttttcaacaggtccgaagcgttactacaagctccctacctgcggtattgcaagttatgcacatatacacctgtgttattactattactaaatgtatataaatattttattcatatatataggagcgtgaaaagcagtgaagttcaacatagccaaggatgacctcctgtctgcactcaccaacgtttccaagggaatgtcatctcgctcgacgctccccattctctcgggaatcctcatcgagaccacggatgaggggaccctcgtcttccagaccaccgacctcgagatctcgatcaggcacaccatccccgccgacatcgttgaaggcggaaggtgcgtcgtcccgggcaagctgttctcggacatcgtcaagaacctgcccgacgccgccatcagcgtgacgtcgcaggcagagcagacgctcatctcgtgcctcgacacctcgttcacgctctcgtcgctcaacccggcagacttcccgtacttccccgaagtcgacgccgacaccaccatcaagctgcccaccaagcagctcgccgacgccgtgaagaaggtagggcgcgccgtgtcccgcgacgagtcgcgcgccgtgctcatgggcatcctgttctccgtcgaaggtggaaacgcgcgccttgcctcgaccgattcctaccgcctggcggttgccgacatgaagggcatcggcgagctttccgaggtggaggatttccaggccatcatcccgggcaagatattcgaagacgtctccaagctcgcgactgtcgtcgacgagctctccatcgggttctcggacaaccagatcgtgtttgaattcggcaatacggtgttcgtcagcagaaagatcgagggaagctatcccaactacaagaggctcatcccctccgagcacgaggttgccatcaaggtgaactcggcggcgctcaccaccgccatcaagcgcgtctcgcttctggcccaggcgcacacgcccatcaagttctcgttctcggcactcgagcagacggtcaccgtctcggcgaagacccaggacgtgggcggtgcgaccgagaccgtcgaggcgtcggttgacgggcccgacatcgacatcgcgttcaaccatcaatacgtgctcgacggcctgggcgccgttggcgacgaggcgctcatcgagctgcagacgagcgtgaagcccggcatcttcaagaacgcgtccgacgactcgtttttgtacctcgcgatgcccgtgcgcctcagctagcccaagacgtggcgcatctgaatgacactgcacatcgataggctcgtcctcgacgagtttcggggatacacccacttcgagctcgacggcatcgcaaggctcaccatccttgccggcgagaacgccgtcggtaagacgaacgtggtcgagggcatccagcttctgaccatgggggagtcgttcagacggccgtcgtggtccgagaccatctcgtggggcagcgacgccgcccggctgtacgcgcgcttctgcgacgagaagcgctgcgtggaacacgtcctcaagatcgcgggaaacgagcgggtctacgaggtcaacggcaagaagaagacggccgcgggcgtgcgcgggacgtttccgtgcgtgctgttcatcccggacgacctgcagatggtgaaggccgcgtcggcgaagcgccgcgacgcgctcgacctgctcggcgcgcagctttccaagaactacgcatcgctcaagaacgactaccagcaggccctgcggcagcgcaacctgctcatccgcgacgagctggcgtttggcccgctgttcgagagctggaacgagagcctcgcgctcaacggcgcgcgcctgctcgccaaccgctggaggctgttcgagcggctggccgcccacatggcgcagatctacgctgctgtggtgccgggcgagcggctcgatgcggtatatctgccctcgtggagtcgcttcgacgcgaacggccgccagctcggcgacgcctccaccctgaaagaggcgccggaggcgatgctcggtcccgtcgacgagatgcagcgggagatcttggatttcgcgcacgcgtttggcgacgtggagctgcgccgcaagacctcgctggtcggtccgcacaaagacgaggtggcgtttttcatcaacggccgaaacgcgcgtctgttcgcctcgcagggacagcagcgcaccatcgtgttgtgctggaagctcgccgaggtcgaggtcgtgcgtgacgtgctgggggtcgagccgctgctcttactcgacgatgtaatgagcgagctcgacgagcgtcaccgattcgccctgaccgagttcatcgaccgctccgtgcagacgttcgtgaccacgacgaacctggggtacttctcggacgagctgctcgagcgcgccaacatcgtccacgtgccggtcgagggcacgaagcattcatattgatgggcaatcgtgctatatatcaaggtgaggacagaccacaccgcgagcacgacagccgatacgaaccaacgacgggtgggaccatggacgatttcgacttgggcagcgaaatacacaagctcgtctcgaagctgcagggcggagaccccgcgcacctcgccacggcgcgcgtgaagacggcctggaaccgcgcggtccccgcaagcatcgccaaacacgtgacgggcgtgttcgtcgttcccgagacgcaggcgcaggaggtcatcgtctacgtggacagccagctcgtggcaaccgacctcacgatgcaggcagacccgctgcgcatggcgctcaacgtcgaggtaaacaagatgcgcggcggggcctacgagcaggcgctcgcccgcggggccacgctctccgaagtcgagcaggtcaagtgccttcggttccgcgtgacgcgcgaccgctacctcagcaagaaccggcgcgagacgacgtttgacgcccttgaggcggagcaggccaagttcgccgcggtcgagcccgtcgccttgggcgaagaggagctcaacgacctgcgcgaggcggtgtcgcatatcgaggacgaccgcctgagggaggccgcctacaacgcggcggtcgccaacctcgaatggcaaaaagggctcgcggcggcgcatctcgacgagtaagatacggtgcccagcgcgcgatgaggccgtcaaatcgcgctcagccttaaattacgctgaaaagcggttgggtataaggaacgtgtgtaaaaacgccttacaggcgaaataaatggctcgtttttgcacaagcgacccaagatgaaatacaatacagggtgcacattcttgtgcatttcgatggaagcgcggtgttcgtcacgcgcttcgttcaatgttaggagtcaaattgcccaatagtagcagctacgatgctggggacattcagattctcgaaggtctcgagcatgtgcgcaagcgccccggtatgtacatcggctctaccggtccgcgcggcctgcaccacctggtctacgaggttgtcgacaactccgtggacgaggccctcgcaggctactgcaccaaaatcgaagcagtgataaacaaagacggctctttcacgtgcatagacaacggccgcggcatcccggtcggaaagcaccccaagcgcaagaacatgtcctcgctcgaggtcgtcttgacgattctcaacgcgggcggcaagttcggcggcaacggctacaaggtgtccggtggcctgcacggcgtcggcgtctcgtgcgtcaacgcgctttccacaaagctcgtcgcgcaggtcaagcgcgatggcggcatcttcgagatggagttctcgcgcggcaagaccacgaagaagatcgagcagatcggcaagtcgcaggcgacgggcactaccatcacgttctggcccgaccccgagatcttcacgacggtcgagttcgactgggacacactcgtcaaccacttccgccagacggcgtttctcaacaagaacctcaagatcacgttccgcgacgagcgcggtgacgagcccaaggaagaggtcttccagtacaagggcggcatcgtcgacttcgtcaagtacgtcaacaacggcaaagaggcgctcaacgcccgccccatctacttcgaggcatccaacgaggtaggcgaggtcgaggtcgcgatgcagtggaactcgagctacacggaaaacgtgcgctcgttcgccaacaacatcgacacgaccgaaggcggcacgcacctcgagggcttccgcaacgcgctgacgcgcaccatgaacgagtacgcgcgcaagcagaacatcctgaaggagaaagacgacaacctctccggcgacgactgccgtgagggcctgggcgcgatcatcagcgtccgcctgcacgagccgcagttcgagggccagaccaagacgaagctcggcaatcccgagattcgcggccttgtccaaggtgcggtcatgcaggggctttctgagtacttcgaggagcatcccaagcccgcacgccagatcatcaacaaggcggttcaagccggaaaggcgcgtgcggcggcccgcaaagcacgcgacctgacgcgccgcaagggcgcgctggaaggcgccgggcttcccggcaagctcgccgactgctccgtcaaggacccggccctcaccgagctctacatcgtcgagggcgactccgcaggcggctcggccaagcaggcgcgcgagcgcagctaccaggccatcctgcccctgcgaggcaagatcttgaacgtcgagcgcgcgggcctgcaccgctcgctttcgtccgacaccatcaactcgctgatcaccgccatcggcacgggcatcggcgacgagttcgatgccgacaaggcgcgctaccaccgcatcatcatcatgaccgatgccgatgtcgacggcgcacacatcgccatcttgctgctcacgttcttcttccgcttcatgcccgagctcatcacgcgcggctacatctacatcgcgtgcccgccgctctacggcctgaagaagaagaactcgcgcagtggcaagatcctgcagtacctctacaacgacgaggcgctcaaggagaccatggccaacctcgaaaaccccgagaagttcgacgtccagcgctacaagggcctgggcgagatggatcccgaacagctgtgggagaccacgatggaccccgagacgcgcacgctgcgtcaggtctccatcaacgactcgaccgaggtcgagcgcgtcgtctccgagctcatgggaaccgatgtcgactgccgccgcactttcatccaagagcacgcgaaagacatcgacgagcgattcttggacatctagaaagggcaccatatggcagaagataaagacaaggtgaacggccagtacgtcgacgacgacggccaggttcacaacaacttcgacgatatcgtcgagcagggcgacgacaaggaggccatcccggacttcgaggacaccgccgacggctttggcggcgacctcgacgaggcgcccaagcacgtcgtcgtgcgcgatgacgtcgaatccaagctgacgggcggcatcggcacgctcgacatcaacgtgggcaagatctccgatacggactttgcaaacgagatgcgcacgtcgtttctggagtactcgatgtcggtcatcgtcgcccgcgccctgccggacgtgcgcgacggcctgaagcccgtgcaccgtcgcatcctgtactcgatgtacgatgcgaacatcacgcccaacaaaccgcatgtcaagtcggctcgttccgtcggcgactgcatgggtaagtatcacccccacggagatgcggccatctacgacaccatggttcgcatggcgcaggacttcagcatgcgcgtcccgctgatcgacgggcatggcaacttcggctccgtcgacggcgatgccgccgcggcaatgcgctacaccgaggcgcgtctggacaagcaggcgatggagcttctggccgacctcgacaaggagacggtcgactggcagcccaactacgacgaatcgctgcaagagcccaaggtcctgccggcgcgtttccccaacctgctcgtcaacggctctgccggcatcgccgtcggcatggccaccaacatcccgccgcataacctgggcgagtccatcgacgcggccatcgcggtcatggaagaccccgacatcgagctcgacgagctcatgaagatcatcccagggcccgacttcccgacgggtgcgacgatcatgggacgccagggtatccgcgatgcgtattcgacgggccgtggctccatcaccatccgctgcaaggcgcatgtcgagaagagcagctccgggcgcaaccgcatcgtcgtcaccgagattccctaccaggtcaacaaggcacgcctcatcgagaagatcgccgatctggtgcgtcagaagaccatcaccgagatttcgggcctcaacgacgaatccgaccgcaagggcatgcgcatcgtcatcgacctcaagcgcggcgaggagccgcaggtcgtgctcaacaagctgtacaagcacacccagctgcagacgggctttggcatcatcaacatcgccctggtcgacggcgtgccgcgcgtgctgtccctcaaagagatcctcacgcactacatcgagcaccagatggacgtcatcacgaggcgcacacagtttgacctgcgcaaagccgaggaacgtgcccatatcctcgagggcctcgtcatcgcgctcgacaacatcgacgaggtcatccgcatcatccgcaattccatggacgacgatgcggcgcgcgccgagttgatggagcgcttctcgctgtccgaagtgcaggccaatcacatcctcgacatgcgcctgcgccgactgaccggattggaacgcgagaagatcgagaccgagttggccgagctgcgcgagcggatcgcctacttcaaggaaatcctcgccgaccccgagaaggtcaagggcgtcatcaaagacgagatgctcgagatcaaacgccgtttcgccgacaagcgccgtaccgacatctccgacgaggcgcgcgacctcgacatcgaggacatgatcgccgatgaggacatggtcgtcaccattacgcgcgcaggctacgtgaagcgcctgcccgttgccacctaccgccagcagaagcgtggcggcaagggtatgagcggtgtcaagctcaaggaaaacgacttcgtcgaacagctcttcgtggcctcgacgcacgactacatgatgttcttcacgaacaagggcaaggtctaccgcctcaaggtgcaccagcttcctctgggctcgcgccaggcgcgcggtaccttcatcggcaacctgctcccgctcgaacagggcgagcgcgtcgcgacggttatcaacacgcgcgagttccccgacgacgagttcctcttgttcgcgacgggtcatggcatgatcaagaagactgcgttctcggcatacaagaacgtgcgctcgagcggcttgatcgcaatcaacctcaaagatggtgacgagctcatcgccgtgcgccgtgtgcgcccgggccaaaaggtcatgctcgtcacgagtgccggcaaggccatcaagtgggacgaggaagaggcgcgtgccatgggccgcgacacttcgggcgtgaagggcatcaagatcgacgccgaagacggcgtccgcgtgctcggcatggagattgcctccgacgatgatgacctgttcgtcatcaccgagaaaggctacggcaagcgcacgaaggtgagcgagtatccgacgcagcaccgcggtggccagggtgtcggcaccatcaagatgaccgcgaagaagggcctgctcgcggccatgaaggtcattaacgagaagcacgagctcatgatcgtgtccgaagagggcgtcatgattcgcgtcaaggcagcagacatttccgagctcggacgtgctacccagggcgtcaaggtcatgaacgtcggcgatgaggacaagattgttgcgattgcgcgcgtggcgggcaacaagaagaaaaagaagaacaaagacctcatcgagggacaggaatctctgctcaccgaggagatttcggggcccatgggctccacgtcggcgccagacgtcgacgacgaggaagacgatgacgatatgatcgacaccaccgactagcggcggcgattgatcgtttcgatggtttggggcgctcctgttgtggggtgccccaaattttttgaaaaaagagcaaaacctacttgcaatcaacatgaaatctggcaaaatactttcttgcgtgtttgagggcctttagctcagttggctagagcgcacgactgataatcgtgaggtcagaagttcgaatcttctaaggcccaccaagtttttggaaataagcgccccagcgtgggccgagtcgccgctggggcgcttattaatactccgagaaaatgggaaccgcatgggggtatagctcagctgggagagcgcgggctttgcaagcctgaggccaggggttcgagcccccttacctccaccaatgcatctgatgagccgctgattccagcggctttttttatgacactgccacctctcccgtgcggaagacgcgaaatgagtggcactgccacgtttcccacgcgggatgcatgagatgagtggcactgccacggttttcgcgcgcttcacctgggacgtgtggcactgccacgatatttttgcacgtggctggcgcccaactcctgacgttgcgtttataatcaccacgatattcgtatagacatgatagaggtgcggacttcatcagtagcatcggcacatcccgcgatgagggacgatgcaaaaggggagcgccgccgaagggacgaggaacatcatcgaggttccccgttcctggggtgcgagacaacatctcgcgcactgtcgcttccaagcggagagctatcgtggtcatcagctcgtctgacacggccatgatggaatcatggtctagtggttgttaggagagctatggaaatcataggcaccttttgggcgctcatacccccaatcgtcgcaattgtgctggccctggtcagcaaagagacctacacgtctttgttcgtcggcatcttggtcggcgcgatcttgctcgccgttgcggcaggcgaccccgtcgacacgatgaacttcatcatcagcgggcaggtgttcagccccgaggcatatctggacggcacggttcccacgcttgtcgcgcctgcggagatacccgctgaatatgccgacgtcgacgttatcaacgtcggtctgatcaatgcgctgtccggttctgccggcatcttcgtgttcctcgtcatcctcggagtcatcgtcgcgctcatcaacgcggcgggcgtgtccgcggcgtttggcgagtgggcagccaagcacgtcaagtcgcgcatcggcgcgcagctcgcggcgtttctgctgggcgtcctcatcttcatcgacgattacttcaactgcctgacggtcggcgcggtcatgcgccccgtcaccgatgcagagaagatctcgcgcgccaagctgtcctacatcatcgacgcaaccgctgcccccatctgcatgatcgccccgatttcgtcgtgggcagcggcagtatcggatacggcggacggtcttaacacgggcatctccggcattcagctgttcatcaacgccatccccttcaatttctactcgttactgacgatcgtcttcatcatcgggctggtcattatgggatttgactacggccccatggcaaagtccgagctcgcggcgtaccgtgatggcgaactggggtcgctcgctcccgagaagaaggtcgtcaacgagaaggcgcgcgtcgtcgacatgatcatcccgatcgtcgttttgatcgtgacctgcgtgttcggcatgatgtacgtgggcggtttcttcgaggtcggcggcgactactacatggacctggccggtgcgtttggcaacaccgatgcgggcactgcgcttccgtggggttccatcatcgcgcttgtgttcacgttcctgtactacctgatccgcggaactctcaagttccccgacgccgcggtgagctttacggaaggcttcaaggccatggttcccgccatgctcatcctcgtctttgccctcacgttgaagtctctgacctccgcgctgggtgcggccctgttcgtgagcacggcgctttccggcgccgcggatgcgctgtacatgatgctgccggcgattatcttcctggtggcgctcggcctcgccttcgcgacgggcacctcgtggggtaccttcggcatcctcatcccgattgtcgtcgcggtgttccccgtcgactcgcaactcctcatcatcggcatctcggcatgcctggccggcgcggtgtgcggcgatcacatcagcccaatctccgatacgacggtcatggcgtctgccggtgcgaacgtcaaccacatcgagcatgtgaagacgcagatgccctacgcgcttacggtcgcgggtgtctcgtttgtgatgttcatcgttgccggaatcgtccagaactggatgatttgcctgcccatcggtgttgtcttgaccatcgccgtgctgttcgtgctgcgcaacaccgtcggcaaaaagtcgattgaggaccgcagagcagctaccacggcataatatgggtagagcatccgtctgagtgaagggacttgagagcatgcaaaagccgattctgtactactggggtccgtgtcccacctgcgccatgtcggtcgagttcgcggagaaaaacggcatcgagctggacaagcgcgacgtcgagcagcaagctccgttcgatgagctgacggcgctcggcggagacgccaaccagattccgtacctgtacgacaacgggcagctcatacagggcgtccaggcaatcaacgaatatctcgcctcgacgtacgtcaaataggcgcaaggaaaaccagttacacgaggggagggccatggcaggtgctgtggcccttcttgtttgcgcggacaatcgtgaaggttgcgcgaagacacggacgcgcccgtggaaagcaaacgccgaccgctacaatggacgccatgcgaaacgacaagagatatcaaaccgacgacaatcccatcgactggagctccttcgacgaatcgtccctgcaggacggccccgtcgatggcagcatgcagctcagaatcgtgagcatcgtcctgctcgttttgggcattgccgccctcatcgttggagtgaacggctttggtgcccagctcgagcaaatgaacggcgcccctacgttctcgtatgcgctcatcgacccgttgctgctcgccggtgcgggtttgctcacgctcgtgcccgcgtgctttggcctgcagacggcctcgacggcggtctcgttcgtcgcgccgaccgtgctcggcctcatcggcatcgtcttcatggtgatcatgaccggtgtcgagctcttcatgtctttgatgggatctggcgggagcatggtcccctggattgtcggcatcgtgctgtccattgtgtacctctactttgtcgtgcgtgttcacaaggcggcaaacgacctggggcgtgccaagcgccggccgaccaaagaagagctttgggatgagaaaaacatctggaagtaattcagtaacaacaaattgacttgctgtttttacgtcgtgctcatgcagatgggcgcggcgtttttactgtatgtggaaacaatttgttgacataggagttatctcaacctaacatgctgtttgctatagctaactaatgtagacgtggctaatatatgctgcaacgaatgtgtttgggggatctatgacactcaacgatgttgctcccggcgaatcctgtcgtgtgctcaagctcaacgacaccggacagacgcgtcggagaatcatggacatgggaatcacgcgcggaaccgagatctcggtccgcaaggttgctccgctcaacgacccgatcgacttgcgcgtgcgcgggtaccacctgtctttgcgccgttcggactgcaagggcatcgaagtcgagaaaatcggatagcactttcaccagcactgctgcaaaggcgtgtacgcacgccttttcttattcccttaaagttagttgaatcacacttaatgagaggtgacaaactaaatgtcggtatctattgcactcgtcggaaacccgaactcgggcaagacgacgctgttcaaccagctcacgggcaatcatcagtatgtgggaaattggccgggcgttaccgtggaaaagaagacgggcaccctccgtggcgatagggacgtggaatttgtcgacctccctggtatttactcgctctctccctactccaacgaggaaatcatcgcgcgaaactttctctcgagcggaaacccagatgccatcgtcaacattgtcgacgcgtccaatttggagcgcaatctgtacctgacgacgcagctcatggagtttggggtcccgatggtcgtcgcgctcaatcagatggacgtcgtcaagaagcgcggtataaagatcaagaccgatgagcttgcacgcagactcaacgtgcccgtcgtcgagatatcggcgctacgcggcgacggcatcgagcacctggcagataaggcagttgacacggcgcggaaaaaacgtgtagcggcccccattatcttcgacccggaagtagaggagtgcctcacgcaaatcgaggcactgcttcccgcgacgattccggagcgcctgcgccgctttcatgctatcaaggtcttcgagcgtgacgaatacgaagtcgtcgaccacggcatgcgcaaaagctgcgaggaattcatcgcgaaggtagaggccgacctcgatgatagctccgatgccatcatcaccaacgagcgctaccgctacattacgagctttattggcgatgtgcagaagaagaccctcaagggtctgacggtttccgagaagatcgaccgcgtcgtgaccaatcgtattgcggcgctgcccatcttcgtcgcagtcatcgccctcgtgtactacctctccatctcgacggtgggcacgtacttcaccgactggatcaacgacggcgtgttcggagacggctggtacgttgcctcgcagggacgtgaagcctacgacgaggcttccgacgaatatacgggtgcgcaaaacgatatcgacgcgtatctgacggcggcgtccgagtcaggggtctccaccgacgatatctctgagtacgtcggtgcagacaaggcggaggatgctgacctcgaaagcgacgaggggcaggctgcgctcgccgcattcaacgaggaagcgcaggctgctggcgtcgtcggcaccacgcatgtcgtcgatgaggactcgggcgaagctgatgagcacgaggttaccagcgagatgttcaacgacgcgctcgcggtggcagagcctgatcccgccgcattcgggccttgggttcctggcattcccgtcctcgtgcagggtggactcgatgccatcgaggcgcctgcctggctgtctgacctcgtcttgagcggcatcgtcgccggcgttggcgcggtacttggcttcctgccgcagattatggtgctgttcttcctgctcgccatcctcgagggatgcgggtacatggcgcgcgtcacgttcatcctcgacaggatgttccgcaggttcggcctgtcgggcaagacgttcatcccgatgctcgtgggcacgggctgcggcgttcccggcatcatggcgtctcgtaccatcgaatccgaatcttcacgccgcctgacggtcatgacgacgacgttcatgccctgctcggcaaagcttccggccatcgctctcatcacgacggcgttcttcgggggcgcctggtgggttgcgccgtcggcttatttcctcggcattgcttcgattatcgtgtccggcatcatgctgaaaaagaccaagccgtttaggggcgagacgacgccctacatcatggaactgccggaataccgtctgccgcgcttcgttgacctgctgcgcagcatgtgggaacgcgcctgggcatttgtgaagaaggcgggcaccatcatcttgctggcgacgattatcgtctggtacttctcgacctacggtatcgtcgatggcgcatacgtcgcggtcgagagcatggatcaatcgttcctcgctgcgttcggcaatgcaatcgcctggatcttcgcgccgcttggctggggcacctgggaaggcgccgcggctgcagtcaccggcctcatggcaaaggagaacctggttagcaccatggcggttctctacagcggaaaccccgatgtcgcttggaccacaacgttcctgcaggggctcgatgcatacacgggcggtttcgcgctgagcgctggattctcgttcctcgtcttcaacctgctgtgcgctccgtgcttcgccgcgattggcgccgtcaagcgcgagatgggcgggttcaacaagtggttctgggctgctatcggctacgaaaccgggtttgcctgggtcgtcgcgctgatgttctacaacttcagccgcgttgccgccggtggtgcacttgacctgtggttctgggttgccgtcatcgccgcagccgtgatgctgttcatgctgttccgcccggctcccaaagatggggcggaagacggcaaggctgtcgacgataagcttgttgccgacgccgcgtaagaagcgtttattcccgtgcaccgcgcgtgaaatgagtggcactgccaccatttccgtgcggtgtgcagcagattgagtggcactgccacgattcctgtgcaccctgcgcccctcatgcgagagatgcgtggcactgccactgtttttatgcgatagacgcaaggtgcgtggcactgccacgattcctgtgcaccctgcgcccctcatgcgcgagatgagtggtgctgccaccgtttacgcgcagcagacgcgagatgtcacaagtcaatgaggagtcgtgggcatcatctcattttatggggtgcgccctttcctatcatcggcacaaaacaagtgggcgctccagtttactgaagcgcccactaatatatagggttgattgctttgattatttctgaggcttgatggttggtacgacagcgttgtgagatgctgcagctgaggcacagccgttacgcttggagcagcccgagcaggcggagaaggagacggtgaaatcatcgtcgccggtatcacaacacgatccgactttagatttttcaccctttttcttgaagccaccgaagaaatataccttgatggcgatgactgcccaggcaatgatgacggcgagcagtatccagcttccgatgctcattcccgctatttgaggcatagtgcacacctcttcctcttgataagttatatataactaaatatgttatctataactaactaattgtcaagtgcaatgttcatcacggcaagcgatgcagacagcttgcacgaaaaggacgggtaggagcgccccccctcgtgtcaaaatcaggattggatgaaatcggcgaactgggtgacgagggggcgtgtgtcgttcttcttccagaggaacagacaggtcagtctgtcggggctttcgaagggacggtatatgacccccggagcctcgcgcacgagatcctcggttacgcaggtaatgcagtccatgtacttgagcacctcgaaaatcgcacccccgtgtatgacaaagcgcatcttgggttgaatgggaaggcgcgcaaactcgcgcagcgtcagagacgagataggcgagggctgacgtatgggaaagatgaactcctcgccgcgcacgtcttccatcgtaagggatgtcttttcggcaagatggtgtcctgcgcgcatcgcgatgaactcgcgcatcgtcgtgacgatgtgcatgttcagggatgccgggacgatgccaatgtctgtggtgagcagaaacgcacagtcgatgtttccggcgagcaggttctcgacaagcagctcgtcgtcgttctcgacaatgccaaaatcgggcgacggatccacctcctcgtgaaattgagcgagcagctttgcggatgcgctcgtctgcgtgaggtggttgaagcctatgcgcaggcggttgctcttgcgaagcgtgcgccccttgagcgcgttcatcccgtcacgttgcgcattgatcgcgcgctgagcataggggagaaacgcacggccgtcttcggtcagcgagacatggcgcgagttacgttcgaacagctgcgtttcaagttctttttcgagtgcctgcacgcggcgcgaaataacagactgattgacgaatagagcgtctgccgcctgggtaaaactcccgctatccgcaacggcgacaaaggcctgaagactctcgatgagcatgaagacgctccaaacaattaattatagcgaaatacatgaatagattatacccttgtttatctgcatcaatgcttttttgcatacgaacacacagatgcgcaatggtcattttgtgaatgggggcgtataaacccacctggcacaaatcacatgtgagcttgtaaatgtacagggattttcgactacgaaggagttttctcgtggcagaagaaaagaagcacctcagcgccaaggcgtggggcaagagcatctggtacggctttatcgccggcatgatttccggcatggtcaagatcggttgggagaacatcttccccccgcgcaccccggcccgcaacgcaatcaatccgccgcagcacatggcacagcagctcggcttccccgatgacgtcatcttcagcaccgtctactacaacgggcagcctgttatgccgttcacgctgctgctgcacttcagctttgcaatcgtgttctccattctgttcatccttctcatccagaagtggaagcaggtcggcatggcccagggtgctgtctacggcctcatcatctgggttgcctggcacgtcatcctgatgcccctgttcggcacggttcccgctccgtgggaccagcccttcgaggagcacttcagcgagattctcggccacgtcgtgtgggcctggtcgattgccgcaactgcgttcttcctgatcaagcatcagaaggtcaacacgctcacctacctcgagtaatacggttccaagtgtcgcggtccgagcaaaaaggggctgcgcaccgcacctgacaagcacctccaaaacaaaccgggtgcgccgctccctcatgggagatggcgtacccggtttctttttgcgctgtggccttggcgccttgcgataaactcagacccatgttcagaaacgccgagtaatgggagaaccatggcaatcgaagatcttccgcaaaccgtcacctggaacccaactgcgcccgcgtgggttccctctcagttcaccgctacgggtgccgatgggggcgccgcgcatctcacgctcatcgaccagcgcaagctgccccacgacctggaatatctcgactgctttaccgccaagcaggtatgcgacgccatcgccgacttggccgtgcgcggtgctccggctctcggcgtgtccggcgcatttgccgtcgtgctctgggcgaaaaacgagtggcccatcgagtgggcacaaaaagacgccgccaccaagaaagtcatgctcgaacgcgaggcgttcatcccggcgctcaaaaaggtcgtgaagaaggtctcgaacgtgcgtcccactgccgtgaacctctcgtggggtgccaagcagatgctcgaattcgcccaagcgggctttgccgcaaacgcaaccatgccgcagatcgtcgaggcaatcgagcatcgcgcaatcgagatcgccgaagaagacaagcagatgtcgattgccatcggcgagaacggcgccaagctcctcgcagagatatccaagcggaagggccgcaagctacgtgtcgagacgcactgcaacgccggttcgctcgcgacggtgcaccgtgggacggcaacggcggtgatctacaaggccttcgaggaagggctcatcgagaaggtgtgggtcgatgagacgcgccctgtggaccagggcgcacgcctcacggcatgggaaatgggccgcgccggcgtcccctacacgcttatctgcgacgatatggcgggtgcgctcatgaagaagggcgaggtcgacgccgtgatagtcggtgccgaccgcatctgcgccaacggcgatgtcgccaacaagatcggcacgtaccagcttgctgtgctggctcaataccacgacgtgcccttctttgttgcggcaccgcgcacgacgttcgactactcgctcgactcgggcgaccagattgagatcgaggagcgtgacccgcgcgaggtacgcggcgtgttgagcaggggctcgtgggttgatgtcgcaccacgcaacgctgacgttttcaacccggcattcgatgtcacgccacacgagctggttaccaagatcatcaccgaggtcgtacccgaagacgaggcctctgctgacgaaggcggtctcgcggagactgcgtaacgtcgtgtactggatttctttcaggtgcatttaaggtttcgagaccataaccttaaatgcacctgtaatttctccaggctcttgaactggccttgagctgcgctttagactgttttttcgcaacgtagaacctggctttttcaggagcagtcaccatgaaggcacgaaccgacaccggcacacctaccagtactatcaaacgcatcggagcgaccgcatgtgcagtcgtcttggcaggaagccttgcgggtactggcgtggccgtacctctcgcgcaggcggcgagcacaggggtctcggctgcttccgccgagaacgaagcgagcgcaggtacgcccgcagaagagggaacgcagcccgaccagggcgaacagcctgctgccgatgcgggcgcgactgcggagtcgggctctgccggcagctcgagcacctcgcaggcggtgccgcaagacgatgtggcgcgcgatgctcagcaggcggtccccaaccagacgcctgctcctgttgtggacgaggctgctgccgctcgcgcaagagcggaacttccttcgcttatgaacaggctagagagtgcgtcgaaggattacgaccgcgcatatgccgagtatcagtctgcaacggaagccctcacaagcgctgaacaaacaatctcagcagatcaggaggccatagcgcgggcgcagaagacgctcgatgcggcccggtccgagctggggtctgagggaaccatcacgatttgggatatcctgcgcggcacgacgagcgtcgagaaggcagagacgcacgattatcttctcaacatcatcatcgaagaccgcacgagtttcatccaggaaaagcagcaggaactcgacgagagaaaccaggcacgtcaggggctttccgacgatgctgatgcgaagaaggcggctttcaacgacgccctttcgcagaccaacaaggcggcgtttgcggtggagaaatctgcctgcgcattgccccgcacgggaaacaagctgcgcgcgtcggcacagtcggcgacgagcgcctggtacgacaaggtcaacaagctctccggcatcgacagcaagctcgtgtttggcacgggtgcggatttctctctcgacaaggacgccttcgttgccaaatggggtgcggcaatcgactctttcttcgcgcaatacgatggccgttccggtgtctcatctcccctcaagggatgcggtaaggagatggcagagcaggcatacgagcagaaggttgacccgcgtctatgtgccgcggtcagcgtcgtggaatcgtccgcaggcgtgtactgcatcaagccccacaacgcctggggctggggtgcggcggacagcaacccgtatgccggagctgcgagctggaagtcgtgggccagcgccatcgagagctggcacaaggggctcacgggttctaggacgggcatggcctctgcggggtcggtgagtcgtttgggaggtatctactgctcgagctgggactggccgtccaaggtggttgacgagatgcagcgcatcagcgaccttgcggagtagccctgggcagcggttcttgcgtgccgagtgctacgcctgctccttgttccgcgcgaagcagaaccacatgaccagcgcgatggccgcgccgccgacgatgttgccaagcgtgacgggaacgatgttgcccaagaaccccaacgcgttgaggtttgccatattgacgccggcttcctgagccgcggcggcgtaggccgggtttatcgaggcgaagattcccgcggggatgtagtacatgttggcaacgctgtgctcgaatccggagagcacgaacgccatgatggggaaccagatgcccatgatcttgccgatgatgctcttcgaggccatggccaaaagcacggcgacgcacacgagcacgttgcagaggatgccccccgcaaacgcggccccaaagctcagccccgtcttggcggcggcgattttgatcgtgagcactgccaggccattcgagctgtacccaagctgccccgtcgcgctcacgagcagcacgatcaaggcggctccgaccaggttgccgaggtagaccacgacccaattgcgcagcagcatggcgaacttgacccgcttgtcggcgacggcggcaatcatcatgcagttgccggtgaagagctccgtgcccagcagcacgaccatgatgaggccgacggggaagacgcagcccatgatgagacgctggattccgacttgcgtgacgttatgcgcggcaagactcgaggcctccgcaccaaacgcgatgaacgcaccagcgagtattcccagcaaaaacatcttcacgacggggagcttcgacttgccggtcattccggcgagcatgagctcggttacttgcgcgggtgcattcgttggcgtgtagtcggacataaagacaatcccccttctgcagtcgtgactcacagtttagagtcagtcggcaaaagggggacttcaatccgaagcagttggatgaacggttaggggcgcgtctcgactcgcggcatagccctacttggcggcctcgatctgctcggagagccacgacgcccactcgtcgacgccctcgtctttgactgcggcgatgcggaagacggccgctgacgggttgaggtcgttgatatgctcgttgaataggtcctcgttgaaggtgaaggcgggcatgacgtcgaccttgttgaggatgacggcctcgcacacctggaagatgccggggtacttgaggggcttgtcgtcgccttcgggaacggacaagatcatcgccttgatgttctcgcccaggtagaaatcggctgggcacacgaggttgccgacattctcgatgaagatgagatcggtgttgtcgaggtcgatgacgtcgagtgcgcgcttgagcatgtcggcctcgaggtggcaggtgccagccgtgttgatctgcacggcgggaatgcccatgctcttgatggtctgcgagtcgacgtcgcttgcgatatcgccttcgatgacggcgatgcggtacttgtccttgagtgctttgatcgtcgcgacgatggtagaagtcttgcccgagccggggctcgcgagcaggttgaccatgtagacgcccttttcgtcgagaagcttgcggttctcctcggcctgacggtcgttcttgttcagaatcttggtttccagatcgatgtgcgccatggttactcctcgtcttcttcgtcgtcgggcgactcgatttccatcgaggccacttcaagttctcgtcccgcaatgagtattgtcgcgtcgctgttgcatttggggcagtgcaggtggaagcggtcgtgctcgaactcgttaccgcagtcgaggcagcgcgattttggggtgacgaagttcatcgtgagcttgacgccttcgagcagcgggtcgtcttccgacagtgcctcgaaggcgaattccatagcctcgggcaccaccatcgtcatgtcgccgatggtgagcgtgatttcggtgatcttggtcgccccgtttgccttggcgacgggcacgactgaatcgaagattccctggcaaagcgacatctcgtgcatggctactcggcttcctcctgcgcttcggcctctttctggcgcttgatcttacgcgcgagggcgatgcgtgctacgaacagcgcgacctcgtacagggcgagcagtgccgcgaacaggatgatcatcgtcacgggggaagcgtccggcgtgacgacggcggaaagcaccatgaggccgacgtagacgtagcgccagttagcgcgcatggtcttgtacggcacgatatcgaacaagataaggtagaacacgacgagaggaagctcgaacgcgatgccaaaggcgagcaggaacaagatgacgtacttgacgtagtctgccgcttcgggcatgacggtgccgatcgacgcgctctcgcccatgaggaactggaacgccgcgttcaggcagaacgcgtagcagaacaccatgccgagcacgaacagtgcgacggcgatgaagaaagtcggcagtaccatcctgcgctcgttttccttgagcgcgggcaggaagaacgcgaggatctcccagaagatgatggggctgcagacgacggccgcggcaaacagagcgaccaggaacttcagagtgaagccgccgaaggcgttgagcacgacgagcttgtcggggatgaactcttggatgggcaacgtgagaaactcgatgatctggggcgagatcgcatagagcacgcaggcggacaccaacaggcagacgacgatgatcatgagcctgcggcgcagctcgccgaggtggtccatcaagggcatgcgcgcgggtccgatgggcatgctactcaccgtcctcggagtcgaggtcgtacagcgaggcggccatgctcttctttaccgtgccgccgttgtcggggagcggctgagccttgggcttgtcctgcgcagtgtcttcttgcttgccctcggtgcttgtcttctcggaggcgaacacgctcgcgaacggatcgtcgcccggagcttctgtcgtggttgcgggctgtgcggcttgcggcgcagatgcgctcgaggccgcgctgccggcgatgacggcggcggtcttgcgcgtcgccatatcggaatgctcatcttgctgcgcggagaagacgctcttgatggggttcgtcaccgtgttctggacatcgcgcaggttcttgttgatcgcgtcgatgtcgtctttgataggcgccgcgacatctttgatgtcgtcggtataagggctgaccgcgtctttgaacgggtctgcgacctcgtctttgaacttctggt

SEQ ID NO: 2630 - DNA, 2274 bp, Unknown
  16S sequences of unknown bacteria
tttgcaggattctttttgaaagacgatccactgggggtcagcggcgccgtccaggcgcatggggatctcgatggtgccgtcggggccgatctggtaggtgtagtcggtgccaaagttggattcgccctcttgggtggggatctcggtcgcagggacggtagcagtgattgcgccgtccatgttgccgcagcggccttccacgtcgctgacctggccggtgctgacgtagagggcgccttcgacgaagaccatcggcgtggtggcggtgacgggcgtctcggggacggtgtccgcgttgtagtttagggactggccttcggggggcgcatctgtttgtgcgtcgccagggctgccggtgtcgacggaggtttgcccgccgcagccagccagggcagccaggagcagcagggcgcagagaaataggatgcattttttcatggttttgtcctttccgtgcagggcactatgttagggttcacttgatctgacgggaaaaattggcagaggttcccaaaaaataaatttttagcactctaagcagtagagtgctaaaaattcacggtctgttcataaaaactgccagatttattcataatatggccgtaagataaagacaaataaaaaagaaagcatccgaggcgcggaggcgctgggggtgccagtttggaggtaacaatcatgtttttgacaccttatactaagaaaaatgaactgcacaactacaatccgttccgggccatggaagagatggaacgggcgttcttcggcggcaatggcattgctgagtttaagacggatatccgcgataccggcgacgcttacgttctggaggcagacctgcctggctttaagaaggacgacatcaacatcgagctgggcgacggcagcctgaccatccgcgccgagcggcacaatgaggccgaggaaaagggcgagggcggttacctgcgacaggagcgctcctacggttccttcagccggagcttcagcaccgagggcgtcgatgtgagcgccatgcaggcgaaattcaacgacggtgttttgacgctgtccatgccgaagttgacgaagaaggagccggaggtccgccggttggcgattgaataatttcaaatgcggtccgcttcgctgggcacgcatttgagagatacaattttgaaagcgcaaaaggcgcgccggaattatttccggcgcgcctttttacggcttgcatcgtgtggtcagatcacgtaattatccccggcgggggcattcatgagatcggcgagggtgatgtttgagaaatattttttcgtcaggtcataatagccctgccagacggggagggttcggcattcggcggcgcgggaacaggaggccgcgccgggctggaggcaggagacaggcgccaggtccccctcggccagacacaggatctcccagagagtgtactggtccggctcccgggtcagccggtagccgccgccgacgccgtgggtgctgtcgatcaggccggcggatttcagggcaggcatgagcttctcaatgtacttcagagaaatctcctgccgggccgcgacctctttcatggggatgtatttgccgttgcgatgctccgccaggtccagcaggatgcggatggagtatcggcctttggtagaaatcattgctgcaacctccttagataggcgcgcattatttcagacgcttatcacacttgatggccaggtgggtgcccaggctctggaagatctggaccaggacgatcaagaacacgacagcgaaggccatgatgatatactggtaccggtagtagccatagttgatggcgatcttgcccaggccgccgccgccgatgatgccgctcatggcggagtagcccaggacggtcgtgatggcgatggtggcgttggagatgagcgacggtacgctctccgggagcatgaccttgcagatgatttgcatcggagatgcgcccatggactgggccgtctcgatgatgttcgggttgacctcccgcaggctgccctcgaccaggcgggcgacgaacgggaacgcggcgatgaccagcggcacgatggatgccggggtgccgacgacggtcccgacgatggcccgggtcagggggaagacaaggatcatcaaaatcaggaacgggacagagcgcaacaggttgatgatgacattcagaacatgcagcacgcccttgggaatatgcaggatgtgcccctcgtcgcccgccaccagcagaacgcccaggggcaggccgatgacgatggcaaagaacgtggacag

SEQ ID NO: 2631 - DNA, 4236 bp, Unknown
  16S sequences of unknown bacteria
cggtatgcgtcagaagcctgttgatttcggcgcgattaccacaaactcttccatgcgcaccgaggacagaattctcgcggtttatacggagctttcggcgataatcaagaagtatagtcccgagtgcgccgccatagaagagctgtttttcaacacgaaccagaaaaccggcataatcgtcgcggaagccagaggtgcaataattcttgcgctgagacaaaacgacgttcccatatttgagtataccccgcttcagataaaaaattcggttgcgggatacggcagagcggacaagcaccagatgacagacaccgtgacgagattactcggacttcgcgaaaaaccgaaaccggacgacaccgcagacgctctcgcagccgcaatgtgccacgcctttacaggaagctcgcgccttgccgaatactacaacaagcctacgactatggcgggcaaaatcggtcagacgggcagaggaagccgctcggacatcgcaaaaaaacttttgaatgaatgattgaaaagagaattatatatgtggtcagcagataaatggaaagaatatgagcttatcgactgcgacggcggcgagcggcttgaaagatggggcagatacatcctcgtcagacccgacccgcaggttatctggagcggcgagagaaaaaatccgctgtggagaaagcccgacggagtttacaaaagagtaggcggcggaggatcatggacggttcaccgtatgcccgaagcgtggtgcataaactaccgcgacctcacgttcagactgcgccccatgggattcaagcacacgggacttttccccgagcaggctgtgaactgggactggcaggacgaggtcatccgcggcgcaatatccgatggcagagagaagccgaaggtgctgaaccttttcgcgtacaccggcggagctaccgtagcttgcgcaaaggcaggcgcagctcttgttcacgtggacgcgtcgaagggtatgactcaggcggcgaaagaaaacatggctctctcgggacttgaggactcgccgtgcagatatattgtcgacgactgcaaaaagtttgtcgagcgtgagataagacgcggaaacaagtacgacggaataatcatggacccaccctcatacggcagaggaccggggggagaggtctggaaactcgaggaatgcgcggcggagcttatctccctcaccgtaaaactgctcagtgacgagccgctgttcttcctcatcaattcatacacaaccggactttcccccgcggtaatgcagtaccttctcatgcgcacactgcccgagagacttcgcagtcatgtcagcacagagacgggcgagacctgcattcccgttacggattcaggacttcttctcccgagcggagctactgtcagggcaaggttcagcttctgacgcaaatactttggtacggagtaaaaaatgccaactgtaataaaagccgaaaacctaaaattttcatatccggctgaggaaggaactcaacctaaaaacgcccttgacggaatttcgttcgagatagaggaaggctcgttcacggcaatactcggacacaacggaagcggaaagtccactctcgcgaagcttctctgcatgataaacctgcccgacagcggaaagctcaccatattcggaaaggacatgacttcgcaggacaccaccgagagcgatattcttgaagcaaggcgcaacgtgggaatggtgttccagaatcccgacaaccaaatagtcgccacaatagtagaggaagacgtcgcgttcggatgcgaaaacctcggtatgccgccgaaggaaataagaaaaagagtggatgaagctctcgaagccgtcggaatgacaaaatacgcgcgccgtccgtcgtataatttatcgggaggacagaagcagcgtgtcgccattgccggagttatcgcgatgagaagacggtgcataatcttcgacgagtccaccgctatgcttgaccccatgggaagacgcgaggtaatgtcgataatcgaaaagctgaacaaggaagagggaataaccgtaatccttataacgcaccacatgaacgaggccgccatggctgacagaataatggtgatgagcggcggcaggcttatcggagacggaactcccgcgaaaatattcggcagtccggagaaaatgtgggcggcgggtcttgacgttcctcaaacgacggagctgctatataaaatgcgtaagagcggtcttgacgttcccctcgacgtgtttgacccggagaaatgcgcggcagttataaccgaagctatacgaaacaaaaagtacatccgatgatacgcggagaataagatggcaactgtagaagtaaaaaatttatcatacacatacggaaaaaagacgagcactccgaacaaggcgcttgacaacgtttcgtttaaaatagacggaggtatcacgggacttatcggacatacgggaagcggaaagtcaacgctcgtgcagatgctgaacggtcttctcactcccgatgaaggcgaggtcattttagacggcgtgaacatctgggcggagccgaagaagatacgcgagataaggttcaaagccggacttgtcatgcagtacccggaatatcagctcttcgcggagactgtgcgtgaggacatcgagttcggtccgcgcaacatgggtcttgacggggatgagctgaagtccactgtcgagcgtgcggctgcgttttcaggactgtccccggagcttctcgacaaatccccctttgagctgtcgggagggcagaaaagacgcgcggctcttgcgggagtaatcgctatgaatccgaagatactcatccttgacgaaccggcggcaggacttgacccggcaggacggcgtgacatcctcggcggaataaaaaaatactctcgtgagtcgggaaccaccgtcgtaatagtcagccacagcatggaggacatggcactgtactgcgacagcatcattgtaatgtctgactcaaaaatactcatgcataagccgtgcgccgaagtcttctcggaatacagggagcttgtcgcgatagggcttgacgtgccgcagataacgcgcgttgcctcggctctcgcagaaaacggcatcgacataggacgcgacgtttacactgtcaactgggcggcggaaaagctcggcgaatatatcgcgtcaggcaaaacaccgccggaatcggaagaaaaatacgtttaaaacaggaatataaaatgaaatcagatataaccttcgggcaatactgcgagggaaactccgtcattcaccgccttgacccgcgctggaagatagtcgtctccctcatgtatatcgcaataatttttatggcaaaatctgtcggcgcgtttgtgcttcttcttgccgcgtcggtgttttttgtggtacagaccgagttgtccccgtcccttatcttaaattcaatcaagccgcttctctatattatcatattcacggcggtcataaacatcttctggatgacgggcgacacgcttttgtttgagatagggtttattcacgtttatcttgaaggcataatcaacgccgtgatgatagtgctgcgaatagtgctgctcattgtcgcgacctcggttttcctcacatacacgacgactccgcttgcactgacggacgcactcgagcagcttcttgccccactcgcaaagattcacgttcccgtacacgagttttccatgatgatgacaatcgcgctcagatttatcccgacgcttatcgacgagacgcagaagattatagccgctcagacagcaagaggcgcggacttctcaacgggaggtatcgtgaagcgtgcgaaggctctcattccgatacttattcccctgttcatctcggcattcagacgcgcggacgagcttgccaccgcaatggagtgcagatgctacaccggcggagagggcagaaccagaatgaaccgactgcgctcatcctacctcgactacgtttactttgccgctatgatagcactcggcgcgggagttgtgcttatgaataagttccttccgatatatttaatgacgatgtgacatgaagcgcgtactgaaaataaagtataacggcacggactttgcgggatatcagtttcagccggataagcggacggtgcagggaacgttaacctcttctctctcgaaggctctcggatttgaagtgaaggtcacaggctgctcacgaacagacgcgggagttcacgccgagggatt

SEQ ID NO: 2632 - DNA, 14369 bp, Unknown
  16S sequences of unknown bacteria
gtaggcggacgagtccgctgtgactatggcattctgaaacagagttgtgttataataattctcaccatagacaatcttcccgtcgatacagatctcgacggtatgacttgtaaagctgtcaaccgggtcgagcttcactttcccctcgaggcagagcttgccgttgtactctccgaccgtgagcgggacaggattgtttatatcccagtctatgacgagaccgaccgtgaaatcacgctcacccgcctcattgctgttccactcgctccagagctgcttgtatgcttcattgtctttcagaatcactctgacagtcgtctcggtaaagaacgctgctccggtttcgatataactgatactgtcctccggacggcaggaaacaagatttgcactgcttaagtccgcgtccttgatctcctgataatccaccgcgtcatgcttgaaagaattcccgcggacgtccttgcagttacccgaaacgccctttatgccttttacatatatagcggtgctgtcaatttcctgcaccttatagtagaaagtgcggtaagacgcgacaatgtcggtcgcgcggttgatcgttccgatatgcgccgcgccgacgctctcggcggacttcacggttgacccatccgcgagaacaagctcgtagtcaccataaaccggctcactgaactcaacaaaaatcggtacaagatctcccgggtaatacgttccggacggaaccgttatcgccttgactgtcggagcggtcgtgtcgacaagcgacatggttccggggaagcagattttctcaaacgacaagtccccactgtacaagtcggcgctgagataccattctgttgattctgtcgcgtcgctcgtgctcagtgtgttgagcggaacctgtatcccgcgcacggcgatggcgtctcttgtgtgatgggcgctgagactgccgaggctgagataatagttatacagctccgtatcctgtgtataatcccagctgccgtataccgtcgcggcaacacgttccagatattctttatcattttgtacttgtgaacctgattcatagtggcgcatcgtgccgcccatgccgacgaaactgttcgaactgttgtaataataaaggatattgcccttatccgcgatctgtgatttaacacagctcatcacgaacgtgacatccgaaaactcgacggtcggagtttcataatttccgacgccgagcctgtgcgcggttttgaacgcgttcatccagtcaccgccgatactgtcatttcgcgatattatcggcagcatatttatcttgtaatagctcttaccgtcgatagtcgtctttgacattacatcgcccgcgttcagcgaatacggctggcgggttgtgctgttgacccaaatagcgggttgcggctcacccatataattaagagttgagttattctcagcggcaggagatatcgcgaagatatactgcttcgactgttttttcgcgccatcggtgacgcggcaggagaacataaaagcctccgcgccgccccagagatcggtgcgcattttcttcagatagatatcccgcaccttcgagagatcgagctcaaaagtaagcgtgtcgacatcttttgtgaaggtgtatgttccatatccgttcagactcggctgtataccgctcgaattgtccggtctcagctcaggcggcctgccgccactgccgaatacatccgcgaacagccccgcctcaaccgtgatcgtctcgtcatccccccaaagcttatacttgccggaagtgttcgagagagacacttcgagtgtcagtatatctccatttacgctcttatcaatatcaaggttaagcccatgccttggcgaaacataactcatcggagtccgcgtcgacaccccgtccccgctcgcgagcagattcagctgatccgcgatctccgagatctctctctcaatcgagagtgcctgagcgatctccgcgacggtcgccgattttccggttgagacaaccgtgacgacaatgtccccgtcgctctcgctaagggtgttcatccactcttcaagcgcgctgagcgtgtcgaaaaccgtcccgtcgccaagccggaacgcgttgtcctcgatgagcgcgccgtcctcgtcgatgagcccgagatcgagcatctcctcatatctcgcggcaagctcttcctctctcgtgtcatacgccattatgcccgtcggtaaaaatgacatgagcatacagagtgcgatgagcgcgctgagtatccgttttttcatgattttccctttccctgagcgtctgccgacgtctcagccgttatcgttttcctgttccgtgcctttcccgttccggacagccgcacgcacacgagcgtcagcgccatccccgccgtgaaagccgcgacgccgaccacaacgtacagccccgcgccgcttctcagtacaagcgacccgtacccgccgtcggcgctgactgttccgccgcctgtccccgctatcagcgcgattatcccagtcatcaggatgaccgcgagcgacgcgagagtcacgagcgaccggttctcacgttttcgtctgtatttccgcgcgcggcgttttatctcctttgcgcgggagtctgtctgtccggtcataaaaatcccctttcgttttatcgctgacgccggacgcgtctcactgttatataaaatacatctttttgaatttccttccacattttccgcaaaaaaaattgagaccgcttttcgcagtctcaaaaaatctatcttccgttagcgaaccgctcctcaagcctcggggcgaaccgcccgacaacacccagaacaacaatcatcaccgacggcagcagatatcccgccacccgccaagctccctccgccgtgatgagcagattatatatcgcgtggaacccgatgcagaacccgagtatcccgaccgtgccggtcagcgccagccatcgctgcctgaacaccacggacagcccgaaaccggtcataatcccgcagaggatatgcagcgcccccgccgaaatcccgcgtatgagcacgaatcttatatcctccgctccgttctccgcgagaaaacacacattctcgaaggtcgcgaaccctaccgcgatcccgatcgccacatccggcagctttctgatatccggctcgtagatcaggaaccagaatagcgtcgggagcagcttcatgacctcctccgacaccggtgttatctcaatcgccgatatgacggcgtcagccccgagcgcgctcatgaagaacccgctgacatacgccgacagcagactgaccgtcattccgatcgtgacgaagacagtaaacgatctcgcccgtccccttgtgaacagcattgacaatatcagcggtatcgcaatgcagatgaaaacattctctatgtatgtcatactctccgttcctccacaagagtcaccggcagaagcgccgacaacgtcagcgtcagaagtatatcaaccgcgaagtacgggcagaacctcgtgtaatcatgtgtgaaatccgagatgtcgtagagcgccacctgaagcacgaccgacgcgatcatgacggcgtcagtgtatttgttctttccgccgcccgccagtctgaagatcgacagatacagtacccctcccgcggtcagcgcgaaaagaaccgacataatcaccgagggaccgaatatcccgcacagcactatactgacgcctaccccagccgccggtatgagcggcagaggtctgagtctcaccttcatcccgtcgcaccgcattatctggagcgagagaaaaaacagataagaagcgagccacgacgcctccgccacatagaacaccttcggattattcccgatgatcacgatataaagaagataatagagcgttcccatagtgaagcacgcgtacgcgaacgcgagaatcatgcacttcctgctcccgcgtctgagcccggccgcaagcgccgccgctgacataacgccgagcagaacggcctgaaagaggttgtcgatgacctcaaaattcatcgtcttttttctgctccttcttttcgttttttcccgcgccgtcagcgtccccgcggtcattccggctcaggtctgtccgatgcctgtccttaagcctgtatagaaatatcgtcaggcatacgccgagcaggaaggaaagcacccccatgaacacatacccgatccacgcgcgccctgtaatcattcccgccgccccggcgacgccgacggagacgttgattctgtccggatcgacgcccggagccgccgacggcataagaacgccaagcagaacaataatcacgacacagacagcggctgacacagcgtctgtgattatccggcgtcttcttgccctctcgcgtttaagtatggacgtccgctccgctatcagccgcgagcgttccttttcagtccgcatagataaatccatcctcctcaaggagcgccttcagcccgcgtttcccgcggtggacgagcttcgtcacctgctgttcgctcttgttcatgatccgtccggcgtctcggtagctcatattctcgaaatacacaagatacaacgcctcgcggtactcctctttaagccgccccagcgcgtcgtggagctgtctttccctctcggatctgattatccccgtatccgcgaagacctcgtcttgcggctcgaaaacgatatcgtcaaagcagaggaacggcatccttccctttgaaagctgccgcagcgccagatttctcgccgtcctgtacagatacgcgcggaacgcgccgtccccggagatcttcctctccttcgcgaagagcctcgcgaaggactcgatcattatgtcctccgcctcatgaaaatctgcgatatatccgtttatgtaacaagtcagcttgttgccgtaacgcgaaacgagccagtcgacggcgctctcgtcgccgtcaagatattttccgtaaagctcctcgtccgttatcagaattaccgcccctttcacgtagtttaattttattatataccgtacccgccgttttttcaagatatgccacgacgtgttcaaataaaagttacatgatccgtgataaagcattgactttccgcacgggctttctgtaatatccccggaacggcaaaaaagagactgtcgtttttccgcggcagtctcagggcgcggtcactccgcgtcgctcttcattatttcgtcgttcacgcgtctgccctcttcgaggaggtcatagagacgcttttcgtcgcccttcttcatcgcgtcggcgtattcgagaagcgacgcggcgagacgctcgacctcgggaatgaggttgtcgcggttctcgaggaaaagctcggtccacatccgcgggttcaggtgcgcgaccctcgtgaggtcgcggaagctccccgcggaatagcccttgtgctcgcgcgccgtcgggctctttatgtaagcgtttgagagcacgtgcgcgagctccgacgtgtaggcgatgatccggtcgtggttctctgcgtcggtgactctgaccttcgcgaagccgacagacttgaacagcttcacggcgacgtcgagcttcctgacgtcgatgtccttcataggcacgagtatcatggtcgcgcccttgtacagcgactcgcgcgaggactcgaagccggagaactgcgtcccagccatcgggtgtccgccgatgaaagtgaaaccgtacttttcagccgcttcaaaaccggctttgcagaccttgcgctttgttccgcagaggtcgatgacgacggtgtccttcccgacctctgccgcgtgccggtcgataagtccgacgaccgcgtccggataagccgcgagaagtatcacgtcataccccgaaaaggacggctcctcaaaataaaccttgtcgcacgcgcctacgagcagagccttgcgcgcggcggtcttcccggggtcgtacccctcgacttcgttttcagtggtgaatttgagcgctctcgccatcgaacctccgatgagcccaagaccgcagatgaggattttcatttttcttttctcttttctttttaagttttagcttatccttgtatctttgccgcggcgtccgcgagaatccgtgccctgcgctcgtcctcggctgcgagtatctcctcgcgctcgctgtagtgtgtgtactcgccgtcgatcagctgatattcctcatgccccttgccggcaaagagtatgcagtcgccggagagcgcgtgatcaatcgcgtatctgaccgcctcccgtctgtctgcaaaggtgacatacggacaggaggtcgcggcgacgctcctttcgatatcgctgattatatcctccggcggctcgaaattcgggttgtcgctcgtgattatacagaaatccgcgagctgaccggcagtctcaccgagctcagcgcgcctcagctgagtgcgcccgccgaccgaaccgaacagcacgactattctcttcggctggtattttctgagagtctcgatcgccgcgcgcatcgacacggcgttgtgcgcgtagtcgattatcgtgacgacgtcgtcgagcccgcagcccttctcgggcgtcacgacctcaaatctgccgcggacccttgccttcgcaagagcttcggcgatcgcgtggtccccgagcttcatccgtttcgcagcggcgatggcggcgagggcgttgtagacgttgaattcgcccggcatcgagagcgtgtactgcgtctcacctgtgacagagcggcagacaaagcgcaccccgaggacgttcccgctcctgaactgcctgatatcccgcgcggagaaatcccgtttttcgcgctcgtgtccgtcgataacgccgtatgtcgcgttgatcgagcgggaattcttcaccatgtcggtgaaatgcgggtcgtcggcgttgaatatgccgtaccggcactgacggaaaagctccgccttgcacgccatatagtgctcgaaggtcgggtgctcgacgccgccgatatggtcgcgcgagaggttcgtgaagatgccgatatgaaaatgtatccccacgacccggcgcatatatattccctgtgaggagacctccatgacgacgcaggagacgccgctgtcgaccattttcctgaacgccttgtgaagctcgtagctctccggcgtcgtgttgactgtcggcgtcgtgacgccgtttatcgtgattccggtcgtgccgatataagcggtgtttatcccgccgtgattcagaacatcagctaaaagcgacgccgtcgttgtcttgcccttcgtgccggtgacgccgattatggcgagcgacctcgccggatacccgaacagagccgccgaagcgagcgccagagccgcgcgtgtgtccgccacaatcacctgaacggcgtcggacggcagctcgagccttctctgcaccatgaacgccctgcacccgcaggaatacgccccggacgcgtaattgtgcccgtccgagacggcgccgataaggcagacgaacagcttatccgcggtcgcgagcctcgagtcatatgtgatatccgatatctcaagcgaagagaccttcgcgtcgtcggttgcgttgaagtcgatgtcagcgagcagatctttcaaatacatataaacagatccttaaaattaataaaatgtcatcagttgtctgacggcagtatagtgcgcttcccgcacgcttttatggtcgccagcgcaaggcactcgagcgagtcggtatagtagtcaccgagcctgttgtcccgcttgatcagcgacagctcggtgcacccgagtatcagccgctcacagccgagagagcgcatatgatcggatatctcgccgaagcgctccatatcagccggacggttccgcttgatctcaccgtagatgatctcgctgaccatcctctggtgctcgtcgtccggcacgacgcactcgattctgtgcgcgtcgcagtacttctgatacgtgccgctcttcacggttccctcggtcgcgagaagaccgaagcgcttcacgccgtcttcactgaggcgcttcaccgattccgcgatgatattcagtatcggaatatcgatctcggcggcgagccggtcatagaaataatgcgcggtattgcacggtatggcgatgacctcagcgccgtaggcgacgagcttctttgcctccggtatcatcacgtcgagcgggttctcgtcgctctttccgaggatatacgccgttctgtccggcgtcgtcgcgcggcttgagatcaccatgtcgatgtgctcctgatcgcatttcgcgtcggtcagcgccgtcagaagctcgtagaaatacacggtggacatcggtccgagcccgccgagaatgccgaggagcttactctttgccatagtacttcctgaactttccgtaatggttgcgcccgtgcatgatgaggaagaacagacgcttcggattcatgaagagatcgtagccgtaccagagcgacgggtgagcctttccggacttggcaagagccttggcgcgcgcgacctcgttcctgtcgcggcagtactcgtatacgacgcccttcgggacgctgtgccagaaaatctcgttgtcgcagaaatacgtgccgtcgaacttcctgttcccgacatagtcctcgactatatacttcgcgacgttgcacccggcggaggtcacgtaatagttcgaccgtccgagcctcagatttatctcgaacgcgcggaaagtcttatccctctcatcgtacttgatatcaaagttcgaataaccgacaaatcccatctcttcgaggtaatttttgaacttctccatgagctcccggttctcttcggtgatgatcgcgcagtggtttccgagccccttcggagtgtgctcctcgaggaggacgtgaccgaggcacatcatgcggaccttgccgcttctgtccgaataggcggtcaggacgcgcatcttcgagtcgtcgccggggatcatatcctgcaaaatgatcttctccgggtatccggagccgtatatgcggcggataattatctccgcctcgccctttgacgccgccgtgtagaccttcttcattccgtcgaaggggtagtgccagtatacggcgctcgcggacggttttatgattatcgggtactcaaatccgagcgaatcctcgtcgagaatcgtctcaagatcgctttccggcgtgacaatcttcgtcttcgggtaaagtatcccgtgcctgtcgcagtcctcatagaagcttgccttgtacgcgagccgctcgaaaagctccggtccgatgtacggaacgatatatctcggtctcagcctgtcgccgtaatggatgagcatcgacgcgtaatcgtccgtgcatccgaaagcgatcagtgtcgcgccctcgtgcttctccgcgaagtcggtcagggtcttcaccatgacctcaggatcgtcgagcttttcgacgaccgtgaactttattatcctcgtatagttcgacgcgccgatggcgtaccgtccgaacgcgtacgacttcacgccgtactgctcgtggaacgccctcgcgacgttgtagcagttcatatccgcgccgatcagcacgggtattatgttcttgttctccatatatttccacaaagccgcaaaaaacggctctccttagttatgttgatttcagacggtctcgtcgatgaagaagcgcttgtaccagacaagaaaagtgaaaaccgtccagacgcggcgtccgttgttcgcctttcccgcgtaatgctcgtcgagcaccttcatgagctcttccgtgtcgaagaactccgcggcgtaatcgctcgtgaagtaacccttcacgatgtcgtagtacttcttttcgcggagccagtatcttatcgggaccgggaagcccatcttcttgcggtccgcccactcgtcggggagggtcttgttcgccgccttgcggaagatgtatttcgtgttctttccgttgatcttgtactcgtgaggtatcttctccgcctgctccatgaccacccggtcgaggaacgggacgcgcagctcaagcgagctcgccatggacatcttgtccgccttgagaaggatatccccggggagccagagattcatgtcgaggtactgcttcttgtcaagctccggctttcccttgactctggcgtatatcggagccgtcacctcgagcgccgaaggaccgacgcggtaatccggcttcaggacgcgaagcgcctccttatcgtgccagacaagcgcctgaccgatgaaataatcctccggtcttccgctcgattttataatgaaatcatgccccttgaaataaggcagccttttcgcggcatccgccgccgcgacgcgcaggaactgcggaatcttcttgtacttccgcatcagcggcgtctcgtcgtaccactcatacccggcgtaaatctcgtccgcgccctcgcccgacagaacgacggtcacgtgctcgcgcgcgagcttcgcgaggaaatacagcggaacgctcgacggattcgactgcggctcgtccatatggtactgtatgtccgggaaagcgtcaaagcactcatccgccgtgattagcttccggtaattctcgatcccgagccggtcggacagctccttggcgtaatccgtctcgttgaacttattataatcgaacccgaccgaaaacgtcttatccggcatcaggcacgccgtgatatacgacgaatcgacgccgccggacaggaacgccccgaccttgacgtcgcttatcctgtgcgcctcgaccgactcatgcaccgtccggtcaatctcctcgacatacttatcgaagtcccccggaacctcggaaaaatcctcgtcccagaaccgcacggtcttcatctcacgcgcgccgtccccgagcgcaagaataaaataatgcgccggcaggagcttataaactccctcaaaaaacgtctcgtcaagcgacgaatactggaacgtaagatatggtctcagcgccctcttattaagcctcttgcggaactccggatgctcaagaaacgacttaatctccgacccgaaaaggtaatttccttcgtcagtccggtaataataaagcggctttatcccgaaataatcccgcgcgccataaatcacattcctgttcttatcataaatcagaaacgcgaacatcccgcgaagcctctccgcgagcccctcgccgtactcctcccatccatggacaagcacctcagtatccgtattcgtcgtgaacacgtgccccttctcctcaagctccgcccgaagagtctgaaaattatatatctcaccattgaagacagtaacaacactcccgtcctcattatatatcggctgagacccgccctcaaggtcaatgatactaagccgcctgaacccgaacgcgacctcgtcgccgatgaactctcccgatgaatcaggtccgcggtgtattatccgctccatcatcttctgaagtatctcgcggtgtctcgcctgttttcctgtgtatcctacaagaccgcacatagaggtaattgtttgcttgcgggggaggaaaaaaactttgaaaagtttttttcctcccccgcccccctccttttttcaaactttatactaacagccatttttcacgatggcataaaaatcccttattataatattataacacaaatcgaaaaaaaaataaatagaaacggcgaaaaaaaatagaaccgcgcgactaatttattcctgtccggagcgccgttttccgtcgttttcacccataaccgcgccctcctcatgatatccgtcaatacccgaacgctgcaacgcgccaaagatacgatgcctcagccccttattattccgctcaagctccgacagcagccgcttcatcgactcccgctcagtatgcttatccgccggacacggcgacttcaccaccggcaacggattatgcctcacataatactttatatccttctccggagcgtaaatcaaaggacgaatcataacaagccccttatcctcataaaaagtcaccggagaaaacgacccgagccgcccctcataaaacaaattcagcatgaacgtatcgaccacatcatcaaaatgatgcccgagcgccagcttcccgtacccgagccgcacacactcgtcatgcaaagccccgcgccgcatcttcgcgcacagcccgcacggattcttctctttcctgacgtcgaacacaatcttcgcgatctcagtcggaacaacatgatacggcacatcaagcccctcgcagaactccctgaccgccgaaaaatcacacggcggctcaaagcccatatcgacagtcaccgcgccaagctcaaacctcttcggataaaaccgcctgagcgccgccagcgccgcgacaagcgtcagcgaatcctttccggcagacacaccgaccgcgatcctgtccccgtcttcaatcatcccgtaatcgtcgacagcgcggcgaaccgcgctgagtattcttttcatctcattcaaagcatcagcccttcctgtaataaacaaacgccccagcgaatacaatactaaaaaacgatctgccggaggtaaacatggcaataaagattttcatagatcagggtcacaacccgcagaacccgaacgccggagccgaaggcaacggtctccgtgaacaggacataacctacgacacaggtctccgcctcgcgtcgctcctccgcgacaacggaaatttcgaggtccgcctgtcgagaaacaccccgaccgaacaactcggaacgagcaacgcgtcgagcctcgccgagcgggtcagagccgcgaacgactggggcgccgactacttcataagcctccacacaaacgcgtcgaccgacccgtccgcgagcggcaccgaagcatacgcgttctcatcgaactctcagggcttcgcgctcggcgagagcatcgtcgccggcatctcgcgcataacgggtctcagagaccgcggcaccttcgcgcgcccgtcgctctatgtattgcggcggacgaaaatgccgtcgacgctcatcgagatgggcttcataacaaacccggaggacgccagacttatgagcgaggacccgagtgtgttcgcgataggaatttacaacggtatacttaattacctcggactgtgaataaaatccccatgcgccaccgataatatacgaagaccgcaaaagcggaaactcttaaggatacacaataaatcgggttttcgcagaaaaagtccccagatttatggactttttctgcgaaaacaacctcaaatcagtgtttccttagatcggcggtgcgaaaattgtctctcacattttctgagaattacgacgaaaacgtccggaagttcgacaaactgttcggcatcggaaagaactacgatttcataagccgtgaacagaaggtggcttcccgccgcgcgaggttctactatatcgacagcttcgtcgacagcgagaatctcgaacggctgttcatatttctcgcgggactcgaaaagctggcggcagacaaaacgccgtcagccccgcgcctgaccgcggagcgcgtgaaggaattcgcggcgaaatatattccgtataccgaggtctcggcagagacggacgccggaaaattcgcgtatcagataatgtccggcacggcgggaatgctcttcgaggatttcggcgccgccggaataatcctcgacgtgcggagctacccgacgcgcggaatcgagcagtcagagaacgaccgcgtcctcagaggagctcacgacagcttcgtcgaaaccataaagcgaaactctaccctcatccgccgccggatacgcgacccgcggctgacatttgaaaagctgacggtcgggcgtctctctgagtcggatatcgtcctctcctacatcgacggcgtcgccgacgctgaatacgtcgcaatgctccgcgaaaagataagctcgattgatgtcgacgccctgaccctcggtcaggagagtctcgccgagtgcctgataaagcgccgctggtacaatcccttcccgaaattccgctacacagagcgtcccgacaccgccgccgcgcagatactcgagggaagcgtgattatcctctgcgacacctcgccggaggcgatgatacttccgacctgcatattcgacttcatgcaggagacggacgactactatttcccgccgctgaccggctcgtatctgcggctcctcagatatctcgtctttctgctgacgctgttcgtgacgccgacgtggtatctgctgataacgcatcccgaatgggttccggactggctgagcttcatcctgatagagggcgaggtgcatctgccggttgtcgtacagctgttcatcgtggagctcgcgctcgacggactgaagctcgcgtcgatgaacactccgagctcgctgaacaacacgttcggcgtcgtcggcgggctgattctcggcgacttcgcggtgcagatcggctgg

SEQ ID NO: 2633 - DNA, 2055 bp, Unknown
  16S sequences of unknown bacteria
accgggaacatctcggccttgtgcaccagcatgaagcggcccgcgagccagtctttgtagggttggaactcctcgggcaggtcggcgacgtcgctcgagatgagatggttgggaatcacgtccttgagcaggtcgaaccagaacagcgagatgcgcgtgagcacctcgcccttgtacgggatctcgtcttccaggatgtagtcgaacgccgaaatacggtcggaggcgacaatcaggagcttgtcgcccaagtcgtacaggtcacggaccttaccctgggaatcaggacgcagtgcaatctcgctcaccgtaaaaacaccctctcttggtcatgaacatacgtatcgctattgtatgcgcactagcgcttagattcgtcgttatctttcttggacggcaggggcacgcggattccgaacagcgtcagctgctgcgggctcactttccactcgcctgtcagccccttgccgtgctcggccgccttgcggcgctcgcgctcctgacgctcctgcaggcggcgcagcttgtcctgctctttacgctgcttctcgagctccttttttgcggcgcgcttcatgcggcgctcctgcgcgcgcttgtccgccgggtcgatcatggaggggtcgagcggagagagcggcaggttgagcgtgaacgtggaaccctcgcccagcgtgctgtccaccgagacggtgccacggtgctggtcgaccacctcgcgcacgagggcaagtccgatgccgaggccgccgctgttgctgcgggcggtgtcggcgcgccagaagcgggagaagaccttcttcaggtccttctccgcgatgcccacgcccgtatcggcaaccgagaccgacgcgtacccgttgtcgcggcgcagctcgaccgagatgctgccgccttccggcgtatagcgcacggcgttggacatgaggttgacgacggcctggtggatcaggtcgcggtcgccctcgatgtagatgtcgtcttcgatgtcggtgagaagcgaaagccccgaagactcgatgagggcctcttgcgacatggcgagccctgagacgagctcgcttaggtcgatggtctctaccttgagctcggtcgtgccgttctcgaggcggttcagacgcagcagggcttcgaccaggcgccccaatcgacgggtctccgaggagatggtgcccatatgctcctggtccgcctcgaacacgccgtcttggatagcctcgaccgttgcctggatggccatgagcggcgtgcgcagctcgtgcgcgacgtcgccgatgagctggcgttcgaggtcgcggtcgcgctcgatggcgtccgccatctcgtcgaagttctcgcccagctgctcgaggtcgctgtctccgcgcaggttcgtgcgcgccgaaaggtcgccttccttgatcttttttgcggtcttggagatcttgtcgatgggctggccaaagctcgccgcaaagtacaggcccagaaacaccgagagcacgagggcgatgatgcccgcgatgatgaggatgacgaagagctcctcgtcgttgacgatggcgccgcggcccaggttccacgcgaacacaatcgcgcccgccgtgatgagcaccgtcatggcggcggtcaggacaaatgcccccgccacgtacagcgcgaaggagagccgcttgcgcggcgagcgctcgctcatttcctattcaccggtagcagaggcgtcgtctttgggcgcctcgaagcggtagcccacgccgtgcacggtgtagatccacttgggatgacgcgggtcgtcgccgatctttgcgcgcaggttcttgacgtggctgtcgatcgtgcgctcgtagccctcgaagtcgtagcccagcaccttctcgacgagctccatgcgcgagtacacgcgccccggatagcgcgagagcgtggtgagcagcttgaactcgcttgccgtgaggtcgacttcctcgcccttgacgagcaccttgtgccccgtgatgtcgatggtcaggtcgccgtactcgaagacctcgcgctgcggctcggagtcgatatgggcgcggcgcagcagggcgcgca

SEQ ID NO: 2634 - DNA, 15431 bp, Unknown
  16S sequences of unknown bacteria
atgaccgccgcaacatggtagatgtaaaaagtatcgctatctaaccccagcaaaggtcgtaccggaaatgccatcatcaacatagaatttgaagttggtatatccgtgttcaagagcatacttctccaggatttttttctggttctgtatgctgttgctctcgccgccgtccctgtcctcgtcgcctacggaaaggcgggagtaaagggctgtgattttgctataatcagtcatgtgcataacctcctgtgcgtccatgtatgtgtcctttacacttaaaattatgcactccatcgggcgctcccgtactccatgcccttgcggtatttcttcgcgttcttgcccttggaatagaccagcagccggatcagcaccgcgccggcggcgcccacgcacaggtccagcagatggaagctgggcgccaggctggcgaaggccgccgaaaagccctgcccgatgtggagcagcttctccgaggcgtccgccccaggcgccagccgcaccccctggcagagcttgtcaaagagatacacgaagatgagatacgggaggttgagcagcaccagctttttcaccttgtcggtcatcgcgccacctcccggtccttggtcttgaccttctcccgttcccggtgtttggtctttgactgttcctgagcctgggccagcctctcccggatggtggggcgattctcccggcccagggtcatggcggtgaactccttgaagccggctggagctggtctttatccttcgccttgaagaacacatagtagtgcggtgggtcggttgtggggtcctttttcagggcatagtcgatgtcatacttcttcgccaccgccgaaaacgccttgatgttctgctccgtgatctcaatgttggtcagggaagccccatgctgtttgagctggtgaagggtctgtctgccttggcggagggtgcgctgggagggctttttctgcatctcctccagcaccttcttcagggccttttggagcaggtccgcggtcatcttgcccgcctccaccgagagggagaccgcgccctgggtgatttcttcctgcataggcactacctcctttctccgccgccgtacaggtcatggctcaccaaggaagtgtagtagctgccgatggtggccggggcgttatacagggcggccagcaggtatttcttgatgttgcggacataggtggtgttctcccgcatccggtccagcacatactcgatgtgggagctgtccagcttcaggaaccgggacttgaccacctccgccgggtagtcgtccccggcaatgcggatggtctcccggcgggagcataccgtgtccaccatgagctccaccagttcatccaggcggtcccggtcaagcggatggctctggatgaggtagtcatactcgatgttctccaaaatcaattcccgatagctctcgcgctcctgcatccagtcccgtcccatcccgtccgaacccctgggggctttgggggaggataggacaggatttgatccttccgtacttgatagatctttttttgatttttctttacttgatctattagtatttaattgtgcggggtttccctgttcaggttcttccaagacagggcaagcctgttcaggattatccaagactggattttcccgttcaggttttcccggttcaggttggcggggctgctccaggatggtgtactcgatggcgccgagctggccgttggggttgcggacccgctggcggatcacatagccgtgttcctccagctcccgcaccccggcgcagatgctgtcaacgccatctttgcagatccgagccagccccttggtggtatagtcccattcctccggcagggagagcatgagggagagaaggcccttcgctttcagcgagagcgacttgtcccgcaggtgatggttggacatcaccgtgtaatcgcgggttttctcaatgcggaataccgccatgttggatacctccttccgttggttttgaaaagtgttcgtttcggtggttttgtgcccctgtatcactgcccggcctcccatgagggaaaggatatgggcggcctcgtttgcgccgcccacaggcgaaaatcaggggatttcccacccgttttcatacaattttgagtgcccccggcagggcataaaaaaacgccacaggtttgtgttacctatggcgtttggaacaggaaaagggtgctgacatttcatatcagcaccctttgtcctgccggtattaaatttttgacttcacatcgtgttccttgcctctgaaaacattgattttactggacttgctcatgttttcttattaggaggcaagtcatgtcgtctcccttttttgcgggccgaggctgctgcgccccgcggggtgtcgggagggaagcccccctcccgacaccctcccccgagcgcgccttggggtcgcgggaacggcggagcgcgggtggtttgccggggtgtcaaggagggagccggccccctccttgacaatcctccccacccaaagcggagagattcgccttgcggcgaatcttttgatacgcggcgccgcttcgcgccgccaacgaacacagcggcccgcggatgggcagcgaccggctccctaggcgaccagcagcgccgcgttgccccagaccgcaagcgcaaactgcacgaccgcgagcagcgggaagaatgcccggaactgccagtgctgcgtcttgtgccggaagaggaacatgcccagcgtccccccgaaggccccgaacaggatcgccaacaggaagagcgtccgctcgcgcacgcggctcgccccgcgctgcgcgcggcgcttgtccgcccacatggcgatcagggccgcaaggttcattcccagataaaccgccagggagagaaagtagatcgtgagtttcattccattctccatcgcgttttccccctttccttttccatccgtttgcgctatactgattgtaaacacttacaatccgatgggagggcttgccatgactcagttgggagcgcagatgttcaccgtgcgcgccttcacgcagacagaatccgagctgctttcgaccttccgcaagctgcgggcaatcggctatgaggccgtgcagatctcggccatcggcgcggggattccggtgccggcggtcgccgcgggcttgaaggagacgggcctcgcctgcgcggcgacgcacatctcctttgacgactgcaagaaggaccttgccgccgtggtggaaaagcaccgcgcctggggctgcgaatacgtcggcgtgggctccatgccggaagaataccgcgcggacgcggccgggtttgcgcgctttgcccgcgaggcctcggacgtggccgacgccctggccaaggagggcctcaagttcgtctaccacaaccacaacttcgaattccgctccttcggcggaaagaccggcatggagatcctctttgaggagacgagcccgaacttccagttcgagctggacaccttctgggtgcagaagggcgcctcggacgtgcgcgcctggatcgagaaggtccgcggccgcatggacgtcgtccacttcaaggacatggccctggacgacaagtccgagcaggtcatggccgagatcggtcagggcaacctcaactgggacggcatcatcgccgcctgccgggacatcggcgtcaagtggtacctcgtcgagcaggacgactgccgcggccgcgatcccttcgagagcctgaagatcagctacgacttcctgacgtccaagggcgtcaaatagttccctcgcgcgggtctggctttgccagacccgcctatttttttgcccgcgcacggaatatgtgtagtttggacagcaggggcagcgtccgctcccgaatcggaccggcgagccacggcgcgccctcgaggatcgcgcgctccacctcgtcaaacgtcgcgagccgcgcgtcgatggtctcgcttcgccccgtgccgcatgcgcggcccggggttccggccggcttatttggcccttcgggcacaaaacactcggccttcaggggcgctttcgcgcccccttcacttcgccccgtgccgcatgcgcggcccggggttccggccggcttatttggccctccgggcacaaaacgctcggccttcaggggcgctttcgcgcccccttcgcggggggcgcacatcggcgagcgcgaacggcagccgcacggcgtaggtgtccacaaactcttcctcgtacaccgtcgttccgagcagctccggctccgcgcccccgaggtccaggccggtctcctcccgcagctcccgccgcacagccgtgcgcgagtcctcgcccgccagcgccgagccgcccgggcactcccacagcccgccgaagcgtttgcgcaggtcgcgccgcgtcagcagcacgcgcccttgttcgtccagcgtccagatctccaccctcatgtggcgctccccggggccgaacgggtccccccgtcggtgcagcgccccggtcttgttccggttttcatcgtagacgtcccagtattccgtcacgagccttcccccgcttccctactgcctgtcccggaacgcgtgcagcttggacagcaggggcagcatccgctcccgaaccggaccggcgagccatggcgcgccctcgaggaccgcgcgctccacctcctcaaacgatgcgagccgcgcgtctgtcgtttcgccctcctgcaaacgcacgtcggcgagcgcgaacggcagccgcacggcgtaggtgtccacgaaggcgcgcgtctgcgtcctcgtctctccgagcagctccggctcggcgtccccgaggtccaggccggtctcctcccgcagctcccgccgcacggccgtgcgcgagtcctcgcccgccagcgccgagccgcccgtgcactcccacagcccgccgaagtgcttgcgcaggtcgcgccgcgtcagcagcacgcgcccctgcccgtccagcgtccagatctccaccaccagatggtactcctgcgggccgagcgggtccccccgccggtgcagcgccccggtcttgttccggtgttcatcgtagacgtcccagtattccgccacgagttttcctcctctccccttttcgagcccgggccgggccattgacggaaaagagagggattgcagcgcaatccctctctttcgcgcgttttcgtcagcagatgctccgcgcccgcacgacgccctcgatggcggagagcgcctgcgcgatgtccgccggaacgtcgtccagagagtcgaccaccgtgtaggcgatgtccccgcgcgagcggttcaccatgtgctcgatgttcacgttcgcctggcccatcaccgcggcgatctggctgatcatgttcggcacgttcttgtggatgacggagatcctgtgcttctccgccggggccagctcgcaggccggcaggttgaccgagttgcggatgctgcccgtcatcaggtagtcgcgcgtctgcttggccgccatgtccgcacagttgtcctcggactccggggtggaggcgcccaggtgcgggatcgcgatcacgcccggcgcgttcagcacgtcctcggtcgggaaatccaccacgtagcgccggagcttgcccgccgcgagcgccgccgcgaccgccttggcgtcgcacagctccgcgcgggagaagttgagcagcgccgccgagggcttcatcttcgccagcatggattcgtcgatcatgttgcgcgtcttgtccgagagggggatgtggatcgtgacgtagtcggactgctccagcagggcctccagcgagttcgagcgctggatcgagcgggagagcgcccacgcgttgtccacggacaggaacgggtcgtagccgatgaccttcatgcccagggcctcggccgcgttggccacgagcacgccgatcgcgcccaggcccatgacgcccagggtctttccctggatctccgggccgacgaactggcccttgcccttctccacctgcttggccacgctcgtctcgccgggcttgagtcccttggcccactccacgccgccgatgatgtcgcgggaggccaggagcagaccggccagcacgagctccttgaccgcgttggcgttggcgcccggcgtgttgaacacgcagatgcccgcggcggtgcacttgtcaaccgggatgttgttgtagcccgcgcccgcgcgcgcgatggagagcagggagcccggcagctccatctcgagcatcgaggccgagcgcacgatcaccgcgtcgggctgcgccgcttccttgctgacggtgaagtcctcctgcgggaggtggttgtagatcacgggcgaaatcgcattcagcgtttgaatcgtgtacatgggaaaatccctccgtccttcctatcctgcaatgccgggaaaatccggccttctgccttacttgttttccacctcaaactgcttcatgaaggccacgagcttttcgatgccttcgacgggcatggcgttgtagatcgaggcgcgcatgccgccgacggtcctgtggcccttgaggttgacaaaacccgccgcggtcgccgccttgacaaaggccgcgtccttgtccgcgtcgccggtgacaaaggtcacgttcatgagggagcggtcgcacgggcgcaccgggttgtggaagagcgcactctcgtccaggtagtcgtaaaggatcttcgccttctccacgttgcgcttttccatctctgcaacgccgccctgctgcagcaggtagtcgaacgtcagccccgccatgtagatgccgtaggtcggcggcgtgttgtacatgctgcccttgtcggccatgaccttgtagtccagcatcgtgggcgtgatgtccagcgcgtggccgagcaggtcgtcccggatgatgacgatggtcacgcccgccgggccgatgttcttctgcgcgccggcaaaggcgatgccgaacttggtgatgtcgtactcctgcgagaggatgcaggaggacaggtccgccaccagcggcacgctgccggtctcgggcagcctggtgtagcgcgtgccgtagatcgtgttgttgccgcagatgtagaagtagtccgcgtcgctgcggaactccgcctcgtcccagtccgggatctgcgtatagccgatgtccttggaggaggcgacctccttgacgtccgcgtacttcttggcctccttgatggccaggttggcgaagttgccggagttgatgtagtccgccttgccggtcttgtagccggacagcaggttcagcggcacctgcgcgaactgcatggacgcgccgccctgcaggaagagcaccttgtagttctcggggatgcgcatgagcgtgcgcaggtccgcctcggcctttgcgatgatctcctcatacatcttggagcggtggctcatctccatgacggacatgccggtgtcgccgtagcaaaccagctccttctgcgcccgctccaacacgggcaggggcagcatcgaggggccggctgagaagttatagacgcggttcatgacaacatcctcctaatttgcgatccagtttcggctctcgggggcggcgcatccacgatccctacggccatcgcgtattctcattatacacgctttacaggaaattgacaatcttttctcaagcgtgaagtgcgctcccccaaaagaaaatttgcaagccgcgctcccgcgcctgcatttttctcgaaaaaatgccgcggattctgcaaaatctgcttccttttcccttcccatcctgctatactgaaaaaaaggaagacaatcaaaggggagggatcgagcgtgaagtcccgaagacgcatcctctgcctggccgcgctggcgctggtcctggcgggcgcggggttcgccgccgcgcgcctgctgcatcgcgaagcgcccgatccgcaggcgccgttgccggccttcgcctttgcgcaggaggcggcgcccgcgcgcatcctcgagcgcgcgcaggaaatcgcgggcgggctgtaccgcctggcggagacgttctccccggacctggtgttggcgatcgacgacagcgaaaacctcggcctgccctacgacgaaagcctcgggcgcgcgctcctggaggaggcgaacgcgcagggctgcgagcccctggcctttgtgtacatcgggcagcactggctcctggcgcaggatgcggagggcgcgcacttcgcctgcggcatggaggagatcggcggcgacgcgcctgccttcctcaacgagggggaattcctccgccgccaccgcgcgtttctcgaccactacggcccgcaaaccaccgaggtcgtgcagctcgagccctgacggccccggagaaaaccgactgcgggcgcgcagcggaacgagaacgcccgccccccacccccgcgcccccaccggggagcgccgcgccggaaacccggcggcggcccccttctgcgaaggcggccgcgttccgcctgcggcggaaccggcgctccccaggccgcgcgtgccgccgcggccgcgcatccgccaaaaagacgcgcgccccgctccggtgcagcccggaagcggggcgttttttgcttttcctaggaaactcaacgcagggcgaagcgctcgaccgcgatggtgacgagcagcagcgccagcacggcgaaggagagcggccggatgaaccgcgcgcccttgcgcacggccagggaggcgcccaggtagttgcccgccatcgagcacagggccgccgggaccgccagggccacgagcacgctgccgctgctgaggaaggtgagcatggccgccaggttgctggccaggttcacgagcttggccgagccgctggcccgcaccagatccatcctgcagaaggcggaaaacgccagcatcaggaaggtcccggtgcccggacccacgaatccgtcgtacatgccgacgagcagaccgatcagcaggcacacccacgcccgcgccgggacgggcgcctcctccggcgcatccaggcggtcccggcggaagaacagcaccaccgccacgaccggcaccgcgatgaggagaaagatctgcgccgcgccctccggcacgagcaggagcagccgcgcgcccagcgccgcgccgggcagcgcgcccaccaccgccgggatcgccgcgcgccaggcgatgcggccttcgcgcgcatacttggccgtggccagcgccgtgccgaagaccgaacccatcttgttcgtgccgctggccagctgcgcgggcaggcccgcggccaggtacgccggcagggagatcagcccgccgcccccggccgccgcgtccacaaaccccgccagcgccaccagcggcagcacgatcgcaaaggtccagggcgtcagctccacgcgtcttccccctttgcgttgcgcagcatcaggatgcgcgtgcgcggggcatccccgccgggcgcactctggcgcagcgcctcggtaaacccgcagcgcaggaagcaggcgatggcccgcgcgttctccgacaggaccgtaaggcccaggctgcggaacccatactgctcctcggccacgcggcagagctcgctcaccgcgcggcggccgagctgcaccccgcgccagcgcggctccagcagcacgtggtccagccggcagcgccgcgcctcccagtcgagctgcgtgagcgaggcgatgccgatgatgcggtcaaactccagcgcgcggatcgcatagtccatctgcggcgcgccgatgtagtgcttgccaaaggcgaatgccttggagaaggccgagatcgtcagccggtccccccgctccccacccgcccagagcgggcggtagaggccggattccgggtcctccgcgatccaggagaccgcctcgcccagcgtctcccgtttcaggggctccagctcgatcgtcaccatggaggccgcggtcttttccatcgtgaccagggtcacgcggtcgcaggggcgctccaggtgcggctggggccggtaacccatcttgcgcagcagggcgatggccgcgccctcgccggagatcaccttggcgcggaagcgcgccgcggggcagcgggcctccgcgtgcagcagcgccacctgcgcgatgcccgtgcgccgcatctcgggccgcacgtagagctccaggatctcggttgcgtcctcgccggcggcaaggcgcagtccgcccacgatccgctcgcccagcgtcacggcatagacctcgcccgcgcggatctgagcgaggaagtccgcctcgctctgcacgcaggggcagtccgggctgctgtacgccccgtactggggaagatatgcctcgtaccgaatgcggtacagctccggcgcgtccgcaaccgccgcccgccgaagcagcaccattcgccgcccgctctgcacgcgccgtccctccccttttttcgtccaaattcgtgtattcctactcgagtatggcgcccggcgcgccgaccgagagaatcccggcctcctgcgcggcgcggtaggcggcctcctcctgttcggtggagacggcgccgcccgtgcacagcgcgccgaagagcgcgtaggtctgcgccgtctgcccgcccaggtccagcgcgtgctcgcgcacggcctcgtccggcacgcgcacggcgatcaggctctccggcatggagagcagctccaggttccgcacgcgcccgagcgcgcgggatacgccctcgtcctgcggggcgatcatgcccagcaccgcgtccgccgtgccgcgctccagggcgctcagcgcggcgtccaggtcgtcgtagcgcacggagccgtagagcgcgcaggtgagcacctgctgcgcgagcgaatcgccaaagccgcccgcctcgcccacgatgaccacgcgcgtgttccggtcccatgcgccgtagtcccccgcgcgcgagagcacggcgaagaccgccagcaccgcctcgggcgaggccgcgccgcccgcctcctgccacgtctgcgcgccggactccgtcaccagcgcgaactcgcactggccgctcgtcagctgctgcagggcggccgcgtcgtcctcggccacggcgtaggagaggccggccccggcctccgccatggcgcggccggcgggcgccgcctccgccgagcagagcacggccgcgtccgccggcgcggcgcagccgcccagggacagcgccagcagcagcgcgagaaccagcgccaaacccctgcgcagcttcacggacagcccccctttgcgccccttcacttcaggaacgcgttgtaaatggcgttgaccgcgcgctcaaagtccgcgctctccacgcccacgatgatgttgatctcgctggacccctggtcgatcatgcggatgttgatgccgctgtcggccagcgcgccgaaaatgcgcgccgcggtgccgggatagcggaccatgccgcggccgacggtggccaccagcgacaggccggagatgacctcgatgtggtccggcttgcaggtgcggcggatctgctcgaccacctcgtcgatgcggccggcgatggcgctgtcggagacgagcacggtcatggtgtcgatgcccgagggcatgtgctcaaaggagacgccgcactcctccagcgcggtcaggacccggcggccaaagcccagctcgctgttcatcatgttcttctcgatggcgatggcggtaaagcccttcttgcccgcgatgccggtgatcgcgccgcgcacgtgactctcgtccgcgcgcacgatcatggtgccggcgttctccggctcgttcgtgttgcggatgttgatggggatgccggccatgcgcacggggaagatcgcgtcctcgtgcaggaccgtcgcgcccatgtaggagagctcgcgcagctcgcggtaggtgatgacgtggatgcgcttggggcgcttgacgatgcgcgggtccgccatgaggaagccggagacgtccgtccagttctcatagagctcggccccggccgcgcgcgcgacgatggcgccggtgacgtccgacccgccgcgggtgaaggtcttgatctccccgttgggaagcgagccgtagaatccggggatcacggcgtactccgtgcggcccaggcgcgcggagagcacctcctgcgtgcgctcggcgtcaaaccggcccgccgcgtcgaagaagatgacctccgccgcgtcgatgaactcccagcccaggtacgccgagagcagcaggccgttcaggaactcgccgcggcttgcggcgtagtccgggcccatgccggaaaggatcgcaaagcgcgcctgttccagctgcgtggcgatgcactccggggaaaggcccagctcctccacgatgcccaggtaccgctcgcggatggcggagaacgtctcctcaaactcgtgcgcgcgcccctcggccgccaaggtgtggcaggcgtagagcaagtccgtgaccttggcgtcgtccgcgtcgcggcggcccggcgccgaggggacgacgtacttgcggttttcatccgcaagcaggatgtcccgcaccttgcggaactgtcccgcgtccgccagggagctccccccgaatttcgtgaccactattcccatgaaagtatcttcccctttccaaccgtgtccggcaaggcggtcttgcttatcctgcccaactgccaatgcacttaattatagagaaaatccgaccacttttcaagcgctacagcgcgaagattttgcaaaaagcggccccttgcaagggcgggattcgcccgttttgcggcgcgagagcgcgcaaagcgccccgcaggatttcgcggagcgctttgcgccggccggcgcgtcagagcagggtttcctgcgcgcgctggatggcgccgaggttctccccggcgtccgcgcgcgtcttgccgtttgccgcgcagtagaacttgatgttcggctccgtgcccgaggggcgcacagccagcgtcccctgcgcaaagaagaacttgagcacgtccgcgcggggcacgtccagcgcctgcaccgagccggaggcaaggtcgcggcgctgcccggtgaggtagtcctccaccgccaggaccgcaaggccgccaagctcggccaggttcgggtcgcgcagcgcctccatgcgcgcggcgatcttctcggcaaagtcgatgccctcgacgtggcggctgacggtcttctccacgcagtagccctgctcgcgctcgatctcctccaggcggtcgagcaggtccttgccctgcgccttccagtggagcgccatcttcgccacgagcgagcaggccagcaccgcatccttgtcgcgggcgaggtcgcccgtcaggtacccgtagctctcctcgtagccgaagaagaagcgcttgcccttcggcggcaggttctcggccacgtccccgatgaacttaaagcccgtgagcacctgctggacctcgatgccgtggctgcgggccacgcgctggcccagctccccggagacgacggtcgtcaccagcacgtcgccgggcacgggcgggcgcacggcgcagaggtagtcgatcagcagcgcgccgatctcgttgccgttgagcggcacaaagccgcccgcgcgcgcgacctgcacgcccacgcggtcgcagtccgggtccgtggccagcaggagctttgcccccgcgctctttgccgcctcgatggcctgcgcgtagacgcgcgcgtcctcggggttgggcatgtacaggccgccaaagtcgctgtccggctccatctgcacggtggttaggttcgaaaagcccagcgcgcgcagcatccgggagacgggctttgcgcccgtgccgtacaggccgctgtagacgaggggcaggtctgcggcgctcgcagcgctcgcagcgcccgcggcgtccgcctccggcagcatctgccccagggcctcgcagtaggcgtccatcacgcccgtgggctcggtcagaaggcccgcctcgcgcccggcctcaagggacaggtccgggttgccgaagaagtccacgccttccatctgctccgtgatgcgcgcggcctgctccgggatgacctgcacgccgcggcggtcgtagaccttgtagccgttgtactgcttggggttgtggctggcggtgacgaccacgccccagcccaggcccagcttgcgcaccgtgtaggagagcaggggcgtgggcacgggttcgggccagagcaccacgcggatgccgttgcccaggaacacgcgcgccgccgcgcgggcgaagacgtccgagttcttgcgcgtgtcataggcgatggccacggacttgggcgcgtcgctgccgaggatcacgcgggagaggccctccgtcgcgcgggcgacggtgtagacgttcatgcgcgccgggcccatgcccaggatcgagcgcagcccgcccgtgccaaaggccatcttcccggcaaaggcctcgagcttttcctcgtcgctctgcgcttccagctcccggagcgcctccgggtcgcgcgcggccagctccttttgccagcgcttccattcgtcctgccacatactgctcatcctttcctcttcctccaatcctgcgcgtcaaaccaatactgccgcttgtcgtactttccgtcccggtaaaagcccgcgaaccggccgcccgccttctcgatgacgtggcgggaggcgtcgttgtccacgtcgcaggtcagcaggatctcccgccggccgcggtcaaagcccatgtccagcagccggcgcaggatctcctgcgcaaagccctgcccccgctcggagggcgcgacgctgtagccgatgtggccggcccaggtcagcacgtccaccgtgtcgtaggggcgaagctgcccaaagccgtagatcttcttctcctcgtcgtccatgaggaagtagatctcgttggggttgctgccgtagtccatgcactccggcttggactgccggtccagcagcaacagccagcccatgtatcccacgcgcccgctggcgccgcagtacggctcctcgcccgcgcgctcgaagtcgcggtcggcctccatcacggccttgtagtgcgcgatcttcggtttcaccaagttcatgccgccacttccttaccgcggaattcgatggattttcctccaacagtataccacaggtttccgcgcttggctagccgccgcgcgcggccaccgcgccggaggaggagcccctcctccggcagcctcctcccgagcaggcccggagggaagcgcttcgccgcgcccccgcgcccgctccccgccccgccgcttcttccctgccgccccggggccaaaaacggcaggggacccggaagtccatttccgggtcccgcaggtttccgcgcttggcctaccgcggcgcgcggccaccgcgtcggaggaggagcccctcctccggcagcctcctcccgagcaggcccggggggaagcgctttgccccgcccccgcgcccgctccccgccccgccgctttttccctgccgccccgggggccaaaaccggcagggggcccggaagcaagcttccgggtcccgcatttacaggtttccgcgcttggcctaccgccgcgcgcggccaccgcgccggaggaggagcccct

SEQ ID NO: 2635 - DNA, 30911 bp, Unknown
  16S sequences of unknown bacteria
agatggtcaaattgggtaaggttatttgcagcctccctcaaattcctccggaattctcccacgttctggactccgggagggctgccaatagatggtcaaattgggtaagaatatttgcagcctccctcaaattcctccggaattttcccacgttctggactccgggagggctgccaatagatggtcaaattgggtaaggatatttgcagcctccctcaaattcctccggaattctcctacgttctgggctccgggagggctgccaatagatggtcaaattgggtaaggttatttgcagcctccctcaaattcctccggaattttcccacgttctgggctctggggataggggcgctgcccggcaacaatccaagaatgctccgcgtcattccccttcccgacgttccctgtggggccggatattgctctccttgcagataaaaatcggacgccgtttggtttccatgtaggttttggccaggtattcccccaaaatccccatggagagcatttgaatgccgccgaggagcaggatgatgcacacaagagagggccatcccgcgaccggatccccgaaaatcagcgcccgcacaaagatgacgatcaggaagacgaacgccaaaaaacagaagagcacccccatgagcgccgcgacggccagcggtaccgtagaaaacgccacaatgccgtcgatgctgtacaaaaacaatttccaaaaggaccacttggtctcccctgcagccctctccgcattttcgaattcgatccatttggtgtcgaagccgcaccatccgaacaagcccttggaaaaacggttgtattcaccgagttccagcaaggaatcaacatattgccgtgtgagaagccggtagtcccgggcgccgtccatgatttcggtcttggacaatttccggatgagccggtaaaacaaacgggcgaagaaggaccggactgccggctctcccttgcgtgtcacccttcgggtggccacgcagtcacacccctcgtcgcggatgccccgcatcatctcgggcaacagggcgggcggatcctgcaaatccgcgtccatgatcgccacataatcccccgaggcgtagcgaaggcccgcatacatggcggcttctttcccaaaattgcgggaaagggagaggtatttgacccggctgtcggtctgggccatctccttgatccgggacagggtggcatccttggaaccgtcgttgacaaacacgtattcaaacacatattccggcatcaaatcggagatccggcagatttcccggtagaacagcgggatggcctccacctcgttgtaacagggcacgacgactgagattgtttccataccgggtcccctcctgctgtcagatattgtcccattccccagagccggcatctctcatcagcgaagatccagcgtctgcacctccaccgtccgtccggtggcgtcgtcgaggacgaagagaacggcgttgagcatgcagggccccggcgcggtcgcaaaccggacgggcagtttatcccgcattttggcaatcgcgagctccggacgaatgccgagcaccgattccaccggcccggtcatgcctgcgtcggagaggaagccggtccccttcggcaggatctgtccatcggccgtctgcacatgggtatgggtgccgaaaagggcggatatccgcccgtccgcgtaataggcgagggccttcttttccgccgtggcctccgcgtggaagtccacaacgcagaacttcggatgccctgcttcctccagcagccggtccagcgtttcaaacgggcaggccagcggttccatatataccacgcccatcaggttgatgaccgtgacctggaaacgccccttatccaccacacaccacccttttccgggggcggaagccgggtaattccctggacggatgatacagggcgagccgtcgagaagctcatagaattcccggcgccggtaggtgtggttgccggccgtaatcgcgtcggcgccgctgtcgaggatgtgctcggcggcggcgggcgtgatcccgttgccgtcggcggcgttctcgccgttgacaatacagaggtccacagcgtattggcgctttactaccggaagcagccgcctcaaatgggcgcagccggccgaacccacaacatcgcctacacagagaatattcatggcaccaggccttcctttccatcacggcagccagcagaaaacagcatcgcgcgggggtttcccgcgcgatgcgccatgccgttttatttcgcgaactcgaccgcgcggttttcgcggataagatgcaccttgatctgtcccggataatcgagggtggcctcgatttttttggcgatatcgcgggccagcagggtcatctgatcgtcgttgacctggtccggccgcacaatgatgcggatttcccggccggcctgaatggcaaaggaacgctccacgccctggaactcatttgccacctcttcaagcttctccagacgcttgatataattctccaggttttcgcgccgtgcgcccggacgggcggcggaaatcgcgtcggctgcctgaaccaggcaggcgaccacggtcgtggcctccacgtcgccgtggtgagcctggatggcgtgtacgacagcctcgctttccttgtacttgcgggcaatgtctacgccgatctcgatgtgggagccctccacctcatggtcgacggccttgccgatatcatgcagcaggccggcgcggcgggccaccaccggatcaatgccgagctcgctcgccatgatgccggacaggaaggccacctccatcgagtggttgagcacgttttggccgtagctggtgcggtaacgcaaacggccgagaagacggacgatttcgggatggatgccgtgcaggccggtttcaagcacagcgcgctcaccctcggatttgatggtcgcctctacatcgcggcgggccttttccaccatttcctcgatacgggcgggatggatacggccgtcggagatcaggcgctcgagcgcctggcgggcgatttcacgccggaccggatcgaacccggacagggtgatcgcctcgggcgtgtcatcgatgatgaggtccacgccggtgagcgtctcaatggtgcgtatgttacgcccttcgcggccgatgatacggcctttcatctcgtcgttcggcaggggcaccaccgaaaccgtggtctcggtcacctgatccgcggccacccgctggatggcatgggaaatcaggttgcgcgcgcgactgtccgcctcgtccttgagctgggtctcgaattcgttgatcttgagcgccttttcatggctcagctcctgggacagattgttcagcaaatactctttagcctgttcggcggtgtagccggagatacgctccagcatttcgaactggcttctcttcaggttttccacgtcgttcagacggttttcgatctcctgctgcttgctcgcaaggagctcctcttttttctcgtagttctcgattttgcggtccagggtctcttctttctgctgtatgcgccgctcctggcgctgcacgtcgctgcgccgctccttgagttctttttcggattcgttgcgcagacggtggatctcatccttagcttccagcagcatttccttcttcttggattccgccgcgctcttggcttcgctcataattctctcggcttcggcctcggctgaaccgatcgcggcttccgctgtcttttttctatgagaaacgccggacttgaacgcgacgaaaccggcgataacagcaccaacgagcaaccctgccacgcacaacagaataccgaccaacagtggtatctgcacttctacgatacacctcctatgatttacttttcgcttttttaaagctatccccccgcccgtttgggacgcatggacaggccatgcggggaatcttcaagtacaaaaagggatggaatgcaggaaaaaaacgacaccgtaccgttttatattcctgtatatccatcctttattttatcgcgcttgtcactactctgtcaagtacaaactttcttttgctcatacttttcgggagagacgcttggtattcatgccgggaatggcgtcccagcgggattttttgacgtaacccgtatcgatttcagaaagaaaacggaaatggcccgtccaaacggacgggccacggcattcctcatgtccattcctgcagggtgccggtcagttcggtaatgctcgaaagcttctggctttgtgcaaaagcggccaggccgtcaataatcttcggcatggcgaagggatcccggaaattggcggcgcctacctggacggcggcggcccccgcgatcatcatctcggccgcgtcctcccaggtggagatccctcccattcccaccaccggcaccctaacgcggcggtacacctcatgtaccatccgaaccgctaccgggaatacggccggtccggacaggccgccggtgttgttgtgcaggatgggacggcgggtacggatatccacccgcatcccggtcagggtgttgatcagggaaagggcgtccgccccggcggcctccgccgcggcggcgatatccccgatggaggtgacgttcggggtcagcttgaccatcaggggcttatccccgcaccgttttttcaccagcgccgtgacggcctccacgctgccgcaggacgtgccgaaattcaccccgccctccttgacgttggggcaggagatgttgagctcgatcagatccaccgcgctgtcccgcaagcgttcggccatttcgccgtattcctccaggctatggcccgcgatgttcgcgatcaccgccgtaccctgtcccttgagccagggcaggtaggtggacaggaacatctccaccccgggattctggagccccacgctgttgagcataccggagggggtctccgcgatccggggggacaggttcccctgccgttcgcggagcgtcgtccccttgcaagagatgccgcccagcgtcgagaccggataaaattcgttatattccatgccgtagccgaaggtaccggacgcggcaatgacggggttttttagttccaccccgcagagattcacccgcatatcgctcatgtccagtccacctccgtcgaacggaataccgggccgttgaggcacacccgggtcatctgcgtcccgccctgttcgttcttggtcttgcaggtgcagccaagacaggccccgacgccgcagcccatccgctcctccatcgacacgtagcagaccgccccggcctcctccgcgagcttcgcgacccccttcatcatgaccttggggccgcaggtatacaccacccccacgtctccctccgaaagccgctgttcgagcgcctcggtggtaaagccgtggaagcccgccgacccatcgtcggtacagaggatcgtcttagccccggacgcggcgaaatccgcctgcaggatcgcggcggaggcggtgcggaagccggtgatgacggtggcgttggccccgtggaactgagccggcggcagcaacggcggagtgccgatgccgcctcccaccagcacggccttcttcgaagcatccgtgagcggaaaaccgtggccgagcggcccgatcagatcgaggctatcccctttctgcctctgtgccagccaggccgtccctttcccccgtacctcaaagatcaggcggaggatccccagagccggatcgaacccggcaatggaaatcgggcggcggagctgataaggctcgcacaggacctggacaaactgccccgccgaggcggccgacgcgattgttttggcggacagcacggtattgtacacaccgggggcgatttcctcgatatggaggatcgccgcctgctcctgggtataacgcatagacatctccttttcagacgggccgggtcccggcccatcagacctttgtgatatcgatgagctccatatcggccatggtctgatccatggcaagacagcgcagcatggcctcggccgtgtccaccgaggtgaagaccggaatggcccgctccaccgccagccgccgcatccgcacgctggcgagcttgggatcccgcccgtgggcgtcggtggagaggatgtagtcgattttgccgctttccagcagatccgcgatgttgggatgctcctcgtggagcttgcgcaccgcggaggccgggatcatctctttgttcagccggttggccgtccccgccgtggcgtagaggtcgaagcccagggcgcggaaccggtccgccacgtgcagggcctcgtttttatccgaatcccgcaccgtgatgaggacgccgcccgacttcttcatcttgtagccggcccccaccagccccttgagcagggcgctgtcgaaacttttggccaggcccagcacctcgccggtggatttcatctccggccccagctggatgtccagatcccgcaatttttcgaagctgaacaccggcaccttgaccgccacatatgccccttccggatagaggccggtgccgtagcccataccggcgagccgctcgccgaacatgcaccgggtggccagctccaccatggggacgttggtgaccttgctgatatagggcaccgtccgggaagaccgggggttgacctcgatgacgtacaccgtgtcctgatataccacgtattggatattgaccagccccaccacgttcagggccctggagagccggccggtgtaatcgatgatggtctgccggatccgttcatcgagtgtctgggtgggataaaccgagatggagtcgcccgagtggacacccgcccgctccacatgctccatgatgccggggatcagatagtcctccccgtcgcagatggcgtccacctccacctccttgcccatcaggtacttgtcgatgagaaccggattctccagcttgtgggaggtgatgatagccatgtattcggtgacgtcgttatcgtcgtaggcgatgatcatgttctgcccgcccagcacgtaggagggacgcagcagaaccggataccccagcttccgggcggcggcaagagcctcctccgcggtcatgacggtggtgccctccggccgcggaatgccgcaccgctccagcagatcgtcgaaccgttcccggtcctccgccgcatcgatgctgtcggccggcgtacccaggatcttcaccccgcgtttttccaggtgtttggtcagcttgatggccgtctggccaccgaactggaccaccacggcgtcgggatgctcggtggcgaggacgttgtccacgtcctccggggtgagcgggtcgaagtacagccgatcggcggtatcgaaatcggtggacacggtttcggggttattgttggcgatgatggcctcataccccagcttcttcagggtgcggacacagtggaccgagcagtagtcgaactcgatgccctggccgatccggatggggccggaaccgaacactaccacccgttttttgcccgtggccagcttttcattgtgaagggccgcctcgttctcctcatcccaggtggagtagaaatagggggtttcggcgtcgaactccgcggcgcaggtgtccaccatcttgtacaccgcatggcggctgaccggcggctgctgtccggaaaggcgctcgatggtgctatccagataacccagctttttcgctcgcagataggtctcttcatccagcggagaggaggcgagctccttctccatggccaccagccgattgagtttcgacaagaaccaacggtcgatccgggtcatgtcgaagatctcgtccggggtcatgatctgccgcttgagggcagcatagatagcaaaaagccgttcgtcgtccatccgggcgatgatctcccggatctcttcgtcgctctttttttccagcttgggcaggttcagggtgtcgatgcccagttcgatggaccgcaccgccttcatcagggcaatctcgaagccggagccgatggacatcacctcgcccgtggccttcatctgggtgcccaggcggcggtcggcgtagacaaatttatcaaagggccatttgggaaacttgatgacgcagtagtccaccgccggctcgttgcaggcgtaggtcttgccggtcacggcgttgacgatctcatccaggcggtagccgatggcgattttgcaggccaccttcgcgatcggataaccggtcgccttggatgccagggcggaggaccgggagacccggggattgacctcgatcacggcgtattcccgggaatccggtttcagggcgaactggacgttgcagccgccctcgacgccgagggcggtgacgatgttgagggccgcagcccgcatcatccggaattcggaggcggacatggtctgggcgggggcgacgacgatggaatcaccggtgtggatccccaccggatcgacgttttccatggagcagacgtcgatcgcgttgcccgcgccgtcccggatgacctcgaattcgatctccttccacccggcaacgctcttttcgatcagcacctgatggatcaggctggcccgcaggccgcccgcgcagatctcccgcatctcgtcgtcgctgtggacgaatccgccgccggtgccgcccagggtgtaggcgggccggaccaccaccggatactcgatttcatgggcgaattccagagcatcctccaccgattcgaccaccttcgaagggatgcagggctccccgatggacagcatggtgtccttgaaggcctgccggtcctccgcctttcggatggtttcgggattgacccccaggagcctcaccccccgggaggaaaggaaatccccctccgacagctccatcccgatgttgagccccgtctgtccgcccatattggcgagcacgctgtccggcttctcaatgtcgatgatccgtttgacgacctcgacggtgagtggctcgatgtagatgacgtcggccatggtcttgtcggtcatgatggtggctggattggaattgaccagcaccacctcgagcccctcctccttgagggcgcggcaggcctgtgtgccggcgtaatcgaactccgccgcctgcccgatgacgatcggcccggaaccgatcaccagtacttttttcacgtcttgccgtttgggcatattgttaccatccctttctgtggggcccggggcccctgcgctcccttttctgtttccaaacggccatcagccgcgcgttcccatcggcttctcccgcagcaaacgcacaaacgcgtcgaacacccaggcggtgtcctggtatccattgccgtcggagggctcgaactgcacggtgaggatcggttttgtccggtagcgcaggccctccaccgtcccgtcgttgacgttgcgcaggaaggcatcggccacctcgtccttcacgctgcggagcgccacggtgtagccgtggttctgttcggtcaccattacccggccatcatccagattccgcaccggctggttgctgccccggtgcccgaccggcagcttttcaatttccatatccgcggccaccgccatgagctgatggccgaggccccagccaaacatgggacggccgctctccgccagggcacggaggatgccgatgatctccggattgtcccaggggtcccccggaccatcggagagcacgatgccgtccgggcccgcggcgaggatatcctccgccggcgtgtgggccggatagagggtgcaggaacagccccggcgcaggaaatgctcgaggatggacacccggaagccgtagtccggaatcgcgagctcatacagcggacgctccgcctcccaccgctggggtttgctgaccgtgattttccccaccgccggcggtacccggtaggtcttcagccgttccatgcggtccgcagaggcatcaggggtatccacgatcatgccgttcatcacgccatgatcccggatatgccgggtcagggcacgggtgtccaccccgcacagtccggcaatgccgagaccgcggagatattcgtccagggtgacgaactcgtgggcatcggtaggctccacgcaccattcccgcaccacatagccgctggccacaaatttcgaagggctcaccggatccacaccccggttgccaatgagcggataggtttgtaccacgatctggcctgaataggtcggatcctggagcaggtcctggctggtggtcatatcggtgttgaataccacctcgccgatcgcctctccggcagacagatcccgctcggcccccatggcatatcctttataagcagtgccgtcctctaaaagcaagtacgctgttttcattcgaatgcccatccctttctgcttctccgtgcgcccgcatctttccttatcaacgtgtcgtttcaacctcgtttccgcagcgccgcgaggatatcgtcccgcatccggatggcctcccgcagagcggccccggcataatcctccggcggcccgttttcctttttccacgcgcagaggatggcccgggaggaattaatcaccgcgccccgcccgttttcatcgaaggcgccggccacatcggccgcgccgcccccctgggccccatagcccggcaccaggaaaaaggtgtggggcagggccgcgcggagttctgcgagctgggccggataggtggcgcctaccaccgcgccgacgccggaatagccgtatgttccgggaagctcctccccccaccgctcacacatggcgcccatgtggcggtaaaccggctccccgtcgatcctcctgtcctgcagctcgccggaggaggggttggaggtcttgaccaggacgaaaatgcccgcatcacgctccctgcataccgtcaggaggggctggatgccgtccgagcccagatatccgttgacagtcagggcatccccgccgaacggttcgcacagcgtatcccccaccttcacccgtcccagatgggcggcggcgtaagcctccatggtggcgccgatgtcgttgcgcttgccgtcggtgatgacgaacatccccttgcctttggcataggcgatggtttccgccagggctttcacacccggccatcccagcctttcataataggcggcctggggcttgacggcgggcaccgtaccgcacagggcgtcgatcaggccccggttgtatgcgagaacggcggcggcggctccttccagggtttctccgtactcccggaacgcctcttggacgatgaaatcgggtatgtagtccagtttggggtccagtcccgctaccgtgggatttccggtcttggctatcgcgtcaatcaatctgtccagcgccatcgtgttcctccgtcaagttgaatttgattggaaagcggccgctttccgggtgaaagggaaggatgcgggatcgtggtccccgggggcccccttctataggagccgtcggttcaggtgtttgggccggggaggctttcctaagaagaaagccgacagaaccccccgggggttcagggggttcaccccctgacgtttctttctcccttttctttacgtaaagaaagagggtgccaaaggcatacatgccaacgcataaaaaggtttggcctgcgggccacatacttttgcccgagcttcagctcgtgagcaagaagtatgcaaaagtgcttcctggggtcccccggaccccaggtgatcggccggttttctcttcaggaaaaccggcagaagcgcggattcccgaagcaacggccataccggaagggggcccggggattggaagcataaaacaatggaaaaacaatcagcccggccccggggattcgggcgttctacagccggagggcaactccccccgtcacagggagagcggctcgcccaggagatccgccgcttcggtttccggcagctcctccacgcttcgcagcttgttctggatgatttcggtccgtttggcggctttgcccaaattgtcggtcgcctcggaaagctttttctgcgtcgcctccagcgcgaccccaaaccggccgaaatccactttgatcgccccgagcatcttccacacctcgcccgagcgcttctggatcgccagggtgcggaagcccatctgcaagctgttgaggaaagcccccaaggtggtggggcccataatggtcacccggtaatccctctgcaggacggtgcacagctcggcccgtctggtaacctcggcgtacagcccctcggtgggcaggaacatgatcgcaaaatcggtcgtatggggcggcacgatgtatttatcccggatgctgcgggcgttttccttgatgctggcctccagctgccgcgaggccgtatccacctccgcgggctccccccgctccgccgcctcggtcagccgtatgtagctttccatcgggaacttggaatcgatgggcaagtaaacggtgtcggccccgtcctccttacccggcaggcagatggcatattcgacgatttcgccccgccggggcgccaccttgacgttggcccggtactgctggggggtcaacacctgttcaagcaggcttccaagcgatatttcgccccaggtaccccgggttttgacattggtcagcacctttttgaggtctcccacccccgcggccaggctctgcatgtcccccaggcccttgtacacccgttcgagctggtcgcccaccgccttgaagctctcccccagccgggtttccagggtcttctggagcttttcgtccacggtctggcgcatgctgtccagcttccgggcgttgtcctcctgcagactctggagccgccggtccaccatccgggtcatctgatcgatgttggtaccgatgatttggccggcgtttttgaaggaggtatccagctcctgccccagcaggctgacctgttgggcggtcagccggttctgctcggcaagttcccggcgaagctggtcataggtcagggcatcccgtctctcccggccccgaaacaggaggacaagaagcacgacgagattcaggagcaccgcggccccggacaggatcaggctcagcttgtccatgacgccgctccttccgcaaagaccacccggccgcccagcatggtgaacctaaccttgcctgtcaaagccatccccttaaagggggtattccgggatttgccgtggagcttgtccggacggacggtccagtgcgccgccggatcgaacaggatcaggtcggcaggtgcgcccttttgcagggtgccgcccgggacacggagcagccgggccggattccaggccatgagcgtaaccagttcggacaaggtgagcagccccggcacgaccagcttggtataacagaccgcaagggaggtttccaggcccaccgcgccgttgggagccttcacaaaatcggctttctcctccggggcatggggggcgtgatcggtggcgatgacggtcagggtaccgtcctttaagccctgcaaaaccgccgctacatcttgctcagaacgcagcggcggattcatgcggtaatcggcgtcccggctgagaagctgcgcgtcggttaaggcaatataatggggcgcggtctcccccgtcaccggcacgccccggcggcgggcgtcccgaagcagctccacgctcccctttgtactgacatggcagatatgcaccgggcagccggtcgcggcggcgagggcgatctcccgggccgttgcggcctcctcggcggccgggtggatccccggcactcccagagaacgggacacgctcccctcatgcatgatgccgccggccgcaatggacaaatcctcgctatgggacaggagcggcagccccgcggatgccgcctcttccagcgcccgcttcatcatcgccccggtgggaacgggacggccgtcgtcggacacggccacggcccccgccgctttgagcgccgcaaaatccgtcatctgttcccctgcaagcgatgccgtgacggcggcgacgggatagacccgcgcggccgcatccttcgccttgtcccggatctgccggaccacgtccggacagtcacaggccgggctggtgttcggcatacaggccaccgacgtcaccccgccggcggcggcggcccggcagccggattcgatatcctccttatgggtctggcccggatcccgcagatgcacgtgcgcgtccacgaggccggggagcagaaggcagccatccgcccggatctcacgggcatcggcggaaagggaccggccgaaatcggcaatcaccccgtcccgcacgagcagatcgagcggttcgttttccagcccctgcgacggatcggttattctcgctccgcggatcagccattgtggcattccggccgcctcccttcgactttctaactgtatagtatagcatagttgccaaaaggttacaatcctttcattgacaaaaatccatccctgccgatgaaaaagcttgcggtatttcaacaaaaagccgaaggaaccggacaaacctcatccaaacgcaacaacccttattcaaaaccatcaaattttggcgaaaacacgacgagcccagcccgataatgaattttttatgaaagtttcgttcaaagttcttgcaaaaaaccagattatccattataataggcaacagcgatcaagctgcatcttgtaataaaggagagggtcccatgtcgtatgtcgaatccgtccttgcggagctgatccgcaagaaccccgcccaggaggagttcatccaggctgctaccgaggtcctgcactccctggaaccggtcatcgaggccaatccccagtaccagaaggctgccctgctcgaacggctcgtagagccggaacgggtggtgatgttccgggtcccgtgggtggacgacgcgggcaacgtacaggtcaaccggggtttccgggtccagttcaacagcgccatcggcccctacaagggtgggctgcggctgcatccgtcggtcaacctgggcatcatcaagttcctgggcttcgagcagatcttcaaaaactccctgaccggcctgcccatcggcggaggcaaggggggatccgatttcgatcccaagggcaagtcggacaatgaggtcatgcggttctgccagagcttcatgaccgagctgtaccgccacatcggtgcggacaccgacgtacccgccggcgatatcggcgtgggcgcccgggagatcgggtatttcttcggccagtacaagcgcctgaccaaccggtatgagggcgtgctcaccggcaaaggcctggcctacggcggctccctggcccgcacccaggcgaccggctacggcctggtgtatttcaccgaggaaatgctgaaggtcatgggtgattccttcaagggaaagactgtcgtggtttccggctccggcaacgtggccatctacgcaaccgaaaaggcccaatccctcggcgccaaggtcgtggccctgagcgattccaacggctgggtgtatgacaaggacggcatcgacctcgctctggtcaaggagatcaaagaggtccgccgcggccggatcaaggaatacgccgacgcccgtccctccgccgaataccacgaaggcaagggcatctggagcgttccctgcgacatcgccctgccctgcgcgacccagaacgagctgctgctcgacgacgcgaagctgctggtgaaaaacggcgtcaaggtggtggccgagggcgccaacatgcccaccaccctggaggcgaccgaatacctgcagcagaacggcgtggccttcggccccggcaaggcggccaacgccggcggcgtggccacatccgccctggaaatgagccagaactccatgcggctgagctggagcttcgaggaagtggacgagaaactccacggcatcatgaaaggcatccatcagaacgcctacgccgcggccgaaaaatacggctgcaagggcaactacgtcatgggcgccaacatcgccggtttcgtaaaagtcgccgacgccatgatggcgcagggcgtggtctgatccgttcgggataacctccccgggttctgcggaacccgggggatttttttaatcaggctttccccttccccctgtccattttccgtgggatatgctatactggacccatcccgtgcggcctttgtcaccgtatctttcacagttcacacagcgtacataatcatcggttacactaaaacacacggatacccgtatccgcccgaaaggagagaccgacatggcccacccgtccccggacactgcgaaaaccaccatcctgatcgtggacgacgagacgcggatgcgccgcgtcatcgccgattatctgcatatcaaaggctatgagaccgacgaggccggcgacggcgtcgaagcgctcgaacgctttgaagccggttcccccgacctcgtcctgctcgacgtaatgatgccgcgcatggacgggttcgaggtatgccggcacatccgggcaaaaagcgcggtgcccatcatcatgctcaccgccaaagcggaagaggaagacgaactgcagggcttcgggctgggcgtcgacgaatacatctccaagcccttcagcctgaaaatcctggccgcgcggatcgaagccgtcctgcggcggcgttccgccccgggcaccaccgcctcccccgccctgccctccggcttatcggtcgatacggccggacgggtggtccgggtggacggcgaaccggtcgaactgacctatacggaattcgagctgctgctctacctgatgaacaacgccggcatggccctgtcccgggacaaaatcctcgacaacgtgtggcgctatgattattacggggacgcccggacagtggacacccacatcaaaaagctgcgcggcaagctcggtgaatacggcgaccatatccgcaccatccgggggatcggatacaaattcgaagcatagaaagggctgtctatggaagcgaaacagcgcaagggcctgcactcggtcctgtggaagatcacggctgcgatggtgctgtgcatcctgctcctcctcctgttcaactggctgctcaacaatttcgtcctccagtccttttatacccagcagaaaaagcagggcctcgaggaggcatacgtccaggcggaccgcctcatccaggacgacgacgaggcgtttcgccgcgccatggacgacctcgcccagaccagcaacatgttcaccctgatctggaacacccgccgcatgatttacgattttcagaaccggaccgccggctttatacaggtcccgtatttcgacatgtctcccgggacctatcaggtcgtggaagaggaaaaaagcctctccattcccgaggattacctccagtcccgctccatcaagctgtacggccgcctgcattccggggagtatatcctcatccagacccccgtggccgcgattgaggagagcatcgccatctccaaccggttcctgctgttttccggggcggtcaccctgctgatcagcgtcctcatcgtctgcctcgccgcccgcagcttcatccgtccgatccggcgcctgtcccatctggcccaaaatgtggcccgcctggatttcagcgagcggtataccggccgcggaaaggacgagctggctgacctcggcaacagcctcaataccatgtccgacacccttgagcgcaccatccgggaactgcaggacgccaacagccgcctatcccgcgatgtggaagaaaaaacgcggcagaacgaggcgaggcgcgccttcatttccaatgtctcccacgagctcaagacccccatcgccctgatccaggcctacgccgaggggctgcgggaggatatcgccgccggcaccggcaaccgggagtattactgtggggtcatcgaggacgaatcccagaaaatgtcccagatgatcaaaaagatgaccctgctcatgcagctcgaggacggcagcagccaactggagccggaagccttcgacatcgccgagctgctgggcaacctcatgcggaaaaacgccatcctgttcgaggaaaagcacgcccagctcaccctgccggccgaccggccggttttcgtgcgcgccgacgccttcctcatcgagaacgtcctctccaactacctctccaacgcgctgcaccatgtgcgggacggcggggtggtatcgggcgtcatccggcgggccggtgacgaacgggtgcgcatctcggtttacaacgacggcgcctgtatcccgcccgccgatctgcctcatatatgggaaagcttttacaaggtggacaaggcccgcacccgcgcttacggcggtaccggcatcggcctgtcggtcgtcgcggcgatcatgcgggctcaccggatgccctgcggcgtcttcaaccgccaggacggcgaccggacgggcgtggaattctatatcgagctcgagcaggccgggccgcccgccgaatccatctgacaggaggcggccggtgtgaacaataggaaggccccgccatccctgacgttccgggggatggccgatgcccgggaggattatgcccggctcaaaacctggctctgcaatcccgcggtccggaaatggtacggcgccgacgattttcccgtcccgccgtccttggaagacgtggtgaagaaataccgcgtcccctctcttctggaagaggaggtccatccctgtttcattttggcggacgggacgcctgtcggctatatccaattctatcccatccgggatcacggggacggcgtctgggggatcgatctgctcatcggggaggatcgattccgggacaggggcatcggcaccctcgcactgcgggccatgacccattttctgtttgaagagaatcaggcccggaaaatcacaatggatcccgacgcgcggaacgcgcgggccatccgctgctatgaaaaatgcggtttccgtccctatgcccggtccggctctcatctcatcctggttttggaccgatcctgataggccggaaaggcttggaatatcacggtgaaagcggcccatccgggctgctttcaccgcgtttttttcctggttttatgataagaataataaaatcattcacattataaaattcgtactttatcgcctaatttctcccatgtgttatggcaaaaacacacaaatagatattttgtgagcatctttcccatatcgagtctttttcattgacattccctttccagctctcctatactggtgccgttcaccagattcttccaattggggagaatgcgaaaagggaggatgaaatatgaagggatggacaagccggatagcggcgcttttgaccgtcggcgccgtactgctcggagcggcgccgttttccacgtcggcacagacacgggccggcctcaccgtttccacaggactggaggccgcggcgctggccgattatctgctgtcggcgcctcttgcctccactgaaggcagcgccgtggctacctgttccgataaatgccagatcggaaccttttccgatgcggccgggctgaccgggctggacgggggcgttatcctgagcacgggagacgccgcggccgattttaatccgggagaccctgccagcaaggggtttccctctgtacagaaccagcccgacggcgacctcacccgtctcaacggcggtgccgccaccaaggacacggccgtcctggaattcgaacttatcgccaccggcgacctgctcaactttcagtatgttttcgcctccagcgaattcgagcaggatgaaccgtataacgacgtgttcggcctctttatcgacggtgaaaacatcgccctgcttcccgacgggagcccggtgaccatccagaacctcaaggcttccaaccgtttcctgcccgaccctgattttgagcggagcgggttcaacggcatttccaccgtgctcacctgttcgaggccggtgacgcccgggcagcgggtgaaggtcaagatcgccatcggcgacgtcatcgacaacgccttcgactccgccgtgctcctcaaggccggctgcctgaatttcgagccggcccgctccgccatcgatttcgaagcggaaaccctgatcaatctcgatcccgccgcgacatacacgatcacggcgggtgacgacatctattccgtcacggccgacgccaaaggggaaatccccttggccgggaccgatgacgacgggggcgcttaccgcctgttcggccgggatatcctgctggtgcccctatccggggacgcccctccccgtctgatcgccgttggcgaaaagcccgcgaagcccgccgccccttccggaccgtcctccctgcccggcggcggttcggatatcgccatcgcgggcgacaccctgactgtcagcggggttgcgggacaggtctattcactcgacggaggcgccagttggcgggtagcggagggcaatccgccccatgtggtttttgagggcctgatccctgggcggacctattctctcatcacccgcgtccccgccaccggcaccacattcgcgtccgatccgtcggaggcgctgaccttcgagctgctgagcatgttcggcgccgatgacttcgccgtctccccggaaaacgggccgtacgacggcctggaccacacgatcgcgatccaggcgcccgccggggtgacggtcacatatgccgcggcgccgtccggcccctatggggacaccccgccctcctaccggaatgccggcagatacaccatctattaccgcgccgaacagaacggctggtatccgtactatggacaagccgagctgctgatcggccgggccggcctgaccgtcgtcccgctgccggatcaggaaaaattcaccggccaggcggacccggaactgcgttatacctatcggggagcgatacccggggaaacgccggccttcaccggggcgctctccagagaaagcggcgaagcgccaggccgctatgccatcgattccggcagcctcgcgctggcggatggggacgggttccgagcggacaactacacgctgacatgtgaggaaggcacccttttcaccgtccgcgccgctgccgcgggcctggaggatctcatcctcagtcccggggcggagctctctatgcgggaaaatccgtcggcctggaaccgggctcccatcgttctcaccccgtccaacggctatacccgtttgtcccttgacggctccgcctggacggataccctcaccctttcctcgcccggagaaaaccaggccgcgtccctgtatctgcaaaagccggacggcaccatcgcccagccaatcacggtctattataacctggatacggaggcccctgccggcatccgggcaagctacgctcccaaccggtttttccagtttctccacacggtcacgttcggcctgtttttccgggagacagtcacagtcacgctcaccgccgaggattcgctcagcggtgtccgggaatttacctacactctttcggacggccggacgggatcgacggcgtcctccttccgaatcgatccgcagttcaaaggctcctttaccgtcaccgcctccgacgaggcgggcaacgaatcggcacccgtctccttcgaggctttcgctgtcgacagcgaagcgccggatgtccccaccctctccttcggaggctatacgccgggacagtggacgaatacggccgtcaccgtcactgtgagcggctcctccagcctgagcggcatcaaaggctatcaggtccggaccggcaacggcccgtggcaggatatgccggccctcgagaccgcccccgccacatccgaagctcccgcttccgtcctttcctctatcctgactgccgatacggatggggaaaccgcctatgcgttccgtgctgtgtccaacaacgggctggctgggcccgccaccgacccggtggtcattgccatcgaccggactgttccgaccgtttcggtatcggccggcgggtatacgggcggctggacaagggaggacgtcacctttaccctgtccaccgtatcctccgctccctcctctgtcgttttcgagtactcctccgatgacggacagacctggcatcctcttccgggcggcatcctcaccctttcacaggatatctgcgccgcctatcgtttccgggccgtcagcgaggcggggaccgcgggtgaagcctccccgccgatcgaggtgaagatacagaaaacgcccccgcctccggcggcgctggtgctggctccggaacagccggacggggataacggctggtatgtcaccaatcccaccgccaccattacccctccggagccggccggccacccagctccgtttacggtatatgtacagctttataccggctccgtccccaccccggcactgccgttctcttccgaagccgtcctctcccttccgggggacggcgtgtataccctgcgggtgtggacggaggacgccgccggaaacctctccccggtccagacccgtaccctttctctcgactccgccgcccccaccggagagatccttctggccggacagccgggaaccgcttcctctcccgtccctccctgcgactttttccgcaaggaggacgtgcccgtcgagatcacggggaatgacggcggcgatgtctccatcgcctggcagttcctgcctctcggcagggcaccggagtcggacggctggacgccggggaacacgcttaccctggtccctggacaaaaaggcgtcgtttgggcccggctgacagatcgggccggtcatatgacgctcctctgctccagggggaccgccgtatacagcgacgcctcgctggcatcctcctcggccttttattcccccgacccatccatgccggatcaccgggatatcctcattcccctttcctggaacggcaataccctggacgccatccgtctcggggacatcctgctggcggaggggacggactatctcgtccgcgaggacggcgtacgcctgaaaaaggaagcgctggcgtcctttcgcgattggccggccaagctggcccttacgatccggccactggatgagccctacgccgctctgcctgggaatgaggccccggtcccgatgatttttacggtctataaccgggtgagcgccgcccttccccttctcaccgaagtcccggatgggaagatggtgtattttaccggggaagaggccgcccctcttcggatacaggcggtgtctccggacggcggcacgctgtcttatcagtggtaccgcaacggtcaggtcctcgaaggggcgacacaggatcacctgatcccctcgacggcgatacccggcgtttcggtctacaccgtctccgtcaccaataccaatgccgatgccgagggccagaagaccgccgtgctccaaagtcccgagatgcccgtatccatccttgacctttctctcggatctcccgtctcggaacccggcctgccgcctcttctgtcccatcccaccctgcgggaactgtttcctctcgccctcggcgggcaggaccttctgcgcctggaacagggcggcagactggccctttccttctccatccgcccctcccggctgacggacgcacaaaagcgcgggtgggagcagcatctggagccggataccggcggaatttgcctgcgcctcgcgctggacaaaaccgccgtggatgcgtatggaaacgaacaaacggatgaactcgtctatctatccgcccctgtacgcctgaccttcgccgtccctgattccctgcaaaaaagcggccggattttcacgctgctgtcgctggacggggattcttggacacttcattccgacctggattccgataccggcaccattaccatcgaaaccgacacccttggggagttcgcgctcgtttaccgggatccctccgtctcgtcccccgacacgaacgccggcgggtccgtgccccttatccggctcgccttctggtcgtctctcacaacagccctgctggccttttggccgaaaggaaaaaagaaagtgcctctccggcggaactaatcccgtttttccggtcacatcgcctcttatgcgcatatcctgtagaggaggtgctcctatgaacttgaaaaatggacagatcaccgtttcggagatcacccgcgatccccgtgcctatgccctattgaaccgggaattcccacaaatcgcccagtccccgctcttccgtcttgcgggcggcatgaccttgcagcaggtcctctcgtttgccaaagggacggccatgcaggagaagctcgacagcctgctcaaacagctcgaagcgctctgatcggcgtacgaagccttaaaaaccggaccccctcctggcaggaggggtccggttttttcttatcgtctcagcttgcgcaggaaggtatcccaggattcaatatggattttgggcgtcggtatttcactgacgtagcggatctcgctctcccggagatcctccaccgtccgcccgcctatgaccgcgtaatagacctccacctctttgttcggatccacttccagacggcccgccggccccagcaatgcctgatagggacgttccccctgctgcaccctttcccgaagcgcgtggaattgacggcggaaaagctcatactgcttgagaaggacgatctggcgctgctgaagctggctgcgcgcgacctcgatccgactggaaagcttgcagtaaccgctctgcgtgaccaaggggaaatccgcccctttgatttcgatgagcgtcaccttcatccaggagcgtcctgaaaacaccgcgaaatcgacccgccctgtcccaatgggaaactccgcaaagacaatgtattcctcttccgggaacgcgaaagcgtcggccagcagggacagatcccgcttgagcagctttgccagctcctgttcactggcacccttttccacgaggctggccagccggtccttcggaacatggttctcccagatttccagacggcgacgggcccggctgggatcttccggccaccccatgcccaaataaggatcgatttcatgccggatccgttcgatctccaaagaaagcctgcgatcttccccggtcttatgcagaagctccttcccctcgcatcccaggcagacggcgacttccgccgcctgcattttccgccaggtatcccagtcacggtaacgtccgttttgcagctcgagttcccaacaggaatacaaatcctcttcctgaatgaacaacctggcttccgcaaccagccgtccgtcccgcatcagctgtgaaacgatgtaggaaatggccccctccaccgcacaggaaggattcttcgctccgagatcggtcagaaggactccgggcctttccgctcccgcaaatattcgcagccggcacaagccgtcggtcctccatccagttggataccggtaaatcgaatcacatattttcatccgacgcctccgccgatcaaacggccaaatagacctgcatataccgctgcagacgggtgtctacatcccgcatacgggcagaggaaagccgcagcctggtctgaacatccgtacggtcatacccttgaagatacagataagcagcggattgagactcctcgtcgaacgtctggatataatccgtcagatccacggtctgctcaaaaacacatccgtctttgagaaaggtataaccagttgcccggaggcctcccggcagcgtctgatccaaagaccgtgtcttatatggccgtccattataccactctttttgagccgattgtataccgtcccggattttaagaaacacatagtcccagaagggataccggccacagacccgcggatagctcttgcgcgcttcttccagggcgagccatcccgtctgcaggcagtcttcccactccattccatattggaacaaacggcaggtttcctcaacaaacagggtcatctggctgaaaatgccggcctcaccccactccttcatccgtcattcctccttgtcgatccgcttttccttgcggtactttttggccaacgtcacgggagacggcaggatgggctgcgatacacaggtaccgaaccaaacgccttcatcctccctccactccatgtcataaacagccggcagcttaacgcccagccgttccagatcccgggagaattcctccatccgcttgcgcccgaccttatcgggaaactcgatggccggctccttatctggggccagcaggatatacagcccatctttcgcacaaaacagcgccgcttttttggttttcagcgttttgaacagctcgggatgtatgttgaggattcctgacggactgactttcaccgtaagcatatgccgtttattccgcggcggctccaccggtttgaagcggctccaatccaatggctccatagtctatttcccctttcgctcgtcccataatacgagacaattttaccggtcattcgtcaaaaagagagaaaatacttatatttaccctatttttcctccatatatgttattaaacagccttcgtgtatgggacagttcctacgtacagacagtggcttctccgggtcattgcttggtcattgcttgaccccacaatggcgtcggccggctccagagcatgccggtgcagccgttcaccagggccggaccggcgctctttttagaaaaatacccgtcgttttcccatatagccacgataatccgtgagaggccgcaagcctcggaaacagatgcctcccccataaacctctccatccccgggagtccaaggctcccggggatggcactaatcagcataaaaaaaccgctgtgggcaggctgcccacagcggtttacatgattttgcttaagctttcccagcgcttccgagcaccgtctcgatcttgtgcttgaccacatcatggataaactgacggccgtcgcccaaatactggcggggatcaaaatgagaggggttctccgccaaatgcttccggatgccggcggtcatcgccaggcgcagatcggaatcgacgttgatcttgcagaccgccatggacgccgcttcccggagcatatcctccggaatgccgatagcatccgccatctggccgccgaactggttcaccatcgcaacatattcgggcatcacagacgacgcgccgtgcaggacgatcgggaacccgggcagacggtccatcacctctttgaggatgtcgaaacggagctgaggtttctggcccggcttgaacttgaatgcaccgtggctggtaccgatagcaatcgccagggagtccacgccggtgcgggacacgaaatcctgcacctggtcgggatcggtgtagttggccttatccgcctcgaccttcacatcgtcctcgatgccggcgagctggccgagctctccctcaacggtaacgttccgctcatgcgcgtaatcaacgacctttttggtcatggcgacattctcttcataatcgagatgggacccgtcgatcatcaccgaggtgaagccgctgtcgatgcagtccttgcacagctcaaaactggcgccgtgatccagatggagcgcaatgggaagacccgtctcttcaacggccgcctgcaccatatgggtcaggtaagcggaatgggcatatttgcgggcgccgcccgacgcctgcagaatgaccggggaattgagctctttgcaggcttccacaatcccctgtacgatttccatattgttgacattgaaggcaccgatcgcgtagccgccctcataggcttttttgaacatttcctttgtgttgacaaggggcatttttctcatcctcctgtttgttactatatcctattataccgcaaatagccgcaaagaaaaagatggattacctcacaacttgcccagccgttttgttaaattcttgtgaaaatcgcccgtaattcaccgtacctcctgcggatggcagcggcaataatgaaaaatcacctgctgtgcgattccggcataccgtccgaaatcggcgggtgctttccctggaaacagggacaccatggcgcgtttcatccacacgtcgagaggaaaggcgtcgagccgccccaatccatataacagtacgcagtcggccacctttgggccgatcccccgaaccgtctgcagctcccgccgcgcctcttcgagaggaagggatgccacgcggccgagatcgagagtaccctccgccacccgtcgggcagcgtcctgtatgtatgcgtcccgccacccgcagcgcagcgtggacagctcctccgcggataaggacacgatccgttccggtgtcggaaagacgtaatcctctccccccaggtgctccccgaaccggcagagacggcggacaatgcccttgatccgggggacattattgttctgggacaggatgaacgagatcagcgcctcgaacggatcctgccgcagcacccgcatccccggcgaaaagcggacgcagcgtcccatcttgccccccatacggcgtacgagggagcggtaaatcgcctcgtaatcccggtcgagatcgaggtagcgccgccagaagctttcaaacaacgcccctgtgaccggcctctcctccgtcccttcgatgagcaaggcctccccctccctgcggatcgcggcagcggcccgtcccgcaaccccgcggtagccgcccgtcccgtccggctcaaaacggaaacactgcccgcagtcgagcgtctgggcgagatcgagaggcggcgcgtccggaatgcgcacgccggttttagtctcttccacccacatcgggatccctccttttcatcttgtccagtatagcacagtgtggtatactgagaaaagacataaataccggaacattcaggaagaggagcgtgacccccatgcgtgacgatatcaccagcatcccgataagcgaggtgttcgagccgcgggacggctgccctatctgccggctgcgcaatactctggaagaccgggtggtggaatacatcaccggcgccgccatgatggagcccgacgtccggatcgagaccaacaagcaggggttctgcatcgaccactaccggatgatgctcaaaaagcggaaccggctgggggtggcgctgattctcgaaagccatctggacgagatggaaaaacggatctacgcgggcccgccgctcctcggaaaaagtgccaaaaaccaggcaaaatcggccggacaggccaccggcacctgcttcgtctgcggtcagctggactgggccatggagcggatgctggccaccgtctgccgcctgtgggaaacggaaaaagatttccggctcctgtttgaggagcagccggccttgtgcctcccccatttttccgtcctggccgaaacggccgccaaaagcatgaataaaaaaaacgtcccggatttcgtcaaggccgccgccgcgctcagccgcaaaaccctccaggagcttcgtggggatgtctcccacttctgcaagatgttcgattaccgcaacagcggtgaaaacgccgactggggcaattcccgggacgctgtcgagcgggccgtctggtatctgaccacccgccagccatgagaaaaagaaccaccccgaaaagcccgtcccggtgccttttcggggtggttcgcgtattctgaaatccggccgcagggcttggcgtggccctgatcctgcgctgaggccccgaagtcaaaccatcccctgccggatatagtacgacacgatcagggatacgacctcatcgtagctgagggtacccttttcctgcccctgtgattcgagaaaactgttgttgacgctgttggaaatttcctgcacccggccttcgaacgcctcccaatagcggttcctctcccccaggtctcgcaggaccccctcggaacaagccgcccgcgtctccctccagagctctatgtcgtaggcatacagggcgttggagcagtagatatacgccatcaggtacccggaatagcggaaatcggcggaatcgctgtggatacaagtcagataggccagaaaattgcactcgtcctcccgggcgaagcctctggtatgggcgagctcgtgggcggccgtggccgggatactgctgtccggtacatcgatgttgacatttgcttcggccagcatggggaaatacatccccgtgattcccgtgtagctccaccagtgggaaagctgcacaggcttcgcccgaaacaccccgccgaacagaaagggatacgtcccctgcagcgaccggtagccgttgtccgcaaggcgcagggtctcacccatcgattgggagagacgggcacagccctccccgtcttccgtcaggctctcccgttccctcgacgcccgctccgcgagatcgatgcagacatcgcgcagctgcacggccgacggctcggccgtttccagccccatcagctcgccgagcggcaggcggtagaaattgaccccgtgcagcagcatatacaccagcagcacggtagacaacacccacgccgtcccctttccggccctcatcagaagctgctttcgacagccggtacggcaaaggcggcggataaaccataccagaatgaaaacaaaggccggcagggccaggaccgccaacacttccgtcaatgaaaacggcagaagggatatgagtccccccagcggcacggagaggatacgaaatacccctttggcgaacaccgcctccgtaaattccggaaaatgcggcaggacaacacgcagcagaagggccgccaacgccggaatcagaaaacaaaaatggcggagaaaccgtcccgcttttttcatgaaagccctcctctgtcgttcgtcttttttccattcggacgctttttccgagtgtcatattttgtcactttaggagaaaagcgcctttttattcggagattgtgaacttagggcttttcagccagcgcaattcccgatataatagagtctggaatttaaaggagaggggaagcggcatgttatccctggaacagtttttatccgggctgttttccaaccccgtcctagccgttaccgtcattttaaccctgggggttatctttgtcaacggctggactgacgcgcccaatgccatcgccacctgcgtttccacccgggccatgggcccccgag

SEQ ID NO: 2636 - DNA, 10896 bp, Unknown
  16S sequences of unknown bacteria
taaaatcaggcgacaatcaatggatactgacggtcaaaacaaaggttttgacccataaaatcgagattttaactcgattttatataattgcatttgctaatgcaattattcagcagacattatttaaagcgataaagttccgtatatgaaaagccaaaaccgaaggtcataaaaaggccttcggttttggcttattttatgttttttcggaaaattttaagaaaggtattgacaaagtatatacttcgtgttacgatgtattatgcaaaaggaggtatggtatggacggtcagttaaagagaggtctcttggatgtctgtgttttggcggctatcaagaacgaggattcatacgggtataagatcattaaagacatgaagccgtatatcgagctttccgaatcgaccctgtacactgttttaaaacgtctggaaacggcgagtatgttgactgttcgcaccgcagagcacggcggcaggcttcgaaaatattaccgcataacagcggcgggacttcggcgtattgaagaatttaagtcggagtggaaggaaattacggcaatttatcaatttgtaacaaaggaggataacggcaatgaataaacaggaatttttaaccgagctgcggaagggcttatccggcttgccgcagaatgatattgaggagcgcctggcgttttacggcgaaatgcttgacgacaggatagaggaaggtctttcggaggatgcggcagtcgcggagataggcgatgcgaacgaaatcgtcaggcagaccgtagccgatattccccttgcaaagctcgccaaggaaaaaataaagccgaaaaggcggcttaaggcatgggaaatcattcttttggcactcggctctcctgtttggctgtcaatattgactgccgccgctgcagtgatcttctcgctttatgcttcggtgtgggctgtaatcgtttcgctgtggtcggtcttcgtttcgcttgcggtttgtgcggtctgcagtgtgccgttatgcgttctgcttgtcgcgggcggcagcggcgcatcggggattgctgcgctttcggcgggaattatatgcgcggggctttcgatatttatgttcttcggctgcagggagactgcaagaggaattttgattcttacaaggaagataaccatagggataaaaaaccgctttatcggaaagggggaagcataatgaaaagggcagcaaaaatatggcttgcgacagcggcggctcttgtgcttgcgggatgtattctttttgcgggcacaatgtcagtgctcgggtgggatttcacgaagctttcaacggtcagccttgaaacaaacacgcatgaaatttccgaagtctttaaaaatatatccgtaacaactaatgctgatatcgaaatcattcggtcggatgacggaaaatgcagggtagtgtgtcgcgaggaggaaaacgcaaagcattcggtcaccgctgtaaacggcacgcttaccgttgaaatcaatgagaaaaaatcatggtatgattatatcggcttttattttgtttcgccgaagataacgatttatcttccggaaaagaaatacggtacgctttccgttcacgcaggcggctcaagcgccgaaataccgaaggatttggcgtttgaaagcgccgatatttctttgagcacaggcaatatcgattttttcgcatccgcgcagaaagcagtaaagataaaaacgaccgccgggaatatttttataaaggacaccgccgccgattccctcgacctttcggttaccacgggctccgttacggcttcgggcgtgacctgtgccggcgatattgcggtaggcgtttcgaccggtgaagccaacctcaccgatatttcctgcaaaagctttatatcggacggagctacgggaagtatagctctgaataatgtgattgccgaaaataggctttcggttaaaagaagcacgggcgatgtgaaattcagcggctgtgacgcagaaaagctgtatgtaaaaaccggcaccggaaatgtgcgcggcagtctgcttaccaataaggtgtttatcaccgatacggacacgggcagtgtcgatgtgccgaaaacggcagccggcggcagatgtgaaatcaaaaccggcacgggtgatattaaaatggaaataaaataaaaaccgaacaaatcggaaatccgcaaaacatcaaaaacaccgaaagcttttttaatgactttcggtgtctgcagtccgagcggcttattcccaaaaagaataagccgccgttattatttgttcaaaatcaggaaacgccttaaaatcgccgcgtcgagcgaatttaccgtgccgtcgccgttaatatcgggtattgcgccgttgccgaccgccgtgccgtatgccgcgtgctttttaaggcacacaaggtcaagaatattaatatcggtatcaccgttgatatctgccttttcggtaatcaccagaccgcaggtatcgcagataatatcgctgttcgtatcggtatgacctgtcctttcggtttcgtccgaaacaaaggagtagccgcagccgcaggtatattcagtgaagccgccctccgtgcaggacggcggggtgagcttcaagctgtaaatatgcggcgagagattcttataatcaagccgaatatcgttgtaattcttgtctaccgccccggaaaccgaagcggatatttcggtgtgctttgcgggggacagaagcggctcccacaaaatattaacgagtgcaatatccgcgtccgaaaatcccgattcattaatgtaagagaatttaacagtgccgcttttgaaattcgggttgataaccaccgttccgccgttttccgaagcaccgtcagccgcggtgactcctctgcaggcaataacggcgggatcgtatttaaccgtgaaatctcccgcggcaatgcccgcgcccttttcaacgcaaagctgtgcgcgggcttcgctcccgattttaaaatcctccgatttaatgaataaatccggataatcctctgccgtatcctctgccttaacggaacatttcaatgtgattttttccggaagatattcctcgcggttttcattataagcgtccttcacagcaacagtgacagcggacgcgccgctttcgcttatcgccttaagctttaccgtgaaaagcatactgccgacaaccgccttttcagcggcgcaggatattaaaatcaagccggcggtatcggtattgaccgagtataaagcgccgtcggcgttaagcccgctgccaagcgttacggatataagcgtgaagacatccctgtcgtactccgcagagaaatccgctgcggaaattccaccgtttgccgaacgttttaccgcaagctcccattcatcgcccacagtaagggcagaagatgatgaattggcgtaaagcccgaatttaggcgcggttttttcggttacggtgatatatccgctgccgcctgataccgccacggcggaaagcgccgaatcataaacctcacccatggtgacggacaccctgtattttccggcaggcgcgccctcgcgaagcttaaaacgaatgtaaataagcctgtcggaatatgagccgctgtcggatgaggtaattccgtcaggcgacgccgcgctgagacgcacctcgcccgaaaccgatgaatcgatgctcgacataacgccgtttaaaagcgccgcggcacctgccgactccgccgacattgcgctgctgtcataatgaacggtaagatcaatgcttgaaacgcttttaaagcccgaggcgcttatataaaccgtggcatagccgccgacgcttgcggaagcgtcggtcacggtaacggcagccccgccgtcggcgaacgccgacagcggaaaagctgcgataataagtgaaaggcttaaaagcagggtgaaaattcttttcttcataagcccctctttatccgcgcatatcaagcgagcctatcgctccgcttgcatactgcagaatgcggagcgcctcttttgcggaaagctctccgtcgccgtcaaggtcggcgcgggcaaactgctctgcgttaaggtttataaggtcgttgcgcgcctgaagtataagcagtgcgtcaagcgcgtttattttgccgtctccgttaacatctcctaatgcgtcggcgcttatttcttcacgcaccgcaacggtgtagggtgagtcctcgctgcccttaaacgcggagcttacgccgtcaaacgcctcaatataatattcaagccccgccgacgttatatactgtgccgggatgattgcggagtagctgtcgttaaagctgttcataaccgcaatgcgccagtccgtttcgccctttatgcggaagtaaagccttgcccattcaatgtgcaggttatcggtaacagtggcgcttatcacaagatttctgcccgcggtcgcgttgtaaaccggggtgtgatatatgctcggcgccattgtatcctttgacataatgctgattttgcccgagggcgcggattccgacaaatcggttttaacaaccgtgaagttgtagtaataaagcacgcccggctcaacatcggaatcaaagtattccattgtgcctaccggtattaccgcgctgttaatgcgagcatacagtccgtcctttgaggttgagcggtaaacattgtagcccataagcgtatcaaaatcatcctgctgccaggtaagctttatgccgctgtcgtccgcatgaccctgcattataagcgcctgcgcggcacttgtgtcaattacaaacgcaaagcggcggctgtcggtcataagtgcaagatcgtcggttgcggagcagccgtttgaaacggtgaaatactggtttccgttttcaataaccgttgtaaggcggtaaacgccctcccaggttcttgcgttcacatattttccggtaatctcataatcgccgtaggggtatgcgctgccgaagcgaactaaaagcggaacggtaacatccatatcgcggttaaagctgacccttacggttatctgctcgttgccgactgtggttactctttcccccgcggagttaagcaccgcaatatcggttacaaacgggaaaacatcctcgggtgcctttgtaaggtagggtgaatagataaggcgggcgtaggttataaagtcgttgccgtcaatcaattgcagacctatcgccttttcgtttgtcgtgccccaccagtttccgccgagcggaacctttttgccctctgccgacggcgctaaaagccgcagccagtgttcaacattagtatcggttgaaatgcggttgagcagcgcgttgccgtaaaagctgccgttatactgatatttctcctgcagctcatttatctttttgcaaagcgttgcggcggttataacgcgctcgattgatgtatcaagctccgccttgtgtatcggcttttcgggagcttggctctcatcaccctccgagggtatatcggttgcctcctcggcggtaaaggttattgttatttcctccgcgtttgaaacgccgccgtcagccttaagattacccgccgcaatcacaagcttataggtctgccccgcctcaaagccgttttcacaagaaatttccatttgattatagtttttacgagataatcgcatgttttcaaaataatatgtattaatagatgaatctaatgttttattaaatgttacggtgaaatttttccctgtttgttctagtgaaagcacctcaaaattctctttaacaacattctttaaagaaatataatcaattgaattttcagccatataatcatatttcattaacaacccgtcatcagtaaaaatgtatatatccctgttattgacatatcctccgacagcattatttatgccataaattcgattttgttcctcaccgatatatactttgccattttctatgcccataaaactgctaaagtactcgcttgttgcatatacctgatcataattgtgtttcagagtcattgtattaacagcattattatataaatttatagctcttaaaatgtcagtttcagtgcaatcaaagatggttgtatcataaaatgccacaggatgtgttgttgtatctatttctttaagattagaagaagtgatattatttagttttccggcgaaatatgctctgtatggactatagaatattgtatagtcttctttggctataactctgtcaatatcgccaataggaacctgttcagcccaagtaacatcatctatagtacctaaaccaagtttgccgtaagtattatcaccccatgcgtagactgcatgttcctttgtaattacaaaaaagctatttccgttaaacgcaattttttcaagatcgtcccgtcccgtgaaaaaatcatacgaatattcatttggtctcatattgcaattccaacgttcaatagagccatcagtttttaacaatgcaatataatttccgaaacagtcaaaatccttaacattttctatttctaagtccggattgcttaacacattattaagcatggtgttataatatgaaaaacttccgtcctcaaataatatacaataataatcttcaacataaatttttttaattcttttatgcgcattttcgtcaacaataaaaaggcaactcacgctaagaccgctgcgggtatcggtcgctataaccgtagttgtaccggtttcttttataacaaggtgattttcataaatttcagcaacctttgtatctaatgagcgccagttcaaagctggttcagcaccatcgtctgtaataactgccggcaattctactgtaccgtcacttaaagcaacaatctttacagctgcatcaagtttcagtaatgctgtttttttgtataccgtcacggtcatgctgtcgctgaagccctcacagcgggcggtgatttctgctgtgccggaggatattccggtaatattcccggcggaatccaccattgcaacctcttcgtttgaagaagaataaattacatttcggcgggtagtattttctggtgtgaatgcacaggtcaaggatacattttcacctgttgccacctcaatattcttgtttttgatctttaagtcttcaatcggaacatattctttaacatttaaggttacataattgcggagcgcgcggtcctttgagtaaacatatacatccgccgttcccttgcctaccggcgttacaagcccggacgcacttacccttactattgattcatcacggctttcatatataaagctgtcgcttgtaagctgcgcgggggcggtgcggggagcaatttgatatgtactttcggtatcaatatcaacctcataatcctcaaaggttatatcggtcggcagaatattgccacatcgttcataaagcacataattgttacccgttaagctaagcttacccgcctcaaaataaagatttttttccggatatgctgatttagcaataccgtcagggtctatagccgaatcaatttccttgccattattccaaataaaacgagccttagttttatcgtaatgaaccccaagtttgcctgaaattccattggaatttgcccattcaacctcatcttgagtttcaaaaattgccggagtaaaaccgagttctgtaagcagttggtcagcaatatattccccaccccatatttgcatataagatgttccggtttcctcgcggtaatactgacatatgctgctttgagaaacagtgccattatacattgcggcattcaaggttgaattataatatttgtcaggtgctgtctggtcagcaaagctgtttcctaaaaatacacaaccgactgcgctgaaatttgcgaagtcaattccgcaatccgcaaatatgcaccgtttggcattgccgtatagtctaggattataagtataccctattttataaaaaatactgtttttaacatttttaagtgttcctaaactgaagttataagcataactatcaccaactttcccgcctgaaaggttacggtatcttaaaccctcgccgtaattcattcggaaggtgcagtgatctgtatcacttatagtattatttgttcccgtatttgaggtgctataaaacaaattcgtaacatcagtatattcaagcgagatataaccgccggtaccctcgcttaattcaaccggataacgatccattaagtcgctcgggtaaatataaaccggtttttcctttgtgccctcggctaaaaatctgccgttgaccttaaggtaggcaatataatcggaggcgtaggggtcttttgcgtcatccgaccaaaactgaatatgagtgcccggctccgctttaaccgtaacgccctttgctattaccgtggcgttggggattatgtaaagcttatcggcggtaagggtcatatcctcttcaatcgttcccgaaagaatttcgccgctgcgaacggtaagcgttattttcccgtccgatttataaaccgttttatccttagcgttcagcgcgtttttgcaggaaatattaacattaagggtgaaaatataatcgttggggcaatcctttgaaatttgaatataaaacggattttcccagccggtaagcagctcgtcggtgtaaattttgccgcagtcgccggtagaatatgtcccgacagatccgtaattaacgctcgggttgattattttaatatacgggtcggcaattccggcgcccgatttcgcgtcaatcgtgaccaccgtgccgtcgctcatgccccagcggtttctgagggtgaggccgagcgctacggtttcgcccgcgtcaataacgccgtcgccgttgtttgcgccgtcggtatcgtttttaagcccttcggtgtcaaacagggcatagctttgcagaccgacctcgggcttcggcagctttgtaagcgcagagtaaaggtctactatctgcggtatgttgtgaagattaccgttaaccgtatgttttttgggatctcggcatatcgccgtatgcccagaggtagaggcaagctgaccgtaaataaattttgtggggtatttatccctatcctgatactcactgcggacgatagccgcaacagcggaaaccaccggcgctgccattgaggtgccgcttaaaaagccgtatttattaccgggaagcgtgcttaccatttcctcacccggggcataaagctcatattcaacgccgttgtattttttaacatcccagtttgtaaaggaagactccacgcccagtgcattaatgctcataacgcccataacataggaaagcgccgcggggtaattcggagtaggagtataatcataatcagtgatctcattaggctcaccgtcattaccggcggaggcaacaagcacgcagcgggtatatgccgctgcaagagcgtcctgcacggcaagggagcaggcagagccgccgaaggacatattgataacctccgcgccgttttggtaagcgtaggttaccgccttggcgacggcagactgattgaaatagcccgaagccatccccgccttgaccggcattattttcacattataggcgataccgagaacacccacaaagttattcttcgccgcgataattcccgcaacatgggtgccgtgaccgttatcgtcgtctccgtcgcccttgccggttataacattaacgccgcaataatcgtcaatatagccgttgccgtcgtcatcaattccgttgccgggaatttccccggtgtttttccaaatattatccgccaaatcctcgtggtcgatatcaacgccggtatctataaccgcgaccacgacgctcgggtcgccgccgtcaaaccgcatatggccgataccgtcgggaataccgcagtgattcaaataccactgatctttttcatagcgattgccgccgaagcttttgttgtccggcaggggctttgccgcgtctattccggcggtcttaatggtataatcatattcggcggtcttgacctcgcgcagctgccgtaatgcagaaagcgccgaagatgcgttggttttttccttaagatacgccttgtaccacgccgcgttttcaagcggaactatttcttcaagctttgcaacccccgctttgcgcatggcttttgtaagctcgccgcggtttttgccgctcatcttaacaagaagagcctcatccgaatacttgaccgctccgctttcaacaagctcggggtagaccaaatcgaacggtattttcatagcgccgttctcatcgtatgcttcgggatggctgttaacatcaaccgacgccgactcgcttttaccgtttttaagcccggcaatcagctcacgcgcttttttctccaaagcgtcatcgcctaaaagcgacgcatcggtttcaccgtcgagcacatttaccacagtttcaagctcggggcgggaaacactgccgtcatccgcttttgcggtgcttccgtttttgaaaattccgcccgtgaacacactgcccgcaagcaatgcggtacacaaagcgacagcgagcgctcttgatacaaacgcccgccttgaaaacctgccgtttgtcattgctttttcctcctctttaatattttcccaatgacaatatgtaaacgcgttttccgcggttcacaacgctttcgtctcaaaatatataggttttgagacaattaaattttcttacttattttaacacaattatttccatattgcaacccgtttttataaaaatataaaaattttttcatagaattatgccgtgaaaatacctgtcctaaaatcttatacacattatgagacggaaatttaacgtgtaattcggaacgcggaattattaataataaagcctgttgttatcggttcccccgacagcaacaggcaggttttatataattatgttgtatagcaaataactgcctcaccggtgtttggggtgcgggtgtccggcggacacctc

SEQ ID NO: 2637 - DNA, 3864 bp, Unknown
  16S sequences of unknown bacteria
tcttgacgctatatcgacgcttgggttccgaggggaggcgctggcggcgatatcttcggtttcgcatatacggattatgactaagcggcgggaggatccggtggggactttgcttgagtcatttgccggggggacgcctgctgttactgatacgggggcgtctgacgggactactgttattgtcgaggatctttttatgaatgttccggcgagacggaagtttcttaagaaggatcagactgaggctttggcggtcgcggcggcggttgagaaggtggctatgtcgcggccttcggtggcgattacgttgattgttgacggcgtggttaagttttctactgctggtgacgggaagcttataaatactatatacgcgattatggggcgtgagtttgcctcaaggctgattgcggtgcctgagagggattattcgaagttgtctatcgggacggggtcggacggatggaagtctggcgtcgttatcggcgggtatatcgggacgccggagaatatacggattaaccggaattatcagaatgtgttcattaacgggcggtacgtgaagtcgcggtgcgttcaggcgtcgctggagcaggcgtattcgtcgtatattccttcggataaatttccgtcctgcgttctgttcataactatcccgccggcggcggtggacgtgaatgttcacccggcgaagcttgaggtgaagttcgcgaacgagaaggaggtcttcgaggcggtgttctacgcggtgcgcggcgcgctcgagaagaggataccgagaccgactatggggacttcgccggataaggtcgacgagaggaaggcggagaagctgctgaattcttttgtcccgctgaaggacggcgcgaggacgccgaaccatgacccttacgtgaaccataagaatatatcggcggagcagttaaggctgaccgaccagccggttgagccggagacgcggaagccggaaatatctgccgttccgccggtaactcagcctgttgagccggaaaaaaagccggaaccggaaatgagcaccgccgacgcgcggaaaaaggctatagacgaggcattgcgcatttcccgcgagaagcacgacgcggggagaccttccctgtcctccggcgctcagattccggacggcgtcataccgcgcagaccgaccgagaaggagattgacgactacctgaacccgaagcccatcccgcgcgagctgataaaatccggagccccgatcccgacatggaaaccgtgggacaggtggagcgactggaaaaaggtctgggacagagaggacaaggaagccatagccgccgccgagaaggaattcgaccggcgcgaggctgagaaaaacgctcaggtatccgaaccggagactcccgcggcgcagccgggtttcattaaaccggagaatccgccggttgttcaggcaccgccgaccgaacagattccggtcgtcccgccgacgcctgacgaaaaaacgccggaaccgtccgtcgccggaaagtccgatctttccccgagacagttcggctcaggaagcccggacgacaactacttcaccgacggaaccgagaacggcaaggcgcccgacccgcgctacgcggagttcccacgtcagcccgagccggtgctgtcgcagagaaccatcgacgagcttgaagcggaaaagcgctccgggaaggacctgaaaatccgccccgccgggaagctatatatgcaggacggcgacggcgaaggttatttctacgacatcccggcttaccggataatcggcgaggtcttctactcctacgtgataatcgaagtcggcgaccgggtcatgatgatcgacaaacacgccgcgcatgagaggataatcttcgaacagctcaaacagagcatgaagcgccgcgtaccgttcgtccagctccttctcgtccccgtgacgctgaagctgaccccgaccgagctcgccgccgttatggactacaaaaaggacatccactccctcggcttcaatttcaagcctctgccgagcggcgacggcatcctgatcgaaggcgttccgccggacacagtcccggacgccgcgggcgatatgctgctgtccttcgccgaacagataataagcggcaccggaagcgtcagcatctcaagggaactgaagctcgagcgcgccctctaccagatgtcctgcaaagccgcgataaaagccggtcacgacgaggacatctcgcacatccgctggatctgcgaccgtctcttagctctcgactgcataaaattctgcccccacggcagaccggtggcttttgaaatgaccaagaatcagatagaaaaacgcttcggcagagaataaactcagaaaaatcaatcacacattaaattaaggagaacccatgtacacactactcaaacaggaaggcgcggcgcgccgcgggcgctttgagaccccgcacggcacgatcgagaccccagtcttcatgaacgtcggcacctgcgccgccatcaagggcggcatttcgacgatggatctcatcgacgtcaaatgccaggtcgaactctcgaacacctaccacctccacctccgccccggcgaccgcctcatccacgacatgggcggactgcgcaaattcttcaactgggacaagccagtcctcaccgactccggcggattccaggtcttctcgctcgcgcagctcagaaaaatcaccgaagaaggcgtaaaattcgcctcccacatcgacggcgcgcgcatcttcatgggacccgaagaatccatgcggatccagtcgaacctcgcgtccacaatagcgatggcattcgacgaatgtatagaaaaccccgccccctacgactacgtaaaaaaatcctgcgaccgcaccgcccgctggctcgtcagatgccgcgacgagctcgcgagactcaacgccgaccctgagacgatcaacccgcagcaaatgctcttcggcataaaccaaggcagcacctacgccgacctcagagtcgagcacatggaaaaaatcgccgaactcgacctcgacggctacgcgataggcggtctcgccgtcggtgaatccgccgaagaaatgtacgaaacgatagatgtagtagaaccccatatgcccaaagacaaaccgcgctacttaatgggcgtcggcaccccctgcaacatcctcgaagccgtccaccgcggcgtcgacttcttcgactgcgtaatgcccagccgcaacgcccgccacggcaacatcttcacctggcacggcaaaatgaacctcctcaacgaaaaatacatccgcgacccccgtccgatagatgaaaactgcggctgtccggcttgtcagcactattcccgctcctacatccgccacctcttcaaagcaaaagaaatgctcggaatgcgtctcgccgtcctccacaacctctacttctacaacgacctcatgcaaaaaatccgcgacgccttagacgaaggcaaatacgaagaattctaccgccactaccgcgaaatcctcggcgccagaagcgaaagctgaataaaccttgttttttcgcaaaaaataaccgcgaagccatcttcacggataaaagaaaggaatatcaatatgtcacccatcaccataaccaaaaccaacttcgagtcagaagtcaaatccttcaaaggcgaagtcctcttagacttctgggcaagctggtgcggcccctgccgcatgctctcccccgtaatcgacgaaatcgccgaagaaacccccgccctcaaagtcggcaaagtcaacgtagacgacgaacccgaactcgccgccgccttcggcgtccaaagcatccccaccgtcgttatcatcaaagacggcgaaataaaggaaatatccgtcgggtacaagc

SEQ ID NO: 2638 - DNA, 4919 bp, Unknown
  16S sequences of unknown bacteria
actggatcgctcgtcggcagcgtcagatgtgtataagagacaggttctatctgttgaaccgcctgtacgggaaatctgcaataggaggactcttcctgtcctgctacgccaacgatctggccgcaggcctggctctgacagcctggctggatctgctgttcgctctggctgggcgccatgctgttgtttcctggaagcaaacagttccctatctattcttctgcggctttgtctgggaaatcctggctccgctgtggaagccaaacgccgtatgcgatccgtgggacttccttgcctaccaagccggaggattcctttatctgctgctgtttcgtatcgctgcatacggatactctttgtggaacatacgtcatacaaattaaaaagcgtcctctctgtcatctttgacaaagaggacgctttttcactttttccctgcttacgcagtaccaccgttttgcgccacttccggcatcagttcactgccgacgatctgcagaaagcgatccagctgcctggcctcctccgctgtgaagcgcttgttgatccgttccatcacggtgtgcaggtaacccgtgctgatattgtaataatccatgtatttctgagtgggccgcagatgatactcccggcgatcctgattcgatcggattttctctacataccctttctggatcagactattgaccttgtacgccgcattgggggaagaaatgttgacgaaagaggcaaattcattaatggtcggctcctccagcgccataatgatctccatgcaaaaggtctctacagcggtcaggctggcctcccggttctgaaaacgggaaaaaacctcctgataaaagtgcagcttgaatttggtataaacgtctcggaaactctcatccagcataacggcgttccttcttccattctgttttccaggtgatacaatacccggggcaaaaagtaattttcactcttcccgaccgttgttcccagtatagcagaatttctcagttttcacaagccttatcattgtcggccagcgcaaaggtaagctctgctttgcaagccacttcgccatccaccagcgcttctgcgctgccaaaccccacgctgccgtgctgcgcggtcagcgcgcagagcagctccagctggtcgccggggcgtacctgctttttgaaacgcgcatttttgatagcgccaaacagcgccagcttgcccttattttccggcacagacaaaatcgctacagcgcctacctgcgccaacgcttccacgatcagtacgccgggcattactgcaaactccgggaaatgcccctgaaagaacggctcattggcactgacacacttgagacctacggcccgttcgccgggcacacattcggtgatgcgatccaccagcaaaaaaggatagcggtgcggaatcagctccttgatttgctcgatattcagttccatggcttacgcctcccaacgcttgaagagcaaagcggaattatgaccgccaaatcccagagaattggacagcgcatagcggatcgatgtttcccgccccgtattgggaacaatgtccaggtcgcattcttcatccggcgtctggtagccgatggtggcaggcacataaccgtcccgcagagccaacgctgtgaaaatggcttccacagcccctgctgcacccagcaaatggcccgtcatggatttcgtggagctgaccatcaatttgtcggcgtgagcaccgaacgccttacggatggccagcgtctcgcagcgatcgttcatgggcgtagaagtcccgtgcgcattgatgtagtccatatcctccggccggatgccgccatcagataccgcgccaagcatacaggctgcgccgccgctgccggtaggatcaggagctgtgatatggtgggcgtcgcagctggcaccatagcccaaaatctcagcataaataggagcgccgcggcgcacagcatgctcatactcttccaaaaacagtgcacccgcgccctcgcccatgataaagccggagcgttccttatcgaagggaatggatgcccgcgccggatctgcactctcggaaagcgctttcatcgcagtaaagccaccgatagccagcggtgtgatcgccgcttccgcgccgccgcaaagcatcacttccgcataaccgtcccgtatatggcggaaagccgcgccaatggagtcggttcccgtggcacaggctgtagtgacacaagtgcacagattgtgcagtccgtatcggatggcaatattgcccgcagcgatgttggaaatcgtcataggaatgaaaaacggcgaaacctggtcgcagccccgttcctcggcttttttgaaattttcagcgatcgtttcaaacccgccgatgccgctgccgaacactacaccgcagcggccgcggtcttcctgctcccagttgataccgctcccggccacagcctcatccgttgccgccagggcatattgggtaaacagatccagctttttgcactcccgctttcccaacagccctgctgcatcaaagttcttcacttcgccggccaatttgacttttcgatcagttgtatcatagcgggtaatggggccgatgccgcattttccttcgcgcacggccgcccagctctccaccgccgtgttgccgatcggcgaaacagcgcccagtccggtgatcacaacgcgtcttttttccattgctctctcctcctcagtttcgtttttcatacagccataccgccgtccacacacagtgtctggcccgtaatataggccgcctccggtgcggcaaaaaaagccacagcctgagccacttcttctgctgtgcccgcgcggcctgccggaatggatgcaagcatcccctcccgcacagcctccggcagaacgcgggtcatgtccgtatcgatcatccccggtgctacagcatttaccgtaatgcccttagccgccaattccttggccgccgccttggtaaagcccaaaaggcccgccttgctggcggcataggccgtctgtccggcattgccgcgcacgcccacgacgctgctgatgttcacaatacgcccatagcgctggcgcagcatcacccgggaagcttccttcgtacagaaataagcgccgcgcagattggtttccagcgttcggtcaaaatcctgcaccttcgccatcagcaaaaggccgtccagcgacacgccggcattgttgaccaagatatccagccgtccaaagcactcttttaccgctttcaccagggccgcgcacgcttccggatcggacacatcggcacaatatgcttctgcctccgcccccagcgcacggcactgctccaccgtttccagagccgctgcttcattgccggcataatttaccgctacagcggcgccttgccgggccagctccagacaaatgccacggccaattccccggcttcctccggtcaccaatgctacattttcctgcaggctcattttgtttctcctttcagtgccgccagaacttccgccgcctcagcagcagtggataaggtcatggtttgaatcgacggagcggtcttttttaccagcccgctcagcgtccggcccgggccgatctccacagccagatctacgccgtcagcctccatagccagaatggtctcgcgccaccgcacgccggtctgaacctgtcgcaccagcaaatcactgatttgctccccttcctgcgcccgtccgcccagacagttgaaataaacgggacattccatcggatggaacacaatggtttcaaagtgcttctgcagcacgttgcctgcactggccatgagggacgtgtgaaaaggaccgctgaccttcaggggcatgcagcgcttggcgcccagctctttggccagtacgccggcctgctctaccgccgcccgtgcaccgctgatcaccaactgacccgggcagttgtcgttgcagatctccaccacacccagcgcccgggcaccgtcgcacgctttttgcagggtttcccgatccagccccagcacggcggtcatggcacagtcgattccttcggcggagtgctccatcgctttaccgcgtagcgccaccgtctgcaccgccgtatcaaaatcgagtacgccggcgctttgcaaggccgcatattctcccagagaaaggcccgccacagcctggggccgaaccccctcctggatcagcagccgcgccgcagccacttccatcgccagcaggcacggctgcgtatagcgggtctggtttaaaagaccttccgggtcttcaaagcaaagctgcttcaggtcaaaatccagcagcgcatccgcctggtcaaaggccgcgcggaaaacggggtatgtttcataaagatcttttcccataccagccttctgacttccctgtcctgcaaacaaaaatgccagtttcatcgccacgtctcctccaattctttgatacacgcacggcactgcgtgtccagtgcttccagaatctgccgcagggggcgaatttcatgaagcatgcccgccacctgtccagccatcagggaaccgtttttcgtatcgccctcaaacacggctttgcgcagcgaaccaagggtaaattgctccagttccattttgtctgctcctgccttctcccggctgagataggcacgggccatctgatttttcagtacccgcaccggtgtaccgccaatgcggcccgtcaccacagtatcactgtcggaagctttgagcagagcctgtttgtaattatcgtggatggggcactcctcactgaccagcaggcaggtgcccagctgcgcgccgcaggcacccagcgccagtgccgctgccaactgccgcccgctggcaataccgccggctgcaatcaccggcagatctgtcaacgcgcggatctgcggcaccagagccatggtggtcatttcacccacatggccgccgctttc

SEQ ID NO: 2639 - DNA, 32759 bp, Unknown
  16S sequences of unknown bacteria
cagatctggtcatccgttctctgagaaaaaacaaagtacgcgtgctgactcatccgggagataagggcgccgtctatctggacgaagtggcggaggcctgcgccgagacgggtacgctgatggagatcagcaaccgccacaggcagctgacggtggaggagatccggatcgcgtccaaatatgatgtgagtttcatcatcggaagcgacgcccatgtgcctgaaggcgtgggaacgtgtgaaggcgccgtacgccgggtgatcgaagcggggctggatccggccagagttgtcaatttaaaaaacggggaagaatagagaaaaaattcatttttcacagaattggcgaaatgcgtgccgggattctgtcagcgctgtatatcagtgctgtaccatacataaaaaacgacaaaaaaggaatattttttgcaaaaatatagaaaataaatagtaatttttataatatagcgccggagacgcagaatctccggcgctgtgttgaatcgtctgcacgccaagatcgagcggacgcatcagaaatttgcaccaattacaaatcggagatagtttgactgccggacgaaaattcaggacaaaaaacggagccgaagaagaccgccggtggccgcagaagagcaggatggtgaaaaatggaagctgtaatcgtaacaggactttccggtgcgggaaagagcaacgcgatgaattatctcgaagacatgggatattattgtatcgacaatatgcccccggcgcttctccagtcttttatcacgttggaaaaacaaaacagaatcaatatggataaagccgcttttgtcatggatatccgcggaagagagtttttcggagatctggtgcgcgtactggaggaactgaaaggcgccggtaaaaatgtgcgggtgctctttctggaggctaccgacgatgcgctggtccgccgttttaaagagacgagaagagttcatcctctggcggaagagagcggtacgaattccgaagcgatccgaagggagcgggagcttttgaagggggtgcgggaaaatgcggatctgatcatcaataccaccggcctgaaaccggcggatcttcagaatctgctgcagaccatgctctccggcaaagaagagagcgataccttttccatcaccgtgcagtctttcgggtataagcacgggatgacgatggatgcggatatggtctttgacgccaggtttattccgaatccgtattacctcaaaagtatgaaacaccttacgggaaataataaaaaaatccgggattatgtgatgaagtttccggagacgcaggatttcatccggaaggcggcggatctcatccagggactgatcccgtattatatcaagcagggaaagaggacgctggtcatcgctttcgggtgcaccggtggacagcaccggtcagtggccatggcaaatctgttctcggagatcttcagagagcagggctgtaatgtgactacggttcaccgcgatattttgaagcgttaggggagaatgctgctatggaatatgaatacccatcctatacccggaattcggaggaagggccgagaatcgtagtcatcggcggaggaaccggtctgtctgttctgctgcggggactgaaaaaaaacagcggtctccacatatctgcgatcgtcacggtagctgacgacggcggcggttccgggatgctgcgaaaagatctgggcatgctgcctccgggcgatgtgagaaactgtattctcgcgcttgcagacgaggaagacatcatggagcagcttcttcagtaccggtttggaaacggaaggctgaagggacagaatatgggaaatctgtttatcgccgccctgaccgatatttacggagattttgagctggcggtggaaaaactccacgacatcctgagaatcaagggaaaggtcgtgccggtaacttcagaggatgtgacgctctgcgcccgtctgaaaaacggaaagatcatccggggggagtcgaaaattccgaaagctgtcagtaagatggagagtccgatcgaggaagtctttctcgagccctccggcgtacagcctctgaactctgcggtagaggcgattatgaacgcggatatgatcgtgttggggccgggaagcctttacagcagtatcataccgaatctgctggtcggcgggatcagcgatgcgatccgttccgccggagggatgaaagtcatcgtctgcaatgtcatgactcaggcgggagaaaccgacgattatacggtcgtcgattacgtggacgccatcgagaaatatctggggagcggcgtagcggaatacatactgatcaacgatcacatctgccaaccggaagaactgaacgcttatatctgcagaggcacgcgccagatgtgcgccggaagcggcgagcgtgaaattctggcgcagcggggaattaccgtcatcgaaagcaatctcatcgatatttccgacggaatggttcgccacgacgccgaccggatcgccaacattttgctgacgatgatccacggagcataaccgtctttgcagatcttttgaaacccggcgttatacgggaatcctatgaggattctgccggggaaactgtcggaacttttgtccgggcgcggccgttgctgcaaaaacgaaaacaggcgaaccctgcaggggatcgcctgtttttgggaaaatgtgacctcttatttctttttgaaggtcgaacattctgtctccgcgcaacatgtgcagtcggagagaatgccattctgactggtaaccttgattgtgtccgctgtgcacagttcgtctgcaaagtggacgcattcagaaaccttacattttacttttgtattgctcatttgaatcacctttcctgcggcagctgcaatgaagaaatgagaccgcgcgctgcctgattcgggggataataaattgcggtctgccttactatcatcaccggaggaaggggattttatacatgaaattgcggatccgtatttttagcaggaagctcagacgataatggctgatgcccggatgaatcgatatgaagtatcgttatctgcggctgcggtatccggccggtacgcggtgagagagcttctgcggaggatctctgattgttttttgaatttcggttttttatgcgggcgccgttttatttcttcgggctgcagaggaggtgaagtatgtctttttcatctgaaacaaaaaaggaattatctaagatcataccggagaaaaagtgctgtactctggcggaaatcgccggttttgcccggatgaacggatcgattcgtctgatgggcggcgggcgtatgaatgtgtcgctgacttccgaggacccgtctatcgcgcgtctgtttaagcagatgattcagtcctatttcgacacgaccaccagcctggatattttgcaggagacggcgctgcgccggggaaagacgtatcgcatcactctggacgacgcgatgaccggcggtcagatgctccgggaaatcggtctgatgaccgtacaggagggcagcaacgttctggtggaaggaattccgcaggaagtcatccgcaaaaaatgctgcaaaaaagcttatctccgggggcttttcatggcggcgggctccgtcagccatccggaaaaaggctatcatctggaagtcgtctgcaaaaatgaatatatcgcttcagatgtaaaaaagctgatgaatcatttcaatttaaatgcaaaaatttcaacgcggcgggaaaaccatatcgtctatctgaaagagagtgatcatatcgtagattttatgaatatcatcggcgctcacagtcagctgctggaatatgagaatgtacggatcatcaaagggctgagaaatacggccaaccgcatcgtcaactgcgaaagcgcaaatctggacaaatcggtgaacgcggcgggacggcatatggaaaatatccggctcatcgatgaaaaaatagggattcggaatcttccggataaacttcggatcatcgcggagatgagaatgcagaatccttatgtcacgctgaaagaactggcggaaatgacggatccgcctgtgagcaagagcggagtcaatcaccggctggcccgcatcggagaactggcggaccgcctgagagaggagtcggaaaaaaactgtgacgcagagaaaatacgataagacaaaagaaagaataaagaagggcaggcaatcttccggcagctgcaaaagatctcagacttccgggattcatcaggcctgtgaagcatctcagcatcgtcaagtccatcagacccgtaaaacctcccgatcgccggaatctcaacgggctttccgggaggagagagggggcagcggttcaccgacgatggcaaagtccgcggctgccggggatcgtgactcccgaagtatggagattttttccgcggatacggtgatcgttggcgcgggagcttccgggctggcggcggccgtcgcggcatcgcggcagggaagccgcgtcattgtggcggaaggaaatgaaaatcccgggaaaaagttatacgccacgggaaacggaagatgtaatttttcgaatttgcgttgttcttcccagtattttaaccggccggaagatctctttgtggagagtgttttccggcgtttcggcgtggaagagacgcttggcttttttcagtcggagggcatgatggttcgcctggaggacggcggccggtattatccttattccggacaggcttccgctgtagtcaatacgctccgcagagcggcggagaatgcaggctgccgctttctgttttccgatcgggcagaggagatttctttttgcggtgcgtctcctgatgcggtgcgtgtgtcggcggaggatagtgcagccggtgtcgctgaggatgatgctgatgcggccgccgcggccggctctgtctcgcagagcggatcggagacgggccggttttgcgtccgtctgcagtccggaaagacgttatacggcaaaaatctgattatcgcctgcggcggccgtgccggactgaaaaccgggagcacaggagacggctacggttttgcccgggctttcggacatactctgacgccgccccgtcccgcgctgaccgcggcggagtccggcgcggcgtttctcgcggggctgaagggcgtccgggccagaggacgtgtgcagctttgggaacggtccgccggaaaaatagcggaggagcggggagaaatccagtttacgggaaccggaatctcggggatctgtgtctttgatctcacccgttttatggacgagcttcttcctcctgcgaagaagagaaagcgaagagaaagcggaagctctgcggaagagccggcgaaaattcgtaaggaatatacgatcgtctgcgattttgtaccggaaaaagacgaggaggaattatatcggattctttcgaagcagatgcggaccgcggggacaaaatcgtctgaggaaaacagccggaaccttttccgctggaggtcgcgctctctttccgatgcgctggcgggaatcgtaaatgagcggctggcagcagtgattgccgggcgggcgcacgaagacctccgacgcgctgtgaagatgctgaagaatttcgatgtacccgtgtctcatacccggggctgggaggaggctcaggtgacctgcggcggcgtgagacgggaagaactggagcctgcgacgctgcagtcccgactgaggcctggcctgtatttctgcggcgaggttatcgatgtcgacggccggtgcggcggttttaatctgcagtgggcctggtcctccggagctgcggcgggcagcgccgcagcaaagaaaggaagagaacgatgctgagaatcagtcagataaagttaaatccggaagagcctgtctcactgcttccgaagaaaatcgggcaaaagctgcggatcagaaattttcagccgaagaattggaagattgtcaaagagtcgatcgatgccagggaaaaacctcgcattcgtttgatctataccgtggattttgatgtcgatgatgaggacgagctgcttgcgagggcgtctttcttgcgaggcgtctctctgacaaaggcgccggatcatacttaccgcgtgccggatctttcgtcactgtccctgtctgaagaggagaggccggttatcgcggggttcggtccctgcggcatgttcgcggctctgattctggcggaggccgggctgcgtcctgtcgttctggaacggggaagggacgtggaccggcgggcccaagatgtggaacacttctggaataccggcgagttggataccgaatcaaacgtacagttcggggagggaggcgccggtactttttccgacggaaagctgacgacgggaattaaagatgtgcgcatttcaaaggtaaaagaagagctcatacaggccggcgcggatccggccgtcggataccgtcagttgccccatatcggaacggacgtattgcgggaggtggtcaaaaagatccgcggaaagattatcgcattgggcggtgacatccgctttgaatcccggctgaccggtatctgtctgaaagaggacgaaccggaccgggggcagcaggatctctctcccggagctttggaaagcaaaaaatatctgaccgctctgaaaatcaacagcggtgagcggatgatctgcagaagggcggtcatcgcgccgggaaacagcgccagagatactttccgcatgctttttgacagcggagtgcagatggaagcgaagccgttttcagtaggcgtgcgcattgaacatcctcagtctgtgatcgatctggcccagtacggtgtcgagcccaacggcgaagaggggagactgggagcagcgtcttacaaattgtcttatcacagcagttcgggccgcggtgtctatactttctgcatgtgtccgggaggttatgtggtgggcgccgcttcctgcgaaggaggagtggtcactaacggaatgagttatcatgacagggccggaaaaaatgctaacagcgctctgctgaccgatgtgcgtccggaagattttcaggatgcagacaaaaatcctctggcgggtatcgattttcaggaagctttggagcgcgccgctttcgaagccggaggcggacattatcgcgcgccggttcagcgcgtcggcgactttctcgaggggagagacagtccggcgccgggaaacggaaatcagagagatctcagcgttttgcctacctaccggccgggggtgcgctggttccgtgtgacggactgtctgccggagtatgtgacggaggctatgagagaagcgctgcctgaaatggcgcgccgtatccgcggattcgatatggcggacgcggtgatgaccggcgtagagacacgaagctccgctccggtgcggattcttcgggatcagaatctgcagagtgtgtcggtatcaggcctctatcccggaggagaaggcgccgggtacgccggaggtatcatgtccgcggcggtggacgggataaaaatagcggaaaagatcattgaagaaataacggctgattataatttttcataatcgtgtaatacagatgtgaccgtcatgtaatcgtttcataatatgttttcaatctctttgcaatattcgcagggtaggataaagacggaggagcagcgatgaaacgaatgaaacgatacgcgaaaaatctatatcggtttttgccggtatcccttgcggcggtactgtgtgccgtctcctttgtctgtgccgcggagattcctggcgggaatgccggtcaggacggtatttctcaggccgtgcactggtatgatgaatatgtggcctgtgcgacggaacgcggttggatagggctgctggaagacggaaccttcggtgcggaggaacccatgacgcgggccgtgtttgtatccgcgctttatcagatgaaacaggagacggagggggctgaaagtatgccggccggtgaaacagatctgtctccgaaacccggcgggcagagcgaagaggacggagcagagcagtccggtccgccggttcctgcaaaagatctcttcggtgatgtcaccggcgatgagtggttcgtgccggcgctggaatgggcggcggaacagaagatcatcaatggaattgacggtgatttctgtccggatcagacgatcaatcgcgagacgatggctgtcatgatacggagagcggcatcggttctctcgatttcctctccgtcggactggagtatttctatcgattataccgatctggcggaggtttccgactgggctgtggatggaatcgcattctgtgccgtatatgaaatcatgtcgggcaatccggacggcagttttgcgccgaagcgggaactgacgcgggcggaggctgccgcagtactgcagcgcgtcgacggcctcagacagaaagccgctgcgccggatgagaaggagacggcggaggagcggaagaacgtgacggaaagaatttcttgaagagaaacatgtgaaacggggagagaaaaagcgattgaatcgctttttctctccccgtttgttttcatatatatatttgtgtgtcagaaattctgtcccgtgtggtttatttttgcagcgaaaatacggaggttcgccatatgcacgccgggatgtttttgtcaattccgaacgacgggcgtgactggatgcagcgctatttttgtatcagtgtgcatcccgtcatttcttccggctgcgggagattcataaggtccaggagagtcggcgcgatatcggcgaggatgccgctgccgcgcagcgtaagaccgcagcctttcggtgtgatgagaagagccggaacgggatttgtggaatgcgcggtcactatattgtgattttcatccagcatgaggtcggcattaccgtggtccgcagtaatcagaagattccctccggagcggatcacttcatcggcgatctctccgacgcaggcgtccaccgtctccaccgcttttacggctgcctcgaacacgccggtgtggccgaccatgtccggatttgcaaaattcataatcaccgcgtcgtattttccggatctcagggcgctgagcgcggcttccttgacctgaaccgcgctcatttccggctgaagatcatatgtcgcaactttcggagaagggatcagcgtgcgcgcctctccttcattgggcgtttccacgccgccgttgaagaagaaggtcacgtgagcgtatttttcggtttccgcaaggcgcagctgtttctttccgagacgggagaggtattcgcccagcgtatttttatgctgttccggcgggaacgccgtgtggacaccttcgagggcggcgtcgtactgggtcatgcagacataatagatgtcctgcgggcggacggtccgttcaaagccgtcgaatgtctcatcgcagaatgctcttgtgatttcccgtgcacggtccggccggaagttgaacatgattacagaatcgccgtcctgcacggtgcaggcgtgcagaagtccgatttctgtatcttctgtttctgtaacgccgtcttcctgtgaaatatgctccgcttcgtatgcgatgacggtgggaaggacaaattcgtcgttttcatctctgtcgtaggcgctgcggaccgcctgcagagcggaggaagaaaattctccggttccggaggtgatagcgtcgtaagccttctgaacgcgatcccagcgtttatctctgtccatggcgtaataacgtccggagacggtagcgatctttccgacttctttttcagccatatatttttccaaatcggcgatatatttttccgcacagcgggggggaacgtctctgccgtctaaaaagcagtggacaaagacccggtccaggttttccgacgcggccagatcgatgatcgctttcagatgatcgatatgactgtggacaccgccgtcggacagcaggccgagaatgtggagagcgccgtctttttctctggcgcggcgcaccgctgtggtgagtaccggattttcaaaaaatgtcttttcgcggatcgctttcgtgattctcgtcagctcctggtagacgatgcggcctgcgccgatgttgagatgaccaacttcggagtttcccatctggccgtccgggagtcctacggattcaccgctggctccgagaatcgtgtggggataggaagagaaaagacgatcgagattcggcgtggaagcggcggcgacagcattgccttctgttctctcgctgtatccgaaaccgtccagtatcattagtgtcgtagtctgattcattttatttgctacctcttatcatgatgtcgcgccgatatcctcccggcggcagaaaatcggaaaacagggggattcggtgtctgaaatgcacaactgttttgtaaaataaaattataccaaaaaattctctttcatgtgtcctgatgacaaaaaattttcagagagggacgaaaagaggggtcgcctgtgctaaaatatctgtattgtttctgcgctattttccgggatttttgtgtcaaatgagaaatatttaagcgaaaatgaggcgcaggccggcggcattcctggaaaattttttcgcagtgatttttcaaagccggcggaaaaggacggagcggtgcaggacagaaggagaggcgggaaggatatgaactggacggacgaacagagagaagcgatcacagttaggggcagcgatattttggtatcggcggcggcaggatccggaaagacggctgttttgacagaacgcatcaaacaactgatcctgcgggacggtatttcggtggatgaaatgctggtggtgaccttcagcaatgcggcggcggcagagatgaaagagaaaattctgaagtctatcgggcaggagatccgtggcctgactggcgggggcgaaaggcaggagctgacggcggaacagaaagaggaaaaccgccggaaagcggagtttctcagagtgcagctgagaaaggcgcatactgcggatatcagcacgtttcacaagttttccatgaatatcatacgccgctatttttatctgacggatatcgacgcggatttttccatctgcgatgaaagccggcgtcagattttacaggcggaagctctggaagaactgatggatgagcgttttgcatcagggggggaagactttacagagtttctgagaaattattccggcgtgcgcagcgaggagcgggtgcgggaaatgattctgtcggtttaccgttttatcatgagtatgccggatcccttccaatggctgagggatgcctgcgcagccctcggagcgggagaagaggaatttcggagatctccggtttggcagtatatcgcggaccgtatgcggcgttcggtggaggaagcgggcgaactggcggagaaggtctgtgaactgacggaacatctgccttcgatcgtgtccaaagcgcagaaagacagggaacagatctcagcgcttctgagatcgatggaggaggagttttccgcagaagctgtgtttaaaggaatcgagaacgtccggtttcagcgttttacagcatcgaaagatgataaagaggatttcgcggagattaaagatctggtaaaaaaagtaagagatcagatgaaaaaatcactggaggacgtccgcaaaaacttttttccgattccggaggcggaaatgctggcgcggatgaacgctacgaaggagccggcggaatatctgtgcggtctgaccgaggaatttcaccggcggttttctgaaaaaaagagagaaaaaaatctggtagatttcaacgatatcgaacatatcgctctgaaaatactgcgtcatccggaagcggcggaggaataccagaggcacttcaaagcgattttcgtagacgagtatcaggacagcagtattcttcaggagacgctgattcagcggatcagcagaggagacaatgtctatatggtgggcgacgtcaagcagagtatttataaattcagactggcggagccggagatttttatcggtaaatataattcctttgctgcggggccccggaaggaaggggtcccggaaggagaaggcagacgtatcgatttaaaccgcaatttccgatgcaagggaaatatcattcgctgtgtcaacgggattttttctcatgtgatggaccggacacggggaggtatcgattacgatgaaaacgcggcgctgaaaaagggagtccggtacgaaggggagctggaccggaaggtgtcgcttcatctggtggacagctccggtatcgacgagacgtccgatttcgaggatatcatcgacgaggagatcgcggaattggaaaagacggagctggaagcacgcatcgcggcaaagatagcggctgaacgcatcggacagcagatttacgactgtaaggcggaaaagatcagaaccgtgggaccatccgatatcgccgtacttctgcgggggacccggggcgtggccgacatctatgcggaagctctgaagcgtgaggggatcgcctcttatatcgatgcgggagaaggatatttcgaaacgatggaaatcgaagtattcatgaatctgctgcgggtaatcgataaccggagacgggatgtgccgctgatcagtgtactgcgttcgccgattttcggaatgacggtgagcgaccttatcggtatccggctggcgcatccgtcggggagttacagcgaggcatttttggattctgaacagccgaaatcccgcgctgcgtgtgaaaaactggatcgctggcgtctgaagtcgaaatatatgccgctggaggattttctctggatgctgatgagggaaagcggctacatggagtacgcttccgcattgccgggaggagaccggcgcgccgccaacctgagggctctcgtggacaaagcggtggcttactccggttcacagggaaaaggactgttcggttttgtacggtatgtggaagccctcagccggaacaaagtggcgacaggacagagctctaaaggagagggggcgcaaaacaccgtacggatcatgacgatacacaagagcaaggggctggaatttccagtcgttatcgtaggcggtctgggacgcagatttaatcgggacaaaaatacgtcttccgttatcatgcagaaggatttcggcctggggctgcgctttgccgacgcggatcacaattgctatgccaaaaccatcgttcaaaatgtcatcgagatgaaaaagaatgaagagcgtcttgcggaagaaatgaggattctctatgtcgctctgacccgcgcgatggatgagctggtgcttacggcaagtatgaaagatctggaaaaggaactggagcgttttgctctgggactccggggaaacgcaggagacgcggggtgctttctcgactggattcttccgaatctgcaggaggcggggatcgagctgatccgtcacgaccgcagatcgatgtccggagcgattcggcaaacagaggaggagatagaaagtttccgtaacaggttagaaagaggattttccggggaaggggagcgggaagatttgttccggctgatttccgggcgtttttcttttcgttatccttatgatgaggatgtgttttcgaagtcgaagtttaccgtatccgaactgaaccggatggcgcgcgggctgcagaacggaggtaagccggaacctgctccgggatccggcggaccgcagcttgtgtccgaaaccgaagaaacggaggttgcgggaagaaaactttccgatatctcttcggcccggcgttccgaaggagaggtgtcgaaagagatgcagctttcttttctggatctgttccattcgcctgaattgctggagggaggggatctttccgcggcgctggatgagaaaatccgcctgattcaactggcggagaagaaaggcgaagaagaggacggggccgcaggatatgctgcgcggtcttcgggcggctccggcaattcgtcagacagctgtgagagcgccgtgccttcctttctgcggggcgaggcagaacttacggcggctgtacggggaacgatcatgcataaagttatggagctgattccttttcgcgaagatctgcaggagccggaggttctgaaattcgtggaatctctggtggaaaagaatattctcagcctcagggaggcggaaacggtttcggcggcccagatctccgctttcttccgtacggaaatcggaaagcgcgcctgccgggcggactggctgaagagggagtggccttttacactgaagaaaaggcgtgaggaactggtatcagaagctcaggacgaagccgctgccgagatgctgaatcgcgaactgccgccggaacttctgatccagggtattatcgactgctgttttgcagacgcgcagggaattgtaatcatagattacaagacggatactgtcgattggaaaagaaaagaggcggcgtatgaagagatacgccgcagatacaggaaccagatttccatatatcgcgacgtagtaaaaaaggcgttcgacacggataaaatcgaaatgaagatttttctgatgaggacaggagagatgattgcgctatagagatgaaatgcgccggtacagcgttcgccggcctccgggacagaggagcggaacgcgggagaaaatacatttttccgggttctgacgaagaacggaaaagaaagatgagcggaaaaaacagtccgaaagccacgtgatggttttcggactgttttttatttttttaatgctgctcttattttatttagacgtccttaacgggaaagctgatataaatagcagataaagggaagggaaaggaaacgggaggataaacatgataaagggcaagattcacatggggatcggctttgccacagggagaacgagttttctcaatgtgctgagagcatatatttttcatctgagggaatcgcattttctttcgaagtacaatgtgctgctctctctgtatgtggcatacgatccggcgtatcaaaatacgaaaaaatcggattacgatgctctgactgcggaggagagggaattcttttacgaatgccgttttctcgggccggaggacatcaggcaaaccctgacagcgatgatcggggaaggggtgatagacgaatcggagaaagatcagttgtttggcagcggttatgccgttcagagaaatatcattcagtttgccgcgctccgtgaccgggcggattatctcgtgtttctcgatgacgatgaatatccgctgtgtgttacgcagtcacagccggcgctgctgtggagcggacagccgattctggaggaacatctgaggtgtctgcagttttcggattataccaacggatatcactgcggatatatggcgccgattccgtctatcgattatgacggaattctggatgagacgatgtttcggcattttaccgacgcgatgagcagcgatgtcctgaaatgggaaagcgtggtgcgggatatggagaacggaggcgtcacttatgccgataagaatgttctcatagagcgcaaagtgcggctggtagagcctgaaaacggtgcgaaatttatcagcggcggaaacctcggtatcaatctgacccggccgcggagggtgcttccgttttataatcctccgggagcgagaggggaggacagtattctcagcacctgtctgacggattatacggtaaaacggattccggtttatacttttcacgatggattcggattttacgggtctctgctgaaaggtgtgctgcctctgtctttaaagaagatatcgctgtatgattccgcgctgatcaccgaccggttttaccgcgcctgtctgggatgggtgaggtataagccgctgtatacgtatctgacacagccggaagaatatgacagaatcatggaggaatcgagggagcgtcttgagaaatctctgccgaaggtctgcgcctacttcaaccgcagtgaatttcggaatctgtcggaagaattacagttttatgaaaaaaatgtgcagtctcactataaggaattccgagatgcacagcgcgtgtggaagaaagcggtggaaaagactgtcgcagacggattggcgccgcagaatcccggcagcgcataaaatgacacaggagaattgaaggagcattttaaatgggcaaacagattttattcagaggagtcggaactgcaatggtgacgccgatgagagaggacggaacgatcaattatccggtttttggacagcttctgagagaacaggcagacagaggcgcagatgcggtgatcatcgccggtactacgggagagggttctacgctttacgaccgggagcatatcgaactggtggaatatgctgtgaaaaagatcaacggaaaaattccggtcatcgccggtgcgggaagcaataatacggcgcatgcggtccacctttcaaaggaatttgaaaaaattggagcggacggtcttcttcatgtgacgccatattataataaggcatctcagcagggactttttctccactttcaggcgtgcgcagaggcgacgaggctgccgatcatactttataacgttccgtcgagaaccggcgtgaatatttacccggctacctataaacgtctgagccagatcgataatattgtagcctgcaaagaagccagcggaaatttttctcagctggccaagatcgcggctctgtgtaaggaggatcttacgatttattccggcaacgacgatcagattacgtcggcgctggctctcggcgctcagggagtgatctctgttttatcgaatatactgccgaaagagacgcatgagatctgccgttcctattttgacggagacagcagtctcagcgacagccttcagctgaaatatctggatctgatcgaagcgctgtttctcgatgtcaatccgattcccgtcaagcaggcgatgcgcgctatggggtacgatgtgggccgctgccgtctgccgctctgcgatatggatcccaccaatgcggaaaaactttactctgttttgaagcagtacggactggtggaaaatgttaaagcggggtctgttaccgtaagacgcgcttccggaacgggaagggttcttcagagtaatgtttagcaaacgctgccgcaggacggctgcggccgaaattgatttagaaattgaagtgtaaaaaagataaataagaaaaacaggaaaagaacggatgagaaagcaggcgatcatccgttcttttttgattcggcagaataattcctgaggacaaaaaatgaaaaacgagcgccctcatggacgcccgagctggtcgaggtgacaggattcgaacctgcggcctttgcgtcccgaacgcaacgctctaccaagctgagccacacctcgatatatctatatattatgcatgatgtctgaaaaacgacaatagttattataatacacaatcggagaaaatcaataggatttttaatattttcttttttatattgtgatatatttcaaaagctttttattttttacgataaattacctgaaagtggaaaataatttctgtttgcaatgacctttgaaggaaaaatttaattgatgaagcttattttgtgtgatattatatacataatttgaaaatgtatgcaaaattggaatgaaaacaggaattttcgtatttaatctcgtaaatgtatatattttctgtaattttaaaggtatatttttgattattctttaaattattgaagggagagaactatttatggaaaaatttgctgaaattgtttctcagatagatggaatcgtctggggaattccgatgatcgtcatcttgttcggcacacatctttttatgacgtttaggaccggaatcgtccagagacacctgtttaaaggcatccgcctttcggtttcgaaagatgaggacggtgaaggggagatttcgcagttcggcgctcttgctaccgctcttgcggccactatcggcaccggaaatatcgtgggcgtggctacggctgtcgtctcgggcggaccgggcgctgtattctggatgtggattatcggcgtgttcggcatggcgacaaagtattccgagacactgatgtcggtaaaatacagagttcagacgaaggacggcagaatgctgggcggcgcaatgtacgcgctggagagggggatcggtcagaagtggctggcggtgctcttcgctcttttcgccgctctggcggctttcggcatcggatgtatgacgcagtcgaattccatcgccagcgcctgcgaagaaaatttcggcgttcccacatggattacaggaattctgcttgcggctctggtagccatcgtcatcatcggaggcgtaaagagtatttccaaggtctgtgaaaagctggttcctttcatggcgattttttatgtgctgggatgtattatcattctgatcataaactatcaatatattcttccggcggtggttctgatactcaaatccgctttcagcgtacaggcaggattcggcggcttagccggttttgccgtgacggaagcgattcgtttcggatgcgccagaggtcttttctcaaatgaatcgggtctcggttccgcccccctggtagcggctgcggcgaagacgaaaaatccggtgagacagtctctgatttccatgacgggaactttctgggataccgtcgtcatctgtctgatgacggggctcactctggtcagttctgttttggccaatccggaggtcgcgtcggctgtatctgccggagattctgtgctgacttttgaagtattcgctcagatcccggtgatcggcagaccgctgattacgatttcgctggctctgttcgcattttccactattctgggctggtcttattacggtgaaaaagcggcggaatatctggtgggctccggcgttatgaaactgtataaactgctgtttgtcattttagcgtttgtgggaacggtgtcatcgcttcagctggtatggaatattgcggatattctcaacggtctgatggtaattccaaacgtcatcggcgttttggctctcagcggcgtcatcgtggcggagagcaggaaatatatcgacaacctggacgctgtcagccgcgatacgattccggtggtaaagacgaaaaacgacagataataaaaataaaatttctgcggtgagattctcaaaatgcggaagcagacttgttacaaagtctgcttccgtttttctggttatttgtctttttccggcggatccgaaagacatcggatcgtcacatcgatgatgattttatccgggtgatgagccgttgggctttcgccgaatcttccggcctgaaaggcggaaatgaaattttcagcggttacggtctccggatctgttgtctctgaatcctcctcttcgagaagaaggcggacgggaatgttcagcacttctgccagatacttcaattcgtaatctgtgaccagacggctgccggtttcgatgcggctgatggctttttgtgtgagatccaaaccgcgcagctgtaattttgccgccaggtcttcctgagacaggccgcgtctctttctgattttccgcagtctttcaccacagatgttatgtttttcattgattctcattttcttcaaacttttaccttcctttctttttgtgaaattagtttttcaatgcttaacataacatgattgcgtgcggagattgttccgctgggtcaggatggagtgtatttgaacagatctggtacggaaaaaaataatctattatttgcagtgcgtatattgcttccgctgatgggcggtgttagaatagaactgcacttttacactgtgatgcttttatgtactaaaacaatacctgatgaaaaataagtctgttctgatgctgtcggcagaagaatggataattcgggcggacaggaaagcttcagatcttacagaaaacaggagaggattttatgagcagtaatcaaatcatcgtgctggtatgcgccatatactttctcactatggtggcaaccggcattttcgcagcaagaagaaacaagaaggcttccgactttctggtagcgggccgaggtctcaacactccgatgacggccgtcaccctggcggcggttcagatcggagtgggaatcgtgctttccggagccacaaacggatataatgacggcgtctggccgggtatctattatgcgctcggatgcggcggcggtctcatcgtagcgggtcttgtcacctcgcggaagctgagagcgcaggagggctatgtgcctctggatttcttcgcgcagaggtacggtgacagcagaggcgtgcgtttctgggcgtggctgagcaacgtgccgagccttctcggaatatttatcgcgcagatgctggcatgcggcagtatcctggagggatttggaattccgtttaaatggggcgtcgtactgacgacctgtgtcattctcatctattgtacgataggcggtatgtggggcgtcgtattgaccgatgcgattcagacggcggtgattatgatcggcgtgccgattctcgccgtggcgactctgatcaaatatacggcgaccggcggttcggtgggagaaatcttcacaacaccgtttatcccgaagggaatgggcacgcagtttatctatctggtgcttccttttctgctgtcgatttcagtatcgtacgacgcttatgccaggatccagtcggccaaggatgccaagacggcatcgagaggctgtctctggggcggagcactcgtcatcgtcgtaggacttctgtgttctgttatcggcgtagccgcccgcccgctgtttccgggcgtggaagacggtattttcacgatcactgccatgggggttctcaatccggtgctggcgggaattgtcatcgcggcgattctttccgcggccatgtccagtgcgaattgtgttatactgtctctcggatcatctttttccagagacctgtataataaggtaatgcatccggaagtggaaaatctggatcagctgccgaaggcgaagcatatttctcagatcgcagtctttctgggaagtctggtcggtattttctttgcgttccatatgaccgatattctggatgccatgataatctttaattatccgtatatgggaagccttctcatccctctgctgggaggtctgctgtggaagggcgctacgagaagaggcgcttttgcggcggcggtagccggcggtattgtcggcgtaggcgcgttttttatcggtattccgggaccgctcaacggcctgattaatacggatctggctctgatgatcgcttatctggtgtctgcggcagttctgatcgtcgtgagtctcacggataaaaacggtcaggaggataatcgcgtcagagagctgaaaaatgccggcgcggcaaaggcgtaaagagaatgtgggaagcggccttccgtatgcaaaagatccgtttttggattcgcggaggaggccgcagagtgaatattgggagaaggccctctgcagagaaacagcagagggctgaaatatgacaaacagcgccggcggcacctgcttcctgaggcggcgcaggtgtcatttccgattttccgcgggagacggccgtctcccgcggaaaaccggcaggcgcagaagtatctgaaatgataaaggtgaaaaatgaatcagtatcagtggccatatgaaaatgagctgaacaaacgggaagaaaatgtgtcggacgttctggtgctgggcggcggcatcgccggctgttatgcggcgattgcggcggcgcgcaaagggatgtcggtaactctggtcgaaaagggcgctacggtgcgcagcggcgcggcgggaagcggttttgaccactgggagtccgcctgtaccaatccctgttctaaagtgacggcgaaagaaatcgcggaagcatatgtggacgaacaggatcagtacagcaacggcatcgcacattatatcgagtgccgggaggggtacgaccggcttttggacatggagtccttcggaggaaagattcgtgataccgaagatgaatttgcgggagccgaattccgggacgacgaaacgaagctgatgttcgcctatgactacgagaataaatttaccatccgggtctggggatctacctttaagccggctctgtataaagaactgaaacgtctcggagtaaaggtatatgaccggacggaagcgacgagtcttctggtcagcgaagaagacggggcgcggcgcggcgcgggggctgtggggatgaatgtccgcacgggaaagattctcgttttccgggcgaagtctacgattctcacgatgtcccgtcccgccagagtctggctgtttaacccggatctggtggggctctgcgaattccgtccgcctcagagcatcggcagcggccatgctatgggatggagagcaggcatcgaattcacgatgatggaaaaatctgtaaagggagagttttctgcagcgggaagaagttttccgccttactcggcgggaaataatcacaatacctggtacgccgctacgatggtggacgccagaggcgtggaaatcccttatgtggacagggacggcagagagctgaaaaccgtatctgaaagatattatccggcgaaaggacagaaatttttcctcaagggcggcgtcatcgacaatccgaaatacgaatatcggggtccggaaactctggaatttgaagaactgatgaagcggggatatcagcttccgttttacgcggatctcagcaggatgccggagatggagcgcaaggtgatctggggtatgatggtcggcgaagagggcaagacgaagatcccggtacttcagaattatacggagcggggattcaatccggaaaagcaccggcttcagagctacggcaccggctggcagtcggcgtcttttctgcctcaggaacgtcagcttttcggagcgccgggcggtgtgatgcacgactgggatctcaagacgaatatcgacggaatctatgcggcgggagatcagcttttcgcctccgactgctgcggattcgcggcagctacgggatattatgccggaagaaaagcggcagattatgcgaaaaccgtttccttcggagaaatctgcgaggaagacgttcagcgggaaatccgccggctttacgcgcctctgtatgtggaaaacggtatggactggcgcgagctgaatatggcgattgctaaagcgatgcagaattactgcggcggaatcaaatgcagggatctgctgcaggaggggctggatctgctggagagctatcagagggaaatcgtgcctcagatcagctgcggcaatcctcatgagctgatgagagctcacgaggttttcgatatcctcgaagtatcgcagatgattcttcatgcctgtctcctgcgagaatccagctcggaacctctctgctttgagcggagcgatttcccgcaaatggatccggaagaagaccgctgctttatcactctgcgcagggaaaagggagaggtgaaaaagggaaccgttcctcatggctatttcggcgatctggaagcggaatatgagcggagaaacggcgattatatcgaggagatggaaaggaaacgaaaatccggactgtcagaaaaggagcctgttcccgataagaagaacggcaaaacacagacccaggggaaaagtcatcctctcaggaaccggacagaagacagcgagagaaaagaaattcctgatttttccgttgcgcctgttccgtgcagcgcgcggccgatcttgttcgaccggcagatctgtgtgggctgcaaccgctgtgcggaagtctgtcaagtagacattctggtgccttcttcagaaaagggcgctccgccggtggtgatgtttccgggagaatgttattactgcggaagctgcgtgatggaatgtccgaattccggagccatccggcttcagcatcctctgatgaatcaggcgaagtttgtgccggtgaaagaaggtcagacagactgaaaaatatgtggtaaagaaatgtgagcctttccggcgcgcctctctgcaaagactccggtctgtacagaatgcggcgcgccggaaaggcgtttttctgcatagaagaaggaaaacagaatttttttgaaaaacggaaattttccgccgcagtttcggaattaatgttaaactgaaatttaagaagacggtaattctgagaggaagaacgaaacgatgagagagatttgcgcgcagacgctgtattttgaagaagaatttccggaagaaccgggggactggggacgggacgagagcgaagtaaaagaaccgagaaccccggaatcgggcagtgtaattcttaccggagcggaaaaggaagcttcggagggaagaaattttgtaccggagcatttttaccgtccggcccgacagaagggaacactgagacgggtgcgatatcttacgaaaaattatgcctccgacggaaaaacgagagaaaaggacgcagtcgtctatctgccttacggatatgaccgggcgacggatgagacacgttgcaatgttctctatctgctccacggttccggaggttcggagatctcctacatgggcagtgaagaggagcctcagcgtctgaaacatatggcagaccatatgatcgaggagggactgatcgagcccatgatttttgtcatgcccacctatgtttactcccgtgaagagctggggcaggcccgggcgaccgccctcactttctataaggagctcatcaatgacctgattccggccgtcgaaggtcagttccggacgtatgccgcagatctcacagcggaaggtattcgcagatcccgggggcatcgggctttcggaggattttctctgggcagtgtggcggcctgggaggtctttgcccgggccatggatacggccaaatattatctgactctctgcggagactgctgggcgtatgagcccttcggagggcgggaacatccggcatgggccgcggaatatctgagccggatggcgaaaaaatcgggatacggactccgggattattttattttcaccgccacgggtacggaggactccgcttatgaaatgctgcctccgatggtggccgagctgagaaaacatcccgacgcgtttgtctgcggcggaaaaaattatgagagcggaaatctggtctattatctggcggagggatataaacacagttacggctatacctgcgaatacatatataacgcgctgcagctgtttttccggcaggaaagagccgatgaagagcggacgaaggcgccgggaggagagtgcgcagagtgaagacggggcggggacctgcggaacaggccggatgaccctgttaaaaaacaaaaggcgggagaaattatttctcccgcctttttccggccgttctttccgccgggcagaccggcctggtcaaatttttgtaattactccggtttttgctctatgtctgtcttttcgacgtctgctgcggacggcatctcgtgaggactgccggcttcacaggcgtccgctgccgctgtgtttttatccggaagactcagcagcgccagcgcagtgatggtgagagccagtccggcaagagaaagcggcgtcggaatttccgagaagaaaaagagcccgaagagcatggccgccaccggttcggcggatgcgagaatcgaagcttttcccgtttccatataattgagggaaagcgtatagagcacatagggaagcacggaagcgaacagggagtggaggaacatgagaattccgtttttcgccgggttcagcgccagaacatgcccgatggaattccagtcggcaaaagggacgagaactgccgcaatcaaaaaaatgcagtagaaagtgatcgtcagcgcatgatagcctcgctccatggcgattctggaaaagatactgtacagagcataaaagaatccggaaagcacgccgataaataatcccagcgccgaccactgcattgccgaggtttcctcaaaaatcccgctgaccagagcgcatccgaaaatggccagtatcatgcatccgaatttttttaccgtaattttttctttaaagaagacggcagccatcagaaggacaaagaccggcgccagactgagaagtacagctgagagcgacagcgtcagacggctgatagactcgttgtagcagaaattcagtcccagtgttccgatgagtcctgcagcgatgaaaatccacaaatcgcggatttttattttcagaagggatctatcgtagagcagaatcccgatcaggagcatgaacatcgctaaaaagacgcggctgaacatgatcgtgagactgttcatgcccataccggccagacttctcacgaagagaccggtggaaccccagagaattcctgagagaatcggggcggcgattatcaattttttcataacaggatctccattttctattatttatagtattttatatatgaaaaatgaatgatttttttatgattcaggcgtgcgcgatgatcttggcatggcgccagagggcagtatttttgcaggattccgcgagattctgactcgagtctgaagcctgcgggatagccatgctgaagagaccgacgcgacatcatacatgtttcagtataacatcagagatagggcgtgtcacggagaaaatcgcatccgccggttttgaccggcatgagcggaatctcttttcggataaaaaatctgtcgaagagatatacaaaatacagtgccgattcgtgtttacggaacagcgctgtttcagtataatcaataaggtttggctgaaaacggaaacgccgcgattcggcagggctgtgacgatgacagatcgcaggccgggataccgccgcaggccgcggtcccgcagcggagtcagggaattgcaggcgtcgtaagccgcatgttttgaggcttcggaaagagagagacgttttttcggcctgccgcagaaggttcgcttcactgacctgtggggcggcggcccgcactatgtgacagggaggtataatatggaaaactatgatgtggtggttgtcggagccggagccggcggcgtgtttttaacttatgagctgtatcgcagaaagtttgcgggaaccgtgctggtattggaaaagggagctcctcttgagcggcgtcactgtccgatcaacgacggaaagacagaaaaatgtgtaaaatgcaatccgtgcaggataatgagcggttatggcggagcaggaactctttcggacggaaagtacaatattaccacccgcttcggaggggatcttcacaagtatgtgggtgaagaaaaagcgatggagctgatggagtatgtggatgaggttctcacaagcttcggcggtgcggacgcgaagctgtattccacggaaaattccgagctcaagacaaaggctcttcagaataatcttcaccttttggatgcgaaagtgcgccatttgggcacggaccggaaccgccagattctccagcatctgtacgaatattccagggacgccatcgaaacacgctttttcaccgaggtggagaatatcgaaacgacggaagaaggttttatcgtcgttaccggaaacggcggcagaatctcctgccgtgacatcgttctggctcccggacgttccggttccagatggatgtcagagatctgcgaaaagctgaatatccgtaccatgagcaatcgcgtggacatcggggtgcgcgtggaacttccggcggaaattttcaaacacattaccgacgatgtgtacgagagcaagctggtctataagaccgaccggtacaacgatgtggtgcgtactttctgtatgaatccttacggagaagtcgtagcggaaaacacaaacggtatcataacagtgaacgggcacagttatgcggacgaagatctgcatacggaaaatacgaatttcgcccttctggttactaatcagctgacggaaccgtttaatgacagcaatgaatacggcgaatccatcgcccgcctcagcaatctgctgggaggaggagttctgatgcagcggttcggagatctggtcaagggcaggaggagctcggagcgcaggatggaaaaatgttacacccgtccgacgctgaaagcgactccgggagatctgagtctggtcattcccaagcgccagctggacagcattatcgagatgatttatgcgctggataagatcgcgccgggcacagcaaacgaagatacgctcttgtacggtgtggaagtcaagttttacaattcgagagtggaagtggacgaaaacatggaaacgaaggtgaagggcatctacgctatgggagacggttccggagtgacacattcgctgtctcaggcatccgcctgcggggttctgacagcccgcgttcttctgaagaaatacggttcgtctcaggcatgactgacgataaaatacaggcattgtacattttgcacggcggctgatagactgacaggtgtccagagaggacgcctgtttttttatgaggcaggatctgctgcattctccggaggggaagatctgcagaatacagatacctgtttattgaaagaccctttttcggcggcgaggaggccgccggagatgaaaatgacgaaagcagaaaaaatgaggtgaaatgatgaacgcgaataaaaagattttagtggcgtatttttcctgcggcggtgttacggcatccgccgcgaaagttttggcagaagccgcgggcgctgatctttatgagattgcgccggaggttccgtataccgacgcagatctggactggacgaataaaaaaagccggagtaccgtcgaaatgaatgatccggactttcttcctcccatcgcaggccgtctttccggtatggactcttacgacgccgtgtttgtaggatttccgatctggtggtataccgctcctacgattattcacactttcctgaaaagttatgatttctcgggaaagacggtgattccttttgctacctccggcggcagcggtatggggaagacggaccgggttctgaaagcgcagtgtccggataccgtacagtggcgtcccggcagactgctgaacggccgtctcgaggggaaagcgctgagagagtgggtggacagcctgaatctgtgatcctgctgcagttcgatttcatgaaacagggtccgggcgcgaaagcgtccggaccctgtttctgtctgtttccgtatttttgtaaactaaggccgcgcgcattccgagtcttttccctgaagaatatccagaccgtgtttgacagacggaagaatcggagcgagcacttcttcgatagctttcggactgccgggaagattgatgatgatggaattgccgcggatgcccgcttccgcgcgggagagcatagctctcatagtgacggcgaggctgatgcttctcatggcttccggaatacccggcgtgcggcgctcgatcacttcgagagtggcttccggagttacatcgcgttttgagaagcccgtgccccccgtggtgacgatgagatcgattttctgaatatctgccatatcgatcatggcggaagtcagccggactttttcgtccgggacgatgcggtaatccaccacttcaaaggtatcggcaaaaccgctgagaatttctctgattgcaggtccgcccttatcttcgcggagaccctgagaacctttgtcgctggctgtaataatacctgctttgtacattttgacgctccttttgtatattttctattagatcaagttttttgcttatctgagataatattctaacataccgacagcgattttcgtatctgtcccggagagaaaagagaaaaagttcagcgcaacatagagaaataattggaatggtaaaaaatagaaaataaaaattgacaaaatatggaatgttttatataatgacttcaggaaggaaatggaaaaaatttcctttcgaatctatgaagaaaggagaaaactgtgtatggcagaaagtgtgagacgcgatcgagacgatgacttccggtatgaaatcgtgcggcatttcggtatcctgtctacgtctgtcaaggggtggacgaaagaattcaacagcgtcagctggaacggtagcaccccgaagtatgacatcagagactggagcgccgagcatcagcacatgtcccgcggcatcaccatgacccgggaagaactggaacagttagcagagcttatttccgcagagctcggtgcagcgtaaagtcagagtttcatccgccgttttcacaaatcggcattacccgcaacagccgcgccccgtaaaatgcgcgcggcgctttcctgaacttttgaaagcgcggccttcttcttcgtctcaaaccgcgcccgtaagagcacgctgatgggcgcagaggggagggagtgtggaagtaccgcgcacttcatgattatctcggttacaaaaggctctccgccggtcgcaaagacccggggagccttttgttttttgcaaatgagatatatcgtatctgcaaaggcgcaaagtctgtcctccgcagccgggttctcttccctcggcgagaggcgagtcgtgaaaagcaaaaaagacgaagactgagccgtagtcgacatggtacaatagctctttctcagcgatccgccgatgagagacggcgggagcaaagaaagactcgtacctgtccctcggcgagaggcgagtcgcgaaaagcaaaaaagacgaagactgagccgtagtcgacatggtataataaaatagatcgatattttcttttggagcggcggttcgccgcaggaagagagcggctgaatctgcggcatttcagccggagcagcaggcatgccgacagcgccgcgtgtcggagaaagcaggaggcaggtatgagtgagaagatcagaatcagaatcctttccgacaatgatgtcaccgaagtaatggagcccccgggcatttcactggaagaactcgctgctaagtactatgatcggtccgcaggatatttcccggtgtttgcaagcgtaaatgacgtaggcagagatctgctgtatcggatcagccgcccggcgacggtacggtttatggatctccgctcccggctggcccggctcgtgtatcagagaagcatttattttctctatctcgtggctctcagtgaaatcgatccggacgccagtccggcgctgaaacatccgctcaacgacggcatttacgtcaagataaaaaatcagccggacagcccggcacaggcgcagtggctcatcgaaaaacgcatgcgggagctcatcgccgaggatgtgtctttttcgagaaaaatcatacgaagaaaagaaattctgtccgatcatccgccggaaattctgacagaggatcagattgaatacatcaggaactgcgatatccgggaggtcttcgagtattcctgccggggggtatccaggattttttacgatccgctgatcgcgtcggcccagtctctttatctctttcagattgttccgtatcagggaggcgcgatccttcgggttccgcagtaccgcagtacgaaatctctgccggagtaccgggacgaccgcaagctctacgaagcgtttatcgaagaggcgcagtggaaccgcgatgtgggcgtatggcacatgaaagatctgaatcgtaaaatcatggaaggagagtggcacgatctcatcctgctgaacgaggcgttgcaggagaaaaaagttgcggcgatcgcagatgatatcattcggagaaaacggagaattattctcatcgcaggaccttcttcttccgggaagaccacttttgcgcagcgtctgtgtatccagctgagagtcaacggaaaacgtcctctttacatgggtacggacgattattttgtggagagagagcaggcgccggtggatgaattcggaaagtttaattttgaggatctcgacgcggtggatgtggatctgttcaacgaacagatgaacggtcttctggcaggtgaaaccgtggatatgcccgtgttcgattttgtaaaagggagcaagcggtacggaacgcggatcacccgggcggaggaagatcagccgatcgtcatcgagggaattcatgcgctcaacgacaagctgaccgaggatattcccgaggaagaaaaataccgcatctatatcagtccgctgacgacgctcaacatcgatgataataaccggattccggtgagcgatctgcgtctcgtgcgcagaatcgcccgggatatccgttccagaggaaggaccgccagtcagacactgagcgaatgggtgaaagtgcgggccggcgaagtaaaaaatatttttccgtacagcgtagaggcggatgtcttttttaattcggcttttatgtatgaatgggctatgctgaagccggtgattaaagacagtctggaggaaatccgggaagaagacgagaattatctggaagccgagcgtctgctgcggattcttcggtgcgtcagatccctgaaaaattccgaagacatcagcaataattccattatgagggaatttatcggcggaggaatctgggtaaaataagtagaaaggcggtgtcggcgatgtatgcggtccttcgggatgacgattcgcggacccgctgccgaaaaacggcgcagaaaagagaaaaagaagcgcagcggtctttcgcgcgcattgaaaccgaagctgagttattttagacaggagaatcatatgttatatctgggctgtcacctttccatttcgaaaggttaccataaagcggcgcaggaagctgtttccataggcgccaatacatttcagttttttacgagaaatccccggggcggaaatgcaaaagctctcgacgagaaagatatcgccaaagc

SEQ ID NO: 2640 - DNA, 30606 bp, Unknown
  16S sequences of unknown bacteria
tacaaaggacgttaccgaacgcgcgggtgctcttcttaaggcaggcgccgacgttctcgttctcgactcagcacacggtcactcaaagaatattttaaattgcattgacaaaataaaatcagcatttccggattgtcagctcatcgccggcaacattgccacaagcgaagccgctcacgacctcatttcagcaggtgctgacgccatcaaggtcggtatcggtcccggctccatttgtacgacacgtgtagtcgcaggtatcggcgttcctcagatttccgcggtaatgaacgcgtactccgaagcagcggaagcaggtattcccgttatcgcagacggcggtatcaagtacagtggggacattccgaaggctatcgcggcaggcgctaacgtaatcatggtaggctcgcttcttgcgggatgcgaggaaagccccggagacacagaaatttatcagggcagaagattcaaggtttaccgcggcatgggttcactcgcggctatggaaaaaggctcgaaggacagatacttccaggaaggcgcaagaaagctcgttcccgaaggagttgaaggaagagtaccctacaaaggacctctcgcagatacagtgttccagctcatgggcggtctccgttcaggtatgggctactgcggcgcggctacaatcgaggacctcaagaagaacggcagattcgttaagatgtccggcaacggtcttaaggaatcacatccgcacgatatttcaatcacaaaggaagctcccaactactcggcacttccgctataataaaaaagatatccgcctgaataggattcattcttatcccatggcggatatttttattttgcctgtctgtacttgttcggcgtgcatccgactgcttttttgaaagctccggagaagtgctgagtgtttgagtagttcagcagcgacgctatctcttttatcggcatgagcgtaccggtgagcaggctttttgagattgatatcttcttgtcgagaatgtactgtatcggagttatgttgtatctctgcttgaaaagcctgataacgtgcattttagttatgccgaactccgatgcgatatcgtcgagtgtgatatcattgtaaatgttcttgtcgatgtacgcgcgtattttttcatcgacagacgtgttgtttgaagttgacgggaagaagcgttcccttgtcgcagccacgagcatattgaaaagcaggctcatgatttcggcataggtttcggattcgttcgtgtcgtcaatgtgttcgagcttgtcgtggatctcgatgaagatattcatgacattgacttccgcgacataaagagtgctgagattgaaaaagctgaaaatcttgcggacaagctcgccgtcgaggtttatccacattttttcataaggttcatcctgggaggcgtagtgaacttcatcaacgcccttttcgagacagtaaaacataccctcgtgaacatcatataccctgtctccgacttcaatcgaccctttgccggagacaacatattcaaaaacgtacacatcgcagttgtttcgcacaatcctgtagtttggatttttgtaggtcactcccgcgagcatacatgagaacagagagtacggatcgtttttgcctacatagatgtttttttcgttgtaggtgttaaaatacattagcccgatgctcctaaagttgtttttctacattatactccaaaaacacggatttgtcaaacaaaaaatgtcgaaattgcatgaaaacaataaaaattatcaaaaataatgaattgtatgtgtaatctcatcgcgaaaattaatatttgattaaattataagcccactattgacagtcaagtgaacgtgtgatagaataatattgcaatgaaaatctgcgaaaggaggagtatcagatggaaagcgaacaggtaaacaatatcccggggactattctgaaccgtgacaaaatggacggagcaacgggacttgaattcctcgataaggtgttcttcatcaccgacaagataatgctcgcgcagataagagaaatcacgggaatcgacggcacgacgcttcaaaactggctcaaaagaggctgggtcgggacgccgaataaaaaatcttacacaatagaacatcttgcgcggatacttatcataaatatgatgcgcgacacaatgcagctttcaaggataatcttcatcctgcaatacgtgaacggcaagtccgaggaagacaaaatagtcaaggaaagcgtgctgtacggctatatctgcaaggtgctcgacagactttccgaaaacggtgagataagcggcgcaggaatagacggtatcatttcagacgttctctcggactacgaagagccggtgagcggtgctgggagaaggctgtccgtcggcattaaggtgataacgattacatattattccgcgctcataaaagccgaagcggaggcgattttagacagtctcggtgcggaaaaaacgcggaaaagatgaaccttatattttgtaaaggaggcatgacaatatgatcgaatggtggaacagtatggatctcgcgggacagatttttgctctcatcgcgataccatccacgcttgtgcttgtgatacagactgtgcttttgcttttcggtatgggagacgacgatgttgaaacggacggcattgacctcaacggaaacggcgtaggagacactcccggagacggcggaggagacggaatggcgctgttttccctcagaggaatcatggctatggctgctgtcggaggatggagcggacttgcaatgtacgacaacggacttccgcttaccatgactataatactcgcggcggctttcggattcatcacgcttgtcggaatggcgtacatcatgcggctcgcgtcaaagctccagtcaagcggaaacatagttataggatatactatcggcaaggttggaacagtatatatacccattccgccgaaaatgtcaggctctggcaagataaacgtcacagtgcaggagagattcatcgaggttgacgctgtaactccgtgcgagagaaagctcatgacgggggaaagcgtaagaatcaccgcgactgacgaaaacggcatggtagtcgtagagcctgtaataaagaatacggaaaagtaaaatcttaaaaagtaaaaatcttcatatttaattaaaggagaacaacatgagaacacttctaacatcgacaatgtccatcgacccttccgttttgatgcttgtgtgcgtcatagtgctcgtagtgctgacgacaatgatagtcatcctctcgcgctacagaaaatgcccatctgataagatactcgtcatctacggtaaggtaggtcagactcaggacggacagcagcgttcggctaagtgtatccacggcggcgcgtcattcatctggcccgttgttcagtcgtatgaatacctcgaccttacgcctatgtccattcaggtagacctcagaaacgcgctttccaagcagaacatccgcgtagacgttccttcaagattcaccgtaggtatctcgaccgaaaacggcgtcatgcagaatgcggcagaacgtcttctcggtatgaagattgacgaaataaagcagattgcggaggatatcatattcggtcagatgagacttatcatcgcgacaatggatatcgaagagataaactccgaccgtgacaaattccttgaagcggtttcgtcaaacgtagagactgaacttaaaaagattggtctgagactcatcaacgtaaacgtaacggacatcaccgatgaatccggatatattgtagctctcggtcaggaagccgcagcaaaagcgataaacgacgcgaagatatccgttgcggaagccgaaagagcaggtgctataggtgcggcggaagcagaccgtgataagcgtatttcagtatcaaaatccgactccgaagctatcggcggtgaaaacgaagctcgtgcaaaggttgcagactccgacgctacaagacgtgagaaggaagcggaagctctcaagcgtgcgactgctgccgagaacatcgcaaaagcccgcgcagaacaggaatcctttgacgcacagagagcagcagaagaagcaagagcgcattttgaacaggctaagctcgaagcggacgttattgtaaagaccgaaatcgagaagaaaaagctcgagcttgaagcggaagctcaggctgaacagacaagacgccgcgcaaagggtgaagccgacgctattctcatgaagatgcaggctgaggctgacggtgtaaagcagatgctcatgaagcaggctgaaggttttgcggaaatcgttaagtctgccggcggtgaagctaatgatgctattcgccttatgattgccgacaagatggaagagcttaccaagattcaggttgaagccatcaagaacctccagattgataaaatcactgtatgggacggcggcacatctaaagatggcaagaacgcgacggctgactttatctcgggactttacaagagcattcctccgatgaacgaaatgtttgatatggcgggaatgcagctgcccaaatacctcggcgagaagaaggacgacgctccgacaacacccgacgagacaaaataacgggagactttacaatggacgtaataaagctatccgacttctatgacggagatacggtgcagtcactgaaaaaagcggtggagcaagtcaaaaaggacggcgcgaaaacactcttcatcgaacccggcgactacattgttacgggagaaagagcaagagcagcacaatctgcggtcatggcaggcgacttcggagagaatccgcagaagataatgttcacgccgacatatgagtacgacatcggttttgacctcagcggactttccgacgtgaagatatcggcgtatggcgtgagattcatagtagacggattcatggagcctgtcagaataaagaactgcgagaatgttgagctgctcggacttaccgtaacgcacaagagaaagccgttcagccgcggacatgtcacaaaatgcaccccgcgagatgaggaaaacgtgtttgacgtgacgatggagcttgacgaggactgcccgataacgcaaaaaactcctatgctgctgagatacatgtggtgcgatgcattatcgggaagaaacaaaaacggcggtatcataagctacacctacgtcgacgagcaccactttacggctgtagtaaaatgcgtcggtctgtgcgtgggagacgagttcaacaccgtacacgcctttcactcacgccccgccatacatatcgccgaatcaaagaatatcaccttgacggatgtgacgataaacagtcagccgggcatgggtgtcgtcggcaacagaagtgaaaatgtgacgttaaaacgcctttgggtagtgccggaatgcgaataccactggtcaacgaacaccgacgctacgcacttcacctctatgactggtaagctgagacttgaaaactgcgtttttgaatatcacggagacgactttacaaatgtacacggttactatcaggaggtagtaacacgcgtgtccgatacggaattcttcatgcaggagaaaacgccggacggaactcacacgcaggctctcgactatcccgatgtgggagacacgctggaacttacgagaaagagcgacctcagagttcttgacacgtacaaagttgagaaagtaactctcatgcccgacgaatggatgtgcatggtaacagtcgaccatcctatgccggagagcacggaaggactgatgcttgccgacgtgacaagactgccgttcgttgagataataggctgttctgcctcgtctcactttgcacgcggagtcctgctcaaaactcacggcgcgcttgtcgagaggaacacaatgcgggatatccacggccctgctatagttgcggcttccgaggcttggtggtacgaaggcgtatctccgaggaacatcacaatacgcggcaacagaatagtgaactgcggtatgttctggggagaagcggcgggaatcgttgtgaaatccgactgcgacaatccggtatcaagaaacatcagcgacatcattatcgaggacaacgtgatagaagcgccgttagccgagcacggtatctatgttcgcggagctgatggagtggaagttcgcggaaatatagtgaagacccgcggagaaggcgtggttttagaagactgcgtacaatattaaactaaccaaatgaataatctaccccctgtatggcgaaaaaatatggggggtgatttgtatgcttaagaaaatcgaatatatctgcgtatttctgagcggaggaataatctacagcttcatcgaagtcgcatggagagggtacacgcactggagcatgacgattgcgggcgggatatgctttatgctcatccactttatcaacgccatagtgtatgacaggaacattttcatgcgcgctgttgtcggcggctctgtgataacggcggtcgagtttgttgtcggagtggtggtgaacctcattctgcaccttgacgtgtgggattactcggacatggcggggaacattgccggtcaggtgtgtccgctgttcacggttctgtggttcttccttgctattccggcgttcatcctctcggatttgatacgcagattcttcgattcgatagccgaaagagagaagaatgaagcaaaacagcaccaaagagcgtaaatacacaagaaaatcaagctataccaaacttgcaaagaaatttctgaaaggcaaaacgccgctgactgccgctataatcatagttctcggcgcggtttactcgatttttgcctacatcagaacaggaacgatagtcccgacaatggagcttatcgacggacttccgacatttcgttttgtggatgtcggtcagggagactgcgttcttgttacatacaaaggggattcggttcttgtcgacgcaggtccgagatcaagcggaacaacagcggcggagtatgtcagtatgtacgcaccgcacgtcgactactttttcatcacccatccgcatgaggaccacatgggaggcgcggcagacatacttgagtcggtaacggtggactgtcttgttatgtctgacttggtagcggacgaggaattttacaccgacgcgataaaagccgcgaagaagcagggaacggagataatctacctcacaagcggagcggaatacgacacggggaacatctcgatagacgtgcttgacctgttcgaattttactccgacgactacaacaattcaagcctgtttataaaaatcgaagctgacggcacgacacttcttgttaccggagactccgaagccgaggaagaagaatacgcgttggagaaatacggcggcgagcttgactgcgatattctaaaagtaggacatcacggctcacgaacgtcttcatccgaggaattccttgaagctgtgacgccgaacgatgcggttatctcctgcggcaggaacaattcctacggtcatcctacgtcggaggtgcttgacagactgaacgaggacgggattatagtatacaggacggatttagaaggaaacgtagtcctgcgcggagaaaaggcggcgtaaaagacaaaacccgctcattggggcgctaaactgcccattctaaatttttagaaaagacaaaacccaccatttgggcgctaaactgcccgtctaaaacctgagaaaagacaaaacccgctctctgggcagtttgagcaggtttcgtccggacaaaatatggatttgaaaaatggaactacttgattttgtatttcagccgcatattgtctgctatcatcgcgatgaattcggaattggtaggctttccgcggctgttctggattgtgtaaccgaaatatgagttgagcgtgtcgacgtcgcctctgtcccatgctacctcaatcgcgtgacggattgctctctcaacacgggaagtcgtcgtttgatatttcttcgcaacggaaggatagagcacctttgtcacggagttaatcacgtcgttgtcggaaattgtcatgagtatcgcggtgcggaggtactggtatcccttgatgtgcgccggaacaccgatttgatgtatgattcgcgtgacctgagtttccatgtcaatcttgtccgccgcgtcgttcttgtcgcttgaagcggaagagttgctgcggtttttcagaatcatgtctatcttatcgctgaatgtatcgtagtcgatgggcttcggcatacatagcgacgcgccggctctgtttgcttccatgagaacggaaggcgttgacacctgtgtaagaattacaaatgacggagtgttcttaccgctttccgctgttcttttcatgatggaagccgcgtcgagagaggggagccaaaggtcgcttatcacgatatcgtatgactgacgggatatcattttcatggcttcatcgccgtttttcacttcgtctatgagaccggcaccgtttactttaagtctttcgtgaatgtgatttctcacttcgttgttttcgtctgcgattaaaattttagtgtccttgtccattgagtatacccctatacctttccgaaaattttatattctgtaatttattaccaatcactgtaaccatattttaccacagtttccacagtaatgcaatagtatccgcaaaataaatgttaccaaaaattgttaaaatatttggcaataattaacaaaacaatgaagatggcgcgatttttgttgacacttcgcggctgatgtggtataatggcagaacagcttctcttaaaaaatggaaaaggagacaaaaaatgctgtttgagaaaaaagaaataacgctgaaaaacgggaaaaaagccatacttcgcgctccgaggagagaagacggcgcggaaatgtgcgaatacctcagaacaatgtcgtccgagacggaatttgtcataagatatcccgaggaatgcaccgaaaccgcggagagcgagggagaatttctcgaaaaactgaactcttcggacttaaatatgatgatagtgtgcgaggttgacgggaaaatcgcgggaaactgtcagataatgttctacggaagaatcaagaccgcacacagagcaacagtagctataggactgacgcgcgaatactggggactcggaataggctccgctatgtttgacgagatggaaaaagccgcacgacagagaggatgtcttcagatggagcttgaatttgtcgaaggaaacgcaagagcgcgcggactttacgagaaaaaaggtttccgcataacgggagtgctcgaggacgcgataagactgaaggacggaacacttttaaacaactaccacatggtgaaaaaactgtaaaaaactgccgcaatacgttaggacttcttttaaagcctgtcatactgcggcatatttgttattccgctctttttccggtgcagaagtgtccgtcgtatccgtcaagcaccacgggaactatctctccgatgtcggacacgcaatccagagccttaacttcaataaaatgctcgctgtgtcccgttgagaacctgccgctgcacttttccgtcagcatatacacgggattatcacggtgggtggcaatatattcgtcgattagctcatgctttatccccgcgcctatttcttcaagcctgccgagtcggagctttttctcgtgctcgggtatctgacctcccatcacagctgcctccgttcccttacgcttggagtatgggaagatgtgcaggtgcaaaaatttagcggcgcggcagaactccacggtttcaagaaagttttcttcggtctcggtggggaatccgactataacatccgccgaaaatgtagcctctggcaggtaggagcgcatcctctcgatagcggacagcgccatgtcggaattgtatctccgtctcatttttctgagaatctccgatgagccgctttgcagtgatatgtggaagtgtgggagaacctttttctttacgttttcctcggaaataatcttgcagaagcagtcgctcatcactgtcggctcaagagaacccagtccgattcgctctattccgtctatcttcgacacatctcgaataagctcggcaagcgcgtgtccgtatggctttctctcgggaaaatccagtccgtatgacgcggattctatgccggtgagaatgacctcacgacagccctgttttgcgagagccgtcgcttcctcaagaacgagagacggcttttttgaccttacgggaccgcgtgctttgtttataatgcagtaggagcagatgttgttgcatccgtcctctattttgatgtacgagcgggtgcggttcggcgtttcgagcttcatgctgaccgagctgtagctgtccgggggagtagtatcgttggttgcgctgtgttcgttgttccctgcaagcttgattatcatgtcggcaagtgatgcttttccgctgttgccgcagatatattcaacgccttctatcttcatagcgtcgtccgaggcgatttgtgcgtagcatccggttacggcaacgtgcgtagatactgctgcggctttgcgtatcatctggcgtgattttctgtcgctttcggcggtgacggtgcaggtgttgattatgctgacgtcgcatttctccccgaacggcacaagacgcacgccttttttcttcagttccgccgtgactacatccgattcatattgattcactcgacatccgagagtcagtatcgaggcggttatttctgctttttccatgtaaataccttcaaattatatcttaatctattaattttatcatgcaaagcgcgttttgtaaagggaagaatcaaagaaaagtgtaaattctcaaaataaatacaataattgcgtcgataattgtaaattcgtcaaaagctcttgaaaataatctcggttcgatgtataatctatagggaatgacaatcgagattttgcggcaataataacttattaatagtttaacgatgacacaacaaaggttgacttaatataaatgaatcttacacagaacgagacggaatttatcaaaacagctgcggcgtcactcggcgggcagaaattcgagcctgaccatgagctgtttccgtggatgtttatcactgcaaaccagcaaaagctgctcccgtatatttttgaatatgtgagacttctgccgggggtgcctgacgaaaagaatgccgagctgtttacgataatgaagcagcaggtcatatcgcaggtcgtgaatcagactgttcacacggcagagttttccgcactgtatcgcaggctgagggagatggaacttcaccccgtcgtagtaaaaggacagctttgcagcagactgtaccctatgaaagaccacagaataagcgcggacgacgatatttgcgtgagcgacgacgaatttttgaaatgccacaacgcactcacggaatacggactgaaaacggaatgcgcggaggaagaccttcttcatgaggacgaggtcacatacaaggacacggagagaatgctgtacgttgagatgcaccgccgcctgttcgactcatccgaggacgcacacgatgagctgaacggatttttctccgatattcattcgcgctgtgttgagactgacggattttactcaatgcctccgcacgagcatcttttgtatctcatcctgcacgcgtacaagcattttgtcagctgcggagtgggactgagacagtttttcgacataggattctgggcgagggaatacgagagagaaatcgactttgataagctgtacaggcagtgcgagagcgttcatgccgctacatttgcttccgttatcttctccgtttgcagagagcgtctcggaatctcgtttgagccgggagagatgtggaagtgtgatgtacagtgcgaaccaatgcttcatgacgtgctgtgcggcggaatttacggctcaaacgactacacaagactgcattcgtcaacggtaactctcagcgcagtcaagtcgagccgcaagggaaaaaacggcagtgtgttgtcaaccgtgttcccgaagaagacatatatggagaaaaaatatccgtatgtcaagaaaaatccgatacttcttccagcggcgtggatagcgagaatagcggactacataaaggaaacaaaaaacactcaaaacgacaacgcgtccgattcgctgaagctggcaaaagaacgaattgaactcatgaaaatgtacaatataatgtaggagaacgatgtgggcagtatttctttgaaaaagtattcgtctcccgtggggaatataaccatagccgcagagaacgacgcaataacaggattatggattgaaggacaaaagtatttctgcgagacgtgcaggtttacgacggctacatacaaggacgattatgctctcgactcggcttgcagttggctcgacagatattttgccggagacagacccgcgccagacgagctgaacctaaatccgcaggggagcgaattcagaaaagcggtgtggaatatactcaggcagataccctacggcgaaactatgacctacggtgacatcgcgcagagaatatccacggattacggcatggagcatatgtcggctcaggctgtcggcggcgctgtcggacacaatcccatatcaataatcgtcccgtgtcacagagtagtaggcgcggggggaagcatgacgggatacgccggaggtattgacaagaaggtcgcactgctcagacacgagggaataatatttgacgaaagaaataatatcatacataaggagaaaagcaaatcatgaaagcagaattttacacgaataaccgaagaaagctcgccgaatacctgcctgacggagcgctcatgctcatcttttcaggctatgcaccgagaaaaagagccgacgaggattatccattcttctcagacagaaactttgtatatttgaccggtatctcacgagacgctggtcttgtttacgctatgaagaaggtcggcggggacgtcagcgaaaagcttttcctgcttccggcggacttcatgaaggaaagatggacgggacgcagaaccaaggctgacgaagcgcacgagctgtcaggtataaatgacattgcgtacactcccgattttgaggaatactttaagaaagccgtatcagagtgcgaaaacatctgccttgacatagacgatacacgtgaagagcgcgactacaccgaagcacacagattcgctcgccgcatgaaggaagaatatcccgcaaagaaaatcgtaaacattcgtcccgcgcttgccgaaatcagaacgattaaggcagactgcgaaattgacgctatgagagaagccgttcgtattaccggagaaggcattaaggctatgatgcacggtgtccgcgacggaatgaaggaatacgagataaagggactttacgactccgcgcttctcgcaaacggctgccttgaacccgcgttcccgtcaatcatctccgcgggacagaacaacttctgcatacactactactcatacagcggaactgcccatacgggagacatggttctgtgtgacgtcggcgcttgctatgacttcatcggctgcgatatttcaagaggcttccctctgagcggcaaattcagcgacagacagagaaagctctacgaagccgcgtacgctacaagccagcatctgtttgatatcataaagccaggctacctgatggaagaggttgaccgcgaggctcagcgtttctgctatacatatctccacgattacggacttgtagataagccggagcacatcggaaagctcatgtggcacggcggatctcaccacgtaggctttgacacgcacgacatcgtgaagagacccgagattatagctcccggaatggtgttctgcgtggatatcggtatatactgcgaggagtggggaatcggcttccgtctcgaggataactgccatgttacagaaaacggctgcgaaaacctcggcattcacgttccgcgcacaatagaagaaatcgaaaacgaaatgagaagataaaaaaataacgctcggcattgataaccgattcactgtagttcggttgcgtaccgggcgttttttattttatttagaatgctatagcttcaatttcttttgcgcactcttccgtcggagggatttttccgtcagctacatcgtaaagctcggagtgagtttttacaatgccgttgaggaattctgaatacgggcgtgagcatacgtcgagtacgccgatctggtagttttcgccgtcaaatcttccgaggtacggctgatcgtagaggatgaagtagtgcgctccgagacacatcgggtgggacgcggctctgtggaggtatcttctgtaagcgactcctctttcgtgctgattttccacaccgcgaagtccagttgcgtcaagaccacggtcaagcgcgccgaagtggaattcgccaatcataaccggctttcccgtcatcttcgagaagttgtcgatcatgtcgtaggggtccatggagtagcagttgaacgagaatatgtccgtgtattcgcatcccgcggcgagagctttacttgaaagccatgcgtatcttatgccgaggttgaggtggttcggatcggcacgtcttgccgcttctgccggaatctttatgtagttccgtatcatcttcgtcgtctcgtccatgaggtcacgctcagcggttttggaaagctcttccgctctgaacggcttttccatgtcctcgaatgaggtgaagcttgcttcccacgcggcgttgagcttttctatagtgccgtatttttcgcggagggagcttatgatgtgctttctcgttacgagctttgatgtacttgccatgacgaatgcggcgaggttgatgtcattgacgaatgcccactgaggttcgtttgacatgaagtagccgatgaggttgtcgtcgtcgcggcgtttgtcaaggaagtgcgcccattcgtcagcttttgtcttgaattcgggcgaatacacgtcgggaaaatcacggaatactgttacatctgtgcagggatagccgggacctatcacgacgtaaggcattttttcacgttcgatgaaccgcatatcgctccagcaggctatcgtgttgcagccccatgaaacaaggcggcggcgaatcatgtcagcccattttccgtagtaatcctcaccgaaagcggcggcaatgttgtgcaggaagaagttgaagttctcggtcttcttgccgttccatgagcctttgtgccagccgggttcgtcctctccgggaaggttttcgcacagctttgtaatgcccgtgaggttgcagtagtcgccgagtcccacgcagtcaaatcccattgagaagaacgcgtatccgtcggggtccttgagccaccatctcttgccgtcgttttcgagcccgaagaatcccgtcttctcgaatctcttgccgagccatccgccgtatcttgaacgcatctcaagcggcttttcggtagtgtcagcggcttcttcaaggagaaaacgcttcatttcttcctcgtcctttgtcttgcccgcccagtttgtcagcttcttctgtccgagtgagtccaccattttcttctcttcaagcggatattccggctctgcgtcaagaatgcgcacattttcaatctttaagatgaggtctgcgggagttttgtcaacgcatacggcgaattttctaatcttgtcaaggctgatgggatgtccgtgaactacggttttcagctttccgggagtgcggggcaggaacagtgtctttgccgaaagctcggagaagggaagcgcgattctcgttttgaggttcgggagcacgcccatttttatgttgaggtcgcaccagtcctcgctttcggattcccagaactgccagcatagtccggctgaaagctcaccgcaggcggttatgtccatcgtgaggtattcggtcggctttaccttgataccgcagaacgttccctcgggaaagcaggtgaaaattgacgtcgctccgcctttcgggaacaggaatttgtcgtctccgaggtatttcgcaccgttcagagagaaccttgtgaggtcaatattttgcatcggaattttaccatcctttcgggttgatatttctgtatatttttcagttagcatagttttcggcttgcattttgaatagtcttgaatactctccgccttgctccataagctccgcgtgagagccgcattctaccacctttccgtgctgtatatgaactattttgtccacatacagggaacatgacagattgtgcgatacaataatcatcgttctttcgcctttgattttctttatggagctgataatctgatgctcagtctcagggtcaagggcgtttgaaggctcatcgagcactattattccggaggatttcaaaaggcttctcattagtttaacacgctgtatttcgcctcccgagggctgaattccgttcggatacatatatgtgagcagaatcgtgtctgtacccttcgggaatttgcgcaccagagcttggaaccagtcatatttttcgcattcttctttgtataaatcaaagtccttgtcaaagcatatgttctctttcagagtcaacgggagcagagttccgccctgaaacatcattgaaatgctttcccatatggacttttgagcaatggagtgcagctcaacatcgtcaataagtattttgcctttgtaattgtcgtaaaatgaattcaaaagcatgagcagtgttgactttcccgcgccgttttcaccaactaatagtatgctctctcccgggtttatggtgaagctgatatcgtcgagtattaatttgtcatttgtcggataagagaacgatacgttttggaattcgattttatgaggagcggcgggaatcagctttatgtctccgtctttgcttgactcgtatttggattcatcaataaaggtaaacagattctcgaggtagaggtttctttccgccagctggagtatgttgttgacaagcgaatccagtgacgactgcatttttacgacatatgactgcaataacgtgtattcgcctaaggtgattatgccagagaacacttggaaaattattctcacggaagcaagcagtcccataataatgccggtcagggacagatagaaggaatactcattcttctttttctccgacgacacagataaatcaattctatccgcgacaaactgcttatatttgccgattaagaaatcgaacatattaaacgatcttacttcatgcgcatagtatttgcttatcattaaatgtcttgtcgcggacaaccttcttccgattgaatttgcttcctttgacacatcgtaagaatatttgttgagccgtgatttcagtatgcagtacggaattattccgactatcaataaaagcggtacgataaaatcatatttcagatagaaaattatcgctatgatgaagtttatggagcttgacagtatttcaagtaaatagtcgattgattttgtcagaccgtttgtctccgtgagagcgtattccatggcgtcatagaattccggctcatcaaatttgctgtattttacattaaccaccgcttctatcagcgtttcctgcaattgataagtaagaagcatatttattttcggataatagcggtttttgaaaatattaataagcagctgtaaaacgtctatcgcggtgcttattattagcagcctcagcaaaacgccgaacgtagacttgtttacggtcaaagcgtcgataagctctttctttatgtatatagaggtgaaagagaaagcgatattcataatcatcataaatactttgatgaaaataaactttttgtcacatttccatgtcagctttatagcgcgtataatgttgtttactctttaatgtacctttccgtgctcgtttaaaattgtcctgtgaactgtcgttatagttattttaacatagccaaaagccgattgcaagcgtatcgggaataattctctcgatttttggctgatgtcaacaaaaacactggcggcaatcctatgcgaggataactacgtctgtacacttattcataaaaaatgcgaaaaaattccaaaaagtattgattatcatgcggcggatagtgtataatatgatgagataatttcaaaaccacagctcagaataataccgacaaggaaatgagaatgaaaaaacgatttttgaataaactttatttgtgcgtgataatgacagttatagctattgcagtatgtcttccgataagcgcagacacacccgcttctataaccgagaccgatatgctgccccccgtaactgccgcagctgatactgcgaatgagtacggcaacagaataggcactgacatttcagtctacgagggaaacgacgaatactacctgtttttgccgtcctctgccgatatcagcgcggtaaagctcagatacaacggctcgctgaaaatgtatgaccccgacgacggaacactgtacgaaagcggagatatcatgctgtacgactgctcggcgggggagatatccgtgtatgaatacgacagcgagaagaatatgtactatcgctatcgactgaaagtcatgcagggggaaaacatcgcgactatgtacgttaccctcgacaacggcgacgacggactgagacacataaactcttctcacgacgctgtagagacgggaagcatggtcatgaccgagaaaaacggcaagacgatatactccggcggtctcaacagaatgaagggacacggacttacctcataccagtcgacaggttcgcttaacacgaaaaactcgtataatattaaccttgcaacaaaggctgagcttatcgaaaatgcgggaaaaagcaaaaagtggtcgctgctccgcataagatcgcacggagactacgacgcgacaggtgtgagctacccaatgggattctacattttcgactctcttgcgggaaaaggctacttcaacatcaccgcgcgatacgtcaacgtgtacatagacggcgaataccgcggagtttatattctgaccgagcgtatggacatgaacggctccattcagataacggaccttgaagccgtgacgacattctccgacgacaactaccgcagagtggacagaacgaaaaaggaagaccccgcaatcgccgccggagtagagttctacagctactgcgcgtctgccgaaacaggggatgacaccgatataagcggcggatatgtgcttgaggtaatgtgcggcacgataggcgagtgcggatttaagacgaaaaagggaatgttcatcaatataaaaagcccgtcacatcccactcaggctcaggtgcagtacatcgccgagtatatgcagaattttgaaaacgcgcttttctccgacacaggcttcaactctctcggaaagcactactcggagtacatcgacataccgagctatacgatgcaggcgctggcatattccttctgccttaactgggagatatacagaacgagcacgtatatgtacaaggacgttgacggaagcaagtacgaaaaggtaacattcggaccagtgtgggactttgaatccggaccgaacatcctcgaaaatgacaagacagtgttcggaatgacatacgcgtacaacgaaagacagcagtacatctggtacgagcagttctggaaaaaagcggaatatatgacgtatataaccggcatgaacgaggaactgcgctctgttattgaaatactcgcgggcgagacggagggaacaagaatcttcaacctttcagatatgcttgagaacgtcagaacctcgcagtacatgaactggattcgctggtcgcagtcaagcaatttcgacagagcggcgaaaaaaatgacggattcgctcgagacgagataccgctgttggtacgcaaaactgtggaatcccgataattaccttctcggtgcagtcgtaacctccgaaaaaagcggagacggatatcttctgacaggggccgcaaacggcaaggtgtacggctatcagtggtataaggtaaccgatgataacccatcaaagggagaaaaaatcgaaggtgcgactgaaagcacatatctcgcggcagacgacggactgtactactgcgcggtaagaggaagaaacaatgcgtactgggaatgggcgtccggcagcgtattctcgaaggaagagataacgatgttcacagatcccgttcatcccgacggaacaaaagcagagggaatcatagctcccgagccgtacaaaatcggagaagagcctaaaacagtcgcgggacttccgacagtcggcgaatacgtctacgtcgagcctgttatggaagaagaaacaaaatccgaagcagaaagcgcaaatgcagaggtgttcgagataacgcccgccgacaagccattcattgctgtgacctctgctgtagtcgttttgtccgcagttgttgtgtgcgtgtccgtatttacaaagaagaaaggagcaaaagcaaatgtgtaagaatattataaagctgtgtctgacagtcgtatttgtctttgtcctttctttggcggtgtgtgcggcttatccttcatcgggaaaacaagcgccggacggttcggttctcatcgagggaaagataatcggcgagaaattcggctggggcggaaacgaacaagcgggatgcactgcggctttcgacggaaataccgacacattctacgaccctactaccggagcggacacaaactgctatgccggaatgaagctgaaagagtcgtatgtgctgacgatggtgtgcatcatgccgcgatgggactttccggacagatttgacggcgcgatgatacaaggctcaaacgacggcgaaaaatggactactctgtggcagtcgagtgaaggtctcggctcggcggagtggcatgtgataaagaaattcaagaacaacacgggctacacctactaccgctactgcaacgaccgctctcacggagacgtagccgaggtcgagctttacggttacgccggaacatcggacggactctcgactgtgaattccgtacctgtcggaagcgtgacgctcacattcgatttgtgcggcggagagggtgagggctttgatgcgatagaagcagtcttcggcgagaattacccgaacataccgtatgtccccgaaaaggaaggatttttctttgacggatggtacacctcccccgtgaacggagtaaaggttgacgcggagaaaaaggtaacaaacccgtcttcgcacactctctatgctcactggagtacggaagaagaaacggaagcggctgatggctccgaaatacccgacgaagcagaacctgagagagagcttaccgaaatacagggaatctgcctgaccgtgtcgcttgtgttcatcctcgcggcggtgatttcagtcatagcaaagaaaaaagcgtgaagcatatccgctgtcttttcgattttcacattgaaatcggaaaataacagcggatatttgttttttcgcgtgtaataataatttgtgaaaatcaaattaacaataataatattgacataggtgcgaaaaatgtattataatatcataagcaatgaactgttcgtttttgaatcaaatccaacatgagaggacggcttatgaatatttttttgaagcttgcttttctgttttttatcggctcgctcatcggatgggtgatagagctgatattcagaaaatatttcgcggtggagaataaggagcacaaatggataaaccccggcttctgtgtcggaccgtatcttccgctctacggattcggactttgcctgctttatcttatagcttcgctcgagcaatacagcataattaaaaatccaatcctgaataaggcggtgctgtttgttgttatggcagtgtgcatgacggctatagaatacatcgccggaatcttctgcctgaagttcgcgaacgtaagactttgggactacagcgacaaatggggcaacatacagggaataatctgtccctcgttctcgtgtgcatgggcattgctcggagctgtctactatttcctcattcatccgagaatactctccgcgctgacgtggctatctgaaaacctcgcgttctcgttcttcgtcggactgttctacggtgtgttccttatagacgtggtttattcttcaaacctcatcatgaagctgaaagcatacgcacaggaaaacgacgtcattgtcaaatacgaaagcctcaaagctcatatcaagcagtttgaagaaaaagccgcaatgcgttcgcacttcttcttcccgctcaaatccgagagatcgcttaacgagtatctgcacgagatgagagaaacatttgaaaagagaaccggaaacataaaaaataaactcaaaaaaagctgaaaggataagaatatgcaggaaataaaaaagccgaaaaagccgataatattctactatacgctcgtgcttgtagttcttcttgtgataaacttcttcctaatgccgtttgtcgctcagcgtcaggttcaggaagtcgactacggcacattcatgaaaatgacggaagagaaggaaatcggaaaggtagaagtacaggacaaccagatactcttcacggataaagaagagaaaaacatctacaagaccggaaaaatgaacgacgacggacttgttgagcgtttatacaactccggcgcgcagtttacaagtgagattatcgaagaaacttctcccatagtcagcttcattctaacgtggatagttcccgtactcattttctggggactcggacagcttctcacaaaacagatgatgaagcacgcgggcggtcctaactccatgatgttcaacatgggtcagagcaacgccaaggtctatgtaaagtcctccgacggtatcaaattctccgacgtcgcgggtgaagacgaagctaaggaaaacctcacggaaatcgtcgaatacctccataatcctaagaaatatgaggaaatcggcgcgtccatgcctaagggtattcttcttgtaggacctccgggaacaggtaagacaatgctcgcgaaggctgtcgcaggtgaagcaaacgtgccgttcttctcgatgtccggatcggaatttgtcgagatgtttgtcggtatgggtgcttcaaaggtgcgtgacttgttcagacaggcaaaagagaaagctccgtgtatagtattcatagatgaaatcgacgctataggcggaaagcgtgacggcagaatcggtggaaacgacgaaagagaacagactctgaaccagctcctcaccgagatggacggatttgaaggaaacacgggagtaataatcctcgcggcgaccaacagacccgaaagccttgaccctgcgcttacaagacccggcagattcgacagacgcgttcccgttgagcttcccgatctcaagggcagagaagagattttacgagtccacgcaaagaaggttaagcttgagaacggtattgacttcacacatatcgcgagaatggcttccggcgcttccggtgcagagcttgcaaacatcgtaaacgaagccgcactgagagcgataagaagcggaagagataaggtttcccagtccgacctcgaagaaagcatagaagtcgttatcgcgggatatcagaagaagaacgctattctcaccgacaacgaaaagaaaatcgttgcatatcatgaaatcggacacgcgcttgttgcggcaatgcagtcaaactccgctcccgtacagaagataactatcgttccgcgtacttccggtgctctcggatatacaatgcaggttgacgagggcgaccattatcttatgaacaaggaagaaatcgagaacaagatagcaacgctgacgggcggacgcgctgccgaagagattgcaataggctcgataaccacaggagcttcaaacgatatcgaacaggctaccaagcttgcaagagcgatgataacacgctacggcatgagcgacgatttcggcatggttgcaatggagactgtcacgaacgagtacctcggcggcgacacatctctctcctgctcggctgacacacaggcggaaattgacaaaaaggtagtcgagcttgtgaaaaaacagcacgaaaaggctctcgatatccttaaaaataaccgcagaaagctcgacgaactggcaaagtatctctatgagcatgagacgataacgggcgaggaattcatgaagattctgaacgcctgacggaggatatgatttggcaaacttattgaagctgaacgataaacctgcgaaagtggctgaggaaaaaaaggttgaaaaagagcttccggctaactccgcgctgagcaaaatgctgcgtgacagtgaggcgctgattcatactgccgaaaaaaccgagcaggaaatgaacgcatattactccgagatggtggacgaaagctccgatatttccgacgaagacgtagaagcgcgcacggaagcactcagaaatgtgtcctcgaatctcgcgaaggcaagccttgtgtcaataaatcttgaagatgaagttcgttcgagatggcacgatgtccaaaacagcaaaaaaggcaagctgatagcacgagctcccgcaaacgctacgatagactatcaggagaaagagactgctcactttgcgcagggtactaatttctataagctcgcgctcgtgttcataatcggcagctttgtcggagttgtgattgagctgatatggtgtctcctccgcaacggttatatcgaaagccgctcgggacttgtgtacggtccgttcaatctgctgtacggagttggagcgttcgcgcttaccgtttcactgtacaacctcagaaaccactcgcgctggctttccttcctcggcggacttgtcataggaagtgttatcgaatatgcctgctcgtttggacaggagcttctcttcggttcacgttcatgggactacagcgatatgccgttcaatattaacggtagaatctgcctcctgtactcgatattctggggatttctcggaatgctatggataaagaacctgtacccgagacttgcggcgataattttgaaaattcccgataagataggcaaaatcgtcacgtgggtcatggttgtgttcctcgtgtttgatgccgccgtgtcgcttatagcagtcgaacgctgggtgcagagaagagaaggcattcccgcgagcaacggctttcttgaattcatcgacgagcgttttgacgacgacagaatgaagaaaatctacgcgaatatggtgttcggcgacgaaaaagataccgaaaaagaagagggaaaaggaatcctctccgaaatacttgaataaacaaaaagctctgtacggttaaattccatacagagttttttatgttatgcagttttactttattatgcgccctgagcgatcattgcgtttactaccttggagaagcctgcaatgtttgcaccggcaacgtagtttccttccatgccgtattcgcgtgcagcttcgtcgatgttgtggtagatgcccttcatgattcccttgagctttgcgtcaacttcgtcgaatgtccagctgagtctttcgctgttctgtgacatttcaagaccgcttgtcgcaacaccgcccgcgttggaagccttgccgcatacaaagagtacgccgttttcctggagatactttgtcgcttcgatggaggtaggcatattcgcgccttcgcatacgcactttacgccgttcttgacaagttcctttgcgtcgtcaatgagaagctcgttctgtgtagcgcagggaagagcaatgtcgcacttgaccgaccatacgcccttgccctcgtgatattccgcagaagccttcgcgtccttgtattcggagattctgccgcgtttaacttccttgatttccttaacgaggtcgaggtcaatgccgtccttgtcgtagatccagccggtagagtcgctcattgtgacaacctttgcgccgagctgctgagccttttcgactgcgtatattgccacatttcctgcacccgatacgcagaccgttttgccgtcaagaccgtcgttgtggcatttcagaagctcgtcggtgaggtagagcagaccgtagcctgttgcctgtgtgcgaacgagagagccgccgtaggaaagtcccttgccggtgagaacgccttcgtaaagaccggtgagtctcttgtactgaccgaacatatagccgatttcacgtgcgcctgtgccgatatcacctgcgggaacgtccgtatcagcgccgatgtacttgcaaagctccgtcatgaaggactggcagaacgccataacctcacggtcgctctttcccttggggtcgaagtcggaaccgcccttagctccgcccataggaagacctgtcaggctgtttttgaatacctgctcgaagccgaggaacttgataacggaaaggtttacggaaggatgaagtctgattcctcccttgtaaggaccgatggagttgttgaactgaactctgtagccggtgttgactctgattttgccgctgtcgtctacccacggaacacggaacatgatctggcggtcaggctcggtgatacgctcgaggatagcttcctgctcgtataatttttcgttcttggtgataactttttcaagggattcaaatacttcgtgaaccgcctgaaggaactccggctgagtggaatattttgcgtctacctgagaaagcacgttctgtaaataactcattttgatcctccgaataaatacttattgaacattataaatattaccacatactcgtgtgaaatgcaatattttcgagaaaatattcatcggggatttgaaatttcttcgttttgccaaaaacctacacggattttgcgacttcgtttctacagagtgacggagtggacgggctggcttgcaaaaacgcataaatagtcggacgtactgcaaaattatacatggtcggcgttttcaatatacaccggaatgggcagtgcggcgcgtatcgcgggggagatttttgttctgtagggggaagagagagagaagaagaacgccatcgcgtcacggtgagtaagctcaagctcgcattctccgtcgtattcttcaactgtggtgtatctgccgccgattttttccgcatgtgtcgttattttcagcttctcgtctcctgcaaatccgtgaatgagaacagtgagagttccgtcgcacatgggcttgtaggatgcttcaaactcgagaaaagctccgacaaatctcttgtagctgaacacattgaacatatcgcagtgacctacggaatatccgccgcagattcgtgttgctctcgcgagtaagtcctctctccagtcgggtattcttatctctaccgagccgtagtttctgacgtaattgcgcacaacatcgtcaaagtcttcgggattgtttagcgtaagctcctgcaaatctcctacaaaatatcctatgtactctccgtttttgaatattgcgcggaggggagtacgccatgaaacgcagatatcgtagaacctgtcgcggggtctgagagtgcgcatgggtcttgtgcagtacgagccgtaaattttgtcgataagttcagtttcatccgacttcacatcgcgaatttcaagctcggtgaacggaacgtctctaaagcagtggcggaggttcgtgccgtttatgtcaacgtgatactccacgccgatgtagtcaaagccgaaatagttgtatctctgtctctgaccgccgaggatggaataatcaactccgtccttcaccatgtcggaaagagccatgttcatgcagtctatcatgtagccctttgagcgggagtatggatgtacggcgacgtttccgataccgcggcattttaaaacttcaccgccaacggtaacttccgagtcaaacgcgccgatagctgccttgagctttccgttttcagttacgacatagttgttgtagcaagggtcgcattcaggattgtagagcttcggaagcagctttttaaaatcctgctcgtttccgttgaagccgaatacatagttgataaaatctatgtagtcgtcgtacatttcggcgtttcctctgcccttgtagataatagtatcagccatatttgagtcctttcttgattatttaacagctttaattattgcttttccggagtatagcttcggtgagcctacagttacagtgacctctcccgcagcgcttgttttgataatggcaacagcgcgtccctcgaatgcgtggcatatgtttgagccgtatctgtcttcgtttttcgggtctcctgagaatattcccataagctcgccgccgtcaactatgcatgaaagctccgcctttgagtcgggaattctgtctccgttttcgtctgtcacaaagatgtcgatgtagcacagatcccgtccgtcggctgtaatctcgtgtgtctcgggtgagagctttataaaatgagctttgccgacagtgtgcagtgaggagcgaccgcatacttttccgtccttgtacacgataacggtaagcacgcctttttcgtagggaatatcaagtgtggatatcgctttttcggttttgctcttgccgacgagtgagccgttcagataccattccacctcgtccgcgtcagtgtaaacctcgcatttcacgggttttccgatgtatttgtcgtcgaacgtccatgaatcgagaacatcgtaccagtgccattccgttcccgtgaagccttcgccgtagtgttcgggatgggtagtgaatatcttcggttcttttccgcctatccaaaccgcctcacggaagtatgactgaggacgtctgtatccgcaaaggtcaaggtctccctgatagcacgaacgccatggatatcccgcaaggctgattccgcgaataacaccgtctcttgcccagcatgagcgtcctgttcccgcttctccgaggttgtcgtatgctgtccacgtgaagtcgcctatgacataactgttgttcagcacagtctgccacgagtcgtagaaatggatagcgtgagtctccgagccccagataacgcgcttcgggaactgcttgtggtctctttcgtatcttgtgtagaggtagttgtagccgcagatgtcgagcggagcgtaatatcccgcagttctgtcagcccatgtttcgccgtctcccatctgatatgtagcggacgtgacaaagcgtgtatcgtcgtacttctttatttccgcagtcaggcgtgccgaccattcgtctccgtcacagtgaccgtagctttcgggaatttcgttgccgatggagtaggctataacgcatgggtgctttctgtcacggcgaaccattgcggcgatgtcccttgcccaccaatcgtcaaaccagacgtggtagttcagctcgccgcccttctcgagtctccaacagtcgaaggcttcgtccattactataattcccatctcgtcgcacatttccatgagattggtggacggcgggttgtgcgctattctgagtgcgttgaatcccgattccttcagctttgtgagtttgcgtcggcatgctgcgggatagtctgcggcaccgagaactccgtggtcgtggtgtatgcatcctccgcgcagcttcatgggcttgccgttgaagagcagtccgttttcagcgtcggcggataccgttcttatgccgaatttggtcttgtcggtttcaactatctcgccgttttcgattatcttcgtgctcatcgtgtagagatacgggtcgtctatgctccatgtgcgtgcgtccttgacttcaaattcgagtgtaaccggtgttttttcacctgctttgaggcttaccgatacggtttttgcttcgactgcacgtccgcttccgagaatttccgcggcaagggtaacgtcagcgtctctgtcggagcttatctcgtatgacactttaactttgtcgagtgtgggcgtggaaacaaacacatcccaaggctcaattctgatgtctccgccatgccagaggtatacgtcacgataaattcctgcgccggagtaccatcttgttgacggctgatgtgcgtttgtggtgataacgagcttgttcatgccttttctcttgcgctcggtgaggtcgacgaggaacggggtgtatccgtgcgggtgcattacgagctgatattcgttcagctttactgttgtacacatatacgagccgtcgatgtcgaggatgtagtgccccttaccaagctccatttccttgacatacgtgccttttccgccggggaagaatccgtttgaagctccgcccggtgcattcggatcgcgtggaagcgttacgctgtagtcgttcgggaggtcaacgttcacccatccgtttgttccgggggcattcagcgaccaaccctttgaaatgcagattttcttcatgtagctgttcctttctaaatattatattaaagatactctgaattaatcggatttttgagatataaggctaaaatatagggacttttatcgcaaaaataaccttaaatcagaggcttcttaaagcttcgcaggcgtatgtcttaagtcccgcgtcgctcatagctctttgcgtatcgtgcagctttgtttcgtcatagaatagcgcgaataccgtaggtccgctcccgctcatcataactccgtccgcaccgagggagagaagcgttctctttatcttgtcggcggcaggacggacgggcagg

SEQ ID NO: 2641 - DNA, 5119 bp, Unknown
  16S sequences of unknown bacteria
cgtgggctcggagatgtgtataagagacagctcttgatctgcaattttttgatgatatggaagcacacattcccaaagggcgggtgcgcactcgttttgccccttctcccaccggctacatgcacgtgggcaatttgcgcacagcgctgtatacctggttgatcgcccgcaaaaacggcggcgattttattcttcgtattgaagacacggaccagggccgcctggtagagggcgccgtagatgtaatttacaaaaccatgactgaatgcggcctcacccacgatgaaggccccgatgtgggtggaccggttggtccttatattcaaagccagcgccgcgacctgtacggcaagtatgccgcgctgctggtagaaaaaggcgcggcttattattgtttctgcgaaaaagcagaagcagacgaggccgccggcgcttttgcgcattccgccgacccctgccgctctctttctgccgacgaggccgccgctctgctggctgccggcaagccctatgtgatccgccagaagatccccgccggccagaccactttccacgacgctatcttcggcgatatcactgtggaaaacgatacgctggacgatcaggtgctgctcaaatccgacggattgcccacttacaatttcgccaatgtggtggacgaccatctgatgggcatcactcatgtggtgcgcggcagcgaatatctctcctccacgcccaagtacaacctgctgtatgaagcgtttggctgggatgtgcctacctatgttcactgttctcctgtgatgcgcgacgcgcagaataaaatgtccaaacggcacggcgatccgtcttatgaggatctgatcgcacagggatatctcaccgaagccgtgctgaactacgtggcgctgttgggctggagtccccggggtgagctggctgaacaggaagtcttttcgctgcaggagctgattcaagccttcgacatctccggcatttccaaatcccccgccatctttgacttggcaaagctggagcattttaacgccctttatctgcgcgccatggatccggagcggttccacgccgtcgctgcgccctatatccgcaaaagcgttgaaaaccccgccatcgacacagcgctggtcgcacctttgctgcaagcccgcctggaaaccctgaacgaaattccggaaaaagtggactttttcgaggctctgccggaatatgacacggctctgtacgctaacaaaaaatcaaaaaccgatgaggacagttccctggagctgctcaaagcctatcttcccgtgctggaaaaattggagccgtgggatcacgacgggttgtacaactccatggtggagtatgccgccgctcacgagatgaaaaacgccaagctgatgtggccggtgcgtattgccaccgccggcaaagctgtcacacccggcggcgcagtggaaatctgccagatcctcggaaaagaggaaacactgcgccggattcgcgtgggcattgaaaaattggaaaaccgctgaacatgcgctatctgaacgaacaatatcgacaggcgtttgcattcctgcgcggaccactggccgtttacctgaaaaacactgccatcacttttgcggtgattgcgctcgtattctacgggacgtgcctgttccttcccaatgtgcgtgattctttgttgtcctatatccagaacattgttgacagcgcagcgattgcaacggaggccggcggcttttccgccctgcgcattctggaaaacaacctgcgcgccgccgctttcagcgtactctacggaatcattccatttctttttatccccgcccttccaatcgggctgaacgccgctgtgctgggtgctatggctgcgtcgtaccagataaaggggctgtctctgctgctgtatgccgcagcgctgatcccccacggaatttttgagttccccgctctgttcattgcttttgcatcaggcctgtatctgtgctacaatgcaactgctcacgtcctcggcaaagaggggactgcgcctttttttccgacgatccgcgccctgctgcaggtatttttgctaatcgtcatccccctgctgatcgtggcctctgttgtggaggcctatataacaccgctgttcgtgtctcttttcctgtgaaagcaacaaaagaaggccggaacgatggacgccgccatcgttccggtcctttttttcctttgcctgtgcaccagcacatcagtttttataggttcggatgacactttgtgcaatctccgttttcgtgcagcgcatattcatcgcctgatgctcaatatagtaatgcgcgctttcctcgctcattttcagacattccatcaacaccagtttggcgcgatccaccaggcggatctcttcaatcttgccctgcaggcgtttattttcccgcttgagcagccgcagacggtgttccatggcatccatcatccgcaccgtatattgaaacatgctgcgactgaccggcttttccagaacaaatacaccggatggctgcaccttcgcgtcgatctgcgccgcatgctccgccttgaccagcaataccacgcctgccagcgtggtttccgctatgcggcaggccagatcattgccgaattcgtcgcgcagcggtgtgttgatcaccgccagatcataactctgcccagccaggcggcggcgcgcctcgccgctgttcatggcaaactgcacatcgctgagatgcagatccttcaacaatccaaagagcgctttgatgccggcatctgtgctggatacaatcaaagcagtttccatcctgtcaacgcctttcttcctgattctctattccgcactttacaagatctcgaaataggtctcccggtcaaattccattttctttttcgcctttgtataatcgttgactgcgtcctgcttattgctgagatagcttccaaggacatcctgcgggataaacgccttgcacaatttgccccggttggccgccgtgactgcctgacgcagcgtggcaggcagctttccgctggcggtctccatccgcggcatcgccagttctttgcggatcccctccagtcccgcgcggatcaaaagcgcataggcaaggtgcggatgaatggccgggtccgctgcagtcagctccattcgtcctttaatgccggcaacgaccggaatgcacacactgaaccggccgctcaggttcgaccagcccagttcacggcggctgtcagcactgtaggaattcgtggtgggccttaaaaacaccgtcagctccggcaagcagcccaagatacccgccacaaaactgcaggcttccggctcaagcattttttcttcaaaaaggttttttccgtccttgtatacttcaaacatcagccccaaagcactgctcttctcagtttccaagggttttggcatgaaagaggcatacagaccgctgaccgaagcagcctgtttgaccacggacttgaaggtcatgaaattgtctgcggccgaaagcgcgtcgctgctgcgaaacactacctcgttctgccccggtcccacggcgtggtgggaactttctggaatgatgcccatttcagaaagcgccaggcagatgtcgcggcgcacattttcgccccggtccgcaggtgcaagatcgaaaagcgtgccccggtcctgggggacatgcatagggcagccgttttcatcggtgttaaaaagataaaattcgcaggacgagccgatgcggatcgaataccccaattgggcagcatccagtacagtgcgttggagcacggcccgggtatcgcctccgtatggcgttccgtcagcattcatcaaatcgcagaacattcggatcacccgtcccgaggacgggcgccagggcagcacggacaatgtacgcgcatccggccgcagcaaaagctttgtgccggcgctcagatgaaagccgggcagctcccaggcgttaaacggaatgccgctttggaacgcccgctccaattcgcccggctgcagggaaatattcttctgcctccccacatggtcgcagaacgccagacgaatgaatttaacatcattttccttgacaaaattcagtatgtctttgcaggaatcgttcatgttctctcctcgcttattggatacggcccaggaagtatcgcttcctgggccgcatgggtttgcatacttctatattttatcatacctgaatcaattggaggtgtaaagagatttgtacggattatttgtattcagcgcatgcatataaaaaagactttgcgcacagatcccggaaagttcctctttcaaagcccggtgggtcttcacctgcaccaacggttgggacagattttcgcagcggagatacatctctccgccgtgcatagcatagctgcaagcatttccggcactaccgtacacacagatcacgccgttgttcatagcgtctccaacggtgtcctgtgcattgtgcatgtcgatttctgtaccgttcatatggcagcccagcgcatttcccggcgcacgatgcgctgcttttgccgctgcttttgccgggatccaacgccgaggccgtcgccccagttgtgcatcagcgcaaaggattggatgatcgtccgtccgctgaatggttctctgcttttgccaatgacgccggaaatggcgcagccgactgcgccttcccgtttcatactctgagcgtgtcctttctaaccctgtctctttgcctttctttccgaacggaaaagaaaaggactcctccgtcaaggtatcgttgctgccagcaatgcctcttcccccccccttgtccgcatacagtgaacgttttgccggaacccaatcctttggctccaaaaatacggtaatcatacaaatctcctttctgtatcaacctatttttgcagggttccaatcgaaaactcgcacatccgcccatgctcccacgccggagaaaacacatttatttacataaaagcgcagaatatagttcgtccggaaaatgctctatttccacgctcccgaaattgtggtaaaataaaaaacaaatgaaacatcaaatattacaggggtgttttgacaggaacggtttatgcaaaatacacggcattatccatagagaaaagacttttatgcttggaatccggt

SEQ ID NO: 2642 - DNA, 2416 bp, Unknown
  16S sequences of unknown bacteria
taatatcaagcatttgagaagaaatacaggacttatgaggagttataaaaagatggtaaaaatcctgtttgtttgccacggcaatattttccgcagcccaatggcggagtttttcatgaaagatttagtgaaacaggaagggaaagcggagcaatttgacattgcctctgctgccaccagcacggaggaaattggcaacggcgtgcactggggaactcggtcaatcttgggccgtctgggaatttcctgtgcaggaaagacggcccgtcagatgacaagggaagactataaccgatacgattatctcattggtatggatagcaccaacctgcgcaatatgtaccgcatttgcggcggcgatccggagggaaaaatatttcgcctgttggatttcacggggcaggccggtaatgtggcagatccttggtataccgatgatttcgaggcgacataccgcgatatcaaggcgggctgtgaaggacttctgctgcggatttcagaaaaagaatgagatttgtctcttttgaaaaacaaaagggtattttcgagtgaatcggttgcttttggggatagaaattgatacaatgaagaggaaaaagacgcaaaaagcaaaaggagtggtgatgatggataaggtattgagattggagaattcgtttgaagtggaggtcgaggaagacgccgtcgttcatgtgcagctgggctgggacatgaagcgcggcggactgaaagagaagatcgaaggtcaggtagcggcagctgtaattggtatttctgaaaagggatatgatttgaacctggcggctattgtggaacacgatacgcaggaagcggaattggtgtttcatcatggccccggtggttgtggagccgacaggagcggcgcggtgttgttaagcaaggacgaccgctccggctttggcggcggcagcgatgaggatctccgcgtccgattgaaagaggtgcctgagagtgtgcagcgcattgtgttctttatgaacatcggtggagctaatgtgcttgatcagcatctaacggatgtggacaatgtgtttgttcagatccagaatgaaaagaactgcagggtgtatcttcgggaagaggaggccttttgctgtgaacgggcacaggagtactgctgctatacctttgctgagctgtgccggaaaggcaggggctgggtgctgcacggtgtctcccgttattccaaagaagacagtgaactggaaacgatgcgggcgttttgcgaccgttgagtgagtgggattcaggtaaaaaaagccaaagctgcggacaaactgtctgcagctttggctttttctatagatagcgggagagaaatttacggcagagccagcagcgtctgcgtaaggacgatcataaccggcatggtgagaatggagagtaatgtgctcaaagataccagagaaacggacaattccgaatcctgcccgtagatcacggagaacatggtgcaacttgcggcaaccggggcacacagggcaaccatgcaggcggtaagagctatgggatccataccggtcacgatgcccaaccccaaaccgatcagcggcaggaggatcagccgttcggcaatggtaagccaggcgcggaaatcccggaaaacaatggaaagctttgcatgagacaggtggtaaccgatgacgaccattggaataggggtattcagcgcagccaggtagtcgacgggggtgttgaccagtgtgggcagggtggaggaagtaaaaaacaggatcacgccgatggtgacgccgatgatgcccgggttggtgatcagtttgcgcagggacaacaactgccggttccggctcatcatgtacaggcccagcgtccagttcataatattgaacactgccagaaaagctgcgccgaaaaacatgccatctggtcccagcagggcgctttccaggggaagagccataaagccgcagttggaaaaaatggcggcgaagcggtacacgctctcgcgctcgggctgctggtcatgcagcgtcctgcgggcgagaaaataaccgatgaaggtcgtgatgacggcaaataggacagcctgcaggaaagcgcccgccagagcggcgtcaaactcgcgctgcagagattggatcatcacgcagggggtaacgatatagagtacaaaatctgtcatgccggtgacggcggtgtctgccaggaattttgtttttccgcagacaaaacccacaccgatcagaagaaataaaatgatgacctgttggctgacggtaagaaagctggcgagcatacaagaaccctctctccaagatatcaacttattataagaagaatttgtgcaatatgcaataggatgacgttaaaaaattgtataaaacgaaacaacagccaatggaaaacattggctgttttttcgtgtgacagatct

SEQ ID NO: 2643 - DNA, 7579 bp, Unknown
  16S sequences of unknown bacteria
atggacaaattgagcgtccgagagtacgaagacccttttaagggtggcaagtaatacgaacgccccttaaggggctgcaaaagtgacaaaggcaatgggcttgaacttttgcaaaaagtgaaagccagcgccttgagacgctggccggtaatcattgggcttttagcccttgtgcaaaccacccgtttgacgggtggttatgatttgtatgacgaattggggaaggcgcgtaaaaggaacgtcactcgccgtcctgcgccctctcgcgccggagctgccaaagaaggactgcgcccaggtagaggaagaagagcgccagccccagcggtagcgcggcctccgtcagctgcccggcgcgcgcgatcgcctccccggccgccagccgcgtcgccgcgaccgcggccaggaccgccccatccgccaggaaaaagagcgccgcccccagcggatgccgctccctgcggctgaggtacgccccgcgccgcaccgaggccgtgaaaaagtacagcgagggcggcaggagcagcgccacggcctgcagcagcggcggcgcccaggggtgaaacgtgttcaccagcccgttggccaggatgagcgccagcgtcagcagcagcgcccgaaacgcaatgcggtagcggatggtcagctggtattcgtcgtagtgccgttccatgcgtcaatcctcctcccaaaagagttcgtccaacgtcttgccgagcgcgcggcagatcgcccggcacaggcggatcgtcgggttgtattcgcccgattccacggcgtggatcgtctgccgcgtcacgccgacggcctcggccagggcctgctgcgtcaggcccttttcccgccgggcgtcgcgcaggcgcaggttctttcccatcgcttctcgcctccgatgcgcttagcataacacggctccacgagaatgtcaaatatattttacaccataggcgagaaaaagcgccgcggggaagggggagaacccctttccccgcggcgctggggagatttctcttgcgacgcccgagcgcgggattagtacatcgggggctgggcgggagcggcgggagcggccttctccgggatgtcgcagaccagggactcggtcgtcagcaggacggaggcgatggacgccgcgttctgcagggcggagcgggtgaccttggtcgggtcgatgattcccttggcaaccatgtcgccgtactcgttgttcagcgcgtcgaagccgtagttgacgtccttgcgggccttgatcttctccacgatgacggagccttccaggccggcgttgaccgcgatctggcgaacgggctcctccagggcgcgcagcacgatgttcacgcccgtgcgcacgtcgccggagaccttcttggacagggcggtgacgtcgtcgatggtgcggatcagagcggttccgccgccaggcacaacgccctcttccacagcggcgcgggtcgcgctcagcgcgtcctcgatgcgcagcttgcgctccttcatctcggcctcggtcgcagcgccgacggacagaaccgcaacgccgccggccagcttggccaggcgctcctggagcttctcgcggtcgtagtcagaggtggtctcctccagctgggcgcggatggagttgatgcgggcctggatgtcttccttcttgccggcgccctcgacgatggtggtgttgtccttgtcgacggtcacggtgcgggcagaacccagcatgccgacgttggcatccttgagctccaggccgagctcctcagagatgacctggccgccggtcaggatcgcgatgtcctgcagcatggccttgcggcggtcgccaaaggcgggagccttgaccgcaacgcaggtgaaggtgccgcgcagcttgttgacgatcagggtcgccagggcctcgccctcgatgtcctcggcgatgatgaggagcttgcggcccgcctgcacgacctgctccagcacgggcaggacgtcctggatgttggtgatcttcttgtccgtgatcaggacgtaggggttgtccagggtggcgatcatcttgtcgttgtcggtcgccatgtagggggagaggtagccgcggtcaaaggtcatgccctcgacgatcttcagctccgtgtggccggtcttgctctcctcgatggagatgacgccgtcgttgccgaccttctccatggcgtcggagagccactggccgaccgccggatcgccggcggagatggaggcgacctgcgcgatggcctgcttgtcttccacgggcttggagatgcgcttgagcgcctcaaccgccgtctcgcacgcctgcgcgatgccgttcttgatctgcatggggttggcgccggccgcgacgttcttcatgccctcgcggatgatggcctgcgccagcagggtcgcggtggtggtgccgtcgccggccacgtcgttggtcttggtggcgacttccttgacgagctgggcgcccatgttctcaaaggggtcctcgagctcgatttccttggcgatggtcacgccgtcgttggtgaccaggggcgcgccgaacttcttgtccagcatgacgttgcggcccttggggccaagggtgatcttcacggtgtcggccagcacgttcacgcccttttccagggagcggcgggcctcttcaccatactgcagctgctttgccatagtaacctacctccgatatgttgagatggaaatctgcttgcgtccggttcttagtcctccaggatggcgaggatgtcgctctggcggacgatggtgtactcctgcttctcgatcttgacctcggtgccggcgtacttctgatagatgaccttctggccgacggaaacctccatcttgacctccttgccatcgatcatgccgccggggccgacctcgacgatctccgcaaactggggcttctccttgcccgcggcgccggccaggatcagtccgctggcggtggtcacttccacctcgacgttcttgagcacgacgtggtcacccaaaggcttgatgcgcataagaatagacctccttgtctaaattgctttctcggttcttgttagcactcactgaacccgagtgctaatcacaggtattagtttacaaaatcaggccccgcagcgcaaacggagcggaaaccgattttccggtatttttccctgaatttcaaaaataaatccggatatctcactaattgggggaaattcgccgcatttcatcttccggccggctggcaaattgacattcctgcgcgccggggattataatgtacgaaaagcgcggacaggctagtgtatggagggcgagcgcatgacattcaccaagtgggaccatcggtttatggaaatggcggacacaatcgcgggctgggcctcgtgttatcaagagaaccggaagatcggcgcggtcatcgtgcgggacaagcggattctgaccacgggctacaacggcgcgccccagggcatccttccctgcaaggagcggggggagtgcctgcgccgcaagctgaacatcccgtccggcacgcgggcggaggtctgctacgcggtccacgccgagcagaacgcgctcatccaggcggcgcgcatgggcgtgtccgtctttggcgcgacgatgtacgtcacccactgcccgtgcatcatctgctcgcgcctgctcatcaacgcaggaatcgtccgggtgatctaccggcacgaatatccggacgacttttccaaagaaatcttaaaggaggcgggcgtggagttgatccggttcgaccccgaagcgcccatcgtttcatgaaaacgctcatctcggtcatcgttcccctctacaatgaggaagaggtcatcggcgagagctatcgcaggctgacgcaggtgatgtcctccatggaggaggactacgagctcatcttcgtcaacgacggaagccgcgacaagacgttcgaccttgcgcgcggcatccaggaaaaggacccgcacgtggtgctggtggacttttcgcgcaacttcggccaccagatggccgtcagcgcgggcctggagcaggcccggggcgacgcggtcgtcatcatcgacgcggacctgcaggaccccccggagctcatccccaagatggtggagatgtggcgcggcggcgcggaggtcgtctacggcaagcgcgcgtcccgccagggcgagaccgccttcaagaagctgacggccttctgctactaccgcgtgctggacgcgctctcgggctggaagatccccaaggacacgggcgacttccgcctgatggacaggaaggtcgccgacgtccttcgctccatgccggagcacaaccgcttcctgcggggcatggtgtcctggctgggcttccggcaggtgccgctggagttcgtgcgcgaggagcgctttgccggcacgaccaagtaccccctgaagaagatgctcaagctcgcctccgacggcatcgtctccttttcgggcaagccctttggcatcatgcgggtcctgggcgggctgctgctcgcggcgggccttgtggacctgctggcgctgctcatcgcccacgcggtgacgggcgcgtcgggcggctggccctacgtgatcgcggcggtgctggccgtgggcggggcgaaccttctggccctgggcatctgcggcgtctactttgagcggatgtacgacgagctcaagggccggccgctctacatcgtgcgccaggtgctgcgcagcgaaggcccaggcggccagacgcgcgcctaaagacgggccgcgaaaaagttttgccgagttttttttccgcccatcttgcctttatacggcaaatggcgtaaaataatactgtaacttgtggacctatatcgttaagggaggttttccaaatggtgaaggttgctatcaacggtttcggtcgcatcggccgcctggcgttccgtcagatgttcgacgccgagggctacgaggttgtcgccatcaacgacctgaccagccccaagatgcttgcgcacctgctcaagtacgacacggcgcagggctctttctgcggcaagatcggcgaaaataagcacacggttgactccaccgacgattccatcatcgtcgacggcaaggagatcaagatctacgccatcaaggacgcgaaggattgcccctggggcgagctgaacgtcgacgtcgtgctggagtgcaccggcttctacaccagcaaggagaagtccatggcgcacatcgccgccggcgccaagaaggtcgtcatctccgcgcccgcgggcaacgacctgaagaccatcgtctactccgtcaacgagaagaccctgaccgctgaggaccaggtcatctccgcggcttcctgcaccaccaactgcctggccccgatggcggataccctgaacaaggcctaccccatcgtctccggcatcatgaccaccgtgcacgcctacaccggcgaccagatgatcctggacggcccgcagcgcaagggcgacctgcgccgtgcccgcgccggcgcgcagaacatcgtgcccaacagcaccggcgccgccaaggccatcggcctggtcatcccggagctcaacggcaagctgatcggctccgcgcagcgcgtgcccgtgcccaccggctccaccaccatcctggttgcggttgtcaagggcaaggacgtcaccaaggacagcatcaacgccgccatgaaggccgccgcttccgagtccttcggctacaacgaggagcagatcgtttcttccgacgtcatcggcatgaagtacggctctctgtttgacgccacccagaccatggtcgccaagatcgacgacgacacctaccaggtgcaggtcgtgtcctggtacgacaacgagaacagctacaccagccagatggtccgcaccatcaagtacttcgcggagctgtaatctcgaccgaaacctgcaaaaaaaacgccgcccgcccgggcggcgtttttttgcccgcacgcctattgcaaatgcgccgtcctccccttataatacagacagaacgatctttttggaaaggaggcgtgcggaatgatttgggtttgcaccaagtgcggctacgaggtcgagtcggacaagcgcccggacctttgcgccatgtgctacgcggccatgcaccacatgatcccgaagaaggaagaggaacaaccggaagagaagaaggactgacaaaggacgcccccggcggaaagggcgttggtcataaaacacaatcggcacagcgctgtgccgattgtgttttcaaggtgactatgataccgtatagacaattcaacaaatcaatatttgatgaggagataaggcaatgcttttagatggagatgtgaaaagtaagaacaatactcctattgccggagctaagattgaaataaagaacaactgttttactactatctactgtgcagaaagtaacgaggatggatactatcaattcgatattcccgaggggaagtatccttttttaactgcagtaaaagactatgcggtaaactatttggagtattggtgtcaaaacattcctcttttagaaaacacttcgttggatattagctttgatacattggagatatacggattacatattttttctgtcaaaggtgcaggaaatggtcttatgatatactttagacctatgagtttggtaaaatttcaggaaggaaatgaaaacatagcaccagatgatatttccattcgtgtggaagttgatgggaaagaaaccgctattattgcaaagaacacagtcgtagaagtagctgctgatagggaaatgacagcttatttgattcaagttgaaggaaccgatgcttggaataagattgaaattcaaattgtagatgcagatagccattatggagctgcagcaatttttaatccttgcgtgtaatgattcaattctgcaaattccagtttatcgaactgattaagggcgcacttctatacacctttggttgtgtggtgcgatgtgcagtgctgcaccgcagaagcctcccttgtgtaaagggaggtggcacggcgcagctgtgacggagggattgtcatgcagttaaagcataataagcagttggttccattggcaaagcacttgcgcaaagagatgacgaaagaagaaagacacctgtggtatgattttctgtgttcctatcctgtgcggttctcccggcaaaaagtattgggaaaatatattgctgatttttatagtgcggaagccaaacttgtgatagaactggatgcctcacaacactatgaggatgagaatatggacaaagatgaagaacgaaccaccttcttggaaggctatggattgcaggttctgcggattccgaataacgaagtcagcagaaacttccgtggggtctgcgagtatatcgatgctacggtaagacaatccctcagtcagcctaccggctgacagctccctttacacaagggagcctttggaggatctctgcgcctttatccccacaaagaaaaggtcgagtatctaaacagtagatactcgacctttcagcctgtcgaaaaaggtcaccggaaggtggcctttttctcattggagattctcgaattgaggaaaagaatgcggtataatagtgaggggtgataaagatgctggtaaaaaaagcagaa

SEQ ID NO: 2644 - DNA, 10631 bp, Unknown
  16S sequences of unknown bacteria
ccgccgccgggcctgcggcccgcaccccccgcaaacttttcccccacaaactccccccaaccggcaaaaacacccggcagggacggccccaccgggtgatgctttcgcggtattcggttatctcacccgcaccagctcgtatctgcgggtccccacccctatcttctcggcgtgctccaggcaggtacgccagtcggtttcgggggaattgttggtaaaatggtcgtggtggtcgcaaaagtcctcggccgccatgttatcggccagctggctgtccggcagcggctgctgacggttgcaggcgtccacacaggcttcgtccagcgccaccgggtcaaagctcgcaaacatcccgatatccggcaggatgggggcatcgttggtcgggcagcagtcgcagctcgggctgatatcaatgaccatgttgatgtggaagccggggcgtcccgccagaacggccttggcgtactccgccattttccggttcagcagctcgcccgcattaaagttattgttcctgatcgcatcaaaattgcagtgcccaatgcagcggccgcagcccacgcatttttcctcatcgatcaccgccttgcggtcctccccgtaggagatggcaccctgggcgcagttcctggcacaggcaccgcagccccggcaccttttggggttcaccgaaaccttgccactgcaatgctgctccattttgccggcacggctgccgcaccccatgccgatatttttgatggcgccgccgaacccggtggaatcgtgccccttaaagtgggccaggctgatgaaaatatcggcgtccatcaccgcgcggcctattttggcagcggtcacatactcgccgccctccaccggcacctccacctcatcggttcccttcagcccatccgcaatgatgatctggcacccggtggaaaggggcgaaaagccgttttcctgcgccgcctccaaatgctccagggcgtgcttgcggcgacccacatacagggtattgcagtcggtcaaaaaggggatgccgcccagctcctttaccacatcggccactgccttggcatagttcggccgcaggaagctcaaattgcccggctcgccgaaatgcagcttgatggccacaaactttttctccatgtctatatcggcaatccccgccgcgcggatgagccgctgcagctttttggggagattgtctccgtcacgggttcgcaggtcggtgtagtatactttcgcgggattcacaggtcattcctccttggttttgcgttagctgtccctattttaccgcagctttcccctcctgtcaaaggtctgtacagcctccccgctttctgccgtcatcctctcaccaagctcccgcaaaccgcaggcccacggcccgcagggcgccccgccggggctgcgcccggcggccctgcggggcatccccctcttcgaagtcttttcttttccctcaagtcctgcttactcctccggcacaggcttgatgaccttcgccggactgcccgccgcgatcacattggctggaatatcatggttcaccaccgaaccggccccaatgatgctgttctccccgatggtcacccccggcagcacaatgacccctgctcccagccacacattcctgccgatgacgatggggcgggaaacggtgacccgccgctggctgggcgccgtgccgtggttggtggtaatcagctgtaccttcggcccgataaacacatcatcaccgatggtaatgccgccgcggtccataaaaaagcagccggtattgacaaatacctgatgcccaaagcgcaaattccgtccaaaaccggactgaaacggcggaatgagccgcagcgtttcattcggttcggtgccggtcagctccgcaatcaacgcccgcacttcctccggggtcttgtagccgcagttcagttcagcgctgatcttctgcgccttgatgatttgctcgttgatcttgtaatactccggctcatcaatggaaaccggttctccggccatatcctgctcaaagatgtctttcatgccgtttcaatcctccgttattttctgtccaatctgcatcttccgccgccattcaggcggtgcgccgtcatcgctccagtattcctccagccgcaggatcttctctccctgccaccgaaaaaacgagatcgcccgtaccgaaaattcctccgaccaaactcgcgtgaccgtcacactgccctccgccgtatccagcatcttttcgatcttcccatgccacttccctgggtactcacagttggcccgcaggtactcctccacggcaaaacgctcgttggtattgggccacaacacctcggccccctccgcaaaaaattcccgcagcgggtctttttcctgcgcggccaccgcccgccagaatgccgccagtatcgcttttcgctccatatgctcctcctctactcattcctgttgccctgccgccgccagcagcgccgcccgctcattgggcagctcgccgctttgcaccagccgcagcagccgccgcaaggcctcccccaccgccggcccggaaagccccagacccatcaggtcacagccggttatggccagctgccgcaccgtaaagcaggcatcttgctccttcgcctcccggaagaccgccagcaatgcccggtaataaggctccgcctcctccgggtgggcctgtcccagggtatcggcccggcgcagcgcggcaaaccgcaaaaagcgcttttccccccagcggccggcccaccgggtggccatctccaccgtggccgggaaccggatatcatgtattttgatcagctcggtcacctcggtgataagcctcgtttccgcatgcagccgccgcaggatcttctctgccgttgcggcgcttcgctcctggtgccccttaaagtgccggaccccctcctcatcggtggtgcagcagctgggcttttccacatcgtgcagcagggcggcccagcgcagcgccggctccgccggaatattctccaacaccgtcagggtgtgctcccaaacatctttcctgtggtgggggttattctgcataaagcccaccatcggcagcagctccggcagcaccaccccaatgacatcaacatactcccgcagcaccggggcggcagccggaccgcacagcagcctttccagctcggccttcacccgctccggagaaagatttttcagccggggggcattcccgcgcagggcggcagccgttcccggctcgatctcaaaccccaggacggcggcaaaccgcagcccccgtaaaatgcgcaggccatcctcggcaaagcggcagtctggttcccccaccgcccgaatgagccggtttttcaggtcagcctgcccaccaaagggatcgatgacctcgccggttttggcattcaaagccatggcccctatggtaaaatcccgccgggccaggtcctcctccagccccaccccaaaggtgacggcatcggggtggcggccatcggtatagctcccctccccccggaaggtcgtcagctccaccgggtattccccggccagcactgttatggtcccgtgccgcaccccggtttctatcacccggcagccgctcagcagggcctccgcctgctccggccgggccgcggtagtcacatcccagtcatggggctgctttcccagcagcaggtcccgcacagcgccccccaccgggtaggccgcaaagccgccccggcgcagggtctccagcagctcctttaccgccggcgggatcttccccggctctatatacgcgcgcgcactcatcgggatgccccctttcctggttctattatagcaaaaacccctcgccgccaaaagcatacaaatcgtatcatcgcattgtattatacaaaatgtactttatcatggggaaaaagcagcaaaattcctgccaaaagccaccgggcagcaaaaaagttcttgcttttggccgcaaactttgataagatactaatgttgcatgattatattgccctataaggaggtgcagacaaatggcaaaatgcgaaatttgtggtaagggcgtcactttcggtatcaaggtttctcactcccatcgccgtgcgaaccgtacctggaagcccaatgtcagacgagtaaaggcagttgtaaacggtactccctgccgtatctacgcctgcacccgctgcttgcgttccggcaaagtagagagagccgtctgatgctccccatttacccccgcaaataaagctcctgtcccgctgtggcaggagcttttttctatccttttgccggggcatattctcatttcgcctgccggcggggcggggccttttgcaaaggcatagattgcacggctatcgccgaggtggcacttttgaatcgccaaaagtgcccaaaagcgacttggggtaaaccccaagaccccgacgcaccggaacgcccgcccggaagggctatgccctcccggagcgtaggctaaacggtgcttatagggtgccacggcgtatttgcccccaccctgttcccctccccccgtggcgggggaggggccgtctgggcaaatagctgcttgttcaattcataggctcggcagcatgactttctgctatcgatttgcagtaaccaaattaaaaatcaaccttataagcgtcgtctaatcccgctccgggaaaccgttgctttggctttccgggcggggcaaaaggggtccctacaaggtcgcaagaccttgtagggagaggaggatgcaccgcagcggggaggactgcccaaagtgaagcacagggtcagtccgactcaagcggaggttgcgtccgacgagcgtacgggtctttagggcggagccctgaatgacttttgcctacttttcttcatagaaaagtagggccccggcggcgagccgtacaagccgtcaccctccggcgactccgcgacgcctttaggcgaccacaaattcagcccccgcggcgagcggtgctcaccaagccttgcaaaaggccccgccccgccgaaggcgagatgaaactttggcataatttgtgtcatcaatccctccggctcatttctttcgccacctccctttacacaagggaggctttcgccgggcaggcccccgcaaacctggcttagcctcttttcgctttccttttcccgtaaaaggaatccccaatgttcacgctttgttcgcttgtgttcccgccgcttttggtatataataaattggtataattctgtaccggaaaaagggaaggagcccctatgttcaatcaatcgttatttacctacctggtgcgcgccatggtgctgctcaccgccattcccatccacgaatgcgcccatgcctgggccagcaataaattgggcgatcccaccgccaaaaatttggggcgcctcaccctcaatcccctgccgcacctcgatctcatcggctcggtgctcatgctctttaccgggttcggctgggccaagcccgtcccggtgaccacccgcaacttcaaaaatgtcaaaaagggcatgatcctcaccgccctggccggccccgccgccaatatcctgctggcgctgctttccctcatcctgtataagctgtggtgctacttcctttatcctcttctcgccatcaatttcaccaccgcttccgctatcgcgcagatcttctacatcatgtgccttttgaacatcaacctggcggtgttcaatctcatccccattcccccgctggatggcagccgggtactgaccgccgtactgcccgcccgcctttactacaaggtgatgcagtacgagcaatacatcatctacggtgtgttcatcatcctcatgctggggtggctggatggcccgctttccttcctgcgcggcgtggtatataatttcctcaatctgattacaggatttttgggataaggaacgactaaaatggaaaaactcacctttaaggtcaatgaatatgaggggccgctggatctcatcctggcgctgctttccaagcatcagatcggtatttatgatatcaatatcagtgatctgctggagcagtacatggcctacatccgcaccctgcgggaaaaccagatggaggttgccagtgaatttctggagatggcctcccggttggtttacatcaagacagccagcctgctgccccgctacaaaaaagaggaagacccccgcgccgagctggtgggccagctgctggaataccaaagctgcaagcaggccgcggcccttctgcggctgcgggataccggctggtcggtttttacccgggcgcccatgccgctggagatcgaccctacctaccgccgccgtcaccccatcagcgagctgaccaacgcttactggtcggcctgcggcagaggaaagcgccgcctgcccccgcaggaaaccgcctttaccccgctggtcgccaagcctatggtttcggtggcaagccgcattatgcacctgctgcggggcttttaccgccggggccgggccagcctgcaaagcatctgggccgataaccacgaccgcagcgagctggtggccacctttatggcggtgctggagttgctgaaggccggacgggtacacctgaccgatgacgataccgagctggtttttgccgggcgggagaaaaagaaagcggaaagctgaaaagcggatttttatccgatgaatctgaccgaaacgaggccgaaacatgaatttgaccgattcccaaaagaagatctttgccatccttttcgcggccggggagccgctggaaaccgaccgcctggcggaagccttggccatcagccatgccgaagcggcagagcagtgtgttttgctgcagcagcggctggccgaaagtgacctgccgttggagctgcgccgactggaaaacagctggcagctgtgcaccattgccggctatgatacagtgataagaaccgccctggagctgcgcagcaatactcccctttccaacgcggctatggaggtactggcagtggtggcctataaccagccggtgacccgcagctttatcgagcaggtaagaggtgttgacagctcctcggtggtggccagcctggaggaaaaagggctgatagaggaggccgggcggatggagctgccgggccggccggtggctttccggacgactgccgcttttctgcggtgcttcggcctttcggatctcagcgagctgccggagctgcagcccccggaggaggccgaggagaccgaagaggaagaacagctgggctttgatgacctgaccccggaggaggagaaatgatcgccctgtggatcattttggggctgctggcgcttattctggtgctgatgctgatcccggccgggctggctctccattaccacggagaggactttaccgccgagggaaaatggctgttcctgcgctttaccctgtggcccctgccggaaaaggaggagccggaaaaagcagaaaaaaagcaggagaaaaaagccgccgaaaagccaaaaaaggagaagaaatccgagcggcggccctttatggactggctgcagctgatcaatgacctgctgccggtgctgggcgaggccctgcggaaaatgggcaaagccatcacgctgaagcggtgccggattaccatggtgatcgccgccgaggaagcggatcagaccgccatccggtatgggcgggccaacgccctgctgtataccatttacgcatttctcggccgccacatccatgtaaaggaattcaaagcggatctccggcaggattatctttccgggccggagggcgagagcgccgaggccgacctgctggtgctggtatgtcccatgatcctagccggggcgggctttcggctgctgcggaaaggcggaaaaatttatctgcggtttgcaaaataacgcttcgcctctccagcggtgggtttttcctctaaaaagcatgcataagaatctccattctaattagatatcgcctatcggcgtcgcaaagccaccgaatggtggcagcccgtacgcctgcccggcgtgggcctacttttgttcgtgcaaaagtaggcaaaacacgcttggggctgtgccccaagaccccctaacgctcaagctgcggctggatacgaacgatgtaaacatcgtccgtacggcgccgcagatacgctctcaaggtgcctgcggcgcattttattgtggacccagcaggaactgaattaaaataaacaccttataagtgtcatctaatcccgctccgggaatgcgaagcgtttccggagcggggtgtaccgacgcgtgggggcctcggggacctccccgagtgacttttggttacttttcttcatagaaaagtaacccccgccgggcaggcgtgcaggctatgcctttgcaaaaggctccgcgatgccgacaggcgactacaaactattcctcgccgaacaggcgaaataaaaatagattaaaatctcttttaccaatatcaatacactttacggaggttactactatggcacattatctgggtgagctgaccgaaagcaatatgaaaaacctgcaggccctcatcgattccaattccgtcatcgggcgggagatcgtcacccccgatggcaccgtcatcctgccggtgagcaaggtctctttcggctttggcagcggcggcggcgatctgccctccagccaaaaggaactctttggcggcggcaccggcggcggggtcaccatcacgcccctggcgtttctcattgtgaaaaacggggatgtgaagctgctgcaggtgcagagctacaacaataccgccgaccgcgtggtgggcatggtgcccgatgtggtggataaggtctccgggcttatcagcggaagcaaaaaggaaaagcctgccgaggaagaataagcttcccagtatgggatcaacaagaaaatgcggaggtgttttatcatgcggaaagggaacaggatcttaagcgggctgctggcgctggttatgacggcggtaatgctgctctgtccggcggcagctatcagctatgaaccggactttacccccaccagcaaggcggtgtacctggagaacctggataccggcctgatactgtatgagaaaaatgccgacgagaagatgtatccggcctcactcaccaaaataatgaccgcgatagtggtgctggagaatgtaaaggacctggatggcgaaacggccgaataccccatgtggatccagaacatgctgtacggcaccaatgcctcgctgggcgggcttatcgtgggggaggagctgaccatccggcagcttttgacctcggcgctggtgcaaagcggtaatgaatccgcgatgatcctggcgggatatgtgggcagcggcggtatggcggattttatgccgcgggatatcaccacctttgtagagatgatgaacgacaaggccaaagcgctgggttgcaccggcacccattttaccaaccccaccggcctacacagcgataacacctacaccacggcccgggatatggccatcatggcgaaatatgccatgcagaagtcggcgttttcctccatcgtaaagaactacgccgtgcagctgggccagaccaataagcacgccgacctgtggcagtactccaccaataagatgctgctgaccagcagtccctactactacgcccccgtggtgggcatcaagaccggcagcaccgatgaggccgggcgctgtgtcatcagccaggcagaggatagcggctaccactatttctgcgtcgtgatgggctcccctgtcaccgcagcggagccataccagaacttcattgagacccggcagctgtaccgctgggccttcggcaatttctcgctgcggacactgctggagcagggcgagctgatggccgaggtaccggtgaaatattccggcgatggcaaagtggctaaactcgccatcaaggaggatgtggtgcagctgctgcgggatgatatctcactggatagcatcatctataaagccgagctgcccgaattcgtggaggcgcccattgcggcgggtgacacggtgggtaagatgcacattatgctgatgggcgaggagatcggcaccgtggagctggtcgccacccaggatttctcactttcctggttccgtaaggcattggggaccatcggcagcctgttgagcagcacagtggccaaggtgatctttattgtggtggtgctggccattgcgggttatattgtctatgcggtgcggcacaataaaaagcgcaaaaagcaccggagcaagtactccgaccggaattattgaggaaaagaattccctcccctgcggtgatacccgcgggggagattttttcatcaaattttattttacctggcagccctccaaagggctcccctgtgtaaggaaagctggcaccacgccaacccaaagcctcccttgtgtaaagggaggtggcgaatgaaatgagccggagggattgccagcacaaattatgacataatttcatttcgccttcggcggcacaccgccctagaggctcccctgtgtaaggggagctggcacggcgcagccgtgactgaggggttgccggtataaagtttcatctcgcctagcggcgtcgcggagccttttgcaaaggcgtagttagcaccgctcgccgcgggggccttccttttgctcctgcaaaaggaagcaaaacagggca

SEQ ID NO: 2645 - DNA, 13427 bp, Unknown
  16S sequences of unknown bacteria
gtgagcacatcgtccatgtccaagacgatggcgctggccggtctgcgtatcgggtggatccatgcccgcgatgcgcagctgctgcagcggatcaatgcgcgcagggattatcatgtgatcagcgagagcgcgcttaccgacgcgctggcgcagatcgcgtttgcgcaccgagaacagatcatggagagaaaccggcgcatcgtacaggagaaccgccgtatcctgcatgaatggctggaaggggagccgctggcggactgcatcatcccgcgatgcgggacggtctgcttcctgcaggtacatctggatatgccttctgcgcagctgtgtgagcagctgcaggcggataccggcgtattctttgcgcctgggtcatgctttggtgtcgaaggacatctgcggctcggtctggggataaacaatacggtgatgcgggaagggctcagccgcctgtcccgctggctgcatcagaagagctgaacacggtcatgcccgcgggcatggccgttttgagaaatgtatcaaaaatgtaaggtagcgatggctttcgagatgccctctttacattgcggcgcagctgtgctagcctacagttaaaggcgtaaacagatgaataggtgagatggaatgaacaacaaaaaacggttacaacagaccgcggcagctgtgatcatagctgccgcttgtgtgctttttctctggcattttcaggatgaagatgcgcgcagggaaacaagcgtgaacggccagacggccgctttgctcgagcagcgcgcatcggcttacacgagcgaggatgtgtatgcgcgccgcgcgcagctcaaagaggagcaggagcgaaaagcagaggcttcccagccaaagccgcccgtcgaacaggccccgccggaaaacgtgcaggagggagcttcgcaggatatcgctgcgcggttttccggttcgctggtcatcggcgactcgatcgctgagggattgctggcctatggcgtgctgaatgaagcagaatgcatcggcgtcagaggattgcgcatcgatcagctggatcaatacatcgatgagatcgcgcgccgttctcctgccgtgctcttcctggaattcggcatgaacgatctggaatactggcagggaaacgcagagcagttcgcgcgtgtctatcaggaaaagctcgatatgctgatcagtcgtttcccgcagatgcgcatttatgtcaattcggtcctgccgatctctcagcaggcgatcgcgcagacgccggccaatggcagctggtcagcatataatgccagcctgtcagcgctttgcgcgcagaagggcgtgacgtatatcgacaatggcagcatcctgctctcgctggcacagccatttgaacaggacggcatccatccgcgtccggattactatccgctgtgggcacagcatatggcagacagcgcaggattgtaggtgatgaagatgaaaaagaccgtatatctcatcatggcgctggccatggcggcgctgctggctctcccgtttgcccgcgggactgccgcggtgagcgcacaggagctgcaagcggcgctggcgccggcagccgaggaggaaggcatggaacaaaaggatgaaggacagctgtgcacgctgcttcagatccgcagcgatgcctatgaagaagcagtgtatttcggcgcgctttcgtatatggatgtcgaggagatcatcatcctctattctccttcgcataaaggagagctgctcgagaagatgcaggaacatatcgagcggcagatcacggcgttcaagggatatggggaacagcagacccgtatgctggaaaaggccgaggtcagcgttatcggcaattatgcggtatgtgtcgtcagcggcagcagtgagctgatgcagaccgtgcgggccgcattgaggtgatcgcgatggaatttcataccttgcttttcttgtttcgctggctgccggtcgtgctgctcttgtatctgctgtatttcaggacgcatgcccgggaagctttcctgctcgtggtcagcttgctgttctatgcgtggggcgaaccgctttatgtcttcctgctgatcgcgctgggggctgcgcattatgtgctcgcccgccggatgagcgatgaacggtggcgctggctccttttgccggcggtcatcgcggatgtgttcctgctggtgtatttcaagtattacggcaccatcctggatcagctctcttcgttcttttctctctcttatgaggtcatgccgatgccctcaggcatttcgttcttcatgttctcgctgctgtcttatcttgcagatgtcgggcgcggcaagatcgagccggagcgcagcctgtgccgtttcctgctgtatgtgtcgtttttcccaaagctgctcatgggcccgatcatgcgttatgcggatttccgcatccagctggaacggccttatgcgcagcgggatcagatgaacaagggtgtctgcctgttcatcgccggcctggcgcagaaggtgatcctctcggcctggatggccgacctgttcgcccgcatgggacagcttccgctttcgtttgtgagcggatggggacaggcagtcgcttattcgctgcagctgtattttgatttcgccggctattcgctcatggcttttggcttagcggcgatgttcggcttctatgtgccggtcaatttccgttatccttatctatctgattccatctcggcattctggcggcgctggcatatcacgctgggtgcctggttccgggattatgtgtatatcccgctgggcggcagccgccgtgggaaaaagcggatggtcatcagcctgcttgcggtctggctgctcacggggctgtggcatggcatcacgctgccgtttctgttctggggactgtatcatggcgtgatcgtgctggtggagcgcttcagcgtgaaatggcggatgaagctgccgcgctggggaaggatcgcgatcacggatctgctggccgtcatcggctgggtgttctttttcagcccggatctcgcttcggcgtttgccctgctgggcagcatgtttgacctgacatcgatcgatgtttcgctggcaggatgggtgttcgccaattatggagcgatgctcgcgatctgcctcatcggctgcacgccgctgatccatcgggccaatgccgcgctgagcgcgcgtttttcctggttcgtctgggtcaagccgtttgtgtataccgcgctgatgatcctctgcatcgcattcatcatcggcagcagttatcagtcgttcttatatcgtgcgttctaggaggtgaggtcatgaaacagaatgagtcttttccctatcttgcgttgctcgtggtgctgctttgcgccggcatgctcgtttcgctgatccatccctcccggacgttttccgcagcggagaatcgcgagctgcagcagcgggtcatgccttggaaggcgtctttgctcgatcgaagctatcaggacgccgcttctgccttcgtcagcgatcagttcccggggcgggaaggctggatgcagatgcgcagcgatatcttagctgctctgcatgatcggcgagtggaagatgtgtatatcgcagaggatgattcgttgatccaggcctttgtcccgcagatgacgctggctgctggacaggtgcaggcagtgaatgagtttgccgcggagcatgcggacatggatgtctctttgctgctggccccgacacgcatcgcatttgcggaggacaccatctcgcgcaatccgcaggaaccgctgcagcaggatgtgcatgcgcagctgatcgatgcgctggatgagcaggtgagagcggtcgatgtgtgggatgcgctgcgatcgcatcaacaggaagccatctatttccgcagcgatcatcattggaccccgctgggggcgaaatatgccgcggaggtcttcctggatcagccgctggatgcgttcacgagcgtggacgcggtgtctggcttctatggctcgctggcacggcagatcgcctggacacacacgcaggatgatctgcagctgcagctgccgaaagaggagacgccgtacacggtggaggatccttcagctggcacgacgtcgacgacattgtatgcgcaggacgcgctttcttccgcagatccgtatacggtgttcttcggcggaaacgcgccgctgcttcgcgtggacagcgccttggccaacggcaagcggctgctcgtcatcaaggacagctatgccaatgcattcatcccgtatctgatcccgtattatgaggagatcgtgatcgtggatccgcgttattattatgatgatcttgacgaactgatcgaaagcgaggagatcagcgaaacgctgtttttgttcaacatgaacacattctgcacagatgattcgctgcagcagatgctcggccggtgaaaaaaggttgcctgaaaaccgctttcatcgtacaatgaaatcaattacaggaggacaggggaatgaatagacgaagattgaccggattgtgcctcatcgcggcgctgctgctgatcccggccgtcgtgcatgcggatgtgggcaattcgttttcaggaggatccggctatagcggcggaggatacagcggcggaggatattccggcggctctggccttggcggcatgttcttcttcatgggcggcggaggcggaagcatcctcggcgccatcatcatgatcttgatcatcgtggcatgggcatatttttccaagaatacccagaacagcagaaggcaggacacgccttatcagggcggcgtgagccatcgcatctgcaatgagacggcggcagtcagcgccttgcgtgagatcgacccgcagttttcggtcgagggcttcaagagctttgcgtccgaggtatacctgacgctgcaggaggcgtgggaggcgaaagaatggcgcaaggtccgcccgtttgagagcaattcgctgttcaacatgcacagtcatcagatccaggaatatatcgacagcggaaagaccaaccatctgaacatgcagaatgtgcgcagcatcaccatcgcggactttcatgcggatggcgcgcgggaggtgctcagcgtaaagctggaagcaagcctgctggactataccacggatgatgagagcggcgaggtgctggagggcagcaagacgcagtatcagcatcgtttctattatctggaattcatccgttccgccggggtgaagacggcggcggaaaaggatctgcagatcaccaactgtcccaactgcggtgcgccgacacaggtgacgagcagcggagagtgtgaatactgtcactcagtgatcaccaacggtgattttggctgggtgctgaatcagtacatggcctggtaaaggaggaatgagcaatgggactgatccgtgccgcatttgacgcggcgaagacgacgctggctgaccagtggatcgaatattattactgtgattcgctcagcaatgaggtgttgctgaagaagggcgaaaaggtcgtcacttccggcagcaacacgaaggcgagccccaatatcatcaccaatggcagcggcttcgccgtcaatgagggacaggcgctgctgatcgtggaggatggaaagatcatcgagttttccgcagagcctgggcggtttacctgggaatcctccagtgaaccaagcctgtttgacaatggcttccagggcctgaaggattctttccgcatttttggcaagcgctttacgatgggcggcacgccgggaaaggatcagcgcgtgtatttcgtcaacctcaaggagatcatcgacaacaagtttggcagcgcttcgccgatgccgtatcatgatccgatgtaccgcaacatctatatccgatacttcggacaatatacgttccgcatacaggatccggtgcgtttctatgccaacctcagcggcaatgtcagcgatgtatatacgaagacacagctgatgcagcagtgcgatgcggaattcgtcaacgcgctggacacggcgctggcggaatgcgcggatcagggctatgtgttcagcgatctgccgaagaagcagatggagatcgcacattacatgaacgatgcgcttgatgatgcctggaatgagcgccgcggcatggtggtcgagatggtggccatccagaaggtgacgccggatgaagagagccggcgccgcatcgagaagatcgatgacgcgatcatgatgggcgatcagcgtgtggcggccggacgtttggccgacgcgcaggcgacagccatggagaacgctgccagcaatgaggccggcgccatgaacgggtttatcggcatgggctttgcccagcaggccggcggcatgaacgcggcaggcatgttcaattccatgccgccgcaaaatgacaatccgctgtttcagcaggcagcgccgaagcaggcatcctggacatgcagctgtgggaacgtaaacaacggaaacttctgcagcaactgcggcaagccgaatcccaacggaccgtggaaatgtgactgcggacagacgaataccggcaatttctgcagcaactgcgggaagaagaagccagaataaaaaacgaaaaatggaaagactgatgcgcggtctttccattttttcggcttgatgccattacggatcatctggatgcggatgtcctcaggcgttttcttttcgcagcgagatgaactgtgccatgatctcctggaaataggtgaaggcatcgtcgtagactttgtcgcttgcgggatcgacaccggcgtgccgcagctcatccagcggagattcgcttccgcctttggtgagaaattcgcgataaggagcgacatttcctttacggatctccttcacgaaggagatggcgacagccatgcccagcgtgtacttgtagacatagaagttgtagtagaaatgcggcacataatagaaaccatatctctgcagatcgtcaacgatgacggcgtcgccgaagtaagcacggttaagctccaggcatcgatcggtgatcgtcttggaagagatcgggcggcgctgctcgatccactcgtgcagatccttttcaaactgcgcgaacatcggctggcggtagcaggtgccgacaaactgttccatcaggttgctcaggatataccgccggtatgcgtcgtcatccgaggtctgcagaagatgctcgctcagcagcagctcattgacggtagaggcgacttctgcgacgaagatctgatatcctgccagcatcggccgctgatggcggtgtgagaaataagaatgcagggaatggcccagctcatgcgccagcgtgctcagcgaatcatagctgccggtgaaatttgtcaggatatatggattggaatcataagtcccccaggaataggcgccggtccgcttgtccggggacgggtagaaatcgatccagcgctcatcgaacgctttttgcagcagggcggtgtaatcctcgcccagcggcgccagcgcctgcttcaggatgtccaggcattcttcgatcgtatagctgatgtctgtgctttgttccaggtcgagcgagatatcatattcgtggaactcttcgatgcccagcacgcgtttcttcatggcgaagtattcatgcagggcgtggatgtatttttcgttggccatatacaggatcttgtcatacaaggtctcatcgacgccatcctgaaacaagctcgcctgcagggcgctgtcaaagtgacgtgtcttggcattgagcacttgtcctttggcgttgccgatgagcaggctggcgaacgcgttttccagcttttcatattcgcggaaataatgctcgaaggcttgtttgcgcacacggacatccgggttgcgcaggaattcatgataggtcgctccgttgaggaactgcttttcaccgttgacctccacatcttcataggtgagcctgatgctctggaaggtctcgtcagggacagcggcgatctcattgacctcgctcatgaaggcctccatctcgtcgctgagacggtgcgggatggtgcggaagagctcttccatcggatagcggaagtccgcgcactgcggctgcttcaaataggtgctgatggtgtccgcatggcggatcagctccagagagacaaaggtcagatcaagctgtgcctgctgcagcagattatttgcggcagccaggttctgctggttctgcatgtcctttggctcgacgtcagtgcacatccgcgcataaacgaccagatcttccaggcctcgctcgaatgtctcctgatcattgaggaaggcgatgtaggtgtctatggtatcgctgatgtgccctttgcgtgcgcacagcgcctgcagctgagccttgcttgtgtccagctgcgcatcaaaggcctcctgtgaggcgaataaggaacgcagatcccaggtataacggatatcggcttcatttcggttcatgtggattcctcactttctcactccttagtatagcacaaatgcgcaaatgaccacatgtgcattgcaaatgcgtccgtcgcatgccataataagaaaaaaggagggatcattatggcgacagcgcataatgaggcggaaaagggagagatcgcgcgcatcgtgctcatgccgggcgatccgctgcgcgcgcggcatatcgcgcagacttatctggatcagccggtgcagttcaacgcggtacgcggcatgcttgggtataccggggagtaccgcggaagaaaggtgtcggtgatggggtcaggcatggggatgcccagcatcggcatatattcctatgagctgttccggttttatgatgtggacgccatcatccgcgtcggcagtgccggcgcctatgtcagtgagctgaatttgtttgatctggtgctcgcggacagcgcatggagcgaatcgacctatgcgctggcacagtcgggagaatctcaggatgtgcagcagccagatccgcagctcaacgagatcatccgcagcgccgcgcataagctgcaggtgccgctgcatgaaggcaggatccattccagcgatgtattttatcatgagcaggatgagctggcgcgttaccgcagccatggctgtgtctgtgtcgagatggagagctttgcgctctttcacaatgccagggtgtgcggaaagcaggcggcttgtctgctcaccatttctgactcactgatcagcggggtccagacaagcgccgcgcagcgtgaacgcgcttttggacagatgatggagacggcgctggaaagcgcctggatgtggcaggagggcgcatgaacgtcggctgtgacatcgtgatgatctctcgggtaaaggatgcgctggcccatacaccgggatttccgaattttctgagcgaacatgagcgtgcgcagtttgaggcgctgaagggccagcggcaggcggaatggctggccggccggtttgcggccaaggaagccatcgtcaaggcgatgcacggtgttcgggaactgcatatctgcgatatcgagatccgcagcgatgacagcggcgcaccggtgtgcgcgctgccggggatccggttatccattgcgcatgagcgggaatatgcggtagcttttgcgctatatatcggataaacatcaaaaaggtattgcaccgtgagaaaaggtatgttatgatatccccgctgatggcgcgttggagaaacggttaactcacatgcctttcacgcatgcattcacgggttcgaatcccgtacgcgtcaccattttatcagatcggccggatatctctggccttttttttcgcagtgcggatcggcgctcatttgggtcagtggacatgtctgggataccgcatggacatgcggatcgaaaacagcgaaaatttgcaaaaaaactattgtcaaagcagaaaggttatgttaatatataacagcactcgggaaaaacctgagttttacatacaatggcgcgttggagaaacggttaactcacatgcctttcacgcatgcattcacgggttcgaatcccgtacgcgtcaccatgaacaaaatacaggggacatcccctgctttttttatgctggaaaaccgccttgttcaaagatgaactgcaagatccccagatagatgccataggcgaaggagaacggatcatcccgaagcttttgagcgtcggatgggttagatagataagcgagctctaccaggatggccggcatgctggtgcgtctgagcacataaagtgatgcgttcacgtgcaccagattgtctcttgtgcctgccgtgcgcaccatgttttccaatacgctctgcgcaagtgtccatgcgatggatggttcctgatagacatagacttcgctgccgttgactgcggggctgacgttgtaattgcaatggatgctgatgaaataatcggcgccccaggcattggccatatcgacacgtgtctgcaggctgctggccgtactggtccccagcacctgctgcgggtacatgcgggaagtacgcaccgcaaagcggcagtcctgatcgagcaggtcagcgagcatgttccccacttcgaaattaactgtctgctcctccagcccgttggcggaagcgccggcgttgaccgtgcctggattatgcccctgatcgatgaatatgcggatcgtcacttctgcccctcctctctgtatcatcctatgaaaaaagggcaagcggtgatgggctttgtttaggtcagcgggtatgatatgatagacgaagtgagaaagaagggatcgcatggaacagatcagcgtgatcgcagcaggcgtctgtgaacagcagaatatggatttcgatgcgcagatgaaggagctgtgcagcctggcggaggcctgcgggctctgcgtggcggaaacatttacccagaagctgtcttcgcgcaatccggcgtcgtattttggagcgggccgcttgttggagctgaaggagcgcctggaggagctggatgtccatgatgtcatcctgctgcatgagtgcacgccggcgcagctgaggacgatggagcggacgcttggcgctcaggtgagcgacaggaccttgctgatcttgaagatctttgcgcagcgggcgcggacgaaagaggcgcggctgcaggtggagatggcgatgtgtcagtatgagcttccgcgtttgatcggtgcgcatgcgcatctgggccggcagagcggcggcaacaaaggcagcggcgaacagcagctagcgctggataagcgtgcgctgcagcagcggatcagcgcgcttcgccgtcagcttacgcagctgtcgaagaagcagacggtccagcatgcgtcgcgcagccgttcgccgtatccccgggtcgcgctggtcggctatacgaatgcggggaaatcgaccatcctcaatcagctgctcagcctgagcaagcgcggacaaaagaaacaggtgtttgcgcaggacatgctgtttgcgacgctggataccagcgtgcgcctcatcgatatcccgccgcatcagccctttctgctcagcgatacggtcggctttctgaacgacctgccgcatacgctgatcgaagcgttcgacgccacgctttcagaagcgaaagaggcggatctgctgctgcatgtcgttgacgcggccgacccgcaacatgatgttcagatgcagacaacgttagatacgctgcagaagatcggatgcgcggacagcgagaggctgacggtgatgaacaagatcgaccgatgtgaagacatcgcggcgcatgccgatggcggacgggtgtggatcagcgccagcacagcggacgacatggagcttctgctgtgcgcgctggatcagctcttcctttccgggaagatcgccttgacctggctgttcccttatgcgcaggctcatctgcttccccggctgcatgcccatgccgcccttttgcagcgtgaggatacggatgaggggatccgcatgcgcggatatctcgatccggcgtggcggacgctgtttcgggcatatgaaaaggcagacgaggctcagcgctgagcctccatctgcctgatcttttcgcatgcttcaggaatgaaattgccgacatgctcagggacatgcgcgtctgaggcagtcatgatctttgcctgctgatcgatcagcacgcgcaagaacgcatcgctgagcccgatatcagccgtatggtaccgataatgacagccggtattgtcctccatgtacagatcctgttccacagcgagctttgccagcttttcataagtcgggacaaggtcataggaagggtagatgtcgaacagtttgatcgtatccggatgggcgacctgggtaaagaggccggagcgcatgagctgctcgatcagttcataataacgccggtagatgtcgtcggcagggtaacgatcccacagcagttcgcgtgagaatggcatatcatataagatcccgtcaacggagtggacgcttccgacaagaaaatcataaggatattggctgaggatgtcccgcagaaagggttcagcctcgggcgtgtagcagacctccagcccgaaacggacctcgatgggcagatccatctgcttcatcgtctcgatcaggtgatgatacgtcgagaggtggtccttcgtctttttcttcagccagtcagcctgcagcgttgaagcgctgcggacgcccgcatacataggggcgaattccaggaatcgatgcgtatggtcaaggatctgaagcgttcggatccctttttttacggccgcatcgacaaactgcatcgcatagtcgacgctcaggtctccgttttcaagatgtacatgtccgtctatcatgtgagttcctcctttttctctgtgagagtattatagcacagcatggatgaaatgacgcgcagatcgtttccgctgcaaaatgccttcagcggaatactcgctgaaagtgagggttcagcagagtaataatttataatgcccatggagagaggttttatggataagagagattacggaaaaagactggcgaacgcaattgccacacagatgcggcgcaaagggatcacacaggaacagcttggcagcatgatcggtgtgtcgcagcgcacgatttcagattatgcaagcgggaagaccgcgccctcttacgatgtgatggcgagaatggcagtcattctggaaatcagcctggatagcatattcatgctgaaagatgagcatgcggcattttacctggataaagaggaatcccggctgatcgatctgtatcatcagtttcctgaagatcgcaaaaagatgagcgtcgatctgtatgaggaaatcctgaagatgtttgccggaaaagaaacacattgagcatgagaggatcacacgacagcgtggatccttttttttgtccaatggttactattcacagcagggaaatgaaagggcgcgggaaaaacacgatgttagaatcagtcttctgattctgcatcgtgtagtttcatttctgcaattgtgatatatctttctcctaacgccctttttatcaattcg

SEQ ID NO: 2646 - DNA, 10188 bp, Unknown
  16S sequences of unknown bacteria
cacgactctttatgctagacacttccttacgggacgtctcccttaacaggctcccattttttacgatcgtatggccagcaggtcccctggccctcgttttttccggccgccggctgtttacaagccatggcggttgcttttttctttctcttatggtaaaatagccgaccaacagccaataacggagggacggcatatcgtgaaaaatccgaaaccgggcggcccgtcgtttgcccgcatggtcgtggctctcgtgctgcccatggccctgcagaatctcatcaacgtggcggtcacgtccgccgacgtcctcatgctagaacgggtcgggaccgaggtgctgtccggcgcttccctggcaggacaggtacaattcatcatgaccctgatctttttcggtctgacctcgggagccgcggtgctcaccgcgcagtattgggggaagggcgacacccggaccatcgaaaaggtcatgggcatcgcccttcgcttttccctgatcgtggccgccgtcttttttctggcggcggaagctgtcccggaactcatcatgcggctgttcacaggggacgaggcggtcgtggggcagggggcggtttatctgcgtatcgtcgccccctcctatctcttttcctccgtgacgatggtgtatctgaacatcatgcgcagcgtggagcgggtcgtggtgtcgatggtggtgttcctcatctccttgttggcaaacatcgcgctcaatgccctgttcattttcggcctgttcggtctgcccgccatggggatcgccggtgcggcgctggcgacggcctgcgcccgcctgatcgagcttgtcctggtattggggtacgcccgctggatgaaaacctcaccccgtatccatagacgggtctgcctgcgattttccgacctgttcgtacgggatccgctgctgttcggcgatttcatgcgatattcgctgccggtgattgccaatgagctgatgtgggggctcggcacctcgatgagcgcggtggtgatcggccacatcagcacccagatggtggccgccaacgccgtagcccaggtggccagacagctcgcgaccgtggtttcctttggaatcgccaacgccgccgccattctcatcggcaaggtcatcggcgaagggcgacgtgacctggccaccgattacgcccgaaagttcatccggctgaccctggctgcgggcggctgcggctccgttatcatcctcgcggtgcgccccttcctagtggccgggctctccctcgatcccgaggcacgcgggctgctctccatgatgatgctggtcatggcgtatttcgtcttcgcccaggcgtataataccacccaggtggtgggggtcttccgggcgggcggcgatacccggttcggcctgattctcgacgtatccaccatgtggggcggttccattctggtcgcctccctggccgcctttgtctttgacggcagtgccaccctggtctatatgctgctgctcagcgacgagctgatcaaaatcccctttaccacctggcggtaccggacacgcaaatggctgcgcagcgtcacccgggatgaaacgggccgtcagcccgacggggaaccgctcctgccgtacgatggcgcggactgagtccggccggacggccgaacgacaggcttgtgcccggccccttccctgaacgatgtaggagagccgtcatcgtctctccaacccgccctcgagaataaacttgcgaaggatttgatccaccttcatattgatttggtaagatttgatggctttcccctccatcttttccagataagccttggccgccgtcttgtcaattgttgccttcagcttgtcaaaccgtccgaattcattgatgttcgcctcggtgagtttcaggtgcataaaggcgcggagcatcgtttcgtccacaccgatagcctcggaaaaacggtggatctggtcgtttctggcccgggtcatatactctgtaatatagtcacgcaacgtttgtccttcatcgacctttatctccccgttctgcacgtcatgcaggaagatgttggcgtatttttgttcctcctgcgtgagggttgcaaaggatttgtagagctcatcgagcacggcggcggtttcttcgccgctctgcaggatcttgacaaactttttgaatcgggaattcatgtaatcggcatcgattacaccggtattgatttcagtcagataggtatcgatttcgtatggcacatcacggataggcgcgcctcctgtcccggtaaaaagctccttgtaccgaagggcgaggatcagataggtggtctcgtccagatgcagccctgtcatcgtccaagtaaagccctggacttttgccgcttccaaatataaattgaatcgtttgaacagcttggcaaattggccgcgttcagcataatcctccggtaaggactcgaagttccccactccggcagagcggaaaagtgcatcgatctgatcaaagagctcattcattttgctgagattctgctcgagcttgtccgcgaaaaggccaagcggtttgtctccggaatacagtcggaacgcctcatcaatataccggctcatggtattcggcttgcggtaatagcggatcgtgccgaacggcttttccgggccataaagacgattggtgcgggaaaaggcctggatcagcttttcgaacgccaagattttgtcaaggtagagggtgttgatccacttggagtcaaacccggtaagcatctgatccacaacgatcagcaaatccacccgcgaatccggctggttctcaatggccttatacggttccttgtgcgccagcctgcaggcaacatcctttttgaaacgggcataggccgatagagggaatgccgtgccatagcaagtattgtagtcctcgaggatctccacgatcgcctcttctttgatgattccattgcctttgttgtcatcgtttggatcgaacagtgccgtcactctcagcccgctgtctgccgctttgaacagcttataatattgaatggcttccggaatactgctggttgccagaatcgcgtgaaaccggccgccgtggctgagtgtcatccaattctcaagaatgtcttggacaaccgcgttccgatggttcacacggtcgtattgggaaatgggcagatagtcctcgattcccttcaaatagcggccatccggctggagatgacccgccatgggtacctgtgtgtgatccatatagtgcagatagacggccttctttttcgggtccgccagcgcttccgcctcggtacccgctttggctttccgaagggcgatgacccttcgcagctcgcggtctttataggtcctcaccttataagggtcaaagcccaggacgtttttatcacggataccgtcggcgatgctgtaccgatgcagctcattgccgaaaacatcggccgtggtactcattttcttctggttttcgtcatgaatcggcgtaccggtgaatccaaagaacatcgcattgggaaaggtatgcttgatagtacggagcatttcgccgaaaacgtcccgatgtgcctcgtcaacgatgaagacaatacgcttgccctggatcaggccgatatcatgtgccttgaatccgctgttctcctccacccggctcatcttttgaatcgaggtgacaatcagggtgttggcgggatcggcgctcttcagctttgcaaccaggatgtctgtattctccgtggactgcaccgaatcggaatcatccgcgaagccgcgataatccgacagagactgtgtacccagttctacacggtccatgaggaataccactttgtcggcatccctggattcggcgatcagctgcgcggacttgaagctggtcagcgtcttgccggaaccggtggcgtgccagatatagccgccgagaggatccctgtccgcccagcggcgcatggcgactcggcttgtaatacgggaagcggcgtaatactgatagctgcgcatgaccttcagtatgccgtcggtatcatccgcgacggtataaaaaccgatgagctgatgcgccatagggatggaaagcaagtattgcgcaatgtccttccagttgttcagcggctcgttgttcgcatccgcccaatggaaatagacatccttgttgaacttgccgtccgggccgggattggcaaaatacacagcctcatccggctccatggcgataaagatctgtaccagggaaaacaggcctgtaaacaccccttcgcgggcgtatttttcaatttggttatatgcctggctgacatcgaccccgctgcgcttgagctcgcaatggaacagcggcatcccgttgatgagcaacatgaaatcgccccgccggttcggcaggagggagcttctggctttgaataccggctgttcagcgatctgataacggctctgcccggcggcgatctccatccggtcatagatttttaagctgatctccttgccaaagtgcagctcgtccgccggattgtcccgcttgacggccacggtttttccattgataaagccgttgagcttgagcggggtgcgcagccgggcgacctgatcgagaacctgctgcatctctccatcggtgagggggacgtcgttgaggcggtcgacatcccggttgttctcaaagaggatctgcttccagttccggaccagatcctcttcggtcttgtagcgcaggatctctggttcccagccgtatttgtctatgagcagatggataagcgccgcttcaaaggcggcttcgttttcaaatagcatggttctcctcccgagtcagaccaccattttatcaaggagtgcttttttgagattttggagtttttcgagctcaagccgataaagatcgatcagccggtcgagctgggcaaagtattctgcgatctgttcctgttctttgtcgtccggcatggcgcagacaatctcgctgaaaaccgggtatttcaaattccatgtatccgacgtgatcccttgggaatgaagctgaaattgatggatcatcgcgggccttttgaaaacataagaaaaaaacaacgagtttatccccggccttggcacaatcaccgtataggcagggctcaggatgccgctgtatggggaatatccgcttgcgccctgccacattctcatggtgttatacgcgatatccccgatttcgacctttttgtaatgcgatttgtcctcactggaatgatcgtgccgcccaagctctgaaaatttcttgatccccgattggatggtgacggaaatcaattccccgtttgcggagcattcctgccgttcgtcaaagcagtcccccagtttgcgccgtttccaggcttctgtgaaacctttgaagcggagttccggtacatctgcgccatcctctgggaacattttctccagcatggcctttttcagatgccggactttttcatatttttcctgccgccgggaaatcaggcaattgagttctcgcaaaaaccgcccgattttctcctgttcttcccttttcgggaaagcaaagttcaattccttgaaatccgcatagtggatgctgcggccatcccggatgccataggtaacggtctcgagccgtttaataaaccggtcggaggcaaacacatatttccaaaaatagtcgtcatgcgtttccttatccttgaaatccataaccgtgtatgccggagatgtgatgccttccgtatccgaatgcgcaaagccgccctgaaacgaacggagatggatgacgaattgcccgggcatcacccgcttataagtgacggcgttcttcttgtcataggaaatatcataatggattttgctccgctgcaccatcccgagctcctgggtagcggccagcacaggcagctcgggatggcggcggtcatcccgggtatcaaagataaaacccgcatccgcttgcacccactcgccgtcgaatcctttaaaccggacctgcggaaccgtctctttctttcccatatcattcacccgacagcagagattcaagctccgccagacctttcatatcgaacgcgctgcctgtcagttggtccatcatagcggcaaggcctttcccggattcttccatctgtttttccaattccagataggtcacggcgtatttatccgccaaagcctggatcgcctgctccagcccgctgacaatcgcttccggcagggcgcggagagaggcggacagcggcgcaatccatttcaggcgcagcaaatcaaggacctgctcgtcggtcagcccttcgatcgtctctttggtcagcagatgcagtgcggcggccatctccttggcctcccgcctggcggccttctcctcgtccatcagcctgcccgcccttaccatcttcgcctcgaaagagccctccgggaacacgtaggcggtttgccgcgttttcatgtatgccatgaccttgcctttggcgtagggggccgttccctccaccgctgtccagtccacttcatggtgatcggccatatattgcagcttggccgccgtccccgcttttgagtccagcaaatccatgtatccctgcaggccggagagctccggggaagagacgtccatataaatttccgccagcttggcggcaaactcttttgcaacaaaggccgtgttgtcctcgttcaaaaattccccacggtcgccctcgtcaatggaatcgatgatttccgccagctcagacgaaatctcgtccagccgggcttccttggcctttaccgccccatattccttttccaggagggtcgtctggaccaattcaaaggggatcacatggccgacccagccattctgtacgtattcttccgtatcgccctttttcctgaccaccatattgggatccacctgtttggcggcggcaaagccttcggtctgtatgatttcaagatcggtagagatttgtccccactggttgtccagcagctgatacgcctgatacctgtccaccacagaaaacggtgcgacacggtcaaaaatattctgtgtaatcgcatcttcttcctgggagacactcagttcctgcattttttcaatcagctcggcattcaaataggaatcgaaatcggcaaaggcggcctgataggcgtcgataaaggcgttcacgtccgcactgccgtcgatcgcctctttgattttttccgctgccaatgtggaatacggtgtcccgtcgcaggaaaacagatcctcccgcagccgtggaaaagccgtccagtatttatccagccggtcgatttcccggttgggaatgccgccgaacatggtggcataaatatcccaggtttccgcttcctcggaagaatcgatgtaacgggggatattcaggttatagccatttttccggatttccgccttggtaacacgcctggcgtactttttgatttcctgcgggcgcgcggcgacagtgtccacaatccttttgatgtccgaagccatcagcttattggattttccggctttggcaaaacctttggaggcgtcgataaacagcacgtccgaatcctcgcgctcccggcggagtaccatgataatcgtgggaatcccggtaccgtagaagatattcgcgggcatcccaataatcgcttcgatatggttgttttcaatcaggtttcggcggatgcggccttctccgtccatgccgcccgtcgcgtccccgcggaacaataccccatggggcagaacgatggccataattccgtcccgcctgatgtgatacaattcatgcagcagaaaggcgtagtcggcttttcctttcggcgccatgccatagctgtagcgggggtcggtctccttgtgggagggatcccagtgctgggaatagggcggattggataccacggcatccacatccaccatgtgataggtattcgccggatcggcgtcatcaaaccacggccagtcttcctccagcgtatccccacagcgtgtcaggatattgtccggcttgatcccccgcatgaccagattcatgcgcgtcaggttataggtgttttccttcagctcctgcgcgtaatatttgatgttatccttgttcgcgatatatttggccgcgctcttgccgatggttatcagaagagaaccggaaccgctcgtcgggtcgtaaatctcaattttttccctgtttttgaggtgattgaccacgatctccgacatcagctgcgacacctcgtgcggagtgtagaactccccggccttttttcctgcgttggccgcaaagttgctgatcagatactcataaataaaaccaaggacatcatagtcctgtttgccgtccatggggatatccttgatcagctggatcaagtcgcggatcgatttcgtttggttgctggcgctgtcaccgagcttgctcaggccggtttccaatgtattaaaaattttattgaacacctttttatgtgtgacgctgatcaaacggttaaacgccgaaagggcaaccctcacgttgtcgacggtaaagctgttccctttggctatccacgtagaaaacaggttgtcgtaagcaatgaaatacccgagcttctgctggcaatactcgaccaacggcgcattattttcatgcacttcggatgcaatgtccgtctcttcatagccgtcttttttcaggaactcgatctctttatcagacaaaaatttataaaaaatgaaaccaaggatataatctttatattcattcgcctcaattttggaacgcatcttatttgccgattcccaaatcttacttgccagctgctgtttgttcattggtccgctctcctagtctttcaatgtaatcctgtctccagacaacacacggcatggggccgtgtccataaagctttccccagccgggtttcctcatagctatcgtgttttcggcttgatatacttaccgctcttaattctcgcgtcctctggtttcggcgcattgtcaggaatcgcccatgtatggccgatacgcacagcacccggtatgcggtttccactgcacaaaatttgtacgcggcgggcagagatcccccatttttccgctgtttgggttacagacagatacttcattctagatcctcccggcacgttctgcccgccatatcgtcgattgatataccttccattataaatgataatcgcaaaggcgaataaagtcaaggcttgcgttctgtatttggaaggccgcccgcaaaaaagaaggatatgagaaggccgggcgacttgctttttggctatgcgtatctcccgccggttttttcctgtatcgactttccatttttttcgctacagccgcacatctgaacccttgggcacgtatttcgtggcgcgggccgcccatgaatagcccccgtcaatttttccatttccgtttccggggcatttcgggatgccctgcgcataaacccccgccgctccacgaaaaaacagggcgcatcctgaggatgcgccctgttttgttgaagagacagttaaaatcgatatttccccgcgaagagataccgccggaaaccggcggcagccgcgcccccacttgagggcggctgcatccgagcaggcgaactgagcgcaatcgtttgcggaaagatgggcatcggcaaagggcgtgaacgtttacgtttaaagctactatatacttctaaatacctctagtatattatcgcaataattacccactgcaataatttcatcacaaatcggtttcattctctctttgtcttgaatgacatcaggttttaaaccaaacccgccttccatctcaataagggtggcaaatccttttccgcactgcatgttataggtgggaatcagccgttcaataaacgtcaattctggattcaaggccaacgctttttgtaaaaatccagctgcacaggcatttgttccaagcatacaaagatatgtcccatgcatattccaacacgaaaatccgggggccccatgcgtataccatattttgtcatccagcgggtaccgttcgaatatattgctttgaaaactgtacgcccaatccataaacgcttttttcccaaacgaaaactgcttggtctcaggcatgtttaaaagcgccggtatcgccataaccgcatttttgtaggcttcagataaagcggggctcatcggggattcgaaccccggacaccctgattaaaagttggtgccctgcctactgagcacacgtacacaccctttgtctttgcagacgtaa

SEQ ID NO: 2647 - DNA, 32759 bp, Unknown
  16S sequences of unknown bacteria
tcgtctttgccgatgcaaaaacacagtggacataccgcattgatgcggtgctgggtatcgttctggagaaaaagcagaaagagaccgccacaacggaaatcgacactgcagatttcatctctttggaagaagcaaagaagatttccctgaaagacgcgggacttgatgaagccacacaaaagatcgtgttcaccagagaggagctgaaccgcaattctggcaagccctgctacatcttagagttctacactgcgaagaagcagtattcttacaaggtggacgccaagaacggcaacatcatggaggcttaccacttcattcttctggcggacgcgaagaaaatcgcactggacgatgccggggtcagcgaaaaagtcacctttaccgaggaaacgctggttgccggcggcatcaagtcgccctactattacttcgcctttgaaagtgcctctgctcgctggacctacaaaatcgacgccgttctgggcgtgatcatggataagacctgcgataagatcattccccctgccccggagtttatcggcttggaaaaggcaaagcagatcgcgttagaggacgcggggctggatgagacagcgcaaaaaatcgtgttcaccagagaggagctgagccgcaattctggcaagccctgctatattctggagttctacacggataagtgtgcgtattcctacaagatcgatgcagtatccggggaagttatcgggaagaaaactgagtggttttcccgtcaggagtccgagactgtgccggacacgtctcaaaattccgattccaagcagcgcaggggaaactaatcaaaacatgactcgttcaagccatagaaaatggggacaggctataatattcaaaggcggtctcaaatcggtgcagccgctgaccgaatgacagcggctcaccactgcctctaaccctaaaagctcaagatttttcgtaagggaacaaatactacccccaaaaaggcgaaaaaatctattttatagtcctaccacattttggccggcatgacgtttgtctccatatacaacttcttggcgtctgttctcaggagcatcggcaacaccgtggttcccctgctttttctcgcggcggcggcggtgaccaatatcgtgctcgatctggtttttatcctggcgctggatttgggcgtggcgggggcagcgctggcgacggtgatcgcgcaggccctttcggcgatcggcgtgtcactgtatgtttttgtcaaggccaaagacctgtgtccccgacggcagcacaggcattatgaccgtgagctgctgcgaaagatcatcagcaattcggtattgacctccatccagcaatcgattatgaatttcggcatactgatggtgcaggggctggtcaacagcttcggctttgccgcaagcgccgcgtttgcggctgtggtgaaaatcgacgcattcgcgtatatgccggcccaggatttcggcaatgcgttctccacgtttatcgcgcagaaccatggggcgaagcaggcggaacgcatccacaagggcacgattaccgccatgaagatgtccagcgttttctgcgtgctggcgtctggctgcgtctatgtgttcgcccggccgttgatgcggctgttcgtgaaggcgggtgagacggaaatcatcgccatcggcgtgcagtatctgcatatcgagggcgtattctatgtgggcatcggtttgcttttcctattgtacggactgttccgcggatatgggcgggccggcgtctccatcgtgctgaccgtggtgtcgctgggaagccgtgtggcgctggcgtatgcgctgtcggcaattccggccgtcggtatggttggcatctggtggtcggtgcccatcgggtgggcgctggcggatatcgtcggcatcgggatttacctgagagaaagaaagcaggcggcttagccgcccgtggggataaaaaagaccgccggtatatgcaagagggacaacctgtgtgaagaaaaaacggcggacatcgtcgcctgcgctatggcctccagaaagtcgtgcaggcggctttgtcttccaggttatatcgaatcatggcctcgagcagcgcgtaatccaccggccggtcccattccatgcgcagcagctgctggctgtgcgaatagccggcccggcggatatcctctgaaaaacgctcgagccccgctctttccggggcgatcgccaagtggtttttggccgtgctgaaaccgatgataaaggtgccatgatgggtaaacatcggctggctccaggcagttctcggcgtcagctcgggaaaagtctcggccacccaagccagcacctcctgtatgcgcgcccggtggcggggatccccgatccgctccaaatactcgtcaaacagctccataagtgccgcctcctgacaggttgtggccgttgccggccccattagtatcgccggaaaaatgcggaatcctcaggccggtcgacgctttttgccccatgtgctatactggaggcggaaatgaacgggaaggggatgcagacgatgcgtacatcggaggaaatgttccgcttgatactggatgtggcacgggaggacgaccggattcgggcggtggtgctgtcgggatcgcgcgccgatccggaggtgccgcgggatcgatatcaggattacgatattctgtttttggtacgggaggtcgccccgttttacaacaacacggcttggatagaaacgaccttcggccggcccgccgtcatgcagatgccggaggttatgacccatccgctgctgccgccggacggggatgggcatttcacctatctgatgctgtttgaggatggcaaccgcatcgatttaagcatcgataaccgcccctatatcgacgacggggaaccggccgtcgttctgctggacaaggacggccttctgccgaagctgcggccccggaaagagtattggcatatccagccgccggacaggtcggtataccgggactgctgcaatgagttctggtggtgcctgaacaatgtggcgaagggcattgcccgggatgaactgccctatgcgatggaaatgttccagaaatatgtccgggacatgctcaatgagatggtgcggtgggcgattggtgtgcgcacgggatttacggtttccgcgggaaaatgcggcaaatatttcaagcgctatctgccggagagccaataccgcctatatgcgcagacttatgcaagcggcgattacaccagcctgtgggcggcggtgttcaccgcctgcgagctgttccggctgaccgcgggggaggtgggcgcgtattttgcgtttgcctacgacgagcgggaggaccagaacatgacggcctatctgctcgccgtcaaaacacagtgggaacaagccggccccccttgaaagggagcgcgaataagaagaccgcatccgttaagcgacggatgcggtctttttgtcgttatagggcggccatggcggcgttcagggccgtccggggatcccccgacggctcggtggggtaggggtcgcccagggtggtgaaaaagtattcggcgtcgtaccggctgtaatccgccaccggccggccggtcagcagggagatgcgcagcaggcggatgtacgattcccagcgaggccggtagaaatccccgagcaggccgctccattcccgggcggcgtagtcccgcaggccgatggccccctgccggtcgccccaaagggtcagcagggtacgggcctgccactcgaaataggctttctcctccggggtgcggccgcaggccttcgccctctccagccacgggcccagcagcatgtgccggtcggtggacaccagcgcctcctgcaccgggtagagggccagaaatgcgtcggcgcaggcgtcgaaggcggcaacgtcctgatcctggaaggccttctgcagcccttccacatagccccaggccttgttagccagggcctggcggacgaagtcgatgacgtccagccgatagggctcgccctcggccaaggcctcccagccctccagcagcaggcggcaggcgccctccagccgccgggtatcgtagttgaaggtgggcaggctgtaggaggacaccatgtccaccgtcagggaggggcgggtgcagaaggcggattcccggggagaaacggaggtgtcggccagatacacctcgtttttcaggatgtgccatccttccagcacggagggcgggcaggcgccgtatcgctgggtcaggcaggcctccagccaggcatcctcctcaaagggggcttgccgcagggccagatcggccacggcatcgaagaggatttcgtcggtttccaccccttccggcagcagggcgacacccaccatggagcaggcgggatcggcggcgtagcggtgcggctcccccagcagcttgcggagattgccgcgggtgacccgctggccgccgaagttattgacgcagccgtacagccagggatagccggcgaaatcgtcgccgccgtcggcgcagtcctcggcccgcagattgccgatgaggacgttttccggggagagggcgcgcagcagctcccggctgggattgctctgccagccttggaggaaccagaccgggctgtcggacacccggcccatctgccggtagcagccccgggcgtaggccgccatatccacgccggcggcgttgcccccttcatggaagggatcggcggcgaaatagtggacgtccccgccgaacagctcccgctggatatcgtaaaaatcggcggcgatgccgtcgaaagccggatctgcgggcaggaggatggaggggcggggaaaatcgcaccacagcccctgatccagcggatgggatccgggatggcgctccccgaagtcgggcggcaccatgcccgcgtagccgggcaggacgaggccggcgccgaaggagaggagataggcgttgattttccgggacagggcgcagcggttttcgtaccaggcggcgggggccgggccgccccaggaggtgaggttcatcatgcactgccaggggaaaaaggccgggccggccacgtattcccgagcctcccgctcggtatagccgtggcgctgcagcagggcgagccagaccgcctcatgccccaccggattgagcactaggttgtagccggaaagcatcatccaatcaagaaacggctcccactgttcccaatcccagaaagcgaaggtgtagccataggtgcagaagttgagaaaataccggtacaaaaaggcgctggtttcctcctgcgcgccgcccaccggcggcggggaggggggaagattcagccgccgggtcagggggccgacatagctgccgcagcggttcttcagataccagtaaaaggcgctggcggccgccgtgccggaggtcgcctccaacagaatgccgtcctcccgatcggtcagacgataccgatcctcgccgggatgcgcctcgggcagcgggcggacggtgaaccgggcggcgtacgcctcgccggcgatccgccggatgaggccgcgcactgcctgttcctccaggtgagcggggatattcttggccttgacgcgggcggcggcctctctggccgcgtggggagagtccataaaacctgcctccttgctattgatttcctaataatggcttccaagctggttgtatcacattcaaacggcggatgcaatggcatttttttacggtatgttggctttttacgatgggagggacgataaccgcccgtttcaagcaaacaacacaaaaaatcaaaatggatataaaaaggttgatatttctttcttaaaacccaatggtatactgtaaatagtgaacaaaaagcttggaggcgacggccatgaaaaggcggagaaccgtgctgaccctggcgtgtgcggcggccttgctgctgcaggtattcctgcctggcggggcgccgctgctgcgcgttcagggagaaggcgcggccggcggacaggaggggggcgcttccctgtccgagaagggcgatacatatgccgcgtatctggcgcggtacgccgacgcggcccggccccggctgccggaggatatccgccgggcggcgggggattttcaggccatcgagccggagggcggctacgaggtgctgtccggctatgctggacgggatcaggcgctgctggtgcagagcgggctgcaatatgtggattatgcgctggaggtgccccaggcggggctgtataacctgctggtggagcaccaccccatggacaccgacagcaagcggtatgaactgggggtgcagataaacggcgaaaccccgttctcccaggcgtcgagcctgaccatctccaacacctacgagccggcgggtcaggcggtcatcaccgacagcagcggcgatcagttcgccgccaaccgggcgataaggcaggactggacggacagccggctgaccaatcccgacggggactacgacgatccgctgctgttttatcttcggcagggaaccaacgtcgtgaggctgatcttctccgcgtccgacgctctggtactgggcggtgtccgggtttgtgaggaggaggcccctccgtcctatgcggcctaccgggcgcagcagcccggcagggacacgggtaaggcattgatccagacggaggcggaggccgccacgctgcagtccgactccaccctgcggcccgagtccgatcggacggatcgcgctacctctccttatagtgcgaagaatatgctcatcaacatcatcggcaccacctggagcgcccacgggcaatggctggagtggacgataaaggtcgaggaaagcgggtattaccgcctgtccttccgctaccagcaggaggcgctcaaggggctgccggtggggcggcggctgtccattgacggcgcggtgccctttgccgaggccgcctgcctgcgcttcccctacaccagccggtgggatttgctcactgcggcggacggggagggggagccctatctgttctacctgccggcgggcacccataccctgcgtctggaagcggtgctgggagagctggctcccattatccggcagctgaacgacgtgatctacagcctaaaccagtggtaccggaaaatcatcatgatcacctccacctcggcggacaaataccgggactataacctggatagggaaatccccggcctgctggaggggctgaccgactgcgcgaaccggctgcgggacggctacaatgccatctgcgccgtcgcggggggcgaggcggcggaatgcgccatcctgatgaccaccgtgcggcagctggagagcttcgtcagcgagccgcggaccatcccgtaccgcatcacctcctttcaaagcaacatcggcagcgtctccgcatgggtgctggatatccgcaaccagccgctgatgctggactatttcctgctgtggcaggagggggcggcgctccccaaaacgacgtccaatctatgggacagcatcgcgcacagcacgtccctgttcttttattcctttgtccaggattacaacgggttttcggccaaggaggcggacaaaagcatttctctctggctgggcaccgggcgggatcaggccgaggtgctctggaaaatgaccaccgacctgttcacccccaagagcggcatccatgtaaacatcaagctggtcagcgccaccatggtggaggcgttcctgtcaggtaacacgccggatgtggccatcaacaccacccgggacaccccggtgaatctggcggtgcgaagcgcgctgctggatttggcggccttcccggacttcgaggatgtgaccggctggttccagccgggggccctgacgccgtattccttccagaactcggtctacggcctgccggacacccagaccttcaacatgctgttttaccgcaaggacatattcgaggagctggggctgacggtgccccagacctgggacgatttcatcgagacggccagccagctgcatctatataagctggaggccggcatcccggtgaccagcgtcgcctcggcggcgtcggcagcgggcgacgccagcatgtattataccctgctgatgcagaacggggggacggtgttctccgacgacctgtctcgcaccttgctggattccgacccgtcccagaaggcgttttcgctgtggacggatttgtataccaaggtaggactgccggtcagctacgatttcttcaaccgcttccgcagcggcgaggtgcccatggccgtggtggcctataacaactataaccagctggcctccgctgcccccgagctgcgcggcctgtgggagatggcgcccattcccggcacccggcagtccgacggcaccatcagccgtgtccagtccgcgtcgggtacggcggcggtcatcctcagttcgacctccaaaccggaagaggcctggtcgttcatcaaatggtgggcgggcgcgcaggcgcagggccgctacgcgggtgatttggaatcgaaaatcggggtcatcgcccgggtgccagtggccaataaggacgccttcggcgccctggactgggatccgaagaccgccggcctgctggcggagcaatgggctcaggtgcgggagatcccccaggtgccgggcaactattacctggacagggatctcattaacgccttccgcgacgtggtgtacaacgggcggaattccctggaggccattcaggagtacggcaggcgaatcaacggggaaatcgcccggaagagggaggaattcggccttgcgtaacgataaaccggccaaggtgccccttctcaaggacttgaaggccaaccgggatttgtatctgatgatgttgccctttttcctgctctttttcttgatgatcctgctgccggtgctggtggcgacggtgctcagcttcagctactacaatatgttcgagacaccctccttcatcgggctgaagaattacatcaacctctttatccacgatgagattttcggcatcgccatgcgcaacaccctgctgctgtccctcctgaccggcccggtcagctacctgctctgcttcgggctggcgtggctgattaacgagttcggcaacgggctgcgggtgctgctgaccttcttcttttatgcgccggccctggcgggctcgtcggtgttcttcatctggcagtttttattcagcggggacgcccacgggttcatcaacggggcgctgatgaatatcgggcttatcaaggaaccgattcagtggctgaccgacccggcctacaatttcggggtgctggtgctggtgcagctgtggatgtgcctgggcaccgggttcctggcctttatcgccggcttcaagggcatcgatacctccttgtatgaggcgggcagcatcgacggggtgcgcaaccggctgcaggagctgttttacatcaccctgcccatgatgaagccccagctgctgttcggcgcggtgatgcagatttcggcgtcgttttccgtcagcactctgtccacccagctcttcggcgccaacagcaccaactattcggcccacaccatcgtgctgcacatgatggattacggcaccgtccggtacgagatgggctatgcctgtgcggtggcggtggtgctgttcatgatgatgctgattttcaaaaccctggtgggcttcgttctgcggtatgtcagcagcgattaagtgaggaggcacgcgtatgcgcaagctgtttcggttcaaacgactgcgccgcggcggacgaagccgcgtggggaacgcggcgctgttcgtggtgatgatcgccctgagcgtgctgatgatcgcgccgctggtttactcggtgatcaattccttcaagccgctggatgagcttttcgcctatccgccccgcttcttcgtggtgcggccgacgatggagaactactccatgctgttcaagctgatggccaatatgcgggtgccgttttcccggtatctgttcaacagcgccttcattacggcgctgaccacggtggccagcgtcgtcatcgcctccatggcggcgtatccgctggccaagtataagctgcggctgggctggctgttcgacctggtggtgctgaccctgctgttcaacggcacggtgctggcgctgccccaatacgtcatcatggcccgcctgcatctcatcaataccatgctggtgtatatcattcccaacctggcggcgccgctcgggctgttcctgatgaagcagttcatggagcgcatccccatgccgcttatcgagtctgcccgcatcgacggcgcgacccagttccagatttttttccggattgttatgccccaggtcaagccggcctggatgaccctgaccctgttcacgttccagagcgtttgggcccagcagccgctgaacatggtgtttgacgagaatctcaagctgctcaacatggccttcaccaacgtgattgcggcgggcatctcccggatgggcccctccatggcctcggcggtggtgctgatgctgccgcttatcgtggtgtttctcgtcacccagagcaacgtcattgagaccatgagcgcgtcggggatcaaggaatgacggggcctatccactccatttcagcaaaagaacgggggtttatgatgaggaacactgcctcagcccatcgcttttggggacgaatgtgcctgtgcttgctggcgttctgctgcctgctggcggccggcgcccccgcggccggggcgttatcctatcaatacgatcgcaaggacaaggccgtgccggcgccggacgggtacgcctgcgtgcggcaggcacgcagtgatcaggcggaaaagggcgccaactgggatcccaccgatttgttcatcgacgaggacgggcttatcaacgtcctggattcggacatggggcggatccacgtctatgaccgggaactgcattacctgtccaccctgagctttaccgaggagggggcggaagccttcctgatggggatttccggcctgtacgtggacgggaagggggacgacaagacctattacgtggcggatccggaacgggagcgggtgttcatcgccgacgcgaagggggccatcgtccgggaggttctccggccggacaccgagcttatcgatcagagcgtcaccttcgcccccaccaaggtgcagctagacaaaaacggcaatctctatgtgctggttccgggcatctatatgggcgcctgcgtgttttccgccaaggatgatttcgcctttctgacctttatcggcagcaacccggtggaggccaccgccttcctgttggcggattatttctggaagcaggtactcaaccagaatcaaatcgacagcatgaaacggtacgtgccggtttcctttgaaaacttcaccctggatgccgaaggatacctgtacacggtgaccaacaaaacctccctgggcacccagttcaccgatgaaatcaagaaattcaacaccaacagcctcaacatcctgccccaccaggattacggggatctggaactgggcaagaccaacgacattctgcaggatacctcctatgtggatatcgccgtaaacgagggcggctatatggccgccctggacgccaacctctgccgggtggcggtgttcaatcaaaacggcgaccggctgttcaccttcggggagcggaacaacacggtgggcggcttcgataccctgaccgccctggacgtgttcggcagcgatatctatgtcctcgatcagaattacgagacgatttccctgttccggcccaccgcctacggacgggatgtgctggctgcggcggatttgttcggccaggggcattacacagaggcggagccgctttggcggaaggtcatcggacagaacggcgggttctccctggcctatgtcgggctgggcaaggcgctgctggagcagggggatttccagggggccatggaatatttccgccagggcaacgaccgggacggatactcccaagccttttcccagtaccgggcccaggggatgcagacggttttcgtcgggattttcgccgcggttttcctcctgttcatcctgctgctggtggcggaacgccgcctgaaggtgcgcagcaactatctggttaatcccatacataagagcctggccggcaaggtgcggtataccctgttccaccccggggagggcggctacgtgctggcccgccataccgatgtgaaaaaaacggggattttcagtctctgcgtcctcggcgtctggtttttcgcgtcggtcgtcgactggcagtacagcggcttcattttcaacccgaacaatcccgaggagttcgaggtgctgttccatctgctgaaaaccttcggcctgttcgccctgtgggtggtcgccggctggttcgtttccaacctgatggacagcagcgcgcgccttaccgatttgacggtggtcagcgctacggccctcctgccctatatcacgggggtgctgctgcacacggcggccagcaacctgctggccaaggaggagggcggcttcctgacggcggtgcaggtcattctcatcctctggtcggcggcgattctcatcggcggcttccgggagattcatgagatgtccttccggggtgccctgctgtccatcctgttcacgctgctggggattctgctgatcctgttcatggccctgctgctgtggagtttgttccagcaggtgttcgtattcttcgcccagctttgggatgaaattatcaaaatgatcgggtagcgccgtgggaagggagaggatgcgtatggaacacaatcgaatccgcgccggcgcccggcggctgctggcgctgagctgcgcggccgcggcggttctgctgttcggcagcggggcggcggggcagacccagacccccgcgctttcctacggcgaacccgtcgcctccggagaggaggcggtgctgcgggatccgtccggcgcgctggagctgcgggctgatctgctgaccggacgggtcacggtgcaagacgagcggacgggtactctttgggccagcaatccggagaagccggaggaggacatcatcgcctacggcatcaaccagagccggattcagtcccagctgctggtcacctataaaggcgcctccaacaccatggaggagaccaatgacaaggaggcggccggtgaggggaacaagtccatcgcggcctaccgggaaggggacaccctaaccctggtctatacctttgaggagctgggctttgtcgttccgctgcagtaccggctgtcggaggggcggatgaccgcgtcggtgccggcggcgggtatccgggagaccaagggcaacatcctggccgccctgaccatcctgccgttcttcggcgccggctccacgacggagtccgggtatctgctggtaccggacggctccggcgccctgatgaatttcaacaacgggcgcaccaacgagggacgcctgaccctggacaccctgtacggcgaccggtcggtgaccgacgataaacggccccccgcgacccagccggtgctgctgccgggcttcggcatctgccgggggacggcgcagccgggggatacggcggggactgcggcgctgttcgcctatgccaccgacggggcggccgccggccagattaccctgaacacggccggacgggaaaccggtcagaattacatctattacaccttcctgcaccgcaacaacgcggtggagatgctgctggaccgcacctacgcggccaaggccaaactgatttgcgacaccgctgacaccggcgcgcagagctacgagatgagctacttcttcatggaaccgggtaaaaccgacctggccgggatggcggatgcctgctcctggcagctgttcggccgtgaggcctcgtccgcggccggggacgtgccgctgttcctcgatatgttcatgggggtgcgggtgcaggagaattttctgggtatcccctaccacacgctgcggccgctgaccaccttctcccaggcccaggccatttccgacgacctgcggggcgcgggggttgccagcgtcaccatgcggctgcgggggatcgacgccgacggcgcgtacgccggccggctggataccgcgtttcgggccgaccgcaagctgggcggtctggacggtttcctaacactgcaggagacggaaaacaccgccgtttacccggacatggagctgaccatgttcaccaaaagcggcggcggggtatccgccctgttcgacgcgtccagcgacctgctgcgggacacggtgcgtctgccagccttccgcctggcggcgggagacgtgaacgacgaactgcccgcccgccggctgctcaaggcctttcaaatcccgacggtcaccgccaagctggcggccagcctgaacaaagccggggtgaaaaacgccgcggccgcctccctggggctggccccctatccggactatagccggtctcacgtcacctccatcggcgaaacggcccgtctgctcgagcaggcagcggaagccctcggcaagcggggcggtttgatgctcgaggcgccgggcgcggcggttctgccccatgccgatacgctgctgcatatgcccaccacctcttccggctataacctgaccgacaccaccgtgcccttcctgcagatggtgctgtccggctacctgccctacgcggcggaggacgccgggagctccggcgatcgggaaaccatgctgctgcgcagcgtcgagggcgggtcggcgctgtccttttctctgatggacgcggattacagccaggtgaccgatacgcccctcgactcgctgtacgccgctacctatgcgcagcagcgggagaccattctcgcgctgtacgcccgcagccgggcggcgctgtccggcgtgtacggccggcggattacaggctatcggattctggcggccgctcaacgggaaaccgtctacgacgacgggacggccgttttggtcaattacgcggatcagccggtggtctggcggggccaaacggtgccggcgcgctcctgcgccgcggcgaaggagggctgacggatgacaatgaaaaaatgcgggcgttcccggttggtccggtgcctgttcggctcgaccatcgagcagaggcgggattccatgggctacgtgttcatcctgccttgggttatcggccttatctggtttttcctttggcccatggcccaggcggcgctgtatgtctgcaacgaggtgaccttgggggacaacggcctggtgtacaacttcgtgggcacaaaaatcatccggcaggtctttttcgacaatcccaacaatttccgcaccattctggagagcaccggcaccaccctgataaacgcgctgctcatcgtggcgttcagcctgattgtggcggtgctgctgaataagccttttcggggccgggggttctgccgggcgctggtggcgctgccgattatcgtgtcttccggcgtgctgatgcaggtgttcaaggaggatttgttccgctcctccatcgaaagcgcggccgaggccaccgttttccagggggtggtgctggaggattccctggccaagctggggctgggcgacgagttcatcggggtgctgaccggcctggtgtccagtatcctcgacctcatctggcagtcggggattcagatccttctgtttgtgggcggcatgcagtccatttccagctcgctgctggaggtgtgcgaggtggagggggcctctccctggcagaccttctggaaggtgaccttcccgatgatttcccccttcctgctgctaaatttcgtgtacgcggttatcgacagcttcaccatttcgtccaatccggtcatcgtgcagatcaacgactatttccataacattctgtacgccaacgcgaccaccatgtcggtggcctatttcctcctggtgctggtggtggtggggctggccacggccatcatttcccgccgggtgttctacatcgagaaatagagaggaagggattggcgtgaaacagtagaggcttcacgcggaaatttgtcctttccggttgaagcaaccgaacctccggcttcgccggaaccgatagaattccagtttctgcgaaaggatgagtgatctctatggagagacaggcggtgaagatcgtccggccggccaggaaggggaaagcgccgcttcgccgccggctgggcggcctgctgttctccctgttccgtttctgcgtgctgttcggcctgatttttctgattgtgtatcccttcctgttcatgttcgtcacggccttccgtggctcggaggatttgaacgatcccagcgtggtctggatcacccggcattatacgctcaacaattttcacaactttctccagatggtggattttggcgacatgatgggcaacacggtggtcatcagcctgtccagcgcggtgctgcagaccttcgtgtgcggcctggcgggctacggcttcgcccgcttccgcttccggggccggaacctgctgttcggcctgctcctgttcaccatcatcgtgccgcctcaaacctacatctcgcagctgttcggcttgttccggttttttaagccgctcttcctgacgccgctgctcgagctgtttaccggctcgtcctatgtcaatctaatcaacacgccgctgccctttattctgccggcgctgttcggcatggggtttcgatcgggcctgttcatctacatttaccggcagttcttccggggactgcccggggatctggaggacgcggcccggatcgacggcagcaacgcgtttcggacgtatttcggtatcatgctgcccaacgcccgccccgccatcgtcacggtgttcatgctgtccctcgtgtggaactggaacgattccttcacccagaccttcttgagcatgtcccgcaacacggtggcggtgtatctgacccagatccgcggcatgctcggcaccatgaccgccgaatatgaggatcccacctatctgtacatcctgattcaggcgggggcgctgctgtgcatctttccgctgctgctgctgttcctgttcggacagcgtttcttcaccgagagcatcgaacgcaccggtattgtcggttaacccgggcttccgggttttattgaatatggagattgggaggtaaagacatgaaaaaaacgatagcgcttctgtcggccgtgatggccctgctgttggcggcgggctgctcgaacgatggaaaaacaaccccctcgtcggtgccggaaaccagcgaaaccggcggcacgggcactgcggaaagcagcgcgtccgtcaccgatcccagcgagacgggcaccgacgccagcaccaccgagaccggcggcagccaggccgtcacgaccaccagtaaaaacggcggcggaaaggccaccgccgcgaccaccaagaggaacacccccgtcaccactctgccgggcggcggctggtccagcacggtgaaaaactacacgccggaacagctggacgcaccttacgccctgcgcaagaacatcaagggggaagtgctggcgtatacgcccttcaccggcgaggtgttcgacaaggccaaggccatgttcgaaaaggcctatccgggagccacggtgaaattcatcgtgaccaacaacgtatcccgcaacgaaaagctgcagatgctggtcaattccaagagctctcccgactatgtgtattccacctatcaggactatcccctgcgggccatcaaagggatgacccagcccatcgacaaatacattcaggatcatcccggccaaagcgccattctgatgaacaacttctgcgcctataagggcgagcggtatgcggtcatccaggagacgccgccctccgtgatgttctataacacggcgctgttccagcgggcgggcaagaagacccccaccgagtattacaaagaggggaactggacgtgggataccttccggtccctggccaagcagatgaccgacgcgcagaacggcatctacggcttcgccaccgatttggattatttcttcccgctgtccgtgggtgaggatgtcatcaagttcaagaacggcaaggccgagctcaacctggtcaacaaccaaaaatatatcgccgcccacaactttttcaccgacatgatcaacaaggacaaatccgcctatcccacccactggcaagccaatgagcagtttaccagcggcaaatgcgccatggtgctgcccaacggcgattttaaaaccatctgcaagaccgcgggtatgaagacctatgcgctcgtccccttcccccgccgggacaaaaacagtccctactgcggcatggtgggcggcctgaacggcggcttcagcatcgccaaaggcgccaagaacatcgagggcggcatggccttcggcgagatgatgatcaacgcccagctggagctgaccggcaacatggtccatggccgggaggaataccagttcagcaaggagaccaatatgcagtacgtggtgccctggttctacggctatgggctggagggcctgtacttccaggacctgtgcggctgggcccgtaccggcaccaaggatctgaacaccctgatcaatgaaaacgcctcgctgctgtccgccaagctgaaggaactgcaataatcaaaaaaccgggagagaggaccgtgtcccttctcccggtttccctatttatcccgcgccgccgatggtcaaggcgtttttatacgactgcgttcgtctttcctcctccaggctgcgcgcgagtccctgctcggtggtagggtcgtaccgtgcctgcttcaaggcctttagaatgtcccgcgtcggcagtcccgccggccgggtgccgggatacacggcgccgacgctgctcagaaacggcacccgcccgattccggtcttttcggcatagccgggatcggcgttcagctggtcgcgggcgtcggggaacagcaccagtccgccgtcgtccgtctccagccagtggcggttttgcagccccagcatggcggtgcggctgccttccttcgaaagcaaatacctggccaggcggacggtgtcccccagatcggcgtccgccgcgcacagataggtggcgtagcagccgtagggggaggcggccatggcatagccgccttcccggaaccgcggccagacggggcgatagggcgtgtccccgtgctcccggctgtaccgttcgagccgcgaagcgctgccgatgtaaaacagcgcctcgctctgcagaagatggtcgagggaagcgtcggggatttccagcgcgccggaggtgccccccgcgcggcccagccgctccagaaagcgcagcagcgcctcctcgccggccggatcctctgtgcccggtgtcaagccgaaccaatgccgcagcgtctggatgccgcctccgttcgctccgaagacgaccggcagatagttggtcttggtctcatcccgattgcggccgtaccaggagtcgtacgcctccagggcggcgaagaatccgttttcatcggtcagtccgggcaggcccagggtgtcgaacatatcctcgcggacatagatgccctccgccggcaccgccgcctccccgccgaagcccccgggcagatacagcagcgagccgtccgcctgctggtgaaaggcccgaatgtcctccggaagctgctcaaagagagcgggaatggcgtcgatccgacggacagacgaaatgtgctccatctggaggcagacggggtccgccgtggccagggtgatgagcgccggccgctccccggattgcagccgcttgagcagagtcggggcgtagttttcgttgagaggctcaagcacaggggtcacgccggccttttccgagatggccgccagcacctcatagctttcccattccttcgggtaggcggcgccctccagggcgagaagccagcggatttccttctcagggggcgcgggggcggaggagacggcctcccgcttgggggagcagcccgccgcgagcagggtcaggcaaacggccgccgccagggctttatggttgttcttcatattgtttccaccttatggccgggatgacgatacgacagagggtgccgccctgcgcgggcgcgatgtgcacgccgtaagtcttcccgaaatagagctgaatccggctgtgtacgttggccagcccgtatccccggctgggatcggtcaaaacctcctcagcggtccggggatcgatgggcgggccggtgttaaagacgcggataacgatgcacgtttccccgttttcctcctcaaaggcggcgctgatacggatcgcccccttcacacccgttgtcttttccaccccatgctccagcgcgttttccaccaccggctggaggatcaggttgacgctttcgtagtcgtagatccgctcgtccacatcgtaaaacacgtcgaaggaatagtcgtggagatcctcctgcagctggagataggcgcggatgtttttgaactcgtccttcatgcggatcttggtgttgcccttgttcaggcaggtgcggtagaaatcggacagattggtggcgaaggcgctggtcttttcgtccccgttcataatggcccgccagttgatggtgtccatgcagttgtaaagaaaatgggggttgatctgcgcctgcagaatcttcagctgcgcttcttgctgcttgagctcgcttttgtatttgtcgatgatcaaggtgttgagccggttgaccatctcgttaaaaatataggcgagatggccgatctcgtcgccgttttccttgacgtccaggttgacctccagcttgccggtacccacccgaatcatttcttggctgatgccgttgagccgcctggaaaagctcagggaaatcaaaatggaaaagaccgataccagcaggatgcagaccagggcgatgctcaggctgaacaggatgatgtccgaaaaccccgcgaacaggatatccttggggatgagcaggcagacgttccagttcaaatccgccatatagtacggttcatacaagaaggtgtgccgcatcagcttgatttcccggctgtcggaaaaccgcagggtgtgggggaagatttccccgtacgacttgtttagacgggcctcggtgtacaggttgaccccgtcgccgtcctgcatgataaaggcgtattccttcagcccctcgatatgcagctctccgaacaggcggcgggagtcgagctgcagcacgatggtgccaatcacgccgccggaataggggttgacgatttgacggtacaggcaggtggtctcctggctgctggtcagggccacgagggaatccgccgtgtagcacaccttcccggcctcccgctccagcgcggtgtagtcgccctccagggcgctgataacggtgtctctgccgggcagcaggatgcagacgttggtgacctcgcccgccaccttttgcagctgccgcagcaaatccccgcaggtgccctccaactccttgcggaacagcgtggagcggggggccagggccaaccgctgcagaaaagcgtcctgataggccacctcgtcgaggctggtctccagcagcagctttttggcccggatctgcccggccatgttgcgggtggattcgtacagccgcacgctgacctgatcgtacatgatgtccgccgataccatgtagctcaaggtgctcagggccacgatcgggatgatggagaccgtcagatacagaatcagcagcttctgccacagcttccgttcggaaaaccaggccttaaaggcgcggatcacagcttgcttccccggaactgggcgggcgtcatgccgcagtgattcttgaaaatctgacagaaatacgacacgttggagtaacccaccatctcgcagatgcttcccaccttcagcttggtggtgcgcagcaggcttttggccatgtccacccggtaagaggtcaggtatttgatgaaattcatgcccgtggtttttttgaacagatagctcaggtagcaggtggacagatacacgtcggaggccacgctttccaagctgatgttgttcatgtattcccggtgaatgatgtccagggcctgatcgatggcaacggtctcctcgtcctgctcggaatactgcttgaccacccggatgcagatgcttttcaaatcctcgatgctggcgctgtgctcaatttcggtgatgtattgcagcagggtcgcgttatagtcgggaagggtttcgctcagtccggcccgcaccaactcgctgctgatgaatttggccagggaggtgggcacgtatatttgtttttgcaaatcgctgaaaacggcctcgatttccttttcggcgtgctgcagctccttgcgggtcaccagctttccgatttccgccgctttttccagatagcgccgcacgtcgatgttggcctcctccgccttctgacgggtcatgtccactatggtgctgcgcgccagatagaatttggaggagctgaggctctccatccggttgtacagctcgctgagctgggcgatcgtttcgaaatggccgccgtaaatcaggatgtaccggttgtccccccgttcggccagaatctgctccagacggcgcaggcagtcccgtgcctcctcctctgtgggggcgatgaaggcgcactggtattcgttgagggggatgtcgatgaaccgcgtttcctcatcgtcctcgccgcgcagagacaggtgatgcaggttgaagaagggctccacaaaatccagcagcaggacatcgccggccttctcgtcgccgcttaggccgctgccgtccggattgcacagaccggtcatcacattgaagtacatgctgatgatccgggtgcgttctccctctcgtaatacacggatcattgatttgatacatgatagaaatttatcaacttttataggcttgagcaggtatttggtgacccccagatccatggccttgtgggcgtaatcaaagttttcgtaggagctgaagatgatgaccttcaggtcgggctgaatttttttggcctcgacaatgagctcatggcctgtcatttccggcattttgacatcggtcagcagaatatgtacgggcatgcggcgcaggatttccagcgcttccgagccggaagccgccggaatcgggtggagatccagtccatactgctgaatgagatagcagaccccattgcgatccagttccttgtcatccacaatcaggatactgtagcgtgcgcagtttccggccattgaggctcctcctttaatttttaaactctttctttaattttaaccaatttttcggaattttcctagaggcattcttttgaacctgtaccggatttttttggtaattgtcacttttttacgctgacggatcggctgttccggcgggggaggggtgaacgggcgcctgcatccggggaactggggggatatatagtaagaatctataaaaataaatccgctttcagaaaataaatgccgaaaaaatacaacataaatcacaaagatatttgcttgtttctggaaacgcaattctttatagtggagataacggcaaacggcggacagccggatgtccgcgtttaccctccctgcgcggaggggccggcccgcaaaaagcccgtcagggacaattccatggcgataaagaggaaaagggggatacatttgaagaaggcacacaccttaatccactgcgcggccctatgcatggcactgctgacggcggtgcaggttcttcccgggaacgggacactaaacgcgcgggcgcaggacacggtgactgcggacgcgccgggagatggagacgccatgcacgtgatgaatctggccggggacggccagctgaccgacaatctgctgggagcctggggcggctggagcaagggctacactcgggagaccattgaggcccacgacggcacccagaaatccgtttacaaagcggtggcgcccaccgccgccgacgaggcgggccttacgcaaaccctgtccgcgcccgcccagggcacctatgtgctcagcggctggagcaaagcgcagaatgttatccgcggcgtgggcaccgagtatttttcctattgcctggcggtctacgtcgggtacacggacggcacggcccagtggttctacaccgggttttccctgggcacccacgattgggagttccgggacacctcctttaccctgcaaaagcccgccaaaagcatgaacgtctacgcgttcctgcgcaacccgatctacggtaccgcctggtttgacgacatcaccctgcgcatggggcagccggacgccacctccaccttccagaacctgccggtgcaggtgctgcagaccgcgccggagcagggcacgaagaaaaccctgaaaaccaaggacggcctcgagctgggtttgggcgactcggtggtgacctccctgaagatcgacgggacggagctggccaacaacgcctactccggcttcctggtgcgggacgtggccgcggcggagaacaccggcgtgtacgcgttctctcccgcctccgggtccgcacccgccgcctttaagggcagccaggcgtccctcggtctgtccctgaacgccgattataccgccgaggacgatcacattgccgtgagcggcgtcattaaggacgccaccgcggcggcggacggccgggccgtccagctgtcctacgccctgccggtcaccgcgtccggctggaaatggggcgtcagcatccaaaagcaccgcgatattgccgccggtggcgtaggagatatttataaagagctgggcgagggcgaaatgtcggtggtggactgggacagcatgcctcggtccatgtatcccacctcggtgatatacaacgaggatctgggcctggccatcgccgtgagcatggacttccccgcctattacgagctggagtacaacggtagcaccggacagtatgtgctgacctatcacctgggtatcgtccccgaagcgccagacgcagcccggttctctttcatcatctataagctggacgatcccgcctggggcttccgggcggcgatggagaaatacacgcgcattttccccgagtattacgaggtacgggagaccgatcagggcatgtgggtggcctggacccagaccagcaacgtgcctcagcccgaggacttcaacttcaagttcaaggaggaaggcggcgagtacttccgcatcgagggcttctatgaaatggagcacggcatcaagggctatcagtatatcgagccgggcgactggtggctgaagaacatgcccagcttccccgacgacgccatggtgcaggccgcggtgaaggagcaggcgggcaaggacgtcagcgttcaggccacccggcaggccatcgccaccgccatctgccaggggctgaaccctctggggaaaaccaactggacgccggtgaacgtgccttgggcccccaacggcgcgcagattcatatcaacgccaatcccaagctgccgggcgcctacaatttctataacctgtatctcagcaaggagcagcaggatctgctgttcgatccccttcagtgcaccaccgtgccttttgacggcatttatctagatgagctcagcggctggtggaacggcaacgccaactttaacaaggcccattaccagtacaccaccgtgcccctgacctactcgccctattacaagaagcccatgctgcaccgggcgtccaacacgtgggaattcgtcaagcagctgaacaccgatctgcacgccaggggcaagaccatctttgccaacaaatgccccgataagaccagcttctacaccccgcttatcgacgccatgggtaccgaaatgaccgccctgaacggcagcatctacgcgcctcagagcatcgaatccatgagtatgtggagaaccctgtcctaccagaagcctttctgcatcctgctgagcaacgactataccaagttcgatcacgatatgatggagaaatacttccagcgctgcctcgccttcggcatcttccccagcccccaggcgaactacagcgacgacctgcagtattggaccagccgggagctgttctacgagcgggatcgggatatcttccagacctatatgccggtgctcaagaccgtggcggaggccggctgggagccggtgacccgcgccgtgtccgataacagccgcgtcctggtggagcggttcggagccaacgcggacgagggcgtctatttcaccctgtttaacgacaccgccgagtcccaggccgtcaagctggatgtcgcgctggatgccttcggcctgaaggacggctgcgccgtccgggagctggtgtccgggcagcaggtgaccctggcggacggcgtgtacagcgtgtcgctcgagccgagccagaccgtcgtgctggccatcaacaacccctccaaaccgccggaggaaagctcgcagccgcaggaagaaagccagacgccttcttccgctgaagactcttccgccagcggcgccgtttccgacagcggcggtgccgacaccggcgaaggccccgtggcccttctcagcgccgccggcttggccgtcctggccgccggcacggccctgactgttcgcaaaaaaggaaataaaggctgacggcctttatgaatggaaatcacagcctggaggctgtcgcatcaaccgtgctcatacatttggtaaggaggatgaacgatgaaacatctgcgcaaaggcgtatccgtcgcatcggttctgtgcctgctgctgtctctggccgccgtctggatggcgccgggggccctggcggcgccccgctcccgcagcgcggtgaaagccacggtggaaaacgggacacagtacaagctaagcggctaccgggacgctctcgatgacctgaccaggacggtgggagatacaggcgcggcgattcccgcctcgctgaattcccagtggcaggggcaggtgaaaaagaagggcgccgccgactggacggcggtcaacaaagccaagtacgatccttctcaatatgtttacgcctggattgacgggtatgaatggggcggtgtataccctggcgtttccatgtacgctccggcggataagggaaaggatttgactgtgctgtgccccatgaaaaccgataacggcgtcttcgacgactgtgcggcttgggctttcaccgctcccaccgccggcatctacgagtttgctcattcccccgacgaggactccgccgcttatgccgaaacgcaattctttatggtacgcggcggcagtcataaggtgggtgtgcgcattaccatcgacggcgcggccatctggcccaaggcggatgacgcctccctcaccctcaacgacggctgggctgaggtgaccaacgccaagccggtggccattccggccctatccgatttggaaatgagcgccggtcaggtgctgcgggtggaatgccgcgccctgacagccgagcctgtgacggggggccagccttggctctttaacacggccgtcagcgccaatatgacctacgtaaagcccatcccgccggacgatgtggcgccggaattcccggccgacgcggcggtttccaacaacgccgacgccgcgaccgataccaccctcaccctgtcctggccccaggccaccgacaataagacggcccagaacaacctgacctataaggtgttctacgccgccagcgccatcgaaagcctggacggcctgaccggcgtcgcggctcccggcaaaacctccctgaccctgtccggcctggaaggctctaccgattattatgtggcagtggccgcctacgacgcggcgggcaattacgtcctgctggccggcggccccttccgcacccaggatccgccccccaagaacctggcggaatacgaggtgtacgactatttcgacgctatccaggccaaacttgacgccttgccctccgcccagccgcagaacgaggacatcgcggcgctggagagcgcttccccctggcgggtgcagctgcagaaggacggtgtttggagctacgtgaccaaggccacccgcgcggacgactacctgtatatcaaaaccccggatatcgactggggcggcaatttccccggcgcgagcttctacgccccgaaaaaggaaaagaacatcgatcgctactacctgtcccagctgatgccggtcaatccggtggacgcagtcaaccccgatttcaaggtcaacgcggctatggtgttcaccgcccccaaggctggtatctacaccttccgccgcggcagcgacgataagtcccagtcttatgaaatgacgcagtatttccgcagctgcgacagcggcggcggggatcaggaaatgggcgtgcgcattaccgtgggcggcgccaccatctggcccaaggcggaggacgccgaggaaggcggcttcgccattaaggagggctgggcggtcattcccggctatgacgccaccgatacgagcaaatgggttcccgttcccactctctccggtctggagatgaaggcgggcgaagtcctgcgggtggaatccaaggtcttcacccagggcgaaatgccctggttccaaaagatcacggcctgcgtggctatggatctcaacgccgagctgggcccggatacccaggcaccggtcttctcctccggcgttctggaaaaggcctccgcctccggcaccagcctgaccctaaaatggccggcggccgctgatgaccagacggctgccaacggcatcaagtataccgtttttgtagggaaggaagccatcaccgccgacagcctgcccacggagggcggcgtcaccgtgaccggcgaaaccaccgccatcctgggcgatttgaccgcggcgacggattattacgccgctgtggtggccgaggacgcggcggggaacaagagcgttctcagcggcggccccttcgccaccctgggcgaaacggaggagcccgatccggacgatcccgacgatccggtcatcgccgatcccaccgcgcccctgacgcccaatatggacgcgaacagcgcgggcatcatcagcagcgccaccggccgggtgcaaatcggctggaacgccgcccccggcatcagccactaccgcgcctacctgttcgccaaaaccgacgctggctatacgctggatcaaaagagcgattccctgccctattcggcggcggaatacaccttcgaaaacctggaaagcaaaaactatgaaatccaggttgtcggctacaacatgcagggagacgccgtgtcggtgtacccggttatcgcgctgaatatgagcgggatcggcggcggagaagacagctccgacggcggcgtccataccggccctggcggatccactcccgtcaccggcgagcgggtggccgtcacggtcttcctgctggccgccgcctccggcgccgtggttctggccagattccggaagccgaagcacaccgccagctaatctcaacatacagaaaagagaggggcgaagcaccatgcggtgcttcgcccctcagcttgtcgaaaaactatttgccaaatagcaaaatgtacaaatggggaatcctgatgcggcgcgttacgccgcaccggggaacccccggcgagggttcccgccgtaaaactgtcccctgcacgacgcatgcgtcgtactaggacggtttacacccctcctgcgctcttttggggaagacatttcggcctctgaggaggacggcgggggcttcgcccctcgcccccaccgccttttgaaaaaggcgggcgaaaacttttgtggctttttgttgtccggccttacagcccgaattccccttcgtagctgatgaggctcgcatccatcacgccgtccacggacagcatcttgtcgagcacggccatctcgtcctccttgagggacacctccagcgtgatttccgcgccggctcttgtcatggtgcgtgatttcagccgatgcttgggcagcagcttgagcgccttgcccacgttggcggatttctccgggtcgtaccgcaccacgagcagatagggcgccttgctcttaccgtggattttggacaccacgaagtagagcagccccacgccgaagcaggcacagcccccgatgatgtactgcccggcgccggccatgatgccgcaggtaatggaccagaacatgaacaccgtgtccaccggatccttgatggccgtgcggaagcggacgatggaaagggcgcccaccatgccgagggacagggccagattggaggagatggtgcggatgaccagcgccgtgaccatggccagcagcaccagggagaaggcgtaccccttggagaacagtacgccccggaacgtctgcttatacaccagcaggatgaacaggcccatgaggaaagccacgcccagcgaccagagcatatccgcgatggaaatcccctgggcgaattgatcaagcacgctctttttgataacgtcaaacatggtgaataccctccattattgaaactgtctgcacagttcgtattttgaaatggcgctgcgcacggcgttgaccggtcgcagcagctgccgcaccgcaaaggggagctgctcgtcgaacttgacctccaggatcacccggtcaccgggcaggacgggcacggtgaacaagtcccggctgaacaaatcggtgccatagttgccggtatgtaaatcgagatcgaacgtgatgcgcacatcctcgaacaaatacgcctcccggtcgtagtccacaaggaccgtcggcctgagcaggcgggtccggcttttcaggtagaagcttttcagcaacgggtccccggtgtcgtataaaaaccagagatcgccggccagcaggcgatcggtctgctcccgcgtgaggggcgcggcctgcttcttggtcatctggttgtgcttctgcttcgattccagccggatgaagctgtcatccatgtcgtagaagcggatccggaacttctcccgggtctccaccccctccaccttgtccagcagtccgctctgcttgtaatcgtcgaaatacaggctgcggattttgtagcggccgtcgctttgcacggcatggctgtccgtctccagcatggcggccagccgcccgcgcaggaattggtatcccgcccagctgatgaaatatttgttctcgtgccgaaatccatccataacggcgcctcctcactgtccggcaaagcagtcatccagctgctgcgccgtatattgaaatttcgcggccacccgcgcgtccaggaactcctgcttgagggtcgccggccgcttttctacgaacgagcggatcccggctaccatcgcgttccaatcgcggctgatttcccaccgggcataattgcgggcgatttccggcttgagcttcccgctcagttcgtcgatgcgggccagcaccttgtcggtgcggaaggtgttctgcatgttgaacttcagccgttccaagaacagctgccgaaactccccgctggtcagcagcccgttgataagggcggtgctgaaattctgcccggtgccggtgcctgccggatcgatgagaaaccatacccagttttcgccggccgcgtaggtgatgtcggtgtcgtagaggatccaccgccacttgttgtccgtttcgctggagcggtaccagcggatgttccctgaatccttgttgccgcaatacatctcggtgatgagataatccgcaaagctggtcacgtccatccggtcgcagacataccggtacgcctctgcgttcagcgggctgtgcgccttgatgtagctgagcagcgcctgataatcctcgctgcccgcgcccacccggccgttggccaccagcaggttgacgctgtcttccgacacgttggcgttggcggcgataaacccttcgttgattttctcccggatatagtggatgccccagtaggccccgttgatatacagcaccaccggccggtatgcctggttggcgagaatatccgtgtcgtccgccagactggtggtcaggacatccttcatgatggccttggcccagtcctgcccgccggagcggagcagcagattatcgaacacccgattgtcccggctggcaaacaccggatacaccagctggctcgcgccgtagctgtcccggaacttcagcgtcagggactttttctgataggtgcgggacatgccgccgaaaatccgtaccccacaccctacggaaaagcccgcttcctccttgtcctgggggaacagctccacatgggccgcccgctcccaggcgtaaccgtgctgcatgaagttggccccctcgttggggtaatcggcctgccccttacccacggcgtagatgcccttttcataaccgaacagcccgtccggcggcgatgtgaggctgaccacgtccatctgatggttttcgttgacgatatagctggccgtgaggatgtcgctgggcaccgcccctggcttgaccgctatcgcacgcacggccgtggtagcggtcacggcgaaagggccggtgtaccgggccgacgccgtggtgggggccgaaccgtccagggtatagtataccgcaccctccccgctcagggcaacctccactttctgcacgccgttgtaaatcccgggcttggtggccgccaccggggtggctgtccggtcccgctcgcctccgccgccgttggccgcgcccagggtcggcttggtgaacagccagaaccccgcgcctcccgtctcccggcgccccttgctgcagtcgatggggatacccgacaggctgacgccgtccaccatgtttccgtccttgtacagcgccaccgcgccgtccccaccgttcagcttgaagttcgcctggatgtaccgcgtgccgccgtccaccgtctccccggtgcagtaaatcaccagatacccgcctgcgggcaccgccttgtcgggcagggcgaaccgcccggg

SEQ ID NO: 2648 - DNA, 10636 bp, Unknown
  16S sequences of unknown bacteria
cttagttcaattccgttatttttaatagaatattttgataaagatttttggaatgaagtgattacataatataaaagtgctgtcagagtttttgaactttgacagcacttttatatgaaagctcaatcttttatttttcaggaattacaatcttaccagcaactgcacaggctgcagcagtgactggggaagcgaggaagatctccactttggaggttcccatacgtcccaggaagttacggttattggtggctaccacacgctcgccatcggtcagaataccgccagtacggccgcagcacagaccgcagcttgggtgagtgatcatggcaccggcttctgccagtgtaagaagtgttccgtctgccagagcctgctcgtagatcttacgactggcaggagtcacgatcagcttggtgaacggagccacttttttgcctttcagtacagcggctgcgcgctgaagatcctccagacggccattggtacaggaaccaataaacacctgatcaatggaagtgccaataagctcgctgactggatgaatgttgtccacctgagacgggcaggcaagtactggtacgaaatcttctgcattgtagtggatggtgcggacatattcagcatccggatcgccaaccagagaacgttctgcatcggtaagctcgatctggcagtattctgcggtcttttcatccggtgtgaacagggcgcattttgctcctgcctcgatggccatatttgacatggtcatacggctggcaacactcatattttccacagtatcaccggaaaactccagagcctgataggttgcaccgtctgcgcggagatcgccgatcaaagtcaggatgatatctttggaagttacattagaaggaagctttccttcaatcaccactttgatcgtctgcggtactttgatccacatagtgccagttccaagaatacttgccatctcggtgtaaccgataccggaagaaaaagcgcccacacagccgtatgtggtggtgtggctgtcggttccgaatacaatatttcctggctttacatacagggcttcagtcataagctgatggcagatgccatcgcttctgtgtacatgtttcatgccgtatttctcggcaaatgcatttccaacatgaaaatgtctggtgtcatccacctgactggcaggaaccagatgatcatagatcagaacaaccttgtccgggtcccacagctttttgaatcccatctcttcgaacttttcagctacaaacggaataaagatgtcgtggatcatgacgcggtccacatttacggttacaatgtcgccagggcgaacagcgtggcccacattgcggcttacaattttttcaataatagtctgtcccatctgctagtcctccagtccgttcagctggcgcatggcttttaccagtccgcctgcattgataatgtccatcaggttctgtggaagagatgcgatcgggtactcttttccgtcacagacaactttttttccaacggtaacctcgatcttttcaccttcggtcactacatcgcgaagatcggggttctcaatgagcagaagcccgttgttgatggaattgcggaagaagatccgggcaaaggatctggcaatcacgcagcggatgcccagtgccttgatgatctccggcgcctgttccctggaagaaccacagccgaaattcttgccggctacgatgatatcgccaggcttgatctgggatgcgagttccgggcggagcggagaaaatgcgtaaggggtcatgtcctgcactgttttcaatgccaggtactcggtgggaatgatgatgtcagtatcaatatcatcgcccagaacccatacttttccagtaaatgtttcactcatatatgaagtctccttttatgtgtcgttaaatattcattcagagccgtaattgtccggtacaaattagtccagcatatctgcagtcgcgatttcccctttgatagcggatgcggtaactgtagcggcacttgccagatagacgaaggaatcacggtgtcctgcacgccccttgaaattacgggtgccggtactgatcaaagtctctccttctccgatgacgccctggcagcttccccagcagacactgcagttggggttcataacaatggctccggattccatgaagatctggagcagcccttcttttaaggcttctttataaacggcctgactggcaggaaccaccagaaaacggaccagaggatgcacttttctgccttttaagagagcagctcccacacggagatcttcgatacgtccattgttgcaggaacctaagaatgcctcatcaatcttgataccggcagcttctctggcagggcatacattatccacaaaatgaggttttgccacaataggagtgatggtagacaggtcaatatcataagtggctgcaaagacagcatcctcatcgctgacaaagcatgctttcggctcgcggccatgttcatgaagataatcaagagcaatatcatccacttccataagagcagtcttggcaccggcttccacacagaggttgcagatggcaatacggtcactcatggtcagtgtttttaagccttcacctgcaaattccatagctttgtagttggctccgttggcaccaatcttgccgatgatggtaaggatcagatctctggcatagacaccttccggcagctttccggtcaggttaaaacgcagagtctccggaaccagaacccaggatttaccggtgaccatggcatagaggtagtcagtacatccaacaccggtaccaaatgcacccagtgcaccataagcgcaagtgtggctgtcagcaccgaagatcagctcgccggggcatacatgattctccatcatgatctgatggcagacaccttgtccctcatagaaggtaatgccgtgttctttggcaaaatcacgcatttttttctgggaagcagcagtctttgggctgtcagacggaacgttgtgatccacgatccagaccagcttgctcacatcggcaatgtgtggatgctttaattttgtattgtacatatcaatggtcagatgtgtggttccgtcgttgctcatgaggcgatccacttctacggtatgaatatcacccgggcgaacggattccacaccagcagcccgtgcaataattttctcggcaatggtcattcccatattagtcttcctccttattcaatgatgcgatcaggccaccctgatccagaatgttctgcatgtatggcggaagcttggtgcagacaaattcctgcccgtttacggaagcaatgccgtctgtcagggacagctccatctggtcaccgtcctcgatgtggtcatacaggtctttgcagacaatgaccggaagaccgatgttgatggagttgcggtaaaaaatacgtgcaaatgattttgcaatcacagcgcgtacacctaaagcttttaagacacttggagcctgctctctggaagaaccgcagccgaaattctcagcagcgactacaaaatcaccgggttttactttggatgcaaaatccggatcgagagactcgaaggtatgtgttttcatttcgtcgatcgtcgggaaaagcagatactgagatgcaatgatctggtcggtatccacatccgtgtgaaatttgaatattgttcccatttctggaaatcctccttgatgtataggtatttgtctggtgtttgcgaatgacactggtcagacatatttataaaaagcggacaactgagcattcagcagtccgcttttttgacgtaaattattcttctttggtatcttcagcagcaggcggatccggaagataaatgtgcacatttttgatccggttcttttccacagaatcaaccacgaggcggatgccgttttctgtagtgacttcatcaccgacttcagggagacggtcaagaagttcaataataataccgccgacggagtcgtaatcttcggattccagagaaagtcctttttcctccagatccagtgcatcgttcaggtcatccagattcatggctcctgcaacaatgtattcctgatcagagagacgggtgacaagctgttcctcatcctcgtcatactcatcacggatgtcgccaacgatctcttccagaagatcctcgatggtgaccattccggctgtaacgccgtattcatccaatacgattgccatattggtagaacttttccgcatctcaaagagaaggtcggaagtttttttatgttcatgtgtgaaaagcacacttcgcaggacatttcttgcattaaaatgctctttgtcatcgtagatcagcaggtcttttacattgatcattccaatcacgttatctgtgctgtcttcgtagactggataacgggtgtatttatcctcactgtacagatcgatgacttcctgataggtataattcacattcataaaactcatgtccactttggggaccatgatgtcctttgcggtggcgtctccaaaatcaaaaacattgttgatcatgtcgcgttcttctggctcgatcacgccgtcctcgtggctgacatccacgattgtacggatatcttcctcagtatagctgtcagattttgcattgggatccactctcataagaaagagaataccaagggacagcttgttcatgatgaagatcagcggggtggcaatcaccatccatgtgtagatgatctttgcgttggcgagagcaatcttttcggcattgatcgtagcacaggtcttaggtgtgatctcaccgaataccagtacgatcagtgtgagaacaccagtagaaatgccggctgccacagcggcaagtccggttccggccagccacctggtcgtgaggatcgttgccagggaggaagcggaaatgttcacaatgttgtttccaattaaaatagcactcagcatctttccctgatcctcaatcaccttgccaagaatcaccgcctggggattcccgtcttcgatgagattacggatacggatcttgctgactgtcagcagtgcagtctccgacgatgaaaaatatgcggagagaccaatcagggcaatcaatatcagcacctgtatggcgtcacttgaatccaaagtaaattcactccttttaactaaatgtattgatgtacagttatcatctaatatacgataaatcaaaaaaaaatgcaataggcagagaacgaaacatgtgacatagaagctggtgtccacacataaaatgaactagcgaaagaaaggggagtgtgcatatgaaatatccttatacatatatcgatcaggctgtgcggatgctgaaagcattggttgcatcctacattgtgacaggacttctgcttctgctgaccgcaggacttttgtatcgctttgaattaagcgaaggaaaagtacggatcatgatcattgtgacctatattttatcctgctttgctggtggattcttaagtgggaaaatgatgaaaaacaagaagtttctttggggaattcttgtggggctcctgtattttgggatcatgctgctcgtctcccttgccgtgaaccgacagcttgaccagactgccgccaacttcgtgacgactatggtgctgtgtatccttggcggcatgctaggtgggatgtgcgcgtaaagcatgagccgtgcgacagacggcaaataacgccgcattgggcttgcacaatagcggcgttgattgacggatggcatagggcgaagcccgcgagtttggaaccgaaggtttcaaacttgcgcacggctcatggaatatttattttgcaatcacgaattctgttccattcagactttcggtggtaaggatatctagcagacggaacaccggtccggtgggatgtgttctgccgcattcccatgcttctacagtctttggggagactcccatatatgctgcaaatacactttgtgtcatgcctgctttcatacggatatctcggatttctttattagagtattttttgacaggggtaatcatgtaagtctttgtccgagctgtgccatttcctttttcataactgattgcttcttccaagccttgctttaaatcatcaaataatgaactcataaaatcatctcctatttttggctgcttcttcttttaatgatttgaccaattttttaagaacatttttttcttcagtagtaagattttcctgctcttttttctcgaaggcagttatcagataagttacctcatattcagcgaaatccgtgtaacagactcggatacttccgctttttccctgatttctaagaggaaatcttactttgcgaatgccgccggtaccttccatcacgggtcctgattcgggatcttttagcaacattatttgtaaggactgaagttcagagtcaccaagaccaatttccctccagcgtttagtgaataaaggtacttcaataaaagttcttatcatttgtttttgacctttcttttaatatattacaccctattatgtagggtgtcaattatcgagaaaataattcaaatacataagtgattcagtaaataatttagttttgcaaattacaatgggggtaatttaagaatttaagacaaatataatattatcaacagttattttttgaattacacctatgttatttccaaggtgcaaaaattgcactttcaaaattctgaaagtgcaatttttgagattattcatttaagaaaatcccttacacctgcacttccccagcgagaatcttcttataatcttcatagtttttctggagcaactccggtgtattaagctgatatggacatttcttcatgcactggttgcaatggagacatccttcgatcttcttcatattttcctgccaggtctcgttaagccaagccttggaaggtgcacggcggaccatgagggacatgcgggcacagttgttgatcaggatccctgccggacatggcatgcagtatccgcagccgcggcagaagtcgccgatcagttcacttttctctttctcgatgaaagagaggatctcatcatccagagcgggtggctgatccatgtaggaaagccattcttccagctcagacatcttctggatgccccagatcggaagcacatggtcaaattgagtcatgaaagcaaaagcagctctggagttattgatcagacctccggcaagacctttcatggcaatgaatcccatattgtgttccttacacatgcggacaagctccagttctttttcggtggaaatatagctaaaaggaaactgtaaagtttcatataatccagattcaatacattctttggcgacgtcaagcttatgggaagtgacaccgatatgacggatctttccttgttcttttgcttccagcatacattcgtacatgtcagtcccgtcgcctgggcggtagcattgatccacacagtggaattgatagatgtccagatagtcagtcttcagcagacgtaaggatgtgtccagctgttctttgaaatctttcggggtgcgtcccatggtcttgctggcaatgaagatcttgtcacgcatgccttcaaatgcatgtcccagtttttcttcgctgtcgctataagctctggcggtgtcaaagaaacgcatgccgccctcataagctctgcgcaggatctggactgccgtgtccatgttcactcgctgtaccgggagtgcgccaaatgcattttgcggaacagtgatgcctgtggttcctaaagtaatcattttcataatgaagtcctccatatgaattttcttttgttccaggttattcggtcattgggcaatgccgggtgactatttggatttgtaatataacatacagtggcaaaatccttcgaaatccggatcattgatctgatcccggaattctttgcacatacatttgttttcttcggtacgttctaatctgcagggacagtagccgccggtgcgctttaagccttcttttacggtcttgaccacttcagcgtcaggatttagtgtgatttttttcatgatgtacctcctttgttctgactacttatcatattagaataaatgataaataactgtcaagtagccgtattatgcttatgcaaataaaacatacctgccgggtatgcgatgttgcaaccaaagtgggaatatgatacactatctagtatgcgtgcaggcagattcagggggaagaccatatgtctgcaaaaacacagattatacatgaaaagaggaagggtatctatgaacaaacatgagcataaaaggaagtacattttccggcaagatcggattcgtgctgtcagcggcaggtgcatccgtgggactgggaaatatatggagatttccatatcttgcagcaaaatatggcggaggaatctttctgctgatttatatcattctggcactgacctttggatacagcatgatcattgctgagacatccatcggtcgtatgacgaagaaaagtccggtgggagcatttcagtcctttggtaaatctggctggctgtcagccggcggatggatcaatgcgatcataccgatcctgatcgttccttattattcagttatcggcggctgggttatcaaatatctggtggaatatatatgtggaaatgctcatcaggtagcagaggatggatatttctctgcatttatttccaatggcgtgtccacagagctttgcttcattgtgtttgcactgatcacactggtcatcatttatgcgggagtccgcaatggaattgaaagggtatccaaatttatgatgccgattcttgtggtattgtctgtgatcattgcggcatattctgtgacaagaccgggtgctattgaaggtgtgaaatatttcctggtgccaaatgtggataatttctcctggatgacggtggtatccgccatgggacagatgttctactccctgtccattgccatgggtattttgatcacttttggatcttacatgaaaaaagacatctctattgaagattccacacagaacgtggaaatctttgatacagccattgcgatcatggcaggcttgatgatcattccggcggtatttgcattttccggcggagatccggatacgctgcaggcaggtccggcgctgatgttcattaccattccgaaggtatttgaaaatatggggctgggaactcttgtcggagtaatgttttttatactggtgctgtttgctgcactgacaagttctattgcactgacagaaagtgcagtatctaccttcgaggatgaactgaaatggagccgtaaaaaatcaacggtattgatcggagtgatcgtgatcgcgcttggaagcctttcttctcttggatatggtccgctggcaggggtgacgatcatcggtatgcagttcctggatttctttgattttctgaccaactctgtgatgatgccgatcgcggctattgcgatctgtctgctggtgtccagagtcattggtgtgaatggcatcgaagaagaagtgatgcatggagaaaataaattccgcagaaaagctatttttaattttatgatcaaatatctgtgtccgatctttgcagcgatcattctggcaagctctgtggcaaatgcatttggctggatctccatgtaaggcttttgggaaaaggaagatggagcatgaatattgcggtttattgtggatctgtttctggaaataaggagcagtttgaaaaaggcgccagagcactggggacatggatcggtgagcatggacatacactggtatatggtggtgcacagggggggctgatgggaatcgttgcagatgcggttctggagcatggtggaacggtgacgggtgtcctcccggcggtggaatccatccagaagaggcgtcatccgggtctgacagcttatattgagacaaaagatatggcggaacggaaggcgaagatgatcgaactttcggatgcctatgtggcattgccgggcggaccgggaacgctggatgagatcaccgatgtgatctctctggcaagacttggcatcgaggacaagccatgtgtgcttctggatatcgacggattctaccagccattgaagaccgtctttgatcagatgctggaagtcggctttgctgagaaaggggacttccggaaggttctgatcagtgaagatttaggtaagatcggcgtatttcttgaaaaataatggagcgccatgtcttacgatggattgaacaaaataagtgagaaataacggactttatcatcgtcgttccagcagatcatgcctgctgcatctgccatcatctgggcgttgatgcagtaagcagacaggcaggaattacccttgtaaggtccggcagtcataagcagaaggtcgtcgtatccggcggcctttattttatccgcaagttcttctgtcagatgattgtgggcaagctttgcctttttgtaatccatctgtccttcctgagtagtctgaaggaccaacgtttttttataagtcagggcatgggctttcatttcttccacggtgccgctctccggcggacaagccgggttcaggtcgtagtttccacagagattttcttcacagaagacccggtactccggtataaatacaagctctgctgtatcaatgacagcagcacctgaaaatccaagttctttggctgcttctatcata

SEQ ID NO: 2649 - DNA, 9351 bp, Unknown
  16S sequences of unknown bacteria
cggacatttaagaagatataaaaagatagtcaaaaagacatatataatttatttaaatatttcttacccgatccatcagcgttaaggctccagtataagaatgtctttcctgtcggcgctgtaattccggtgattgccttcacatctgcttttgcgccctgtgcatatgctctgctatcttctacggtacctgttccgccattcgcatcataggttaccttaaaggtgcccttactgatcacacgtgcatacagatctacatcggaatagatttttgtactgaaatcccacggtctgtaagagccgtctgcatttcttgtaaaccatccaagaaattcctgtgtctccgcatcatacgaaatcgccggaagcagattctcatctaccgattcgccatatgctgcctctatatttacacccgtcgtatcttccgggcttctgtgtgccgttacccggacttccggtgccttccagcctgcatatactactatattcgttgccggcattgtcgtattgaaatcaaatttcttcgtacactccggatcgctgtaccagccatcaaacgtataatttgcatctaccgtagccggtctggttgtcggtgtaaactttgcatcatatccgttcagggatgcggtatattttaccgtttcatgatgctgaacttctccaccgtttgagtaatccaaccggaatgactgcagtttacttgcaatataaacaggtttctcgtatgctttctctccatccttgcaagaggtcttatttttccagaattctgcagttgtcggctccccactaatccttccagtcgtatacttatacaaatcatagcccgcatacttctggtgaattgtcaatgtgccaccgccggtagtaactgtgtttaccagtttgaaactgccgtctgcctgctcgttgtaataataaaccttaccaccggtttcttttcttgttccgtaaaaattacaggtcgtcacaacgccatctgaactaatatttccttcattatttgcataacctgccgtcttgaaatcataggaggtcagaagaatacaaccggttcctccatccttatgagcgtaccaataataatcggtccaccattctccttccttcaggttcgccccgtacagaccggtgacggtctgcttgatattccattttctattttctcttacataataattcaccgtacacagaacacgatcataatatacattcataatcgtgctgccgtccgctgcgatcgttacgctcttgctgttcacggtattctttgtaaatccattgtagcttttcgtgatcgaagatgcgttcaccgtcgttcccggtctgcctgttttggtttctgttgctacatatgcgtaggtcttctgtgcattcgtcgcgttcttatcatcggtcaccttctgctgccagtagatcacgcgatactgtgcacttgaattttctttccattttgcttttacggaaacgctcgtagtcgtactagtgactctggcgtcaccgtcataccagccctcaaagctgtagccgtttttcgtcgtctgtgctgacaatgctgcggtctctcctgccggataaaattccggtgcaacatagcttccgccatctgaatcataggtcacccaaaagcctttttctacctttgcatataaatcgacattggagtctgacagtgtcacactctcgactgcacttccggaataataccatccggtaatggattcttctgctcccactgcaaaggtcacatccgatgtcgtgatcttagcgccagcgattccttccttcgtcgcgactaccgcgccatccggattatggaagaagacataatatacttcctcaaatctggccttgacgatgatctcttccgtttcggatactgtgctaaccgtaccaaaggttaccggtgtctctcctacgtaccatccgatgaaccgatgtccttctttcaccggagctgccggctcggacaatgtatcaccactcgtaatgtactgtgtgtcaacggttgcgccgtctgcgttaaatacatacgttgcgatgcttgtctccggctccagaatgcttgccggagcgactgctccgcctgcggtcgggaatatccaggtagaaaagctatccgcagtaaaacccaggcttgcacctgactggctcgctgtaaccgcctgcacggcaccaccgtctgacacatgataaacatttgaaatctctgcgtccgcgatttccgctgctctaaaggatacctttactgcacttgtcggctggatttcttttccgtcatatcggaatgtgatatccacgcccatcaggtcggatacatcctgacctgccgccgctgccgccgctgcaagactctccgccgatggtgctgcaaggactgtttttgttccttccgggaataccccttccggagcctggatagctactgcaattccattgcagacaccattgtaatgaaactccggcatcaaaatttcttcttcgttctccgattctgtctcgctttccacctctgtacccggctccgtctcatactcggactctgcctccgtactttcttctgttgcgttctctgttccgacctcagtttctgcctcccggtcttcctccgtctcagactcatccgtcggcgcttcggtctgtccttcgtcagcttccgtctccactgcagcatctgcagtctcctgtggaacaatcttatatgtaactactacctttacatttcttgtcacagctgcgatttcataagcgccctgtgcattcttcggaagctccgcattcgtatcggcataacggacatgctctacctcatagccatcgtttgcgtggatcgtaaatgcaaaggatccgttttcttttacttccttataataattggaaacagatgcgatcggaccggattcgccccggacataaatgcttccgtaatccgtcgcatgcgcttcaaaggtcacgcgatacgtgatctcctgcgctgctttttcctgcgctgcggtctcttctgcagccttttgtgctgccgccgcttcctgcgctgctgcttcctccgcggccttctgcgctgcggtctcttctgcagccttttgtgctgcggcctcttctgcagccttttgtgccgctgcatcttccgctgccttctgtgctgcggccgcttcctctgctgccttctgcgctgccgctgcttcctctgcagccttctgtgctgcggccgcttcctctgctgccttctgcgctgtcgctgcttcctctgcagccttctgtgctgccgccgcttcctgcgctgctttttcctctgcagccttctgtgctgccgccgcttcctgcgctgctttttcctctgcagccttctgtgctgccgccgcttcctgcgctgctttttcctctgcagccttctgtgctgccgccgcttcctgcgctgctttttcctctgcagccttctgtgctgccgccgcttcctgcgctgctttttcttctgctgccttctgcgccgctgccgcttcctgcgctgctttttcttctgctgccttctgcgccgctgccgcttcctgcgctgctttttcttctgctgccttctgcgccgctgccgcttcctgcgctgctttttcttctgctgccttccgcgctgcggcctcttctgccgcggcctgctcctgcattgccacgattgccgcatcatccgtcagatcacctgcggttgtcaccagacagctctgtccgatcatggccactgccaatagcgcagacaccatctttttgagcctcaacctcttcctcatagtgtatcctccttttcttcagtgagatagcctcccgttctttttcataatcatttcactgatttttacttgatattaattctatcatatgacggtcacatttcggtcacatttgcgttttttcaaaaaaaaatatcccatcttttttatgatgggatattttccgtcattccgtttaattttctgactattttattacggttaaacacactatttggcggttttctatagaagcatctggtacgtaaagcggacattcgcaatccatccctgcagctctgctgacagggcctagcttcgctacttgctcatgaacacagtcgcttcgcgcacttgaagcgggggaatgcttatctgcgttcacatccttactctgcgacttccaccagctcgatccggaaattcagctccttgcctgccatctcgtgatttgcgtcaaacgtgatcgttgtctcatcacggctcaccacggccaccggaaatggctgaccactcgcgctcgtcaggtagacctgctgtcctgcctcaagattctctgctcccggcaactgagcaagcggtactgtaaatacgttctccggatccggcatgccgtatgcctcttccggcatcagatggatatcgatgatctgtccgacttccatgtcctttaccgcttcatcaaaccctttgatcatcatgcctgcaccacagacaaactccagcggctcaccgcgatcataagaagaatcaaattttgttccatcattgaaggttcctgtgtagtgtactttgcatgtcttgtttacgttgctcatatgctttctcctatcttttcattatttcattccagacatctgttctatcataagataaaagcaacattttttcaagaatgccccggcatttttacttcgcaagcaccgcggacagctgtatttccttctctgctccatccaggtcaaagcttccgccatcttccacggtcatatgcacttcatacagggtatccgcttccagtgtatccggtaaactgccatcttctgtctggatatgccacagctcagatggtacctcctgcagcatgccatctgctccatatgcatacaggtgcaggtcgcctgccgtgccggacaatccgttcatccgcagcgccactgtcgtattcggatgtacattttccaccgtcaccgtattcagccagcccatgactgttccaacgcctcctgctgcctcaaagtcttcctgactcagcacattccgactggccagatcgaggtcagcttcccggtatggcatctccggcagataaacgaagcgatcctgcaaccgcagaagctccagatagccggtcggacagtacagcgcgtttccgctgtcaccagcgtacatgccgatcgccatattgttatagccgtatttattcgcgatatccatcgtaaatacggtctcgccggtctcgaaatccagcacaatatactgccacatgccggtattgatatcctgtacatagccgtagatgtagccggtcgccgtcgaaagcttcatcatcgacgtatcccgcagatcatctctgcaccagatgctcttcatctcatagccgttctctgtcttcacggtgtcgacacgctctacccccggcataatcatcttattgccctgcctcagccagttgatatcgtaaatattcgcatagctctgaatcgaggaatcgctgtcggcattgccaagctctgcgcttcccgcgccgaaccagttgcacacgaccgtgctgacggtgccttccccgtcgtcgtatacgatcgcggagttttccaccgatacctgcactccctccggaagctcatcgagcaccggcaggcttgcgaccttctcaccggtcttcatatccagcgcaatcagattcaccggatcctgattgtccgtaaacatcacaagatccttcgtcagtgatggggagcatccgctgccccaggccaggccgcctccggtcgtctcatcgccctctttgctctccttcgccccgatgctctcataaggcgtgctccatgcgacctttacaccctcatctgcctgcagcagatagcagttctgattcgtcaggatcaccgcaccgtctgccgaagccgcaatgccattctccgcgccttcgcccggtgtcagctcctgtacaaataccgcatccgacagatttgtctcttctccgtttaagatggcatcaattgccgtccgtgaaatatagccgatcgcgccctgctgctgccggtccggataaatcctgaaccctccggtcgcaaaccacaggttcccctcatagtcaaatacgaccgccagcagattctgatccagcgtctttccgagcttctcttctgccgctgctttgatatcgatatccagcaccttttcaaattccggcagcacattgccatcctcatccgtcgctttcagcatcaggacatgattattactcgtcggacatacgatacggttgctctcatcaacaaacgagtacgagctctggatcacataatcgcccgtatcatgctgcttcggtgaaaaatatccttctgtcgtcgtctcatccgcattgatatcccgaatcgccagaccaccgagcagcggtacgatggcatgtccgtacgtatcaaagaaaatcgccggtgaagcgttcgcattgactttctcataggaaacattgatctccggataaatcgctaccggcaatactgaatcggtcgtgtctgtattgtaaccatcgtggtggatgtttgtatctccggatgccatatacggatttgcatcgactgctttttctgcaagtgcttttatcggcaatgcagacgccgcttctgcacttaccggaaggctgcacgccatcgcgcatacggaagcaatcgttgccagcatctttttatttttcttcatagttgttctcctttctgtgtcacaaacatcagctgaagctgatcgaaattgcacaccagctctggcgtgcattcgatttaactataaaaaaaagccgtccctttttcaatatatctggcacgaacggtaagaatccggcacaaatcgttacgtcctgtgatatactgaggatgttgatacgaaaaggaggatttttaagtatgaacattgctattgttgacgatatcgcagcggagcgtgccctgctgcgcagccgtctggaacgccagctgtccaggcgaaacatacaggcaaatctgctggagtacgacaccggcgaagcgtttctctcttcttgtgcaaagctgaggtttgcagttttatttctggatatttatatggatggggtaaatggcatcgagaccgcaaaacagtttcggagcatggacacacactgcctgctgatctttacgactacctccacagaccacgcgctggaaggcttccgtgtccgcgccatgcactatctggtcaagccatatacagaagagatgatttccgacctgatcgacgaaatccttgcccgccttccatccacggaaagatacatgacattgaagcttaacggcactgaggtgccgctccctttttccagctttatctacgcggaacatttttcccatatgatccacattcataccacgcaggacgctgtactgaccgtccgccagtccttccgggacttcacagctccgttaaaaacggacgaacgctttttcctctgcagccgcggaaccgtcgtgaacctggcgcacgccgtcgactttgacggaaccgtatttcagcttgatgacggcagtcgcgtctcggtcagccgggatcttagcaaatctgcgcggcagacgtttatgaagtttctgttcgaaaaggaggcaaaactatgaatgcgatcctgggcccgacgctggagctcaccgtcctgcttcccggcatgctgcttgcctatctcccggtgattccctgtctgaagcagtctccgcgaaggctggctgcatggctcgccccactgctccttgccctttgtattttgggcggcatgctctgccgtgcactggaatgtccgacacgcccggtgctttttgccctgttaccgcctgccatgatgctgtatcataagacacttcgcatttctctttggaaatcggtcagtatctttctggcggtctgtgcggtctttgcctgcgtcaacagcttctgccgcgcgatcaacgccgtgcttgctgccggtctgcctccttcccgggctgctctctggttccagcctgccgccgggattttatataatggcatctgtcttctgtttctgcttgccgcctggtatccggccacacactctgtccagatgatgatcgaggatcagaactttgctcacacctggtatattttctggattctgccgatgctctttatcggcctgaatatattcatggttccgacctgccacgatacactctatacgggccggattctgcagatctacatcgtgctcagcctgatccttctggtgattctcatcctgttctacgccatgtttctgctcatggcaaacagcctgaaccgaaacgccaggctgcagcaggcgaatcattttctcctgctgcagcagacgcggtacgacagcctccgcaccgccatcgaggaagccagacaggcgcgacatgatatgcgccatcattttcttcagttgtccgctctggccgaacagggcgacattgaaaaaataagaacgtatctcgccggtgctacgagtaaaattccgaacctcaccgttcctttttgtgaaaatcaggcggcagacagcgtggtaggctactactgtgcgcttgccgggcgggctcagattccgttttccgcacagattgacctgcccgcccggattcctgtggatgaaatcgacatgtgtctggtgctctccaatcttctggaaaatgcgctggaagcaagcctgcgcatggaaagcggccggtatatccgcgtggaggtatcctgtcattttacacacctgctcttaattcaggtcgaaaatgcgttcgccggaacgctgcaggagacaaacggcatcttccgctcctccaaacgcccggacgatggcatcggcatccagtctgtccgccggattgcagaaaaaaacggtggagactgcagcttcactcacgaagctggcgtcttcaccgcacggattatgctaaggtgtacctccatctgaatccgtcgtcaacagcatagtaaagaaatctatttaaaaattgccttcgccgtatcaatcggatgcccgattttattgtcaatgtccacttcattttcagagaaggtgctccctgcaaaatcaagcacctcatttccgggcaggctgtcgatgcagaccgccgtaccatttccggtaaacgtattggtgaacctcacatgacttaagtcacatgcttccagccgctttaagcggcagactgaatatcggcggatacgcctgtagcttaggagcacgcagttatgcgcagtttcatgccagatatggcatattcccacattacaggtagtccgctgtatatctgcctgcgtttatgctgcctgtaaaacctccatttgtaaatagagctccttcaggtccgcataaacacatgaggtt

SEQ ID NO: 2650 - DNA, 30235 bp, Unknown
  16S sequences of unknown bacteria
tgcgaactccctctttcaaaaatgggcaataaagggctttttcccggcgggtgagggaagcgaaccgaggccgaggacagcccgaagggctcccgcaggccgaagcttgggccgagagggagcgcgtgcccagtgggcacaactgccgtaggcagttagcgactggcaggcctgagcaaatacaagagccgggcacggcagtgcccggaacgccgatatttgcgaataacgcatagcggggcgggccgcaagagtcgccgtgccgctggctttctttggtactttctttcgcttcgaaagaaagtactgcccccctcggggcggcagcccaccaaccgcgccgtagtcggcgcgtcagaccctcagcgaggattccccttcggggaagttggcgtgcagcgacgcaagcggggggctttccgctcgccctctgcatcccttcggatcgcctaccaaagcaaaaaaacatcccgtaagatgcacctgcgcttccgcaccgtagtcggcgcgtcaggctccaccgaagattttttcggcaatgctatcgtacaccgcagtaagcaggggctttcctttgaattaacaaccagcacggcccgtttgttgtttgcccgaacgccttcagtgcgctgccaaaacggcaaattcattcccgcaccatcattggcatgttttcaggagaaaacttcgccctgcaaaacaaacatcccgttaaaattcagccagctccacttcgttcccgtgctcccgcacgatgcggatcaaatccgccgtgcgaagccagatcgtggcggtgttgtcgttgggatgaacgccgaccagcccgtccgccaaatcgcggtcgatgaaaagctttacccggcaagccgcatcgttcagcagccccaagggcgtgaccgcgccaggataaagccccagcagcgcctccaaatcctcggcggaagcaaaagtcagcggccgcgtaccgtgttcgcgccgaaacgctttcagatccacccgcttttcgccgaaaaccgttaaaaggtaataactgcgctgcttatcatcccgcacaaaaagatttttcgcgtcggcttccgggtgaggtaacggaatttccgccagctcggccatgttgtagacggccttgtgctccgtgatctcaaagggaatattctgggaatgcaaaaagtcgtaaattttctgcttgttcatgcaaaaagccccttccaaaatggaattgcggctattttatcacgaacgccgcgccaaggcaagaaacggcaaattccgcctgcgggaagtgacgaaaaaacttgacaaaccatttgaccaatcgtataatacaaaatggtcacgctacaaggaggatgctatggaactggatgtttcaaaaggctttttaaagcccgacgaggccttcccctttgaagcggaggtcgttctcccgccgcaggaggtgaacggcgaaaccgtttccttcgatccggtggcgctgcaaggcacctataccgtctacgacggtacggtcaagctggagggcgaactggaaacggccgctcacgcccggtgcgcgctgtgtatgcagcccgccgacttccccgttcatgtgaagttctccgaggacttccgcaaggacgcggacgaaatggaggaggaatccttccgcttcgagggcaagaaagtgccgttggatcacatgacgctgacgctggtcgtgctggagttgcccatgcgctttgagtgcagagagggctgccccggaagcgaggagctcaaggcgtggaacgaaaacaaccccgtaagctcgaacgacgcgggagcgtccactcagcaccccttcgaggcgttgcggagcttgctagaaccccgggagtaacccggaaaggccgtcctcaggatggcgcaggacgattcgaggaggtgtaacaatggctcttcccaagggaaaaatttccaaggctcgtggtcgcagccgtcgcgcaaactggaagctgaccctgcccggcatcgtcgaatgcccgcagtgccacgaaaagaagctcgcccaccgcgtgtgcaaaaactgcggctactataagggcgtgcaggtcatcgacatgaccgaaaagcaggaaaaggcctgatgacctcttccgctatcgctgaatagggctgctggatttccagacagccctatgattcttacccgaagaacgggaggagtaccctcatcagcgccatagagagagccgctcaccggctgaaaggcggcttggatgcagcttgaggggaaggtcgcccgggaggggacgggatgaaggggacaagcgtcccttagtttcgtcgtgggcgcacgttacagcgcacagaggcggtttttctgctgcagcaaaaagaccgcgaaataaggtggtaccacggagccgctccgtcctttgcacaggatggggcggcttttgtcgttgttggctggaactggacggacgttcagcctcggaaacggcgctcatgtgccgcagggttcggactgaaaaatccgcctgacccgcattccttcgaacacacaggcaaggacatggcaatggattggaaacattgccgccttcgcttgaactattccccggccggggcagcaccccaagagaaaggatggaagaacatggctgagaatcaggaattcaccatggaaaaggtgtacaatcctcagcagatcgaggataagctctataaaatgtgggaggacagcggcgcgttcgtggcgcaccgcgtggagggcaaaaagccctttaccatcgtcatgccgccgcccaacatcaccggccagctgcatatgggccatgccatggactgccttttgcaggatgcgccgattcgttaccaccgcatgaagggcgaccccaccctgtggctgcccggcacggaccacgcttccatcgccacggaggtgaaggtggtggacgccatggccaaagagggcctgaccaaggaaatggtggggcgcgagggctttttggagcgcgcgtgggcatggaaaaaggaatacggcggacggatcaaccgccagcagcgccgtctgggcgccagctgcgactggagccgggagcgcttcactatggacgagggctgcaatgaggccgtgcgcgaggtgttcgtgcgcctgtacgaaaaagggctgatctatcgcggcaaccgcattatcaactggtgccctgaatgccagaccgccctgtccgacgcggaagtggaatatgaggagcaggccagccatctgtggcacatccgctaccccggcgcggacggcagcgagggtgtaatcgtggcgaccactcgccccgagaccatgctgggcgataccggcgtggccgtgaaccccaacgacgagcgctacaccgatctggtgggcaaaaaggtcattctgccgctggtgaaccgggagatccccgtggtggccgacgattatgtggacatggagttcggcaccggcgcggtgaagatgacccccgctcacgaccccaacgactttgaggtgggcaagcgccacaatctggaggtcatccgcgtcaccaatgacgacggcaccatgaaccgcaatgcgggcaagttcgagggcatgaccgccatggaatgccgcgaagccgtggtgaaggagctgcaggagctgggcctgatggtgaagatcgaggactacacccacaacgtgggcacctgctaccgctgccatcacaccgtagaccccgtgaccagcacccagtggttcgtgaagatggagccgctggccaagcccgccatcgaggcggtgcgctccggcaaggtgcagttcgtgccggaacggttctccaagacctatttcaactggatggagaacatccgcgactggtgcatcagccgtcagctgtggtggggccatcggatccccgcctattactgcgatgaatgcggcgagaccgtcgtcagcaaggatgcgcctgaaaagtgccccaagtgcggctgcacccatctccatcaggacgaggatgtgctggacacgtggttctcttccgccctgtggcccttctccacgctgggctggcctcatgataccgaggatctgaaatacttctatcccaccagtatgctggtgaccggctatgacatcatcttcttctgggtagcccgaatgatcttctccggcatcgagcagatgggcgaaccgcccttccataccgtgctgattcacggtctggtgcgcgacgcgcagggccgcaagatgtccaagagcttgggcaacggcgtggatccgctggaaatcatcgataagtacggcgcggacgcgctgcgcttctcgctggccatgggcgtcagccccggaaacgacacccgttattccgatgaaaaggtggaaagcgcccggaatttcgccaacaaggtgtggaatgcttcccgcttcgtgctgatgaacacccagacccgggaaaccatcgaccccgccaagctgcttctgcccgatcagtggatcctgtcccggctgaaccgcaccatcgccgaggtgtccgcccacatggaggacggcgatttcggcatcgcggcccagaatatatacgacttcgcgtggagcgagttctgcgactggtatatcgagctgagcaagggccgcctgatgggcgaggacgaggagcagaagcagaatgtgcgcgcggtgctgctgtacgtgctggagggcctgctgaagctgctgcaccccttcatgcccttcctgaccgaggaagtgtaccagtacctgccggagcatgacggcatgctgatcctggctcattggcccgaggtcaagcccgaatacgacttccccagagaagcccggcagatggagggcctgatggaggtcatccgctccgtgcgcaacctgcgggcggagatgaacgtgcaggcaggcaagcgcacccatatcgtcctgatccctgaagagggctgggaagaaacgctggccatggccgaaccctacctgcagcgcatggcttacgccagcaatgtagagctgggcggcaaggacgcattggccggtcagaaggtggtcagcgccgtgtgcgccgcaggcgagatccgtattccgctgggcgatctggtggacatcgacaaggaaatcgcccgtctgaaaaaggagcagaagaatctgcagggcgagattgcccgggccaacggcaagctgaacaaccccggcttcctgagcaaggcccccgcccatctggtggagcaggagaaggaaaaactgaaggtgaacgaaagcaagctgcaggcgctggaagcccgcatcgccgacctgaaggcgggcgtctgatggaggttctgctgggaaccaccaacccttccaaggtgagcatgtttgagcgctggctggaaggcgaggacgttcattttctcaccttaagcgaggtcgcggttccgggtgaaccggaggagaccggaaaccgtccgggagaaaacgcccgccggaaggcggagtattacggacggtatgccgattacgtgatctgcaacgattccgggctgtatctgaccgggcttcccatggaggacgcccggcagcccggtctgcacatccgcacgccgggcggcgcggcgcaccggctggatgatgaagaaatgatcgcctattacgcagggctggcccattcgctgggcggatgggcgcaggcgtgctatctgagcggctacgcggtgaaaacgcccgaaaaggtgtttgtttatcaggagcggatggaagatcggacgcgcgatcttttttggttgacggatacgccctgcgtggaacggcaccccggctggccgctggattccctgtcctattacagcgaccgaaaaacatctttcctttcgcccaagccgccggtactatccggccccgaggacgatcgggaatggaaacgccttctggcgtttctgaaagaatctctggggcttcagccccggagcgaataaggagtacccatggaatttcaccatattcccgtcctgtttgacgaagtgatggaatggatgcagccccgtgccgacggcgtgtatgccgacggcacgctgggcggcggcggccacagcgagggcattctgcgcctgtccggcggcacggccacactgtacggcatcgaccgggacgaggacgcgatccgcgccgccagcgaacggctgaaaatctacccgggctttcacgccattcacggcaatttccacgacgcgaaggccctgctgaccgccgcgggcgcgccgcccctgaccggggctttgctggatctgggcgtcagcagccatcagctggacgagggcgaccgggggttcagctatcacgaggatgcgccgctggatatgcgcatggatcagagtaccggcctgacggcggcggaatatctggcacaggtcacgccggaggaatttcgccgcattctgaccgactacggcgaggaaaaatgggcggcccgtattgcacaaatttttgcggaaaagcgggcgcagaaacccattgagaccacggccgatctggtggcggtggtggatgcggccattcccaaggctgtgcgcaggaaggacgacggccacccggcccggcggacgtttcaggcggtgcgtatcgccgtgaacgacgagctggctccgctggaaaacgcgctgcgggattttatggagctgctggctcccggcgggcggctgctggtcattaccttccattcgctggaagaccgcatcgtcaaaaataccttccgtgccatgcagcatccctgcacctgtccgcccaaagcgcctatctgcacctgcgggaaggttccgctgggcaaagtgctggggggcggcggggtcaagccttccaatcatgaagtgcaggaaaacgttcgggcccgcagcgccaagctgcgcattttcgaaaaatatggggaagagggggagtaaaggatgccgacgctctatgtggtggccacgcccatcggcaatctgggggacatgagcccccgggccattgaaaccctgcgaagcgtgcagctgatcgctgcggaggacacccgcgtcaccatgaagctgctgaacgcctttgacatttccaccccgctgaccagctgccacgagcacaacgaacgcagcaaggccgttcagattgcggagcggatgctggccgaaaacatcgacgtggccgtgaccacggacgcgggcaccccctgcatcagcgaccccggcagcgtccttgtgcgggaagccacggaacggggaattccggcggtggcggtctccggccccacggccatggcctcggcgctcagcgtcagcggcatggacatttcggaatttacattctacggctttctgccccggcagaaaaacgagctgcgggacaagctgacggacatggcccggcattcgaagatcgccgtggtgcatgaatccccgcatcgggtcattgagctgctgcagcaggtgcaggccgtgctgcctcacaccgatgtcagcgccagctgcgacctgaccaagaaattcgagcagaccctccgcggccccgtggagcaggtacttcgtctgctggaggaaaatcccaaggcagacaagggcgagtactgtctctgcctgcgctgggcggaggaagacattcccgcgccggagactgttcgggaagatatttcgctggaagcccgcctgttcgacgggctgatccgcgggctgtccctgcgggaaagctccgacgagctgatcgctcagggcgaacggaagaacgccgtcaaggccgccgctctccgggtgaaggaacggctgggaaagtgacggggggacggcggggcgctgccccgcaccctggttaagggctttgcccttaacaatcccttcattgcccgtgcaaagcacgggcaaaaagcaaaagtgtattttcagaaaaagccgtgtgcacagcacacggagcggaggtgcaggaggcgatctttctggattgccagaaggattacaaggggcgagcggaaagcccctgcctgcgccgcagcgaggaagcctgcacgcaatggaggaaaaatatgaaactgtttgtcttgaacggtccaaacctgaacctgctgggcattcgggagccggatatttatggtcggcagacctttgccgatctggaagcgtttatccgggaggtctgcgcccgggaacgcatcgaagtggagtgctttcagtccaaccatgagggcgcgctggtggatatcatccagagcgcgctgggcaaggtggacggcatcgtcatcaaccccgccgcctacacccacaccagcgtggcgattctggacgcgctgaaggccgtggcgctgcctgcagtggaggtgcatctcagcgacatcaacgagcgggagaccttccgccacatcagctatccggccatggcctgcatcgcccagatcaagggcaagggcttcgccggatatgaagaagcgatcctgctgctgaaggaatatgttcagggccgcagggtctaaggggcgcgttgagatgggtggagtgcccaaacatcttcgggacttttggcgcatggatttagcgacggcagtcgctgctcgagatatgaaaaatccgaagctttcatgaaaaaatagagaaacgccggaagaagatttctttcggcgttttttggggttggataaagctgctccttcccggacaaaatgaccgttggaggggatgcgcttggtgcattgggaagatttcggactggtgctggtgtacagccttggttcgctggtgtggctgtttgtgctgacaaaactcatgggcaaccggcaaatgagccagctgaccctgttcgactatatcatcggcatttccatcgggtcgatcgcggcggaaatggccagccacccggaagaagacgcatggctggggctgatcgccatgacgatctacgcactggtggccgtaggctttaacgtgctgaatgataaatccctcaaagccagacgggtgctgatcggttcgccgttggtgctgctggatcacgggcagctgtatcggcagaatctcaagcgggccaagctcgacctgaacgaactgctggcggaatgccgctcggcgggctattttgacttaagcgagctggaaatgatcctgatggaagtcaacggcaagctgtctttcctgccggtgagccagaatcgccccgttacgccgcaggatctttcactggccccggcacaggatcgcccggcggtggctgtggtgatggacggcgttccgttccccgaacggctcaaggccgttggactggacgaagcgtggctgcaaaaacagctgaaaaaccagagaatcgacgattgccgggatgtgtttttcgcgtcggtagaccgggatcatcagctttccgtgtacctgcgggaaacggatggccgcagcaaggatcattacgcctgatcgtcccggtaaatgcccagccggtacagttcttcctcagcaggggcgttgatgagcaccgccttcagcgggccccagtaaacgaacatgctccccgccgccactgcgtgggcgccgccctcttcgagggcttttttcatgtccgaagcgtccttcgcaccgccgcaggcgatcaggggaatggtcagctcctgcgccacggaacggatcagtttcaggtcgtagccctgcatcgtgccgtcccggtcgatggagttgagcagaatctcgcccgcaccaagctcctgcgcccggtgcgccgcgtcctgaggggtttgcccggcggaaacggttccgtccttggtgaaacagcggtaacgcttgaaaagatcctgcttcacatccagcgaaacggtcacgctttgagcgccgaaacgctccgaaatgcgggtgatcagctccgggtcttcaaaaaaggccgtgttgaggatgactttttcaaacccgatgtggaaaagccgggccgcgtcctccaaggtggtaatgccgccgccgtaggacaggggcatgaaggcctcttccgccatgtcccgcagcaggtcgaagtccggcccccggccttccttcgacgcggaaatgtcctgaacgcatagctcgtccacacatttctcgttgaagatcttcatggcgttgatggggtcgcccagatagtttggctccctgaaccgcacggttttgaccagatcgccgtgattcagcagcatgcagggaatcagccggggacgatgcagcatgacgcgcccctccttccaaaatcagccaatcattcaaaatccaataggaaactcagaagcaattttgcacggtctatcgccaagccctgccccttgcgcgagccgcgaggcctgtcgccgagcggcggtctggcctcgccaaccggcagggagccgcaccagacccgcgagccgtggcacccttcgtgccacggcggtaaaaccccggccaactttcatgtctcccgagcagccccgcgcccagcgggcgcggagtggggtcaaggggtactgccccttgcgcgagccgcaaggcttgtcgccgagcggcggtaaaacctcagccaacaggcaagtcgctctagtaccctgcgcgcattgcgcgcagtccggggtgcagggcttcagccctgccggcggtaaaaaccggccaaccatctttccctcgagcgccccgcgccctaagggcgcggtccggggtcaaggggcactgccccttgttggaaggcggttaggagttggagaccgaaacggtggcttttctccgggtggaattgaacgccccagacgttgccacggtggacggctgcggcaaaatgaacgccgtagtcgcattccatcagaacgtcgcgctcgtcctcgcagaccgcatagtaactgtggacaaaataaaaacgggcgggctgctctaacccctgaaccaacgccgcatctcgctggacgatctcgactcgatcccagcccatgtggggcactttcagctccgggtgatcgtccagacggaaacgccgcatggaaaaggggatgtagccaagcccgtccgatacgccttcctcgctgtgaagccccagcatctgcatcccgagacaaatgcccaaaaccggcttgccggaagccacggcttcgtccaacgcgccccgcatcccgctctggttcaaaagcgccataccctgatcgaacgccccgacccccggtagaatcagccggtcgcaggtggataacgcttcacccgtggtgacaggttgggctttcactcccacctttttgagcatgttcaggatggaaccgatgtttccgatgccgtaatccagaacgccgatcatgcgcatccgcccttcttcctaaaaatagcagcgcggcaaaacactgccgcgctgaaaggatagcatgatggaaaaaggttgtcaaatagaaatacggcttatcgtttgcgcacttcggcggcaaagctgcgcccggccagacgggtgacgaaccagagaagcgccagcagcacgatcagccagctgaccgccccgacaggggactggaccgactgattccacggccagaaacgcccggaaacgggagcaatctcacttcctgccagcgtgaatagcaccagattgctgcccaccagataatacagggacgcgccgcccagacggcacagcgcccgccgcagccattccacgggcagccagtatttttcgccgggcagacggcacagaccgtggcaaagcgccgtcagcagggcgatggcgaagcagggcaggacaatccacgcccagtggggcggaaaccgctccggcaggccgtggcggacatagcggacgaggcctgcggcgctgaaggccagcgccgcgccgcccatgcccagccgttcacgaaagctcgcgtccgcataggccacgcccgccagaaagaaaggaaagtattgcacgatcgggtaggtcaccagatttttgccgcctatcagcagggccagctggggaagcgtgacgcggtcataggggagaaagcagcacagcgcacagggcagactcagcggaagccagagccaccgccgacaggtgatctgccgcagcagaggaaacaacacgatggccgccagcatcagcagggcaaaggcaatgagaaattccgaccagccgggaatgtcgttgagcaggaagatgttccgaagcgttccggcccccagcggtttccgctcccgcaggacgcggtaggccgcgccggatacgtaaaacgcggcgaggcagcgcagcagcgtgcgccccatgcggggcagcgcctgccggaagggctttttcagataggccatcgccaccgttctgccaaagcagaaaacaaaggtgggaaaggccagcagactgatgccgtttacccagagattcgtttgagggaacagctgggcgtcgccgaaaaactgaagaatgtgggcgtaaagcatcaggatcaccagaatgccccgctggaggtctacggaacggtctcgcatggcgctgcttcctttctgtgcaggggaatcggggctcccggagaaaagggaagcccgggcgttcattatagcagaaaaaaccatcccttgaaaaccggaaacttcttgcgggatcaaaaaccctatggtagaatacctgatgcgaacattctttcgcgtttgaaacaggattccgaaggaacagacgaggtggctattttgcaggataaactgattgtgcggggagcccgagagcataacctgaaaaatgtgacgctggagatcccccgcaacaagctggtggtgttcaccggcctgagcggctcgggcaagaccagccttgcctttgataccatttacgccgagggccagcggcgctatgtggaaagcctgagctcctacgcccggatgtttctgggccagatggaaaagccggatatcgactccatcgacggcctgtccccggccatttccatcgaccagaaaaccacggcccgcaatccacgctccactgtgggcacggtgacggagatttacgactacctgcgccttctgtatgcccgcatcggcgttccccactgccccaagtgcggccgggagatcaagcagcagaccatcgaccagatggtggatcaggtgatgaccctgcccgagggccagaaaatgcaggtgctggcccccgtggtgcgggagcgcaagggcgagcatgccaaaatgctggaggcggctcagaagcacggctacgtccgcgtgaagatcgacggcgagctgtacgagctggacgacctgcccgcgctggataaaaagaagaagcatagcattgagatcgtcatcgaccggctgatcgtccgcaactccgacgagttccgcacccggctggcggacagcctggaaaccgccgccagggaggcggaggggctggtgctggtagacctgttcgacaaggggacgatgctgttttcccagaactacgcctgcccggactgcggcgtatctatcgaagaactggctccccggatgttcagcttcaacagccccttcggcgcgtgcccccagtgcggcggtctgggcacagtgatgcatatcacgctggagagcattatccccgaccagacgctgagcttccatcagggtgcgctgcaggccatggcgtggaacgtgcaggatcggggcagcatggcgcatacctattttgaggcgctggccaaaaaatatcatttcagtctggacaagccggtgaaggaactgcccaaggacgtgatggacgtgatcctgtacggttcaccggacaagatcaccatcgaatacgagggcgccaacggcgcaggcaagtacaacaccaccttcgagggtgtgatccccacgctggaacgccgctatcgggagaccaccagcgacgccatgaaggcgggctacgaagaatacatggtggaggacgaatgccgggcctgccatggccagcgtcttcgcccggaagtgttggccgtcacggtgggcgggctgaacatttccaaggtgtgcgaactgagcgttaccaaggcgcgggcgtttttccgctcgctggaactgacggaaaaggaacgcatgatcgccgcccagattttgaaggagatcgacgcgcggctgggctttctggacagcgtgggtctgagctacctgaccctgtcccgggcggcggccaccctgtccggcggcgaggcccagcgcattcggctggcgacccagatcggttccagcctgatgggcgtactgtacattctggacgagccctccatcggcctgcaccagcgggacaacgacaagctgctcagcaccctcaagcggatgcgcgatctgggcaacaccctaatcgtggtagagcacgacgaggataccatgtacgccgccgactggattgtggacgtgggccccggcgcgggcgttcacggcggcgagatcgtggcgcagggcacggtgcaggatattctgaaggaccccaagtccctgacagggcaatatctgagcggcagacggttcattccgctgccggaaaagcgccgggagccgaatggctggctcactgtgcggggcgcgcgggagaacaatctgaagaagatcgatgtttccttcccgctgggtgtgttctgctgcgtcaccggcgtcagcggctcgggcaaatccagtctggtcaacgagattctctataagcatttggccaaggtgctgaaccgggccaagacctatccgggcaaatttgaagccatggagggcgtggagcagctggacaagatcatctgcatcgaccagagccccatcggccgcaccccccgctccaacccggctacctacaccggcgtattcgacctcatccggaaaatcttcgccatgaccccggaagcaaaggcccggggctacagggagaaccgtttttccttcaacgtgaagggcgggcgctgcgaggcctgctccggcgacggccttttgaagatcgaaatgcactttctgccggatatttacgtgccctgcgatgtctgtaagggcgcgcggtacaaccgggaaacgctggacgtgcgctataagggcaaaaacatccacgaggtgctggagatgaccgtggaggaggcgttggagttcttcgacgcccacgagcccatccgccgcaagctgcagaccctctacgatgtgggcctgaactacatcaagctgggccagcccagcacccagctgtccggcggcgaagctcagcgcatcaagctggctaccgagctgagccgccgggacacgggccgcacgctgtatctgctggacgaacccaccaccggcctgcacgtggcggatgtggaacggctgatcggggtcttgcagcggctggtggcggcgggcaacagcgtgctggtcatcgagcacaatctggacgtcatcaagacggcggattatctgatcgatctgggccccgagggcggcgacggcggcggaaagatcgtcgctaccggcaccccggaggaggtcgcccactgcaaaaagagctacaccggccaatatctggccccgattttgaaaagagaccgggaacggatggaaaaacggaaaaacgagcgggagtgaaacacgggaatttcgggcaggctcttgaggaaaacgggaaaaaacgtgaaaagaaaacggcccgatttccgtcagttggggacttgtgaaaatccggcgggatgttgtataatgaatcataacctctccgactaaaaaaggagccggggaaacggacagaaagggtgcaaatccgatgaaaaaagttctttctttgattctgtgcattaccatggtggcaacgctggcggcattgggcgcgtccgctgaaggggaaaagaccgacgctttgaaggtcggcatctgcgtggcgggaagtctgggcgatcagggcttctacgacagcgccaatgacggcctacagaagctggcggcggattacggtgtggtgggcagcgtggtggagtgcaagaacgacgccagcgcctacgaacccgcactggtggaggctgcggagcagaacgacgtcgttgtggccgtgggctgggagttctgggacggtctggacgtggtggctcccgaaatgcccgacaccaagttcatctttgtggacaacggcatgaccggccatgacaatctgctggccatcacctacaaggaaaatcagggcagcttcctggcgggctacattgccatgaagctctccaaaaccggcaaggtgggcgtgatcggcggcgaggacagcgataccatcaacaacttcatcgtgggctacaagcagggcgcgctgtacgccaatcctgacggtcaggtgcttgatcccatctacaccaacgattacgaagaccccgccaagggcaaggaaagcgcgttggccctgaacagcaagggcgcggacgtgatcttccaggtggccgacaagaccggtctgggcgtgtttgaagccgctcaggagaagggcttctacgccatcggcgtggacaaggatcagaagagcgagaaccccgacgtggtggtttgctccatgctcaagcacgtaggcgagagcgtctatcaggcggtggcgcagtacattgaagaaggcgtgttcaacggcggcgagatctgggacgccgatctgtccactggtctggtgggcattggttacggcgacgactccatgccccagcaggtctccgacgagctgaaggccgaagtggatgcgctggcccagaagatcatcgacggcgagatcgtcgttgacaccacccgttaagcagcaggggcagtgcccctgcaccccacaccgcgcccatagggcgcgggaggcgtcgagggaaagactgctggatgcggagataccgcctctcggcggaatgcctcgcggctcgcgcaagggacagtgtcccttgaccccggactgcgcgctgtgagcgcgcagggcacgtgggcgacatgcaggttggacggcgttcggataacgcttgctgacgtgctttacgattttcaatatcatcatggtactttttgcccgcgcaatgcgcgggcaaattttggatgaagcgcatttggcagaaaacgacagcagggtttgatttgtcggctgtaagttaatccatgttgaccgacttaaacccgcgagccgcgaggccttccgccgagcggcggtagaaggaagttaatcagcaatcaccaaacgcccctgcgcgccccacgcgcagaggtgggtgcagggcgaagccctgccgagcggcggtagaaggaagccaagtgacagtgccagacaacccctgtgtgcatcgcgcgcagaggtgggtgcagggcgaagccctgccgagcggcgggtccagggcatagccctgggaggaggttggatggagaagaaggagatcgtccgtttttcccacgtgacgaagcagtacccgggaacgctggcgaacgacgatgtgagcctgagcgttcagcggggcgaggtattcgcgctggtgggcgaaaacggcgcgggaaaaagtacgctgatgaacctgctgtacgggatgcagccggtcaccatgggcgaaatattcattgacgggaagccaatcgggccgcagcattgcccggaaaaggccatggagatgggcgtgagcatggtgcatcagcacttcaagctggtgcccagctttaccgtggcccaaaatatcctgctggggcatgaaccgaaaaagggattgagctatgattttcaaacggcgcgggacgctgtgcggaaactgtccgagacctatggcctgtacgtgaatccggacgatgtgaccggcgaactgagcgtgggcctgcagcagcgggtggagatcctcaaggccctgcgtaccggcgcgaaggtgctgattctggatgagcccaccgctgtactgaccccccaggagacggatgagctgttccgcgtcatccgccgtatcgtggaggaacagggcatggccgtgatcctgatcacccaccggctgccggaggtcatgcaggtcagcgaccgagtgggcgtgatgaagcgcggccgtctggtgcaggtaatggagaccgctcagaccagcgaacgggagatcgcctccctgatggtgggacgggacgtgatctttgacgagctgcgccagcagcatgaaatgggcgaggaaaagctccgggtagagggactgtgcgccatgaacgatcgaatgctgcccgcactgcggcaggtgagcctgtccgtccatgcgggggagatcgtgggtgtgtgcggcgtggagggcaacggccagaccgagctggcggagtgcatcatggggatgcggccccagaccggcggccgggtgcttctgtgcggcgaggacgtgagccggaaaacgccgggcgaaattcgcggccggggcgtgagcttcatcccggaagaccgcatgaccaccggcgtggacggaaaggccagcgtggcggaaaacctgctggtgggcaagcagcgccggccggagttcagcctgctgggcgggttgcatctgcgccgccgtcaggtgaagaaatacgcggccgaacaggcgaaaaagttcgatatccgtatgtccggggtagacgaccctgtgtcctccctgtccggcggcaatatgcagaaggtggtcatcgctcgggaattcagctttgattccccggtgctggtcgtcagccagcccacccggggcgtggatatcggcgccatcgagttcattcatgaacacatcctgcagaaacgcaacgagggctgcgccattctgctcatcagtgccgatctggacgagctgttccgtttgagcgaccggctggtgacgctgtatgaaggccgcatcaccggctccttccgaacggaggaaatcacccgggaggagatcggctactacatgaccggcggcgtaaaggacgaggaaagcgcggcaaaggaggaattgcggcatgggtaacggctttttccagagtgttcgggcgctgcttcgcctgaaaccggcgcagaagctgaaccgggactacctgatctccctgctgagcgcggtgctgctggcctttctggtgggggctggcatcatgcttctgtgcggcttcgaccccattcagtgctatggcgcgctgtttgagggagcgctgggcaaaccccgggccatcggcaatacgctggccaaggctacgacgctggcgctgtgcggccttgccatgagcgtggcggccaaagcggggattttcaacgtgggcggcgaaggacagctctttatgggcgcactggccgccgccgtggtgggcgcacaggtaaagagcgtgcccgcgtgggtcgtggtcattctggcgctgctggcttccctgctggccgggggactgtatgcatgggttcccggcgcgatgaaggtctactggaaggtggacgaggtcatcaccaccatcatgctcaacagcgtggcgaccttcttttgcagctacatggccaacggccccctgaaaaccacggagaagggcattgcctccggcacggccagcattatgaaggaagcgggctttgccaagctgatccccctgagcaatctgaccaccgccattctgtttgcggcggtggcggcatttttcacgtggtatctgatgacccgttcctccgtaggctttgaaatgaagctgaccggcgataacgaccgctttgcggcctacggcggcatttccgccaaaaagctgatgctctggtccatggtgctgtccggtgcgatctgcggcctgacgggtatgctggaggtattcggcctgcacaaacggtttatgaccaccatttccaacgagttctactttgacggaatgctggtggccatgatcatgcgctatcagccattcggcgtgatcctgatgagcctgttctttgcggtgctgaatatcggcagccgctccatggagctgtccgccggaatttccagcgaggtcatcctgatcgtccagtccatcatcatcttcttcatggcggcggagggcggcatccgcacggcgctgcagaaccgctccgccattcggaaggcccgtcgcgaggccgcggcgaaggaggcgggcgtatgagcgatatcttcaacgtgcttctgtttcagaatactctgcgcaccgccacgccggtggtgctggcggcgctgggctgcctgatgacccagcatgtgaacatcaccaacatcggtatcgacggcatgatgctcatcggcgcgttttttgccgtgctgggcagctactactgcggcagctgggcggcgggtctggcctttgccatcgtgttcggcgtgatcctggggctgctgtactacgtgctggtgatccgctttcacagcgatgaatttatcatcggcgtggcgctgaacatcttcgcgggcggactgaccactttcctgctgcgcacgatctttcaggtgaagggctccttctctgatccgcgcatcgtgcctttgcccaccatcaccattccgggagtaaaggacatccccgtgctgggacatctgctcagcggcaataccctgctggtctacatcagttggattctggtgccggtttgctggtatctgatctacaagaccccgtgggggttccacctgcgggccagcggcgaatatcccgatgcgctggaggccagcggtcgaagccccgaaaagatgaaactcagcgccagtgtactctgcggcgtgctgagctgcatggcgggcgcgcacctgtcgctgggctacctgaccatgttctccgagaatatgtcggcctcccgagggtatgtggccttcgcctgcgtgatcttcggccggggcaatccgcccatcgtatttctggcggcgctgctgttcggttttatcgaagcgctgggcctgcggctgcagaagtacgtccccagcgatctgaccggcatggccccctatctggtgacggtcattatgatggtggctgtagtgctgtgggaacggaaaaagaaaaacaaagcggtcaaagcagaaggataaggaaaaagccctcgctgcggtctggaaaaggccgcggcgggggcgaagtcgtttttagggttcattcaatatctgcggaatttgggaacgggaacctcgcagggtctccatttccacggtcaggccattcagctggttgagaatgaacaggcgatcctcgtccagcttgttcccggcagcgtcatagtaggtgaagacaagctcgtcctcgtaaggggtcccttcctgccagaggggagcggagatcgccgcctcatagaccagcgtcagttccagccgggagctgttccactgcagggtcagctcccgcttttctccgtcccagacgaaggactgatcttcgcttaacgccgggaaaacggtcccctctcctgtggtcaggacacagcgttcgacctgctcggtggcatactgaacttccagaaccagccggttcgcttcgtgttcccgaactgtgtagtcgcgccatgggacgggcgtttcagccagcgccgaagaagcgcacagccagacgaacagcagcaatagaaaacgttggatgattcgaggcatgaccttccctcctgtcgttgatgaagaacaaaaaccttctgctcatgcaacgaatcagccatggaaaatcctgctataacaggcggaagaaagctacgcctgtttttccagcccgcttttctggatgcagcgctggagccagccgcccttgaggtaataaatcacgaaggcgatagaggtgaccacccacgtcagcggatagctgaaaaggacgcattccaccgtgttgtgggaaggaacgacgaaccagatccagatgacgcgcagcacgcagatacccgtcaggttcacgatggtggggatcagggtgtcgcccgccccgcgcaccgcgccggagagaatttcaatgcagatgtaggtcacgtagctgggcaccagcatccacatgatcgtaacgccgtagtccagcacgatctcgtcattggtgaacatccccaaaaaaacacgcgcgcccagcatcagcacgctggaaagcagcacggtagcgatggtggaaagaagcagacagacccgcacgcttttgtgcattcggtcatatttgcccgcgccgaagttctggcccgtgaaggtggtaatggcaatgccgaaggcgctgataatcatccagtacaggtcgctgagcttgccataggccgtccacgcagccagcacgtcggtgccgaacacattcatgctggcctgaatgatgatgttggaaacggagtacagtaccgattgcagcccggcggggaaaccgatctgtagaatccgctgaaggatcgtgccgtgaaagcgaatttcccggggacgcagctgataggactgctgagtgcggcacagtgtgacgatcaccagcaccgcgctgagcaactgggacaggatggtcgccagcgccgcacccgccacgcccatattcgcgcccactaccagcaggacgtcggccacgatgttgaacagacagcaggcgatcaggaaatacaggggacggcgggagtcgccgatggcgcgcagaatgccggagccgatgttgtagatcagcgagggcagcattcccagcgaaataatgcgggtgtaggtggacgcctgatcgaggatctccaccggggtgcccatggtgaccagaaagccgggcagcaggaaataactgagtacggtcatcaaaagaccgcccgccagcgccagcgccgccgccgtatgcacggacgcgctgacctcggcgtttttccgcgccccgtaatactgggagatgatgacgcttgcgccggaggaaagccccacgaaaaaacccaccagcagattgatcagattgccggtggcgccgcccacggcggccagggcttccttgcccacgaatttaccgacgatgatcgcatcggcggtgttgtacagctgctggaagaacgtacccagcagaatgggaaagaagaaaagaagcagctgtttccagatcacgccttcggtgatgccgttgccgccatcgtttggagaaagacgccgttgcttcattggaataaactccttatttttggctttcgatgttttccagatgccggcggatggcctcaaaggtctcgtcggacaggtcgtgctcgatcttgcacgcgtcctgacgggccgtctcttccgaaacgcccagcgccacaaacatctgggtcagaacagtgtggcgcaggtaaatgcggtcggcgatggcctcccccgccggggtcagggacagcagattgtcgccatccatcaggatgtagccgttttcccgcagcttcttcatggccacgctgacggacggcttggtaacgcccagcgctgcggccacgtcgatggagcgggcataacccttttctttctgcagcatcaggatcatctccagataatcctcgccggattcatagatcttcatggccgagcctccttcaatagaaacaattccagtctgatactagcacaaacccggggggttttcaagctttccttgtttatggtatactggactagcacaatggacacaaacgcggggagggaagaccatggcgggagcgcacgacgggcaccgcggccggatgcgggaacggttccgcagggaagggctgaacggctttgccgaccatgaggcgctggagctgatgctgttttacgccattccccagcgaaacgtcaatccgctggctcacgcactgctggagcgttttggcagcttccacggggtgctggaagcctcggaggaggaactgtgcagggtggagggcgtaggcgagtacgccgccgtgctgcttcatctgtttgccgccgtgggccgccgggtggaggaaagccgcgccgggcagcgggaaaagctgcgcaaccgccgggaggcgcaggaacattgccgcagactgctggcgggccgccgtcaggaagcgttttacgtggtttgtctggacggccagctgcaggtattggccgatgtacagatcgctaccggctctttaagcgaggtagccgcctatccccggctggtagcggaggccgtgctgcggcacaacgcccattcggtggtgctgtgccacaatcatcccggcggcagcgccgtgccctcccagagcgatctggacatgacggcggagctggcggcgctgctttccagcctggaagtggcgctggcagatcatatcatcgtggcggacggggaaaccttcagcctgtacgccagcgaactgatccagcgggagtaccgcaacggagagccggttatcaaggtggccagctctgcgggagagacccgcattgctgataagatccgaaaaaaggacggaagactgaaagcatgacgcgaaagaaaagcgcaaaaccatggagaacattctggaaaattctgatcggtctgctgcttctgggcgtagtgtgctacgccgggatggtgggctggatctacgcgcaggaggtcagcgtgccgcagcccagggattatgacagcattatcgtgctgggagcacaggtattgcccagcggggaaccgtcggtgcagctgcgctggcgcatggacgcggcccggaaggtatacgacgagcatccctgctatatggtggtcaccggcggcaaggccgggaaggagccggaagccgagggcgacgtgatgcgccgcctgtttatcgaagagggcgtgcaggaggatcacgtcatcagcgaccccctgagcgccgacacccggcagaatctgcagaatgcctgggccattttgcaggagcttgggtgcagccgccccgtggtggtcaccagtgattatcatctgccccgggctctgcggctgatgcaggatatgggcatggacgcgcagggtgtgggaagcccctgccgccctggcgtgaagtattttctgaagaatcatctcagggaggtgctggcatgggggaagtattgggccgtgcggtatctgggactgaagctgtgagccgggagcagtggccggaacggctgaaaaacgggctggacgcgctgaacatccgttacgaccccgccaccccggaacgattggcccgctaccaccagctgttgaccgagtggaatcaggtcatgaacctgacgggcgatacggattttgagacctctctcgggcggcactatctggattcgctggctccgctgggcatcgagggactgttccccgaaagcgcgagcctgatcgatgtgggcaccggcgcgggttttcccggcctgccgttggccatcgcccggccggacctggatgtggtgctgatggattcgctgcaaaagcggctgaattttttggacgctgtggtgaaagaactgggcctttccaacgtgcggctgtgccatacccgggcggaggacggcgggcgggatccccgctggcgggaacagttcgatctggcagtggctcgcggcgtagcggcgctgccggtgctggcggagctgctgctgccctttgtacgggtagggggaaaagcggtctgctataaaggccccgccgcgtcggaagaatgggacgcgggacagcgggccgcccgtctgctgggcggcggcaagctggaacggacgcccatcgtgctgccggggcaggaggactgggagcattgcgtcatcgccctgcctaaaaaggaaaaaaccgttcgacagtatccccgaaaagccggcacgccgggccgggagccgttgggacagaccggcggaaaataaaaagaagccggaaagcctgaacccttgcacggtcgccgttcccggctcaagggcgcggcggtggaataaaagaaacataaaacaaagagagactctgcgcgtcagggtctctttccctttgcctgccgctgtcgaaatgtggggaacgattcccgcctttcctcggcaggaaaagccgcctgtgcagggaaatacacaggcatggacgcgttccgtgggcttcgcaggtcatgggggagggcctgcggggatcgcggggcgcgttcattttttcgtgaggaaggggcgagcgggatgcagccgacagccgaacaggtccgctgggtacctctcagcgacattcaggaaacgaaccgggcggaaagcagcgccaaggccggggccattcaggtggaggctgaggcggacggacggtacacgctggtggcgggacaggagcagctgcagcggcttcgggaggaaggcagctgctatgtggcggcagtcatcagccccggggttccgctggaagaacggctctccgctttcgtggacaggctggcgaaggggcggctccattatctggaagaggcggagcagtaccgcagcttcatccgtcaggacggcctgaccacccagcagctgtcccagcggacaggccgttccgtgcagacggtgcggcggaagattcgcctgctcaatctgggggaggaggtctgtgccctgctgcggcactatgacctgagcgaatccatcggcgaggcgctgctgcggatgcccggccagcagggacggcttcgagtgctgcggcacgtggtggagctggggctggacaccaagggcacggaaacgctggtagacggcgaactggcccggatgcccctgcccatgacctccggccgccatatgaagccgctgatgcgggattatcggctgtacctgaacgccatccgcgagatcgtggagcagatgcaggacgcgggtcttcgggccgatatgcgggtgaacacgggccgcgccgcggtggatgtgcgcatttccattcctgtatttaccgggcggaagtgaaaattcccttttcacatgatttgtgttatactgaagctgattccctcagggaaggatctggaagcggatgagccatcatcccagccattggggaggtacggaccatggatgaatttctgcagcaggttgtcgacaacatgcgcaaaaatgagtttgaagtggtggagctgcacacggcgcaggaagcctgcgattatctgaatgaacacatcgccgccgggaagacggtgggcgtaggcggctcggtcagcgtgcgcgccaccggcattctggaaaaactgcaggagaagggctgcaccgtctattcgcattggggcgtgccaaaggaagaagtcaaccccatccgccgcaaggccatcggcgcggacgtgtacctttgctccgccaacgccgtcacccgtcaaggaaagctggtgctgatcgacggcgcgggcaaccgggcggcggcagtgtgtttcggcccggagcaggtctatttcgtcatcagccattcgaaggtggtggacggcggcatcaataccgccattgcccgcatcaagaaaaccgcctgcccgcccaacgcccgtcggcaggggttggatactgcctgcgcccgtaccggcgtatgcggaccggactgtcacgacagcatgtgccgcctgacactggccgtggaccgcgccccccggggacggaagatcaccgtgctgtttgtggaggaaacattggggtattaagaaaggcctccgacctgtcgaaaatggggcgtatgcttccggcggatccgaaaaaactctgccgtttttggaaaaatccagaaaaaccgcgctaaaatgcaaaaaaaggtagcgcggtttttgggtttatggtaaaatgaaaaatggcttaatgccaatctgggcggctttgccgcattcgagggatgtatcgttgaatcagagagtgttgaaactgatggagcggctggcgctggatcagcgcgaagccgtgctggtgcacaatcccagcaacatgttctatctttccggctacaccggcgagggtctggtgctgatcggacgggaaatgcaggctatcatcaccgacttccgctatacggagcaagccgaaaagcaggctcccggattctcggtggagatgaccgaaaagggcgtttctcatgaagcgatcgtgggccgcctgtgcgcggagcatgagatcggcgcgctgtattatgaggacgattacctgaccgtccgctccttcgagtcctgccgcaaggccgtgcccggcgtggaatggaagagcctgcatgaagaagtgcagcacatccgccagatcaaggacgaggacgagctgagccgcatcgccgaggcgtgccgcatcaccagcgaagccttcgaacgtctgctgcctgagatcaaagagggcgtgacggaaaaggagctggcgctgaagctggagttcgatatgctgacccatggcgcgacaggactggccttctccaccatcgtggctgcgggcgccaacggttccctgcctcacgcggtgcccggcgactacaaggttcgtctgggcgatatgattacctttgactttggcgcgaagtacaacggctactgcgcggatatgacccgcacggtggcgctgggccagcccagcgacgagatgcgcaaggtctaccagaccgtgctgaccgcccagcagaccgcccgtgacgccgtcatggcaggcaaatgttgtaaggatatcgacgccattgcccgggactacatctacagccacggctacgaaggacgcttcggccacgggctgggccactccgtgggcatcgacatccacgaagaaccccgcctgagcatgacctgcagcgccattctggaagaaaaccagatcatgaccgtggaacccggcatctatctgcccggtgtgggcggcgtgcgcatcgaggactccgtcatcgtcaagaaggacggctgcatccccctgaccagccccaccagagaactcattatcctgtgattcgcccacagggcgtatcatcaaccaattctacaccatataaaaaacggaggaatgaccaatgattactgcgggcgatttcaaaaagggcatcaccatcgaatgggacggcggcgtgtggaacatcgtggatttccagcacgtgaagcccggcaagggcgcggcctttgtgcgcaccaagatcaagaacatcatgaccggcgcggtggtggagcgcagcttcaaccccactgacaaaatgccccgcgccatcgtggagaccaaggaaatgcagtacgtctacaatgacggcgaactgtactacttcatggacaccgaaacctacgagcagatcccgctgaacaaggatcaggtggaagacgctatcccctacgtgaaggaaggcaccaatgtgaccgtgaagttcttcaagggcagcgccttcagcgtggccgcccccaacttcgtggagatggaagtcatcgacaccgagcccggcttcaagggcgacaccgccagcaacacctacaagcccgctaaggtcgagaccggctacagcgtgcaggtgcccctgttcatcaacattggcgaccatatccgcatcgacacccgcaccggcgagtatatggagcgctgctaattcatttggaggataagaccatggcaaatatcacggatcgtaccgcttacctgcgcggccttgcggaaggcatgaagctggatcgggaagtgaacgaacagcgcctgatcctggaaatgctggacgtgatggacgaaatgtcccaccagctggccgacgtgaacgacagcgtggacgagctgaacgaatatgtagaggacatcgacaacgatctttccgatatggaagacgtgctcttcggcgacgacgattgcgactgcgactgcggctgcgaggacgacggcgaagacgaggatgaggaagaagatgacgatgaggacgacgatcaggagctttccttcgattgccccaactgcggccacaccgtgatgatccgcgcttccgacatcgacttcgacgaaagccccgtgtgtcagcactgcggccagcccttcttcgtagacgtcgaggatggggactgagtcccctttcggactgcgcgcgcgtagagcgacatgcagattggctgcggagataccgccgctcgcgcaaggggcagtgccccttgactccacaccgcgccctttgggcgcgggggtactcgtgggaaagcagattggctgcggagataccgccgctcggcaacaggcctcgcggctcgagggtctgatgtggctccatgccagttgaatagcaaagaccgccattcggcgacgggcctcatggctcgcaataaaggccagcgtgtgaaagaacacacgctggtcttttgtgttacaggaatatccaagccgcggcgaaacatcccaaacagcgctgattgagtaggcatagtgccgaccgtagtgggaaaaatcaagcccgttttttgtgctgcagaaccagccaagtctcactgtaacatcctaactggcttttctttgagcctgcccagcgccaactgcgggggagcagagcggcgataggcagcggagggaaaaagccttgccctttttgaaagaggaaaagagtgagcacgagcgcgcacgatagtaggtaataactatccaacaatgctgcgcgcgacattgcgaactccctctttcaaaaatgggcaataaagggcttt

SEQ ID NO: 2651 - DNA, 1802 bp, Unknown
  16S sequences of unknown bacteria
acggaggttttcttcatccccagcgtgacagcacaatgtctcgtttccttcagcagcgccttgcggagctgctccgtctcgtaatcggtaaaagccaaggtcgcaccctctctaaaatatgaccgtttcggttcttttggtcatattataccgcgcttttttctggtttgcaaggggtgtagagaaaaacatacgcattttaacaaaaaattattttcccttaacacattatttcaggaaggcgctccgcttcctttggcaaagaactgcaccccccgaaaatcaaaaatgcacccccctctaaaccgtaattgcgccccttaacggatttctatcaaaattagagtcatttgccaaacggggattggacgaacacctatttcttcagcggcggcttcgccggaaagggttcgcgctgatccacaacagaaaagcgccgtcttgggagtgatcccgagacggcgcttttctattataatgtcggttgtgcatatttggggcatgcgctatggggaagatctggttgacggcgggggaaaaatccggtatgataagactttagaggtgagcggggatggattctttcgaaaaagacgcgctgcgggcgcagatccggcaggcaaagcgggctctgaccccggcgcagatcgcatcggccagcgcagagctggcggcggcgctgcggcggcatcccctttaccggcaggcgcggtcgctgtatggttatctgagctataaccaggaggtcgagacccacgcgctgctgctgcaggcgcagcgggatgggaagcgggtcgccgtccccaaggtcacagggccgggggagatggtcttttattggctggacgagcttacccaggcggcccccggctactgcggcatcccggagccggacggctcgcagccagcggcggatgatgatacggctctggtcctgacgccggggctggcctttgaccggcagggccatcggatgggctacggcggcggcttttacgaccgctatttggccgcacatccgcacccgaccatcgccctatgctacgactttcagctgctgccccatctggatgcggcggcccatgatatcccggtggatgcggtcctggctgcgccggtgccgggcgtgtgctcgaatcggacagcgcgcgagaacgacaatgaggtgacgcaatgatttatgtactgatcggcatttttatggccttggtgtttgccctgtgctttctgacggacaagctgctgcagcggctgagcaagcgggcggatctgggcatcgggcaatcgaaggtgcggctggcccgggcgaatgtcatcttcggtgtgatcctcgccgtcgcgggcgtggccttgctgctgttctttgccgcccggctggggccggcattttatgtcatggcggcgattattattctgctggggctgtatctgctgctgaattatttcacgacagggattgactacagcgctgagggctttgtttaccgccgcccgggccggaaggcgcaggcctttacctatgaccagatccgggggcagcggtcctttgccaatcgggcgggaatcaatgtgatgctctatgtcgggcaggaggaggtcaatctctattcctcgatgaatggcgcgcagaattttatgcgggcggcttttaacggctggtgcaaaagccgtggcttggagccggatgaatccctggcgccgaacccgggcaatatgatctggttcccggagcccggcgacggggcggaagcggaagaagcggaataagaaagaaaaaatccccccgtgggctgcagttcagt

SEQ ID NO: 2652 - DNA, 32759 bp, Unknown
  16S sequences of unknown bacteria
cacttatgtatataatgctgtcctgatcgtatttgttcagggcgtattcgcttttcttacggacaatttgactgggttttccaatgcaatcaatgcagtgttcccgcagacggatgtccagaactgcatcattcatcagctgcgcaattcgagcaaatatgtgtcttacaaggatttgaaggcgctcatggccgatctcaaagctgtttatgccgcggtggatgaaccgtcggcccaaagcgccctggacgcatttgaagaagcctggggaaagaagtatccccggatcgctgcttcctggcgggaaaattgggcgaatctgagcacgtatttcaagttcccgcaggaggttcgccggctgatctatacgaccaatgccattgagggcttcaatcgccagcttcgcaaggtcaccaaagccaaggcggtttttcctacggatgacagtctgctgaaaatgctgtatctcgccatgatggacattacgaagaaatggaccggacggcggcaggattggagcgtcattcatgcccagctggcgatctattacgcagatcggatgcctgagtaacagaaatcccttccctgtcaagggtatatgaacagcagcacgccgctgcccttgacaggctgcaggatttctgcttcatggcaatcaaggcggcgaacagggagccctgcacgccgcctagatcaactttgattcttacaccggcttcagccatcatccgtcctttttccaaatagtaattgcatccccatgggaagtacgtccactcaaaggtaaatccaccatccagacgtgcaatctcatccaatacctttacgccttcagcgattacttccggaccaataccgtctccgggaatgactgcaatcctgtaatgcgtcatagcccaatcacctcttcaatagttgttgttgaaaaaagaccatttatacattcttgatgcggagtcgcatcacagagtgggcaggaagcagcatgctaccatcctgtgctgatacatcgtactcagcaaagcgcgttcccatcatcaggctctcaccccggaacagccgcgcttctactaatccggttattccctgcagttcgagcgtcttatcttgattaagagatttgttgatcaaagttgcaatatacatatcttcctgtttgtcaaggctgacaaggcatcttacatcttcatcatcggtcatgctttgcagcagcagattacctttgtgctctttcattacgcccatcatctgtccacaagcagtcaattcggcataggtcttttccacaacgatggcgccttcattaatgggttgaaagtacatgaccatcgatatgttcaaacgctgatggttcttgcatagcatgtcgagcatcaatgctgtatacagtccctcaagaacacctggatcatgataccatgcaaaatacaaattccattcgtcatacgagatagaaactgccgaacatccattctcattcatcaattcacgaagtttctcaaccgccgtcagacatttgtctggagcaccaataatggtagcgtaggtgtttttcaagccgttatccgtaacgaaatctgcgccaccctcaaaaattcgcggtgcataattgtgataggagatataatgtacgccttcagccgcgagttttggcaattccgccagccattctctgtagtcgtattcagggttgtaagcccccgaagcaaacagaacaatctcaggatcaacttcacgcattttccgggcatattgcgtggctttggctgtgtatgccgcaggcgtattggggccatccatatgtcccaagccttgctcgttgcccaaggaccaatatttgacggcatagggctgtttaaacccacgttctgcgcgcactttaccccattccgtatcggcagttccattgcaatattctacaaactgtgcgcatgtctccgccgtatccctgccgaaattgatcgtcaaataaggttctgcacctatcagatggcatagctgaatgaaatcatcaattgccatctcatggaaatcgaaaccctgcgtatagggatgggtttccatctcgcgaacggatttctgcgcaccacgcatgtctacatccattaaaccatctttccagtgatattcaccggcaaagttgccacccggccaacgtagtacagagggaccgatttccctgagcttgtcaattacatcaggccgcaatcccagtacatgatccgtaggaatcagcgacacaacgccaattttcatctctccgcgattgtgggtaattacttcaaaacaggcattgtccgtactttcaggtgccgtaaatacaaacgcagtcttttcccattcgtgctgtgctggcgtttcaatatgttcagcgtacatgcggcgcgtacgtgcgttaacaatgcggatggtgtagctgaaagcctcatcactatttgttttaacgactgatcgcacctggtacgatttgtccttttcaagtacaatgccgtcttggccaacaccggcttccatcccaacgtacggattctgtaccacctgagagttgcattcatttctacgctgcaagatccctgtaaaccattcctcgctgtgccttacataggcatcaaagcgatccagcgtgaaatatacttcccttccgccaattctgtaccattcggctgcctgaccagagtgagccgctggtttgccggcaaacttacggttacgcagaatttgtgcgctcaacccttgatagatgcagctgcgagtatgctccaaattgtgtgaaaatatattgggatgtataatgccttgcgttttttcgggacagatggtaactcgtactttttccatagaagcacctcctattcagcttttcacagcgcccagagccatgccttcaatgacgtttttgctaaggatgaagtacaggatcagcgtaggcgttaccgccatcacaatagccgcaaaggtcggtccccattccaccagaccaaactcacccgtgaaatccttcagcgtgataggcagcgttctcattgcacgatccgtcaaaaacgtattggcataggtgaattcattccaaacataaatgaagcggtacgtcagaactgtgaccgttgtattgcgcaccatgggaacgacaattctcataaacgtttggaatgtagtcgcgccatcaatgtaagcggattccaacacagaatcgggaacgtagtccatgaagctacggtacatgtaagtcacaatcggtatggaaaagccaacctgtggtaaaatcagagacaagtaagtgttgcgtagacccagtgtgttgaaaaccttaaacatgggaatcaggcagcagaataccggaatcatcatgccgagcagcacaaagttaaacaccttttcgccgcccttccagcgaagtttgcgaacggcaaaagcaaagggacagcaaatggcaacctcaagcgtaagcgtgacgactgcaacaatcgtgctgttgagaaacgaacgggggatggtagaaacctcaagcgcttttttgaaatggcctgtatacagggaggaaggaagagagagggcagaaaggttggtcaattcttcagtggttttaatgctttgcaggatgacccaaataataggataaacctgtatgacagcaaacagtatgagaacggcatacagaatcgttcttcctcgagcagacatcacatttttttgcactgctttctcctcctttactctacgttgctcttgcgagtaaacaggttcacaattcgtacggcaatcaggcattccaacatcaggaatacagccatggcgctactgtaaccataacgcatggtttggaaagctgttttgtacatgtaagtggcgatcatttcactggctgtgccagggcctccgtttgtaagcacatacggcatttcaaaagatttgagtgtgccggagatcagcatgaccaaaaccacaccgaatacgcctttaatcatgggcagtttgatgtaaagatgttgtttaaaccaaccgcaaccatcaatataggcagcttctaccacttcctgcgaaatggatgtcaggcccgaatacagaatgaccatatagataccgcaatatttatagccgtctaccagagcgagggttgacaaagctgttgacggcgtaccaagccatgatttcggtttgattccaattgcctgaaaaacgatgttgataacgcccatgggttgcagtgccagaagcttgataaagatctgcgcaatggcaaccgtgctgatgatgcacggcacaaagtacatcactttgaatagattgcgtcccttggtgatgctgctgagaataacggccaatataagacccagcgacagctgataggtagtgctgattgcaacaaatttcagattattccaaaacgctttgttgaaagtacgctctgaaagcagcttttggtagtttttaatacccacaaatttggcagcagtgattccgttccagtcctgaaagctcaaaacaatcgtccacagaatcggaataatcaccacaaaggcaaaaaccagcaaagccggtgcggcaaaagcccatggagtccatttcttttgatatctcatgtttttcttacactcctgcgcttcgttcagaatatagaaaacggctgcgccaaactgtcaaccgcctcagacggcggcggccgttcatttggcgcagcagctgttaggtatccttcttcagatgtttaagaagcttatttcacattttcctcgatggcctgatccatgatctcggcaaactcctgaggagtgatctcgccaagtgtcagattgtagatctcgcccttgagcacttcgttggatacggggtcaataataacatcccagcaagccgcatattcggttacggcattgaattccttatacaattccttgtacagattggacagattatccatgttgctgggcataatgccggaacaagtattgtactcgtagagatagatatcaccgaaatggttgatgaagtattccacgaaacgatagatctcttccttgttctcctccacgaatgccttactcatgaagatggccttgccggagttggcaaagtacattgtctcgtcggtggcatcatagccgtccagcagcggaagcttgaaccatgcgatatcatccagcagttcctgattctcatccgtcaggtactgcaggcactgaccggtggactcataccacatggaagcgcccttgctcaggaagagatcgcgcatagcggagctgtccatgccagaccagccctcgttgaagtaggtggcgtacttctgcatgaattcgcccatggcgataccagcatcggtaccccaggaatgcttgccggagatcgcgccttcaatccagtcattgccgtacatacggaaggggatgaaagcagctgaacgcagcatcatggccatacggggtggagcagctacaggtgtcatgccgtgagcacgcagtgcctcacaaacctcaaagaactcagcccaggttgtaggagcttctacgccggcagcctcgaacatggacggatgataccagaaccattcggtgttggcgccaatagccatgccataaagctcgccatcactgaagcggggatagttgagcgtgatggaaaggaaacgatcggtcaggcccagttcttccagcatatcgcccacgttatagatcaagccagcttcgcgcagctcagcagtgaactcatcggggtcagcctggaaccaatcgggcatctcgttactggcgatgaggatcttcagcttctgatagtaggaatcactgtcggaaatatattcgggctcaaagttgaagttggggttaacctcagccttatacatttctgcaattttcctgtaagttttggactcagcgctatcttcagttttctggatcaggaaattcaaggtcacttccggattttcgccttctgcaaaagcaagagaggaagaaatcataagcgttaccatcatcaaaagggtcaaaaagatttttgccatctttttcatgctgttcactcctttattgtgtaataacgtctcattcataggcggccaccctatatgaatattgtatacacgaatgaagcagcaaacaagtggcaaaaacttgatatggaggttcaaaaaattttgtgtatcctaaaacttggggcgctgttacctaaagaattatgacgttttaaaactcgtcaagcacttctgaatatcgcggcaattgaatggtcacacgaacgcctttgcctttctggctccatacggaaactccgtaactttcgccatagagcaggtggatccgttctttgacattattgatgccgtaaccgctggacaattgttcgcgatcctcaacaccaacgccgtcatcttcaataacaataatcaacttttcatcctcttccgtacaggtaatgcggatacagccttgaccgactctgggttcaaacccatgctgaatggagttttctacaaaaggttgaatcaggaatttgggcagaggataattttccaattctaccgggcattcaatttcaagatgaaaacggttagggaagcggaaagcctgaatgagcatgtatttgtggatataatccagctcgcttttcagcggcagaatgctgttgcctttgttgagcgtgattttgaacatgtcggaaagggcttctgtcatttgagcaatatcatccacattatgcagcacggccatgaagtatagcgaatccagcgtattatacaaaaagtgaggattcacctgtgcctgaagcgcttggtactccgcctcgcgctcacggatctgtaactgtgtcatgcttttgttgagctcgatattcttattgacagcctccttcaaaacattgccaatctcaccgatttctccgtcatcaaattccgctttgatgggctgatgcgtatgatcgaagttctgaatcacctctttcaagtgttcaagaggcttactgatgtaactgctgctggcaatcgatacaacgaaacccataattacaacaatgatcagcaggctgataatattgttcaggagcagcctgctggctgagctcagttcgcttttcaaaatgctgttgacaaacagccagcccgttagttcattttgatgtgttgtgaccaaatattcagaccgatcgttcggatccagcaatacatttttcaaatcttcaaactggcgatcatactcgtcctcgctggcaaaaatcatatctggtccatattccggcttcgaatccacaatcatcatcacgtgactttcctgccccacatgccatttcaacgcaatatcacttacaatactgctgtcaagcaccacgaccagcatgccgacgtggtacagctcgttggggtcgcggatttcctttgcaaaagaaatttgattctggtttcctgtgatgacgttctgcccgtagaatacttcttttccctgtgcttcaagggcatgcttataccagtcctcttcaatttcaacatttctgtgaaggtatcggtcataatcgctttcataagcatcagacacgtacacatagcgattttcatcaccaaacagcagcaccgcagtaacggccatctcctgataaaagatttcaacaagccggtttcgcagcgcgcggttttccaaactgtcctgaatacgctgatgctttgccagcgtcggcgctttgagattatcaataaaatcgttggcaaacacaatttcacgaatatcgcgtaccatcggtcgtaatttgagtgtgagcgcatcactgtatgctttcaggtttccctgattaatttctgagtacaacatttcaaactgctgatttgcctgtgtataaaccaccacagcagtaagcaaacacatgaataacaccagcagcataaaaattgccagtaatctgattttaatttttcttggcttgtgtttattcatgtgcttcttcctcatcaaagcctgcttctgcagctgtcgtggcacggtattctgcgggtgtcaggccggtttgctttttgaaaacatcacaaaagtaacggtaattggaataaccaacagcctcgcaggtcttgcttaccttatatcctttggcaagcaaaagcttggcttcttccatgcgtcgatttgtgagatatttgatgaagtttgttcccgttatttctctaaaacgagcgctcaagtacgtgggattgacagcaaattcttcagcaatccccgtcaaactaagtggggcagcaaattttttatcaatataagctgtgattttttgaatgttgattcctgtttccttatgtccatcttcattgattgcatcaaaagccatatccagcagatccagaaaataggcttctgttgtatgactctcttccattttgataaaatcaacgggctttacattgttttgtttaaagaattgttctgcgtcttttcccaaagccttggatacacaggtgcagatcgtgtgatacacttcttggatggcaacgtgctgcgccttttgagacttgatttctttgtagaattttcgcagtgcttctttcagttggaggcggttttcctgctcaaaagcctcctgtacatcgtgtgcaaacacaacatctccgtcagaatgaatccttcttttttgctcaagcaataggacggttcttcgcaaagcctctctaattttgggaatcgtggccggtttatcgatatagtctactacgccaagtttaagcgctttttgcgcataggcaaactcctgataaccgctgattaccacaaaaatggtattgggtagcaaatcatacaccgactcaatcagcgaaataccatccattccaggcatgtgaatatcagtgatcacaatttcaggcttctcacgcataataatgtcataaccaaccaagccgttgtctgcccatccaacgacgctgacatcatcgcgaatcctcggaataatcgctttgattccctgtattacaattatttcatcatcaatgataacaagtttatacacgataagccctccacgcagattggtaaggcgaccatataaatgagtcgttatccttttttatcatgatagcatattttatcgagtatgaaaagagattctgtggcagcctttgatctgctcctgagccataaaaatgaaatcgaagccacggttggcgcttccctgacctgggagagggcggatgaatacaaaagctcattgatctgctatcatcttcgtgacgtaagaattgcaaacgaggctgtctggccgcgcatggccgagtttcatgcacagcggagcgacgggctgtgcagcgcggttttgccatatttggaggatgaagggttataagcgatatcgataaaccaaaaattatagtaattctgtcagcagggccttaattctacttattcaacaacttggaacttggacaacaaagccgggcagctagtctggcttttttccatctcaacgccaatttagagattttttattgctgcatcaataagatcgcagacagcttgacactcatcaggatatcctaaaaacagaaacgtatgattgatcagcaaggaacgcagaaaggtgcttatcaacgggtgctcctgttcgtaattgatatagtcgctctcctttaataccattgtttctggttttgacaagtccccatgcatcttaaggatataatgatcgcttgcctttgaaagtagttcactatcttgtgaaacaacagtataaagctgcacatttaccgacatcgattcttcaagcagattatcatagtttgtagtgacaatatgattggggagaagcaaaaaaatctcttcatcaatcgcatttgctgacccgccactacccagggaatcttgaagaagctgataatatgctttatgcttctccgaatgatcctgaataaaataatactctggaattcgtaagtattcatcctgcgtgaaggaaaagcgctctttacaatcagcctcttttgagcaaggcttcttctctttacacacattgcaatgactgtatccaatttttttggcaatatcctgaattaattcaccccatgtcggtatgccagaattttttgaaactcctgccccaacaaaaacaactaagcgattattctcattagcttttctgatttcccgaacagattctacccaatccatttgccgcccccgaacttatctgaacttttgtgggaaatgtccttctcggcatagtgatttgttaaagagaacaggacttccaccgttatgtgacaggaccaaagcaaatgctcaatcaagcaattcttcagtcttttcttctacacgtgaataaccgacgtccatctcaattaaaaaagctgagcaagagcggccagtatgccgcaaagaaagtagaacacgcaaagtcttctgttcgggcaaaagtagagcacgtattcggtgtcgtcaagaaacagctgcaatttcgaaaaacgcgataccgagggctcgaaaagcagcgagccaaattcaatatcatgttcgcattggcgaatctgcttctggctgacaggccctgcctggcggcttgaagttgtgcgctctcgcgaagaaatgcgccgggaagcctatggtttcctgtctgatgggtgattcgacagcgcttgcctcagcaattgtgcggtgctgccatagataacatgttctccaaatagaacatccgttcatcctctgtggcggcatgctccatcatatagctgtaatagagcagttcattggtcgtagaggccacttcctgcgtaaagatgatgggctccgcatagatcgattcctgattatccttggaatagctgctgtaaatagcatgacccagctcatgcgcaatggtgctgacatccgaagaatatcccagatagttgagctgcacaaacggcaggaattcttttcccatggagaatgaaaacgcgcccgtcaactttgtatccgttggatatacatccacatgaccgctgttgatgattcggtcgtagtaacacaaatattataatggaaactcataagcaaacaggagagcgtggtatgcatgcaccacgctctccgtcttatgctctgctattattccattccgcggtagccgtgcttttctgcatgaccaagcagataaaggaacgcaaaggccgggatacggatcaaatctgttccacttttcgtattgtggacgccaaaatcatcggcggttttcgttaccacgatggaggccgcagcctctccgctcaactctacgatggcggagtcatccgggatgggggcaccctcccgatactttacttcaatgaggatgttcttggaattggagtattccaccacaacatcgatttccttcccacgcttgccgccgcgatagtatcccaccgacgcagcctgctgatagtaaaatgcggctacatgtttgtaaacggcggtctccacaaccttccccatttccaccgggtcgctcagcatggaatcgtccatcaaaaccgcgttgcggattgccgcgtcggcaatgtagatcttggggctggctttgagaacctttttccccgccatattgacgggccagctctgataaatcaggttggcactttccaaatacgcaatatagttttcaacggttggcctggaaacgccattcaactcctttgcaatcgcctcgattgagacgatttcagaagaaacattgcacagatacaggaagatacgctccagctctgttgcgttgcggattttgtaaagggagggcagatcccgcttgagtactttgtccaccacatcttcccgcatgacctgctgggccagaatgtcgttgtcggccagggccagttcagggaagccgcctacttgcagatagcggttgaagtgattctgcaccttggagagctgcagcatgatccgggtgcgctcctgctgggttttatacaccaacggagtgatcttcaagtcatccggaaggtcggggcgatctatgtccagcagctcgcagtactcatagaaggacagcgtgggaacctggatggcagaccatcgtccggcgccgctctcccggctccccttgaccaaaaccggactggccgagccggtggccaccaccttggtgtccggctgcatatcatagatcgttttcagccatttgtcccagtcctgcgcatactgtatttcgtcaaagaagtagtagacatcctgatccggacagatattttcgtgatagcactccagaatctcgttcatggcgctcagtttcagcatgggatgatccatggagatatagacgatcttctgaggcggcacgtcatttcggagaagggcctcgatcatctggtactgtatggtggtctttcccactcgtcttgttccggttaagacgactgtgcgccggatgtcggtttgattcaggcgcttcatggcctcgtaaaaggcgaaccgcttataggttttggacagtttcgggtttacgactcccgttttccaccaagggttgtaggagaccagcactttcagcagcccttccttgctgatgatagccatattagcacctcctttaacaatatagtagcactaatctttatctttttcaactattattgataatatacttagaataattgttcaacgatattgacaaatgcaccgctatgttattcgattccgaaggtgagtatccctttgctttgccaccggtatcccttgtgccggggacctttgttctcttgattcttttcatgctcccgcctgccaagaagttcgtctttttttgcaatcgcggggtcataccaatccgcttttgcccgcgcccaagacgcccatgcagaaagagcctgctccgaatacgctttttccatagcagagacataagcgtgaattctgcacgcgttcttaccgtgatgataagcgatcaaccgctctagaatgatattgtagctccggctttcgctgcaccgattctctttttgatggcgaagtcgattggaagtcatgcccagggtcaccatcatgggagagatgctgaggtagtttgcagcaattttgactgtgattttcgctagtacccggagctcatcgtccgtatacgttcctatacccttcacctactcgcttggaaaaatgggaataccatactcccacacaccccctgcattaaaattttccgcttcgcactgtaccatattgcgaacacacgttcccatatgatataatctacccattcaccgcctttttctgtcagaaaaaccgaatgtatgcgaaagcgagacaaagtatatggaagataagcttgtatttgatgaaatcaatgagcgggatatgcgggaagcgccggatgttgtaactgcccttgacgaaacgataccgtccccggcccgaattcagatgacagaaaccgttgaactgccggaaatacagacgatgaccggctacatccgcaggcattatgaagaagaagtcctcgcggcgctttcgcataagatccgatgcggcgagctgggtgtgcagtgcggcgggaagctgctgcgggaaacctcacatacggcctcggggcatgacggtaaggagggtttgagcaaagctccgattgtcatacccggggatggcggggcaactgaggaagcggctcatcgcagccgcaacgcgccgcttgtgagcatcacgccgctggccggcaagatcgcctggatggggtttcggcgtgtggggctgtactttgtagaagcggatctggtcatagaggtggaggccgaaatccgctgcggcatgccccaaagctcacagcgcgtcacacagcgataccgggcggatatgtgcatcagcatggaaagcggcattgaggtggagtacggtaacttccgtatccaccgttatgaggaagaccgggacggaatcaggctggacgaatacctcattccggtctttcattgggaggacatcgaaaaagaagcggaagacatcattttccgcatcgctccggaggcattgcacaatcccacatatctgcgacccgctgtgttggctgagcggctgggactgaagatcatcggcctgccgctgtaccggcgcgacaggacggcaagcatcttgttctttgacgcgggcgaagtgctggtctgtcaggatgttcagcgaccgcagcttcccccggtccccgtgcgcgtggaggcagacaccatcgttctgaacaccacgggcaaattcaacggcaatcgtgcgatcatgcatgagtgctttcactatgtcgagcaccggctgtttttccagctgcagcagctgcacaacagcgacgtcatggaaatcatccggtggaagcgcgtggacgttcagaaacaggagcgcagcccggtggaatggatggagtggcaggcgcatgtggggagccagtgccttcagatgccgcaaacgcaccttcgcaaacggttgcatgaggaactggacggtgaaaacccgccaggccggcatatggggtatcggctgcaggccatcggtcgcgcgctggcaaaggagtacggcgtgcgcaactaccagatgcgcaaccggatgattcagctgggatatacggcggccaaaggtgtgctcaattttgtcgacgacggctatatcgagccgtttgcgttttcggccgacacgtgccgcggaagccggacattcgtcatcagcccaaaggaaacgctggaggagtatgttcgcaaccaggctttccgggaactgctggacacggggcactacgtctatgctgacgggcatatctgcgtcaacgaccctgcgtatgtggtgctgcgcaacggcaagctgcgcctgaccgaatgggccaacgcgcatgtggacgcctgctgcctgcggttcgtgcggagctactatcgcgacaacaggacgcgctacgtctatggccagctcaacagcgacgaggagtataacggacgcgggctggcactgtcgatggaatatggacatgaaaacgtcctgatgcaggcgcgtgccatgtcggagattctgaccggtctgccgggcagttttcatggtacgctcaaggcacatatgaagcgactgaatgtgacccgtgaaaggctggcggaagaggcgtttctctccgattcaacgattaaacgcctgcgcagcgcggagaaagacgattattcgtttgaccaggtgattgcggtctgcatcgggcttcacctgccgcccgaatatagtctggatttgattcgcaaatccggaagaatcctgcgggacacgccggaacacctgatttaccgggctatcctgcagacgatgtataggaataagattcaggacattcaggagacgctcagaaaatgcgggtgccgggaactgaacctgaaagagtgaacgagcctttgaaacaggggcgaaaccatgccgcctgacgtgcgatgcctggcacggcaggcggctttttggatggcttctctggatggctgcggccaaaaggtaaaaaaattttggcggagcggttctggtcgtgacccgctgccgcttcttttttttgccccgggaacgtcaaaatctgccgtgtgatatgccaaaaaacgcatcccggagggaaagcgtgcgatcagtgccttgcaaaatgaaggaaatccttcattttgcgggtctttgccagacctgttccctgaggcgcaaaaccgttatcatcctattcgtgaggtggccacccacaaagaacccggaaaggacaaaggacgagcgcagcacaggagcaccatggcaaggcgagaaaccgccgccggcaggcgacccgtgcagcgaagccgatgaaccggcaaaagccgtgcgtcccgcgtcatgcgcaagcaagcgcccggagatttttgcgggaggtcacgatgatgtttgatgcgacacatcgcttcgtcatggcaggccatatcgtctccatcgaattcacaaagcagggccgtcggcagttcgccgcggtcaatcgcaggctggctgcacgatatatccgtgcgttcatcctcaagcgggagcttaagcagtacatcgccgcgcacgaagcggcaggcgtgcatctggatacgcagtgccaggaggtgtgctatgacagcggcatctatttgctgctgcgcaggacgcaggggacgtggtacatcaccgacatcgtcctgatggacgcggcggccggcttcgtgcccgtgttcacgtgggagcgcatccggcgcggtgcgcccggggctttgcggcgggtgctgccgtgccggcacaatccggccgcgcggccgtcgggcggggaggcagtgtgcctgtgaaccgggaagaacgcgaggagcttgccttctgtgaacgttgcgggaagcgtgccggatgcaccctgtacatggacggacgcctgcgtggggagtgccagctgctggacgaccgaaagccgctgagctatcggaaccatgaggggtatgccgatccgacggcctactacgccctgctgaacatcgagcgcgagagaaaacgcggaaagcgtccgctgcaaaagcgcaggacgcggacgcaggtcgaacactacgactgagaagaagggggaataccatgagcaaaaagacctataccctgacggcggaatcggtccgccgcggccatccggacaagctctgcgaccagatcgcggacggcattctggacgcctacctcaggcgcgaccccaaggcccgtgtggcggtcgaggttatggcgtccaacggccgcatcaccatcgccggggaggtgagcgccggggcggagcttcttgaggagcgggtcatgtgcgacacgctggagcggatcggctaccgaagcaccgacctaagcgacgacggcgagctcgacgtgaccatcggcatccacgcacagtcccccgacatcgcgcaggcggtgacgcgcacggagccgggcgcgggcgatcagggcatcgtgacaggctacgccacggacgaaacgccggaatacctgccgctgcccgtggtgctggcgcatcgcatctgcaggctgctggatgaggaaccgctccgcggcgccggcgtggacggcaaggcacaggtgacggtatcctacagcagcggaacccccgcggcggtaacggcggtggtcgcttccgtgcagcacgccaaggacgcggatctggatgcgctgcgcagggacgtcgaaagccggatcatccgcagggccatccccgcagaccttctcacaaaggaaacgcgcctgctcatcaacccttccgggcgcttcgtcaagggcggtccggcggcggataccggactgaccgggcgcaagctggcggtggaccagtacggcccggccgcgcacatcggcggcggcgcgctctccggcaaggaccccaccaagacggaccgcagcggtgcgtatgcggcccgctgggtagcgaagaacctcgtggccgcggggctggcgaagcgctgcgaagtacagatcgcatacgccatcggagagagccgcccgatcagcgtgacggtggacgccatgggaacgggccttgttcccgatgccgcgctggaaaaagcggtgaaggaggtctttgatctgcgtcccggcagaatcatcgacgcgctcgccctgcgacggcccatctacgcgcccctggcggcatacggtcactttggtcggcccgaattgaatcttccatgggaacggacggaccggcgcgcggcgctgctggcctccgtggtgaaacagggatatccgctgtgaggctccccatgagtcaggagggattggccgatgcaccccatccgcgctcccacccggaatcaggtccgttactccccgtcatcgcaccggtggcggattttttgtacccgttttgcaaggaaggaggtccattcatgaccatacatatccagatgcttcaggagatcgcaacgaacgcacaggcgatggccgaggccgcgcatgcgatggcggcgtccatgcaggccatcgtggacgactgcgcccggcagcttgccctgcgcaaggcggcgggggaaagcgaggaagccgtcatgaacgaagcaatcgggcaagccgcaaccggcaagccctctgcgccacagacaaccatcgtggagctgcgcgcttttgtggcggaacgctcgaccccggagaaccggccgaagatcagggccattctggaaaagcacggcgtgaggaaactcaccgagcttcaggaaagccagtatgccgccgtcatggatgaggtggcggcgctgtgaacgagatccagcacagcacccgttcccatgcccggctcaacgcctccagttctcatcgctggatgatgtgcccgccgtcggtgaagctgtccgagcagtttgcggacaagccttccccgtatgcggaggaaggcacctttctccatgagctgtgcgagctgaagctgcaccgctatctgggggacatgaccccggaagtgctggaagcgcagtacgcggcgcaccgcgacagcgacttctacagcgacgaggctgaaagcgtcaccgacgaatacgccgccttctgcattgagacgattgaatccgtgcgcgcctcctgtcccgatccgctgattctggtggagcaccggctggactacggcgagtatgtgccggagggcttcggcacgggcgatctggtcatcgtggcggacggtgtgctggaggtcatcgatttcaagggcgggcgcggcgtgcgggtggaagcggagcgcaacagccagctcatgctgtacggcctgggcgcggttttggagtttgacccgctgtacgatattcgcaccgtgcgcatgaccatcgtgcagccgcggctaaacaacctctccgcctatgaaacgactgccgatgagctgatccgctgggcggaaacggaggtgcggcccagggcgctgctggcggcgaagggcgagggcgagttctgcgcgggcgagtggtgccggttttgtaaggcaaaatacacctgccgcaagcgcagcgagtaccacatgcgtctggccgagcgcgatttccggcagcccgacctgctgaccgacgaggagattgccgacatcctgcccgtggcggagagcctgaacaactgggtggccgacctcattgcctacgcgacgcagcaggcggtggacggcaaagcctggccgggctacaagctggtggccgggcgcagcgtgcgcaaatacaccagcgaagcagaagtcattcgtgcggcaacggaggccggctacaccgacatctacaagacgacgctgctgggcgtgggcgatctggagaagcgcatgggcaggaagaagttctccgaggtgctgggcaggtacatcgtcaagcccatgggcgccccgcagctcgtgcccgaaagcgatccccgcaagccttatgccgacgcggcgggcgattttgcacagcaatgaaaggacagtccatacagggcagaaaggaaatcaactatggcaacgaaagtcattaccgggaaggtacgcgcgtccttcgtccacatctttgagccgcagagcgtgaacggctccgaccccaggtacagctgttccttcatcatccccaagagcgatgcggagaccatcgggaaaatcagggccgcgattgaggaggcaaagcagagcggcgtgaccaagtggggcggcaagatcccgcccagcctgaagcttcccctgcgcgacggcgacatcgaccgccccgacgaccccaactacgctggcgcctacttcgtcaacgccaacagcaacgagcggcccggcgtggtggaccgccggcgcgtgcccatcactgacccgctggaggtgtactccggctgctatgtccgggcatcgatcaccttctatcccttcaacaccaacggcaaccgcggcgtcgcctgcggattgcagaacattcagaagtggtgcgacggcgagccgctgaacggccgcgtccgcgccgaggacgagttcgacgcgctggacgatgcggacgacgaggattttctagactaaaggaaagccgcgcatcggttacttaccggtgcgcggctatcggatctcctgttccagatcatcaaagatggggctgtcaaagaactcccgaaggctgatatcaagaccgtcgcacacctgcttgatcgtcacgatgcctggattcctgctcttcgcgttgagcatactgtagatcgtcgtcggcggaaccccagcatcattggccagcgtattgacggtgatgttgcggctcttgcacagttccatgatccgctgcgctaccgcctgttttgcgttcatgcaaccacctatttgcctttgccgcaggcgttacttgacctcctgatccagattgtcgaagaggtccgaatcgaaaaactcgcggatactgatttccagcccgtcgcacagcttttggatcgtcgcaacgccggcgttgttcgttctgccgtttacaatgtcgctgactgtggactgcgtgacgccggagatgatgctcactttgttgatggtgatgttgcgctgcgcgcaaagctcgtacagccgctttacgaccgcctgtgaaatcgtcatgcctgctttcctccatcggaataccgttgaattcatgatatccattcgatgatgaaaagattaacggaatatcgttgacttctgacggaggagggtatatgataacggtatatcgttaacaaatgagaggttcaacgccatgcgaaagaagctcgcatttaccggccaacggcccgaatcgctgcctttcggggaaaacgagaccgatccgcgctgtatccgtctcagggaaatgcttctgacagagatcacggaccgggtaaaggcgggatacgataccttttacaccggatgcgcaagaggcatggacatcgtttttggcacacaggtgctgctggtgaagaagacggcctgtccccacatccgactgatcggcgtggtccctcacgagggacaggcgaaccattggaccgagacctggcgggaccgctattttgacctgctggaacaggcagacgacgtggtcacgctctccgctcgctatttcagtggttgctatcatgcccgcaaccggtacatggtcgacgctgcggatgccctcctggccgtatgcaggaagggtacctccggcggcacgcaatatacggtgaaatatgcatggcagaagaaccgagagatcgtcgtgatcgaccccgactcgctggagcgcagactgctgccgcccagactcaccgcgctctgagagcgcaaacacaacacaggcgcatccgcgagggtgcgccttttgatttggaggtgatgcgcttgcgcgttatgcatctggacatagagacctattcctccgccgccctccccaagtgcggcgtataccgctactgcgacgccccggatttcgagatccttctcctgtcctacgcctttgacgacgcgccggtggtgaccgtcgacatggcgtgtggggaatcgctgccggatgaattccttcatgcgcttgaggacccagacgtcctgaaaatcgcgcataacgcggcctttgagcgggtgtgcttctccaagcacctggggcgctggctcgatccggcacaatggcgctgcaccatggtcatggcgtggtaccggacgctgccgggaaaactggcggacgtcgcggtggctctggacgttacggaaaaaaagatggaggaaggcaaggacctcatccgctacttttccgtgccctgcaagccgacccaggccaacggcggacgcacgcgcaacctgccgcggcacgcgccgcagaagtgggcgacctacaaagcctacaacgcgcaggacgtggaaaccgagcgcgcggtctgccatgcgctgctcaggcatccgctcccggaacacgaatgggcgctgtacgcgctggatcagcgcatcaacgaccggggcgtgcgggtggatcggctgctggtgaaaaacgcgatggcggtcgatcagacgttttcggagcgagcgttccaaagggccaaggcgctgacggggctggaaaaccccgggagcgtgagacagctcaaggcgtggctcgccgatatggatatgcccatggagagcctgtccaagcgcatcgtgcaggagaagaccgccgaggcggacggcatcgtgaaggaactgctggaactgcggctggagctgtcccggaccagcgtgaagaaatacgaatccatggcgcggtgcatctgcagggacgggcgggtgcatggccttttgcagttcggaggcgcgtcccgcaccttccgctgggcagggcggctggtgcaggcgcagaaccttccccagaaccacctgcccgatctctccctcgccagagacatcgtcagaagcggcgacgaggaacagctggagctgctgttcggctccgttccgggcacgctctccgagctcatccgcacggcgttcatccccaaggatggatgccgttttatcgtggcggacttctcggccatcgaagcgcgcgtgctggcgtggctggcgggcgaagaatgggtgctggaggagtttcgcggcaggggcaaaatctacgaggcgacggccagccgcatgtttcatatcccgcaggagaccatcgtcagggggcatcccaactacgagtaccggcagaaaggaaagcaggcgactttgtcttgcggctacggcggaggcgtcggcgcgctcaaggccatgggcgcaaagatgccggaggaggagatgcagccgctggtagatgcctggcgcgcggcgaatccgcatatcgttcggttctggaacgcgctgggcaatgccgcctcggaggtgattgagcggcagaatagcgtccgcgtgggcaaggtgacggtgtaccggaaggaagggcatctgctgatccgcctgccgggcgggcgcgacctgtgctacctctcgccgcgctttgtgacaaaccgcttcggcagccggggcatcggctatctcgcgcccgcgggaaacgggcagatgacgccacaggaaaccttcggcggcaagctggcggaaaactgtacccagagcatcgcccgcgacctgctggcgcacgccatgttaagccttgaaacggcgggctatcccatcgtgtttcacgtccacgacgaggcggtcatggaagtccccgacgggcagggcagcgtggaggaggcctgccgcatcatggccatcccgccggactgggcgcgggatctgccactccgggcggagggagatgagatggcatactacaaaaagacatgataaaggacagccttcaccatttgaagaatctccttgtccattgcgggcaaggagaatgaaatgtgtgcgtgttaaaggcccaacgaatcgttcaatatgcttttcagatcgcgaccgctgtacacgatgcggacaattcgcacttcacaggtaggttcatggacaagatagaaaacagtgtagtgatctacgatcagcttacgcatacccatggaaaaccagggctcccagttgacactggcatggcgggcggggagctgttccagcttgcgaattgcgttgcggattctgacggtctgcttcgcggcgatctccggttccagaagctctgtggcgatgtaggtatagacgccaaacaaatcgtctctggcagcgggcgagtaaaccacgctgtaagtatccatcagatgccaaactccttcgcaagcgcctggtcgatctcatccgctgtgaagctccccttattgaaggattccacgcccttgcgcagttcggcgtccagttgttcttgcgtcatcctgccgacggcggttggcgctttggcaggaatacgcgcggagaatggaagaccattatggagaacaacctggctataggtcatctggataagcgccgacggtgtgattcccagctgtgccagaatggcctcggcgttttccttgagctgtgcgtcaatcctggcgtaaacggcagatgtatttgccatatccatcagtctcctttctgttcatacctgtagtatatccgattttgcttgcatttgcaagcaaatgaaatcaaaagaggtcaaaggcccagccgaaggaggtacctacatgcaaatcacccacgacaaaaagctgctcatcgccacgggccgcagccgcaaggcggcgcagtggcagaacagggagatgctctggagcgaatttctggataagctctcccggcccacccgcacgcgggagacggcggccgagtacgccgccatgggcaaggccgagcgcgacgacgtcaaggacatcggcgggttcgtgggcggctatctcaaaaacggcaggcgcagcaacgcgggcgtggtcaaccgctgcctggtctgtctggacgcggacaacgccgacgccgcccttgtggacgatctggacatgacgttcatcaacgcctatgcgctctactcgacccacagccacacgccggagaaaatgcggcttcggctcatcatcccgctttcccgcacggtcacgccggacgagtacgccgccgtctcccgccgcatcgcggacgggctgacgctgtcccgcttcgaccccacgacctttgagccggcaaggctcatgtactggcccagcgcgccggaggacggcgagtacgtgtttcgctatgcggacgagccgtttctcgacccggacgaggtgctggccacctatcccgactggacggacgcctcgctctggccgaccacgaagccgctggaggagcgcgcccgtgcaaaggcgtccaaagcggaggacccgctggagaagcgcgggatcatcggcgccttttgccgcgcgcatggcatcacggacgtgctggagcacatcctcgccggccggtacaccgccacggcgcaggacgaccgctacaccttcgtgggcggcagcaccacgggcgggctggtggtttacgacgacaagttcgcctattcgcaccacgccaccgacccggcgggcggccagctgtgcaacgcctttgatctggtgaggctgcacctgttcccgccgggcggcacggctccggacggcacacatgtgggcgacgaaaaggactccgtccgccggatgcaggagtacgccgcgcaggacgaagccacccggcgcatgctctccgaggagcgccgcaggcaggcggcgcaggagttcggcgatctggataatcaggaggcacagccttcgcaggacgagcactggcaggaaaagctggaggtggacaggcagggaaaggtcagggacacgctgggcaatctggcgctgattctgcgaaacgacccccggcttcgggacatcgcctacaacatccaccgcagcggcatcgacatccgccgggacgcggagggctgcagctccgtcccatggacgcccatcaaggccggctggaacgaatcggacctgggcgcgctgcagatctatctggagcatgtctacggcctctacaccccctccaagctcaagggcattctgctggccatcgcggcggaacggggctaccatcccatccgtgactacatcgaatccctgcccgcatgggacggtgtgccgcgtgtggacacgctgtttgtggattatcttggcgcggcggataccgcctatacccgggctgtggcacgcaagatgatggtggcggcggtggcgcgggtgtaccggcccggcgtgaagtttgacagcgttgtcgtgctcaatggcccgcagggcatgggcaaaagctcgttctttgccaggctgggcggcaggtggttcagcgattccctcaccatcggggacatgaaggacaaggccgcgccggaaaagctgcaggggtactggattctggagctgggcgagctggcggggctgaagaaggtggacgtggagacggtgaaggcgttcatcacccgtcaggacgacaagttccgccactcctacggctacagcgtggaggaccacccgcggcagtgcatcatcgtgggcagcacgaacaacggcgacggctttctgcgggacatcacgggcaaccgccgcttctggccggtgacctgcaccacgtcgggaaagcaccgcccgtgggaggtggcggaggtggtggatcagctctgggcggaggcgtacaggctgtttcagcaaggggagacgctgtatctgccgccggagatcgagcggatggcggaggcggagcagacggaggcgctggagagcgatgtgcgcgagggcatgatcgcagaatatctggagaagctgctgccggaggactgggacaggatggacctgtccgagcggcgcgggtttttgcgcggcgacccgtttacgggcggaagccgcacgggcacggtgcggcgcacggtggtcagcgcggtggagatctgggcggagtgcttcggcaaggaacccacggccatccggcgcagcgatacctacgacatcttcggcatgctcatgaagatcggcgggtgggaaaagtacggcgggaacaggagcgcatccatgaagcgcgcgttctacggcatccagcggtgcttcgtgcgcaggtagagaattgtccgcagcaggcggatcacattgcctccgcgcttgcggtcggtttgccatgtgcgatggcaagccggagagacgcggcgggtgcttgccaacgacgatggcaaaacagggcaaacggggaaggcaaatgcgggcatatataggaagaaaacttccgtgtttgcgatttgccatcttttctttattggggttttgaaaaagtgaagaaaaaagcaaaaaaagcgcgcatatgtgcccgtatgcacctacgcgcgcgaggcaatgtaccgttcccatcaaaaggactgccggttccacgatatatccccgctcccttatgtggctgcaaggcatggcatgcgccaaactttgctaccgcataggggagctgcttatagcgcactacgattggagctgatttcccatgaacgcacataacccccgcgatgcacggccgcttgcggaaagcgacctgcatgactaccagcgcttctgcgtggagttcatcgaggcgcacccgcaatgcggcgtgttcctcgacatggggctgggcaagacggccattgccctgactgccgtgtcccatctgctctacgacagcttcgaggtgagccgcgtcctgattatcgcgccgctgcgcgtggcgcgggacacctgggttgccgagctgggcaagtgggagcacctgaccggcttgcggctggaacgcgtgctcggcacacccaaagagcgcgtcgccgcgctgagccggagggccgaactgtacgtcatcaaccgcgagaacgtggaatggctggtccggcactacgccgggcgaaagctgcccttcgatatgctggtgatcgacgagttgtcatccttcaagaacagccgtgcaaagcggtttctggcgctcaagaaagtgctgccccagttttcccgcgtcgttgggctgaccgggacccccgcgcccaacggactggaggacctctggccccagatctatctgctggatcggggcgcgcggcttggcaggacgatgcgcagctatctggacctgtactttgacacccccaacagctggacgccctacaggcgtgagctcaagcccggcgcggaagaagccatctaccggcgcatcggcgatatctgcgtgtccatgcgggcgacggatcacctcaggatgccggagcgggtggacaacgtggtggagatccggttgtccgcaagagaggaaaagctgtaccgccggatggagcgggacatgctcttgccctatgcggacggggacgtcctcgccctcaacgccgcgtcgctggccggaaagctcctgcagcttgccaacggcgcggtctatgatgagttccacaacgtccgcgtgatccacgaccgcaagctggatgcgctggaagacctgatagaagcagccaacggcaagcccgtgctggtgatggtcaactaccggcacgacctggcgcgcatccggcagcggtttgggacgtacggcccggagaatccgggcggcgtgcgggagctgaaaacggcgcgggacatggcggactggaacgccggcaggattcccgtcgccgcgacccagcccgcctccaccggccacggcctcaacctccagcacggcggcagcaccatcgtgtggttcgggctgaactggtcgctggagctctacgagcaggcgaacgcccggctctggcggcagggccagaaggagacggtggtcgtgcaccatctggtggtgaagggcacgatggacgaacaggtgatgcgggcgctcagggacaaggccgcggaccagaacgcgctcatggcggcggtgaaggcaaagattcaggccgtgaaagaacgggacaccctgtcggggggtgaaagacttgcctgagaaggacatcgttgcggccatcaggcggtatctggccacactgggtgaggacgtgttcttctggaaggagcacggaggcgcgtatggtacgtccggcgtcccggatatcatctgctgctacagagggcggtttctggggctggaagtaaagcggccgggcggcaggctgacgccgctgcaggagcggaccctcgcaaggatcaacgccgccggcggcatcgcccgccgggtggagagcgtggaagacgtgaagaccatcattcgtcaggcggatgggggagaggagaatgcaaatgacggcaaaggaatatctgtcccaggcgtttcacatcgaccagaggataagcagcaagctgtcgcaggtgatgcggctgcgggaggcggcgacgaactgcaccgcgacgctgtcggatatgccccggccggacagtccgagccggcagcaaatgaccgataccatctgcaagatcgtggatctggaacgggagatcaacgaggacatcgaccggctggtggatttgaaggcggaagcccgtcgggcgatcaacgccgtttccgacccggaccagcaactgattctggagctgcggtatctgtgctataagccgtggaatgagatcatgacggagctcggctacagcgagccgaccatctaccgcctgcacggcgaggctttgaaaaaaattcttgtgcccggcgaaaaatgatagcttttgatatggtttgagagtcgtgatctgtgctatcattacactcgtcagaaaaggacacacaccgcccttcggagatcagcagcgctccggagggcagtttttattccgctgtgtctgatgacagagaatatccggaaaccgcttgacttttcatcggttcagagcgtatatgtcactacccgaaacgaacggagggatgaacatgacgctacaaacgaaccccgcggaacgccgggaggtggtccgggcgatttcggagaggctcggcagcccggcggtctacctgcgcatgccgacctgcgcctaccggatcggcgacctgacggttgagcgggacggaagcatcgcaagcgacgacggggcgctgctggacgggctcaggccgatgctgatggaacggggttggctgacggacgcggcggattccgaagcggatgcgcccgcgacagagacggaaccggacgggccagactccgaacccacggggatggagctgagcttcccggtggaggactggacggtttcgcagctgaccaaccttctgcgcatcctgtacagccatcagcacatcctccgccggatgatgcgaagcgacgccctgtacatcgaccggcagctggtggagcggctgaaggaagcgcagaccccggccgatttcgaagccgagcttgcggatggccgggcggcggaaatgctgaagggctgccgcctccgggagggcaagctcaccttcgagacggacccggacgacctcgacctggtccgccagcaggcatacggggcgcttctgggcgcgatactccggcaggcgaaagatgccaagcgcgtgttcctcaaagcggacgcggattccgaaaacgagaagtaccgcgccaacagcctgctgacgcggctgggctttagcgggccggagcacaaggagctgcgccgcatgctcatgggtcaccttagcggctatgccgcattcaaaaacgagacgggcatgcgggcgcaccgggagaagtacgcgcgacttcgccgggaacggcaggcagcgaaggaagggacggagccatgagcgcgtggatggactggattcgggatgtcgcactcaaccgcatcgatacggtggagcgggatttgagagcgcaccccgagcgcagccacctgtttgacaaggcggtgcgcgaactgcacgcggcgctggacgaaaccgaagcgcaccccaacgcggagttgagcgcgcgggacaatctgtggatggggtacaccgctgcgctggcgctggagatgtatctggccggggcgcgggacggcgggcgcgtgtatcacgcctttgtcaccggagagctgccgggcggggcgattcaggaacggaagggagaggatcaccatgctcggaccgacccctgagaagctggcatggctgcgggagcactacaggcccggcgcgcgggtaaagctacttcgcatgaacgacccctaccggcccgatttgaaagcgggagcgcttggcaccgtgatcgccgtggacgacatcggcacgatccacgtcgcgtgggacggcggcgcttcgctgggtgtggcctacggcgcggacgcatgcgcggtggtggatttggaaggaggagaagcccttgacggaacggatggaacgtaagctgctggatttgaaagcccggcagcagatgggggagcgcatgccctgcccgcgctgcggggaggaccgcatgaaggagccggtacacaccaacgccctgagccgcatagcggacgtgtacgtatgcgacgcctgcggcacggcggaagccctgctggccttcatgaagcagcagtatccgctgacctgctggacggcgtttcagcccgaaaggccgcccgccgatttcaaagcgcgcccggctcgcgaggtcatggaaacggtactgcgcacgcagagtgaggacttgcagcgaatcttccttctttgccgggacgatccggaaaacgccgagtggtacaggcttgaggcattggaaagctgccccggcctgaccgagctgtggccgcagccctttcaggcaaagttcgctgcggcggacggcgcggtgctcatccgattccgaagcggaccggacggcggcgttcaggtggcggcggacatcgttgattcgtaaggcggccccatgggaaagcgtcaggcaaacgcccggcgcttttcgccttgtcacgcggcccacgtgggcgcacgtttcgcccgaagactccgccccgggcatgcgccccgtcccgccgcccaggcccgacaaaagccaaacaggcccgcgcctcgcaaggagggcgggcctgccgcatggatgggacctggcggatttaaaagctgttgcgcgcccggctgcggcaaagggcgggctccagcacccgcgcgatttcgtcgcggaagccgagctgtctgtacgcgtcgcggattgcgcggtagtattccgccgtcgggggctgccgccggatgagaatcatgacgtacaccatgccctcgatttcggagccgtcggcaagaatcacccgccgcctgagcttgacgtagtagttcgggaacccctcgtagcggtcgaggcgctgctcatccgcctcgtcgatttcccagacggccaccggcacgcgggcgttccgggcgcggcttcgctccaccgtggcgtggagatagaacgccagacggtgatttgggagataccccgtgccgatcagctttgcgcccgggcagcggtaagccatctgttctttgaccatgttggaaccgtaagcgatgtacttcatgtgcgtcctccttttcgtgtccgtcggtcatcgggccgcgcggccgggccgatttgaaagcgccggagcgcggccgcccgtgtgtgtttcatgtcggcgcctccctgatttgaaagtgtgcggcttcccgcgaccggctcgcgccggtttcggcccggagccgccgggccatcgtcaggcgggccattcagaagccgtacctttctcccagcatcagccgggcgaggctgcgttcgctgccttcctcccagctgcgctcgatcagctcgatttcggagtaaaggtcggcgctgtccggctcggcgaagagccggaaggcgttccacgcctccgcgaggctgaggtgctcctgctcctcgcagggaatcccgccgcggggatcgcggtgaatgaatcgaatcgtgtaggtgatgccgggcatgggtgtacctccttctcgatttgggaaccgtgcggcttcccgcgaccggctgcgccggtttcggccggttgccaaccggcgctcgtcaggcgggggtgcgccgggctttttgaaagcggcggtgctcgatttggattcgttcggtgatgcgccgctcaaattcggcctcgcccgcggcggtcagtacactgtggccgtatccgtactcgaggctgtatcgcgtcatgtccgggcggctccgcgcccagccgggcaggtcgccgtcgttgtagtagcggtggtagctgtggaacagcgccccggtggccttggtgtatttgaaagccgccgcctgcatctcgtcgtagagggcctgtgcttcgccgttggaattccagtagctgcgttcgttcatggggtgtgcctccttttcgatttgaaagccgcgcggcttcccgcgggcgggtgtgtcaggatgcctgccgccaggcggcgttgccgggcaggcgcttggtcaggtgcaggcgcgcggtctcgaattcatccccgatgaatcccaggcgcaggagccagcagcggaaggtgtacttggggttgtccgtttccggccgcgccgggctggcggccttggcggtcagcgcctg

SEQ ID NO: 2653 - DNA, 12899 bp, Unknown
  16S sequences of unknown bacteria
cttccgtactcgcgcccgagcgccccgaaaagacggcgcccgcattcacggcgcccgttcccgaaaggactcctctcgggaacgaagtcgtacacaccaaagtggattccccgctgttcacgcccgaaacgctggacaggacgattcaggagaattattatgattttgcgccgactcaaacgcctgccgcccccgtcatccccgttcaaacggcggacatgccggctgcgggcgagctgtcggtcgcgcagatgcccgccgcggcggcagctaccgcttctgtggacgccgccgtcaaagagtcttacggactcaacgcgtttgccgtcaagatgatcgccgctttcgctgcgctggttttcacgcttttgaccatcatcgggattaattcctacgtcatcaggcaaaagacgatgcggctcaatcagctggaacagcggaaagagaggctcgtggaacagcgttcggagcttgaaaaagacattctcgaagcgcagtcctatgaaaagattttggaattcgtccgcgaacacggcatgattctcgaccccaacccataaagattttttccgaaacgcggaaggctttttagtctttcgcctcgggaatggatcgtatattttttgaaaggagtaaaagaccatcaaaaaaccgacaacagattattccgtatccgttttacgaaagaggttattcgccgtgtttacggcaataacctttattttttgcattttaggcgcccgattcttttacgtacaggtagtttggggcggacagctggggtatcgcgcgctcgatcaatggatgcgagagatccccgtcgtggcggaacgcggtcttatcacggacagaaacggcgtcgttctcgcggaaaacaatacgtcgtacacggttttcgcgcgctccaacgccgtcaaggacaaggagaaaaccgcctggctgcttgcggacgcgctcggcgcggacggggatacgcttttaaaaaagctgaattccgtaaaggcgtccgagattacggtggcgcggcacgtggacaaaagcgccgtcgaaaagctggcggcggaaagtcccgacggcgtctattactcgcgggacaatacccgtatttatccgaagggggacgcgctctgtcaggtgctcggctttacgtccaccgacaattcgggtacgacgggcatagagaaatactacaataaatacctctcgggaaagaacggggaactcctttacgaaaccgacctcgtgggcatcaatctcgaaggcgcggtggcggcgtatcttcccgccgaggacggcatgaacgtgcagctcaccgtggattacggcattcagtcggtggcggaaagcgctctgaaaagggtggcggaaatgtattctcccgtttcggccgaatgtatcgtgctcgatcccaacaatttcgagatccttgcgatggcgaactatcccgcctatgatctgaacgacgttccccgcgacgaaacggagcttttaaactcgctttcgagaaaccgaatcgtctgcgatatttacgagcccggctctacgttcaaggtcatcaccgcggcggcggatatagaggaaaatctgcgcggaaaccgcaacgcgttttccaccagctatattttccccagcagccgcacccgttcggtggacggcacgacggtcaagtgttggagcaatcacgccaacggcaagcactgcaatcagacgctttccgacgcgctcaacaacagttgcaacccctgctttacggacatcgcgctctcgctcgggaaggataccttttacgattatctttccgcgttcggattcggaaagacgacgggcgtggattacagcggggaggcgctcggaatgctgctgcccgaatcggccgttcgggactgcgatctcgcgcgtatcggcttcggacagacgatcgccgtttcgggaatacagctcgcctgcgccacggccgcggcggtcaacgggggatattactatacccctcatctcgtcaagagcatttacgcctcggacggatacgtgctcaacgaggcgggcaagtcgctgaaaaaccgcaccgtcagcgaaagggcgtcgtcgacgctcgcctccatgctggaaggggtcgtgcgggacggcagcggcaagaaggcgtatatagagggctaccgcgtggggggaaagacgggtaccgcgcaaaagtacgaagacggacacatcgccgcggggaaatacgtttcctccttcgtcggcttctttcccgcggataagccgcagtacctcgcgctcgtgatcattgacgagccgcagggcgcctattacggcagtacggtggccgcgccgtgcgcaaaagaaattttcgaaggaattatctctcttaaaaacatacaaccctatcaaagcgaataaatataaagggaaggaaaatacagccgcctgtcggttggaaggggtgacttatgcttttatcggaaatagccgcctgcgtggagggcgcccgcatcgtatgcggcgccaaaaatatgcagacgtcggaaaatacgcaggtccgcggtctgacggcggacagccgattttgttcgccgggggatttgttcttttgcctcacgggaggaaagacggattcccacgtctttgccgcagacgcggaagcaggcggcgccgcggcggtggtgacgcagcgggaactcgaattgaaaatcccccaaatcatcgtgcccgattcgcgcggggcgatgggactgatcgccgccgcgttttatgatcatgccgtcgacaagctgaaaattgtcggcattacgggcactaacggcaaaacgaccacgtcttatatgctcgcgtccatcctgcgccgcgcgggaaaatccgtcgcggtggtgggtacgctgggaatctactacggaaaaaaacagatagcgcccgaactcacgacgcccgatccgctctttctccataagatgtttgccgatatggtcaaaagcggggtggaatacgtcctcatggaagtttccgcgcacgcgctcttttatcgcaaggacgaaggcatttcctatacggcgtgcgtctttaccaattttacgcaggatcacctcgattttttcggtacgatgcaaaaatacaaagaggcgaaaaaacttttgtttgccgcggataaatgtccgctcgccattctcaacggcgacgacgccgtggggcgggagatcggcggggaacgctcggaaacggatcgggcgggaggaacgcagacgatattttacggccttgacagtccttcggagatattcgccgtgctgacgtcggaggaattgtacggctgcgaatttatgctaaatctttccgacagcctctgccgcatttccctgccgatgacgggaaagcacaacgtctacaacgcgatggcggcggcgggcacggcgtatgcgctcggcatccgcaccgaagcgatcgcggggggactcaacgaaatgaagcccgtccgcgggcggctcgaacccgcgggaaaatttcacggcgcggatattttcgtcgatttcgcgcatacgcccgacggactggaaaaatccctttccgcgctcaaagcgcactgtaaaggtaggctcatctgcctgttcgggtgcggcggcaaccgcgacaagtcaaagcgttcgctaatgggagaaacggtggcgagaaaggcggatttttccgtgctcacgtccgataatccgaggtttgaggagccgacggacatcatagcggagatagaaagggggtatcggcgattctcggtgcattacgtcgtcgtacccgaaagagagaaggcgatctactatgccgtagggcttttgaaaaagggggacgtgctgcttgtggcgggcaagggcggggaggattatcaggaaattatgggtataaaatattcctataacgacaatgctgttatcagggaggcattgagcagaaagccgtcgctttgatgcatggatatatgaagaattacctcgctgccgcgctcgtcgcgtttttcttgtcgctcgcgttctgtttccttttgatccccgtccttaggaaactcaaagcgggacaaaatatactttcttacgtaaaagaacacaaaggcaaaagcggtacgcccactatgggcggactcgcttttgttttgtccgcgatcctggccgaaagcatctttctcaaaaaggcggacagaactgccgtcgtcgcgctcacagtcggcttcgcgtatctcctcgtcggttttctcgacgattttttaaagaaaaagcacaaggaaaatatggggcttaaagcctggcaaaaggccgttttccaggcgtttgccgccgtgttcgcgggaatatactgccttcgcgcgggactgactaccctcaatcttccctttacccataaaagcgtggacatagggtggggaatgcttcccctggcggtattcgtatttctcgccaccgtcaacagcgtcaatctgaccgacggattggacgggcttgccgcgggcacctgcgtgcccttctttctgacgctcggacttctgacggcgatacagggcgagttttcttcgctggcgatgctctctttctgcctgtgcggggcgctcggagcctacctcttgttcaacgtttctcccgcttccgtctttatgggggatacgggatctctcgctctcggcggattcgcttcctgtatcggagtctttacgggcaacgccctgtatatcgccgtcgtcgggattatgtttgtcctttcgagcataaccgtcattattcaggtaatatattataaggcgacgggcggcaagcgcgtgttcctgatggcgcccgtccatcaccattttcaggaaaaggggtactcggaatgtaaaatcgcgtatgcatacgcggcggtcacggcagtgctcggcgccgtatgcgtgctcgtgcagctctgaaaaacaaggctttgcgcggtatgagggacgctataaagaaataggacgaccgcgtccgccttatcccataaaactatgagaaacgccgtgccgtaaagtgccgcgcggctatgatacgcggaacagagaacgggggcggcgcctccgtcgaaaaaacgaacgaagtttcacgtgacacatttttgggactgtttatgagaaggaacgcccggcggcgaaaaaagagatcctgcggaaaggaacagagaaataccgaagaggattaaaaaatcggatggaggaattcatgtatcccgcaaaacagacgtttttagtgctggggctgtcccgttcgggctgtgccgcggcggaatttttactcgaaagaaaggcaaaagtgtatatttacgacgacgttcccggcgagggcgtcgaaaaatccgcgcggctgctcgaagacaagggggcggtgagggcggacaaggagcaactcccccgtatgcaggaaatctgcgacgctctcgttttaagtcccggaattcccatcgatcatcccacggcggtggcgttcaaacggagcggcaaagcggtggtgggagaaacggaactcgccgcgaggtatatgcgctgccccgtggtggcggtgacgggcaccaacggaaagaccactacggtgagtatgctcgaaaagatattgtccgagggcggctataaagcgcagtcgtgcggcaacatcggctcgccgatggtaaagtacgccgagctgaaagaggacgaggtcgcggtcgcggaaatatccagcttccagctggaaaccctcaattctctctgccctcatgtgggcgtcgtcctcaacgtgacggaagatcacctcaaccgtcactacaacatggaaaattacatatttttaaagagcaagctattaaaaaacagcacggaatcggaatacgcggtcctcaatttcgacgacggcatcgtgcgcggctttgccgaaaagacgaaggcgcggattctctatttttccgttcgggaaagggtatacggggcttatctcgaaaacggctccctgtatttttgcggggagaaaatcatgtccgcgtcagaccttctcaccgacggtctgcataacgtccagaacgctctggcggcgatcgcggcggcgaagatcatgggaatcgcctcggaaaatatcgcccgttcgctctcctccttcaaggggatccggcaccggatcgagccggtcggcgaagcggacggagtcaaatatgtggacgactccaagggcaccaacgtggacgccaccatcaaagccgtggggtgcatgaaagaggaaacggtgctccttctcggcggcaaggataaggggtacgattacgacaagttgttcgtcaaattgaggtcttcttccgtcgtccacgcggtattgtacggggaaaatcgttttcggctgttcgagagcgcgctgcgctgcggtttcgaccgcatgaccctctgcgtgggtttcgagtttgccgtaaggctcgcgcggatgatagcggaaagggggcagacggtgcttttgagccccgcaagcgcaagtttcgacgagtttgcaagttatgaagagagaggtgatagatttgtcgcaatcgtccgttcgttcgaagaagaaggtcgtgcaaaggaacacgaaggaacagaaaaggcagacgctcccgcctgcggcgaaggcgcggcaggcgacggagcagccctccttctcgcagatacggatgcggacggcggaagcggtcccgaagtcgaggacgaatagagcgacgggagatctgtccattcccatcctgacgctgattctttcggcgttcggggtattgatggtctattccgcaagttcgtatacggcaaagacgcagtacggcgacgagttctattttatgaaaaaacagctattggggctgatactcggcgcgggagctatggtttttacgggatttttcgattatcgaaaactgaaaaaaataagatacatagccctgattgtgccgatgatcctgctcgcgctcgtctttgttccgggcgtaggaaaaagcaattacggcgccacgcgctggataggcttcggaagctttacgatacagccgtcggaaatcgccaaatacggctttgtcattttcgcggcggcgtatatgtccgagcatatggacgcgatgagaacgtttaagggaatgttgcccgtgctcgccgcgggaggcgccatctgcgtcctcatcatcttggagccgaatatgtccgtcaccatgtgcgtggggcttttgatgctggcgatgatttttctcggcggaatgaaattccggtattttctcatcattctcgtccccgcgctcgtcgccgtgcccgtgctcattttaatggagccgtacagacttttgaggctgagcgcctttctcgatccgtgggcttctcccaaggacgaaggctatcagctcatacagtcgctgtatgcgctcggcaacggcggttggtttggaacgggacttttccgttcccgtcaaaagtaccgctttctgccgtttgcggagagcgactttatcctgtccatcatcggcgaggaattcgggttcgtcggcatttgcattctcttcctcctgtgcggggtgctcatttataagggcatcaggacggctgcggaatcggacgactttttttcctttcttctcgcttcgggcgtcacgctcgtctacggtatccagacggtgataaacgcgctggtcgtcagcggtaccatcccgcccacgggactgccgctgccgctgatcagttcgggcaatacctcgctggtcatcacgatggcgtcgatggggattttgtacggtatttcgcgtcggaacgcaatgtcgcgcgcggaaggaaaaacggtgaacaaacggcggcgataattcatacaatggaacataaggagttatattgtatggataaatttattatagagggcgggggaaagctttacggcaaagcggatattcaatccgcgaaaaattccgtactgccccttctcgccgcttctgttttaaccgatgaacaagtgacaatacgggatgtgcccgccatctcggatgtggaaaatatgttgcacatactaactgaactcggctgtaaaatcagtcggacggcagacagtgtaatcatcgacagcgtgaacgcagtttcccacgaaatccccgcgaggcttacaaaggaactgcgttcttccgtttttatgctgggttccgtgctgacgagattccatcgtgcgaagatctcctatcccggcggctgcgacatcggacttcgccccatcgatctgcacctttcgggcttaaagaggctgggggtaaagatcgtcgaggaaagcggctacatatcgtgcagcgcggagaaactttcgggagcggatatcctcttggactttcccagcgtcggagcgacggagaacatcatcctcgcggcggtgcgggcggagggactcaccgttattcgcaacgccgctaaggaacctgaaatcgtggacttgcagaattttctcaacgccatggggggaaaggtccggggcgcgggcgggggaaccgtgttcgtcgaaggcgtggagaaattgcgcggcgtggaatatacgccgatcaaggacagaatagaagcgggaacttttctcatcgccgcggcttcctgcggcggagaaatcgagatggacggagtgcccgaggaaaatattgcggcgcttttgcataaactgcgcgaaaacggttgcaaaatacatataaaaaatgatagaataatcctaagaagcgacggacgtctgtttgccgccgatttgatcgaaactacgccttttcccggtttccccaccgatttacaggcgcagttctccgcgctcgcctgtacggctaaggggacgacgctggtggtggaaaatctgttcgaaacccgctataagtatgcggcggagctcaaacgcatgggcgcggacatcaccgtccgcggcagaaacgcggtgatccgcggcgtggagaagctgcacggcgcgtctatgacggcgggggatcttcgcggcggagcggcgctcgtcatcgcggctttaaaagcggagggagtaagttcggtggcggatctttcgcatatcgaccgcggatacgcggactttgaatacaagctgaaaaaacttggcgcgcgcatccgccgcgtgagggtgtgattttcgcctgtcgtacataaggctgcgccgagaagaaaagcgtgaaagaaaaagcgcgccgtaaggataaaaaaatatgcacaaaagaaatgtaatcgcaatcatattgacggcattgatttttattgccgccgccttgctcggcgtcagctccgtctatcgggtgagcgccgtgactttggacgtttccgtcatttccgaggcggccaaaggcgaagcggacgagcttcaacgaaagctggcggagcgttatagggacgaaagcatcttctttgtcgaaaaacaagaggcggaggaggagtttgcggcgtttccctattttcgcatggtttcttttaaaaagacgtatccaaaccgcctcgtcattcaggccagcgaggatgcggaactgtttgccgtagacaggggaaacggctattatatcctcgggggggacggaaccattctcggagttcgggaggatgcggccaaccgctcggacggcgccgacaatatcgtcgtcacgggattgtccgccttcggggaaaagggggaactcctcggcggggacgaaaatatttcctatctgcttacgctttgctcgacggtgtccttgcagctcgacggattgaggagcaacgtcctttcgatagaggtgacgaagcccacctccgtcgcaaaagacgtcagtttctgtctgtccatgcgggagggcgtaaaggtatatgtgcgcaatccccaaaatttgacggagaaaaaagcctcggctttcgtttctctctatctttctttgaaaagcgaggaaagactggggggcaggatcgaggtgacggatgatgcgctcaatcccggcgaggtgcgcgtttcctattccaaaaaatagaaaaaagaaagaaatctccttttaaaacgcggcgttcaccgcgtttttttgcgctttttttcctcaattcgttgacattgtcccataaatagtgtataataaagaaaatatatactttcacgagattgtttttacggagcggacgaaatttatgagtaacgaaagcgttgccgttttggatatacgatcgtacgaggtgactttcctcatcggagcgaaaggcgtcaacggcacgttcgtattccgcggcagcagaagcgaaaaatacgaggggtattcctcggagggctttctcgacgcggcttctttccgccgcgccgtcatttctgccgtcacttccgtccgccaaagctacgagggaacgatcaaagaaatttacgtcggcgcgcccgcggcttttacgcagatatataccaagggacataccatttcctttccctccaaacgcaagatctccgcgcaggaaatagacgcgctgtacgaaagcggactgaacgagctgctcgcgccggggcgcttcgtccgccgctcggatatgtattttgccctcggcgacaatcgaaaatatttcaacgcggcggatttatacgggattcccacggcttctttaaaaggggcgctctgctactatttcgtttccgacgagttttacgacgcggtggactccgttttaaaagaactcggtttcgaggacgtgaagattcttccccagactctcgccgaagccaattatcttctgcctgaaaaaatgcgggaagggtacgcctttttgttggacgtaggctttctttccacttccgtatccgtcgtgtacggcaacgggatcgtgcatgaggaatcgttcgactgcggtcttggatatatcctcgtttctctcatgcagggattgggcgtcgattacgaaacggcggaggaaattctctcttccgcgaatatttcgggcggcgcggtgtcgaaggatctgatgtggacggacggcggcggcgccgcgtactcggtgcgcgagataaacgaaatcgtcaagtacggattggacgagctgtgcgaaagcgtggataaattttttgaaaaatactatcgggacaagagcacgatgggattcgcggcgaatcccctttccgtgacgggggaaggaatcggaggaatcaaaggctgcgcggaacatatttccaagcgcctcagccgcatgacgcagatcgtctgccccgaccttccctattatgacaaacctttgttttcatcgagaatcgccctgctttccacggcgctttccgacaagaagaaaaacggattcatgtatagaattttcaacattttcggaggaaaaaaataatgttcaacaattttggagataacgataattacggcgcgggatacggtatgaatacttacggggaccagccggcgcccgccccgacagatatggcgtcaaacaatctttccggcgtcgcgaagatcaaagtcatcggcgtgggcggcgcgggcaataacgccgtcaatcgcctgatcgaatcgggtttaaagagcgcggaatatatcgtcgtcaacacggacaatcaggcgttggcgcgctccaaagcaaccacgcgccttcaaatcggcgtcaagctgacgaaaggactgggcgcgggcgcggatccttccgtgggaaaagccgcggcggaagaaaacaaggacgtcattcagaacgtcttgaaggacaccgatttgctgtttatcaccgccggcatgggcggcggcacgggcacgggcgcagcgcctatcatcgccaagatcgccaaggacatgaagatcctcacggtggctgtggtgacgcttccgttcacgttcgaagcgaaacgcagaatggacaacgccgtttcgggcgtggaggaactgagaaaatcggtggactccatcatcattattcccaatgataagatccgcgaagtggtgcccaaagggacgcctttccccgaagcgttgaaggtggcggacgaagttctccgccagggcattcgcggcatcgcggaactcatcgtcaatccttcgctcatcaatctcgactttgcggacgtcaagacgaccttaaaggcgcgcgggctcgcgcatatgggcatcggtgtggcaaagggcgaaaagaggatctccgacgccgtgcgctgcgccgtatgcagtcctcttctcaataccaccatcgaaggcgcgagttcggtcattctcaacgtcgtcggcggcaaggatctctctttggacgaggtctggatggcggccgatctcgtgaagggagtcatcgatttttccgcaaacgtcattttcggcgcctgtatcgacgaaaatatgtcggacgaagtggaagtcgtcatcatcgccacgggcttccccgcaggcggacagacggtgacggggacggaggatcgttccgcgacggcgaggaaggtttcttcgctgtccgaaaagatcgaccgcgcctataataacgggatgggcggcgccaatatggcggcgggaggagtttctcctcagcccgcttccgcgcagcctttctcctatgcgacgagcagcgctcccctcggcgcgaacgccccttacgcctcgacggttcctgcgaacggttacggcgctcccgcgggatataaccagaacggctatgcgcagggcaatccctatggacagcagcccgccgcgcccgcttctccttacggcagtcccgcgccttatgccgattatcccggctatcgtcagcccgttcagcccgatccgaacgcagggtatcgcgctcccgtctatggcgaacagccgcagcccatgcccggaaacggacgcaattttgaacccgacgatcccattcccgacgtttcgcagacggctgcgcaggacgtcgacagaaaacatcgtcccaagtttgtggactatttcatcaagaaaaattccgataataaataaaaggaatgcgagatcggaagagc

SEQ ID NO: 2654 - DNA, 32759 bp, Unknown
  16S sequences of unknown bacteria
gggcggctcacagccgcgaatagcccgcggggttcatcccccgcataccaacgcaacccccgacaaaaccataattaacaaaaaattcatagacaatctgacgatttcatctgaccaatctgcagtttatttcataaatccaagagttgtacgctcccggcattatccttattccgccaatcttcgaccattgatttttttggtactagccatatacttataagccgaggggcctgtaaaaaccgcctctgcgaaaattcgtaaaggagtgcacccaccatgtcctatcaagccgaagctcttgaaagaaccaagctcaaatttcttggcgtttacctgcaatgcggcggctcccccggccagtatctgctggagcatgacgaaaccgaggaggaactgaccagccggacgcgcggcgagctggaaaccctgctccaggacatggcgcggagcgaggacatcctggaagccgccgaaagctacagcgaggcctgccagcgcgtcggcttttattccggcatcaagatcggcgcccggctgatgctgagcctgacggaggacgcggacatcgtcttttagaagcgatgatcgcctaccgcccctgctcatccagggtcaaccccaccgtgtaaaagctgtatacattgtcctccgctccgttcagcagccgcttgtataccttgctgaccggcgccatctgccagccgccctctttgtttagaatgggctcgccctccgtcaaatcccaggcatatcccttggcggccagcccgccgcgcagcatggcctcccccagatagcacccgaaggtcagcgcctcgctccggatttgctcctcggagggcagagccatctcccggtgaaggttttcgagcatcccctccagcgcctgcacgctggcctcgctgaaatccagctgcacccccatggctcgcccgcgcttgaccgcctggcggatatatccccgcaaagagtttccctgtcgcatctgtaaagacctcctgtagccgtccaatatacgcggctattttccgtacttttcccgcacggccgcccagtaggcctgataggcctgctcgtttttgttattccccgggacatagtaagcggcgtttctcaacgcgtcgggcagatactgctggtctacccagcttcctggataatcatggggataaagataatgctgccccttcaccgccgcgtcctccccgtcgtaatgcttgttttgcagctgccgggggatcggccccgccttgcccgcctgcacatccgccagcgcggcaaaatacgcgttgtgcgccgtgttggatttgggggccaggctgaccagcaccaccgcatccgacagaggcatacacgcctcgggcaggccgacctgcatcgccgcgtccaccgccgccttgacaatggggatgatcatcggataggccagccccacgtcctcgcaggccgtcaccagcagccgacggcaggcggagggcagatcccccgcttccagcagccgggccagataatgcagcgccgcgtccgggtcggatccccgcatggacttctggtaggccgagagaatgtcgtaatgctcgtccccttcccggtcgtatttcatagcgctgcgctgtgccagctgccgggccgtgtccaaagtgacgttccgcccgccgtcggcggcgggcggggtggccagcacgcagagctccaccgcgttgagcgccttgcgcacgtcgcctccgcaggccgccgcaatgtgcgcggtcacgcctttttccggatggatgggaacctgctgctcctcctccaggaaagcgaacgcccttgtcaccgcctgctccacatccggcggctccaccggcttgaactcgaacaccgtcgagcggctgagtaccgcgttgtacacgtaaaaatacgggttttcggtggtggaggcaatgagggtgatccgcccgttctcgatatgctccaacaggctctgctgctgctttttgttgaaatactggatctcgtccaggtacagcagaatgccgtttatccccgccagggtgtccagctcctccaccaccgccttgatgtcagctgtggaggcgttggtgccgttgagcttgtgcagacgcatgtcggatcgctgtgcgatgatgcgggccaccgtggtctttcccacccccgaagggccgtaaaaaaccaaattggggatccgcccggaatcgatgatggtgcgcagggccttcccctgcgtaagcagatgccgttggcccactacatcatccagagtgtcgggccgcatccggtcggccagtggtgccgtcattcgtgtcccgcctttcctttatccaaaagcgcgtaaagcctataggctttacgcgctttaccgtcgttatctgccctcgaaaaagaaggccagcgcccgtcggacgctttcatcccagaaatggtaatcatgggttcccggccagatctccagcggatgatcccatcccagcgcgtccagatgggcggaaaaccgccggttgtcctccagaaggaaatcctcggtcccgcagcttatatacagccgtggccgttcccctgccgtcttctctgccagccggaagagatcgtcctccgcccgcagcgtcccgccgcaggttgcctggaaaatgtccgggtgggaatcgagccgggcggccacatccaccgcgcccgaaaagctggccgccgccgcgtaccgctccggacgggacagcgccgccttcatcgcgccgtagccgcccatggacagcccggccacgaagttgtcctcccgccgggccgatacccggaacaggcgctggcagagcgccggcagctcgtcgacgatataggtgaaataccgcggcccgttcgtcatgtcgcagtagaagctgcgctgcacctcgggcatgatcaccgccacgccccattcctccgcgtaccggtcgatgtccgtgcgcctcacccaggaggtgtgatcgtccgacaggccgtggagcagatagaggacgggcatgtcccccgtcctgtcccgccgctccccagggagggacacggtcactcccgtgttcatccccaggctctcggcgtacaggcttcccgcaaacagcgccatggcttagtacagcgggtactgggcgcacagggcggacacgccgtcccgcaccgcgtcggcgcggccctcgaaatccgccaccacgtcggcgatgaagcccgcgatgcgatccatgtccgcttccttcaggccccggctggtcaccgccggggtgccaatgcggatcccgctggtcacgaagggagacagcggctcgttggggatggtgttcttgttgacggtgatgtacacctcgtccagccggtgctccagctccttgccggtgatgccggtttccctcaggtccatcagcatcagatggttgtccgtgccgccggacaccagcttgagcccccgggaggtcagcccgtcggccagcgccttggcgtttttgacgatctgatcctgataggctttgaattccggggccatggcctcgccgaagcagacggccttggccgcgatgacgtgcatcagcgggccgccctgggagccggggaacaccgccttgtcgatggctttggcgtaggcttccttgcacaggatcatgccgccgcggggcccccgcagggtcttatgggtggtggtggtcaccacgtcgcagtagggtaccgggttcatatggttgccggcggctaccagtcccgcgatgtgggccatgtccaccatcagcagtgcgccgcaggcgtcggcgatttcccgcaggagatcgaagcggatttcccggcagtaggcggacgcgccagccacgatgagcttggggcgaacctccagcgccagcgccttcaccttgtcatagtcgatatagccggtttcctcgtccacgccgtaggggacgaagttgtacagcttgccggagaaattgaccggggatccgtgggtcagatgcccgccgtgggccaggttcatccccagcactgtgtcgccggtctccagcagggcgaaatacgccgcctggttggcctgcgcgccggaatggggctggacgttggcatgctccgcgccgaacagcttgcaggcccgttcccgcgcgatgttctccaccacatctacttcctggcagccgccgtaatagcgcttgcccggatacccttcggcgtatttattggtcaggacgctgcccatggccgccatcaccgcgggggacacgatattttccgaagcgatcagctccagatttcggcgctgacggagcagctcgcgctccatggcctgcccgacttccggatccgcatttttaacaaaaccgatggtatccatcatatctgcgtacatgtgttgctatccccttttttaaacaatatattcctatattaccaccttcccaccggggagcgcaacccttccccgcgcttttttccatttttctcgttttttatatttatgcacttttatgcaaaccccgtctttctgccaatccctcccgtttgacaggaaatggacttcgtgatacactgaacccggtagaaaatgagcgaaaaaacgcgaattcgtgcgaagcgaagagcggtttgcaacgataaaatgcgaaagaaaggggaaaaatcgccatgaaaaagaaagaattggcgcttctggccatcgaaaagctgaaggagcgctacccggaaggcatctgttccctcacctataccgaccctctccagctcctcatcgccacccgcctttcggcccagtgcaccgacgcacgggtcaatatggtgacccctgctctcttcgcccgtttccccaccttggaggcctttgccgaggcctctgcggaggaagtgggtgaatacatccgctcctgcggcctgtacaaaaccaaagcccgggacatcgtggccctggccatcatgctgcgagacgagtacgacggggtgattcccgacacggtggaggagctcattaagctccccggtgtgggccgcaaaacggccaatctggtggcgggcgacatctacggccgccccgccgtggtcgccgacacccactgcatccgcatcgccggccggctgggcttggtggattccaaggatccctacaaggtggagatggcgctgaaaaagctgctgcctcccgaggaaagcaacagcttttgtcatcgccttgttctgtttggccgggacgtgtgctcggcccgttcgccccgctgcggcgcctgccccttgcaggacgcctgtccctccagggtcagccttgctccttcgccggacggcggcggatccgccccgtctccagccaagaaaaaaagaagcggtacagcggaatagccacgatgctcagcagcccccacagcacggaatacagcaggcacacctggcccataatattgagcgggaacccgctgtagtcccagacgttcatgtgcaacttgagattgaacaggcagccgctgaaaaactccacggccgtcacggcggcggagcagagcaggcagcggcggaacagtccccacttcaccagggcggtctgaatgtagccgatgagctgaaagcacagcccgcccacgatgaacatggaccagtgggtatagccccgccacagaatttcgatgagattgtacagcgcgcctccgatgagaaagatacctacctggcatcgcagcttcgtccaaaaatgatttttcatgggcagtcgtccattccttttccggtattgcatacttagtctgtccgtccgccaaaaccggtataccatgaaaaatctggccagaaaaaccctcttcacagaagtgaagagggtttttctggatgctatatttgctcttcaaaaaatcggcttttatatccgaggctttttaaataagaaaacgccgcattaagtttttcttcaaaatccggctgatacgcaggataatccggataaaagtattgctcatgtatcatgacgcgaattgcatcacgatcggataaagctttcagctttgcaagtatttcgtctctagaaaaagaattcatcacaatatctatagccgcaaaagctatcgtcccttttgtcactatcgcgccgtttcgaatccgtgcagcatccatttcttcaatgccataagatgttcgcgggtgcgtttcatcgccgaaaagcccaagcaaaccgatcactttattatcagcaatcgcctttaatccctccgccgttgcaagacaataatgaaccgtggtggttttcgccaaattcttgagagaagcaaagtgtattatccgatcgtttaccgctttgcagtcccgatacacttcatcatatccggaaaactcatatggtttgatgttctccacatcggaatgaaaagatagtttaagccaatcggcattattttcccattccgaacaataagcgtcactcatttgaaaaagattaaaaccgtcagcgcgataaaacaaattcaactgtacttttaatccgtatttctcatgcagtcttctatacaaggaaaggtacggatgctcaaatatgcttatatatgtattctctgttatttccttcaagaagcgaatattatcatcaaccgtaaaacaaaagcttttttccatagcagaacactccttaaactaggggtagtaagaagatatagtaaaaaatcccgaacgcttacgcattcgggatttttggaggcgacacccagatttgaactggggaatcagggttttgcagacccatgccttaccacttggctatgtcgccatggatagtaaaagacgccaaaatccttttgacgtcctttactccttggagcggcttacgaggctcgaactcgctacctccaccttggcaaggtggcgctctaccagatgagctaaagccgcggggatggtgcctccggccggaatcgaaccagcgacacgtggattttcagtccactgctctaccgactgagctacagaggcaaatttggcgacccggaacgggctcgaaccgtcgacctctagcgtgacaggctagcgttctaaccagctgaactaccgggccaaatccaaataagagatatcaacgcggcggcgggttgcccccttcgcagacgctgacaacggggatacaccccgcgttggtgggaacaacagggctcgaacctgtgaccccctgcttgtaaggcaggtgctctaccagctgagctatgctcccgaaggcgccgccgtcggcgacgctgtatataatactacggatggggcggtttgtcaacaggtttctgcaaacttttttgaataatttctcatttcgtggtacgcgccgactccgctgccagaacctccaaatccttggcggaaaaccggtatacagcgtcgcagaattgacaggtggcctccacctttccctcgtcgtccggcagctggagaagttcctccggtttcatggacagcagggcgcgctccaccttttgccgggagcaggtgcaacgatacgccggctcataggtatccagaatatcgaaaggcatgccttccagggccttggcgcagatatccgcaggcgtcatccccttggacagcatcaccgtcatcggctcgagtgccgccacgtttttttctacctgatcaatgaccgcttccgggcagaagggcagcagctggataagcagcccacccgccgcctgcacggtcaaatcgggattcaccagaacccccagggcgcagacggtgggggtctgctcgctgaccgcatagtactgggtaatatcctccgcgatttcgccggaaaccaggggggtacagcccacatagggctctgccccgcccgagtcccgcatgacatagagcatcccctgggtccctacggccccgctgacgtccagcttgccattcgtcttcagcgggatttccaccacaggattggccgcgtagccccgcgcgttcccctcactgtccgccacggccatcaccgtgccggcagggccgttgccgctgagcttcagggtcactgagtcgtcccggcccttgagcagtattcccatcatggaggaagcggtcaacaggcggcccagcgccgcagtcacgacggcggacggatggtggatgcgttccgcctcggccaccatgtcggtggcgtccatcgccatagccatcacagtggcgtcggtcgtcaggcagcgaatcactttactcatagtgtatacaatccttttccaattggttacaaccattttttgtcttcttgcgtctaaacgctcttttggtaataggccgtgcggttagccgccaccagcacccagcgctggcaatcctccgtcggcggctcctcggtgcgctccccatacacggccaacagctcgaaatcggcttccttcagcagccgctcccaggtggacaacgagtaggcgcgttctctgactacgtcggtcattcgctcatacaggccgccttcctccacaaagaaatccagcgtcatctccacctcacaggtacggccgataaagcgattgcgccagacacacaggaaatcctcctcctcgaacacgaaggcattgtctcccagaatctctcggtgtttatacggggtgttggcgtcgaacaccagcaggcctcccggctcgataaacaggcccagacgacggaacacctctgccaagccggcggtattggtgatgtggtttagactgtccagcaggcagaccgcgccgctgaccgtgccgaacaaatccagctcccgcatatcctgctccaggaacatcagctcgagattccccagcgccgccttggccatggccagggacagcatgtcctccgagccgtccacgccgatgacatccacgccccgggaggccagctccagcgacaggctgccagaaccgcaggctagatcgagcagcgtctcggggcgtccccttccatgcttctcaaacagagacagcagatagtccgcccacggcccataagccacatcggtggtcagccggtcatagaattccgcaaacacgccgtaaccgcccatggtttcccgtcctttcccgcagcgttttactccccgtcttccttcagcatccgtgaaaagaccatatcatacgcatcgcagccataaatcagggaacgattcacccggctgatagtggcggtggaggcaccggtagcagccacaatgtcgctatacaccctcttatcgctgagcattttggccaccacgatccgctgggacaaggccttgatttccgccacggtacacaaatcctcaaagaactggtagcactcctccatggtgtgcagctgcagaatcgcctgaaacaaaaaatccgtattcgtatccttgatttttgaattcatggtttatccccctatttttcgccttatctttccatagggctcccccaaaagggaggcccgcatctcccttctgtattttagcacactacagcgtgaaaataaagagaaaaggagcggaagcaacatgaaaatttgcttccgctccccataaatggcgttcgttatcccagaatcaccttatgaaaggcctttttgccctttttcaagaccacatagcctttatcaaaggcggcttttttaaccgattccgtcaggctggtcaccttgacatcgtcaacggcaatgcccccctgctcgatcaggcggcgggcctcgccgcgggatggtgccagcttggtcagcaccagcaggtcgatgaccgaaacggcatcctgcgcaaagatgtcctcgccaacggtggtggacggcatgttggcgctggcggaaccggcgccgaacagcgcgcgggcggcctcctgtgccttgtccgcctcctccttgccgtgcaccagggcggtcacctcataggccagccgttctttgaccgcgttgatggcgctgccctccgccttggccatctcccgaatctcctccaccggcacaaaggtcagcaggttcagacatttgatgacgtccgcgtcgtccacgttgcgccaatactgatagaattcatacggagaggttttctccggatccagccaaacggcacctttttcggtcttacccattttcttgccttcggaggtggtcagcagggcgaacgtcatgccgtacacctctttggccgccttccggcggcagagctccacgccgccgatgatgttgctccactggtcgtcgccgcccagctccagctggcagccgtagtgctgattcaggtagaagaaatcgtagctctgcatcagcatatagttgaattccaggaaggacaggccacgttccatccgggttttgaagcattcgaaggtcagcatgcggttgaccgagaaatgaacgcccacctcccgaagaaagtcgatataattcaaatcccgcagccagtcgccgttgtccaccatcagggccttaccatcggagaaatccacgaatttggacatctgctttttaaagcagtccacgtggtgctggatggtatcgacggtcatcatcttgcgcatgtccgtctttcccgtgggatcgccgaccatgccggtgccgccgcccagcaaggcgatgggccgatgcccagcccgctgcatatgcgccatcaccatcatctgcacaaagtggcccacgtgcaggctgtccgccgtgggatcaaagccgatgtagaaggtgaccggctcgctccctcccagcagctcgcggattttctcctcgttggtggcctgggcgatcatgccgcgggccttcagttcgtcgtacacattcatgtcttgaccattcctttccgttcgttcggggccggcagacaacaaaaaacgccctctgccaaaccagcagagggcggaaataccgcggtaccacctctatttacccattccttacgaaacaggcctcacgggcatctttcagaccaatgcccctgcgctgtaacgtgcgcgcacggctcccttactgcgcctttcaggcggttcggttcgcggctccgggatgtatttcctcctgccgtccctccgcttttcaccagccagcggttctctgcgcggacaagccgggagtacttcttcccttctttgcctatgagggcattaaagcacatttcgccggaaaagtcaagccccggatttctggaaattcaaccggcggctacatctgggaaagcatctcccgggcggccacgcgggcggcctcactcacctcgccgccgatgatacgggccagctccagctcgcgcccttcctcgtccaggggggcgacctgcgtataagtgcggccgtcccgcacctgcttggcaatcagcagatgatgatgcgcctgcgcggcgatctgcgccagatgggtgacacagagaatttgccggtttttcgccgtctgacgcagcttaatccccaccttgagggcagcgcgaccgctgatgccggtgtccacctcgtcaaaaaccagcgtatcgatatcgtccacctcggccagcaccgatttcatagccagcataatccgggacagctcgccgccggaggcaatgcgggaaatgggcttggccggctccccaggattggccgcgatgaggaattccacccgatccccgccgacggcggtcaggggagcggattccatggacacctccagagttacgccgggcatgtccaaaaacgccagttcctcccccacccggcgggtaaagagggcggcggcgtcccgacgggcagtcgtcagcttttccgcggcggcaatgaggtcttcccgggcagtttccagctccgcccgcagacgggccgccagttcgtcggacatttcaatggtctccaactcttggcgagcctgctccagaaattccagagccgcctcctcggagccgccgtatttcgtggtcagacggcggatgatttccagacgcgattcagtccgctccaaatcctccgcgtcgaaatccagctgatccgcatagctgcgcagatcttccgcgcattcctccagctcgtacagcagcccttccacccgctgggaaaccggctgcaactcctgcatgaagcggcccgcatctgcaagggacgacgcagccccggacagagccgcaatcgcgccgccggtttcctcgtcgccgctaagcgcggcgcgggcagtctgcagagaggatgccacccgttccgcgttccggtacaacgtccgctgggacaggagggtttcctcttctcccgggcgcagagcggccccttcgatctcctccagctggaaacggagcaaatccagacggcgctccttgagcgtctcgtccatatccacctttttgagccgatggcggatatcgcagtaccggcggtaggccgtctcgtagaccgcccgtaccggcagcagaccgccgagccgatccaggtactccacatgtttttccggcgccagcagagcctggttttcgtgctggccgtggatattgaccagcatccggcccacggtgcgcagcatggcgacggtggccggacgaccattgatgcggcaagaacccttcccctcggaggaaatactccgctggatgagccaagtgccatcctcatccggctcaaagcccatttcgccaagacgggcggccgcctcctccgaaatcccggtaaagagggcggagacatgggcctgtgcgctcccagtgcgcaccaaatcgcggcggatccgctctcccagcactgcgttaatggagtcgatgacgatggacttaccggcgccggtttcgcccgtcaggacattcaggccggaatcgaagacgatatccgccttctcgattacggcgatattttcaatatgcaggctcaccagcatcgaggcatccgcccctttccaggcaaatttcttattggagggtacgaatcagctttttcagttccgtcaccagttcgaccgactgggcttcgtttttcgtgatgcacaggaaggtatcatcgcccgccagggtccccaccacattgtcccaatgcagggaatccatggccgcacaaaccgcctgagccatgccgacaaagcatttgatcaccacgatattgcccgcgtaatccaccccgacgaccgcgtcgctgaacagggaatgaaatttggaggagatgtgatcgttctcctgcttgacagtggaataccgataccgcccgtcgctgtccagagttttaattaaacgcagttccttgatgtcccgggagactgtggcctgtgtcacgtcgaagccgcattcccgcagccgcttgagcagttcgtcctgggtatccaccggcgtgctgtggatgatttccaggattttcgcgtgccgtttggttttcacaacaaccatcctttcgcagtcgttcccgtttaaaagacaagcagcgcttccctttaaaaacctatctcctgtttatcagcttttgattcagcacctgataaaacgatgtctgcttgagcttgattagatgggcatccgcggcggcgcgggatatcagaatccgatcgctgccggtaatgggcgccccctcctccccgtccacggtcaggaacacgctggtccccgctggaatgagcgggcggatggacagcacggcgtccgcgtgaaaaatataggagcgggaatacaaagaatgggggcagataggggtgagcagcaggcagtccacctccggatccaccacaggaccgccagccgataaggaataggcggtggagccggtaggggtggctgcgatgataccgtccgctcggtacgtcatcaccggttcggcatggttggaaacctccagttcaatcaagcgggacagggccccgcgggagacaactgcttcgttcatggcggtaaaccgccgttcccccgcagcggttcgaatcaccacatccaggagcatccggtgctccaccgtatactgcccttggataagggcgggcagctttcccagttcatcagcttccaggccggccataaagccaaggcggccgccgttgatgcccagaacagggcggaaataccgggcggcccgcttggcggtgtgcatgatggtgccgtcccctcccagggccaccaccacgtcgctcgcggcgatgatttcgtccgtctcctcactggggaactgctgcgtttcggcgggaagcagcacctcggcgcccagcttttccagagcagcgcagacgccgcccagcgactcaccgctgccggaggctttaaaattggggataacggccacacgcatacatgcttcccatacctttccgcgccggcaagtccgggcgtttcccgttaaaaaagccgacgctgtccacagggcagcgccggcgagccggtcacggagacgcacctccgcttcggcggccccatgcctctgtgttccgcgttttcgaggctttgggaacgcgtcccgcaagccttagttgttagggcgtccgcgcagacagcgatgcgcctgttccaccaggccatccacatcccaggcattgacgggaaccggtgagccgggcgcgtaggtcagcgcggccagatattcgatattgccctctccgccggtaatcggcgaataggtcagctgttccaggcggcagcgctgcccggcaaagaaagcgagcagggcgtgcagcacctgtttatgcgccttggggtctttcaccaccccattcttccccaccgcctgccggccggcctcaaactgcggctttatcaggcagacgatccgcgccctatcggccaggaatggaagaaccgaagcaaaaattccttctactggtataaatgatacatcaaccgagcaaaaaagtacagaactttccgcaacaaaattttgaattttttcggttttccgaatatctataccttccaggttgatcacacgggagtcggtgcgcagcttttcatggagctgatcatggcccacgtccacagcgtagactctcacggccccttgctgcagcatgcaatcggtaaaaccgccggtagaggcgccgacgtccatggccgtgacgccttccagccgccagccggtgacatccagcgccttttgcagcttatacccaccgcggcccacatagagaagggaccgggtatcgcagtcgatcgcatcggcttcttttaccagctgagccggtttcgccgcgggatggccgttgacacgcaccaggccgccgacaatcaattccttagccttttcccggccgctgacgaagcctctctccaccagaacagcgtccagccggctcccctcacgcgggctcatcgggttcctccgtgggggcgtcgctggatcgttccgcgagtacagccgccacaataccctcgacatccagccccacctgatggaggccggaggcggtggagcaggtggtcagaaaatcctcgatagcccgcacccggtagctgccgctgaatcgttcggccatcagccgcgagcccagatattcaccgatcccgccccggcggctgccctcttcaaaaaagaggacatggctgtaccgacgggcgatctgcacgcattcctcatcgagaggatggatacgggtcagcttgagcacggaaacgggcaggccctggcgaagcagctccttggcggcggagaggacattggcgaaaatccggccgtaggtgatgagcagcacggctttcttgccggagcgcagataggtatacggcttaaaattcggcacatagcccgccggacagggaagctcgccgcccttgggatagcggacagcggcaatgcccttgacgtcatacagggcttgcttgaggttgatctccagctcggcaaaattgaaaggtgcgtagatggtgacatgggggatggtggttaaaaacggcacgtcaaaaattccctgatgggtttcgccgtcgtcggggacaataccggcccggtcgatagccagcacgatatggttgccgatgatcgaagtatcgtttaaaatctgatcgtagctgcgctgcaggaaggtggagtacacggcaaacaccggcaggatgcccccgcaggccaggccggaggaaaaggtgacggcgtgcccttccgcgatccccacgtcgaaaaagcgctcgggataaagcagggagaaatcctgcaggcaggtgccggtcttcatagcggcggtgatggcgcaaatttcaggatcgtccttggccaggcggcagaggcactctccaaaggtggtggaaaaagagggtgcggattccggcgcctggccggtttccacgtcgaacttgcccacgccgtgataccgatccgggctctccgctgcaaaggtatagccctttcccttaattgtctccacatgcagcaggaccggacggttgattttttttgcggtctccatggcccgggtcaaatccttcaaatcgtgtccgtcgatggggccgagataatgaaagcccatctgttcaaacatggagctatttttatagacagcctgcttgagtttggtcttgacacgaatcaggcagttgtacaaccccttaccgagcaaggggatgtgggacaaaaaattgccaaaagcatttttgaaccgaacatagcggggcttggcccgcaggttggcgagatagcgggcgacgaagccgacgttccggctgatggacatgcggttgtcgttgagcacaaccaccagcttgtctttgctacgcccagcgttgctcaacccctcgtaggcgagtccacctgtcagggcgccgtcaccgataatcgccaccacatagccgtcctctcccgccagggttttcgccttggccatgccgttggcggcggagatggaggtgctgctatgtcccgcgatgaaggtgtcgtattcgctctcgctcggccgtgggaacccgcccaggccgttttcctggcggagggtatggaactgttccatccgcccggtgagcagcttgtggggatagcactgatgccccacgtcccagaccaggcgatccagcggcgtatcaaaaaccttatgcaaagccaccgtcagctccaccacccccagattggaggacagatggccgccggtctgcgagacggtctgaattaaaaagtcccggatttccccgcacagggcggtcatctcgggataggtcagctgtttcaaatcggccggagacttaatccggctgagtatcgtttcctctggcatgccaaaaagcctcgcttccaaaaccgcccatctgcgggcagaaatctgccacctacatgggcaccgttacgccgaccaaaatacccagcagcacgccgccgagcacctccaggggcgtatggccgataaactctttcagctcaatctcatccacttctttatccgggatgccgtcaccgtctacatcggcgttttgattctcaatttgattgagatatttgttaagcagtttagcgtgaacgcccgcctcccgacgaacccccattgcatcgtacatggtgacgaaggcgtatatcacggccaaagcgaacaaaggagagttaacaccgtcaacccgtgccagggagatggtcagtgcgcataccatggaagaatgcgcactgggcatcccgccggcaccccacaggcgctcaatattcagttttttggaaagtacaagggtgagaagcaccttcaacacctgggcgcacagccacgccagtacggcggtaaacagcaccttgttttcaaaaaactctttaaaaaccgacattgtctcatccgttcctttatccgttttcccgtccggacttatttcttccgttccagaagcgcccgggccagccgccgcagatgctccgcttcggcgccaaagggctccaggtattccacagcctcccgggtgcgccgttccgccaggcagcgggcgtcttccagccccaggagggacacgtaggtcactttttcattttcaacgtcgctgccggccggtttgcccagctgctgtgccgtggatgtactatccagtatatcgtcaacgatctgaaaacacaagcctaaattctgcccataggcgcgggcggccgccgtcttggaagcggaagccccaccgaccaggcagcccatctcgcaggcggccatcatcagcgcggcggttttgccctgctgcagcttctccaggaccggcagaccgatggcctttccctcgctctgcaaatcgatcacctggccgcccaccatgccggcatatccggcacgtttcgccagtgtaaaggcagcggccagtacagattcagctgggattgcctgtcggttatcggcgcgcagcatcacctcgaaggccagagtcagcaacgcatccccggccagcagggccatatcctccccgaaggcggcatgaacggagggcttgccgcggcgcagagggctgtcgtccatacagggcaaatcgtcgtgaaccagcgaataggaatgaatcagttccaccgccgtcgcaaaaggcatggcccgcccggcgtcgccgcaggctagccggcagaactccaacgtcagcacgggtcgaatccgcttgccgcccgcctcgcaggcataggtcatcgcccgggccaccgtctcgcagaggccttcggcggcgggcagatgggccggcaattccttctcaaatacgcgcaggtgctcctgtaattgctcggtgtaaagttcgctcatctcggtgtctcccggcctttcctgctaattttattcggacagcgcctggcccatatcctggccctgcctatccaccagctcatccggggcgggagtcgcctcttctacagcggtcagcttgacgattttctgctcggcggttttcagcgccttggagcagtaagccgtcagcttggtcccctcctcgaacagcttcaaagattcgtctagcgtgcagcggccgctctccagcacagagacaatctgctccaggcgggtcatcgctttttcaaaagtccattcggtagccatggctgccatcctttcttatgtgtcttccccttgtgcgcgcacctcgtccacggtgcagcggatgctgcctccggagaggcgccaatccagagagtcgccgggggcgacatccgccgtgctcttgacgacacgaccatcggtcctatagccgatggcgtagccgcgggacagcaccttcaacgggctgagggcatccagcttggaagcggcggcggccaggcggcgatccgcccgggcggtctgcatctgtgcggcagaaacaaaggctttggtgatatagtccagccgcatggcctgctcttccacgtaaaacagtggcgtggacaagcagcgcttcgcgcgcacggcctccaaccgcttggcggcatcctgcacgccggcggcgatagcccgtcgggcattctgctccagctgagccacccggcggattagctgctgctgatccggcaccgccaattcggcggcggcggagggagtgggcgcgcgcaaatccgcggcgaaatcacagatggtaaaatcggtttcgtgccccacggcggagatgacgggtatgcgggacgccgccaccgcccgggcaaccgcctcctcgttgaaggcccaaagctcctcaatagagccgccgccccggccgatgatcagcacatccgccgcgtccgcctcattgaagcggcgcagagcgtccaccagagagggggccgccccctccccctgcaccagaacgggggcaaatatgacccgcgccatcggataacggcggcccagaatgttgagaatatcccgcaccgccgcgccggtcggcgaagtaatcacgcccacccgggtcggataaggcggcagcggacgttttcgcgattcgtcgaacatgccttcggctgccagcctttttttcagctgttcgaaggctatttggagggcaccgacgccgtccggctgcatctcttcaatatataattggaaagaaccgtccttttcatacagagacacccgggccttgacaatgaccttcatgccgctttccggacgaaactgcagcttggaggcataggcgcggaacatcaccgctttgacaatggcgttctcatccttcagggacatatacagatgccccgacttgtaatggttagtaaagttggaaatttcgccgccgatatagacggccgccagattggcgtcgccttccagaatggatttgacatagcgattcagctgactgacggaaatgaccttcataaacggctggctcctttctcccgcagactgcatagcagggcaatgcccgccgcgttgtcagccgaataggccggcggggcgaacgtgccgttataggcggcctccaattcccgccgaagcagactgttggacatgacgccgcccgcgtagaccaccggcagattgccgtaaacacgcagcagagcctgcgtcataccgctaaccgccgccagaacgctgcgcagacaaaagagcgccacttcttcgtcgggcgcgcccttttctttcatggtacggcattggttttccaccccggacaaatggcagtccgccccttctaaagaggggcggggcagacggccggcggagccccatcccggggcgcggaaggccagtttctccagggcgggaccggcgggaaagggcaggccgagaaggccgcccacccggtcgataagctgtcccgccttcaaatcccgggaacgccccaccgtctcacagcggaggatatcctctttgtccggccgcaccagcagggcgtcggtcgtcccaccggagacatgaaaggccagaaacggctcacgtatccacgcggtgcgctccgagccgaaaagggcggcggccacatggccctgctggtgggtaaaccggtagcagggaacatggagaaccgccgccaattcccgggcggcccccatccccgccagaaagcagggcatatacgagccctcccgctgctgcgggcggtcggaagcggctatcgctgttatcggcgcgtcacagaggccgcgcagttcctcgacgatgtccggaagctgccgtacgtgatgaaacaccgcgtcgctttgccgcagccccaattccccgggctttaccggtagcaggcgtttaacctgatgaatagcgccgtcctgccagatggccgccgaggtggtgtaattactggtatccagcccgagacaaacactcatgcctgtgcgtcatccttcggggcagtttcgcgggaaatgccgccgagcacgccgttgacgaaggaggaatcctcgtcgccgccgtattttttggccaactccaccgcctcgttgatggaaacgctgacagggatgtcgtccacatacagcatctcatacaccgccagacgcataatggccagcgccacccgggagatccgctccttgctccacttcaaggaacaggcggcaattctctgatcgatggactctgtgcggctttccgccccctgcgccagcgacagcgcgaaggcgtccccttccacgtcccgggcctctcccgcgcgctggaggatttcgcttaccggttcctcggtaaaggtcttttcaaacaacagtataaacgccaattcgcgcgcttcccgcctcgtcatacggcaccccgccttttcctatgtattcggccgtttcccgacaggaaacgacacgccgatcaacaagagagccctccacacctctgcggagggcccgcttagccggttatttgcttttttcatcatccaggacaatgcccgccacgtgcacgttgacctttgtcaccggtttgccggtcatggactgaaccgcgaccttgacaccgtgctgcacatcccccgctacgtccgggatacgggtgcccagccgcagattgatgtacacgtccacgatggtctcgttttcattgttcagcaccttgaccgatttggtcgcggcgttggtggacataatgccgtgaatatccgcagggcgcgccgccatgcccgccacgccgggaacctccagcgccgccgtgctagcgatagtcgcaatcacatcctccgagataatgcagcttccttccgaaggacgcaaccctttatcatccatgtttgagaaccccctatttcttgatagcggaaagccggcccatccgcccgtttatctggacggatgcaaaccttcgctttcctgttattataccacaaaccaagaaaggggcaactgttttttatgaatttacgttggatatcttaatattttgtgcgacaatcttcgactgggcggtgacaatctcggtgatttgaatcgtctgctggggctgaagactgtccgctttgaccacgacattgcagttttctccctcaatgtacaccacgcagtcggcaaagcccttggctttgataaggctttcgattttgctttcctgctcgatggcggcagccaccgcctcggttttttccagcgcttgctttttgatggcatcggtggctttgacgtcattcatcatttctttgataagatccagcgactgagcccgggcgtcctcccggtttttgcgagcctgagagaaatagtcggccttgtccccaggctcggaggactgggcggagccgcccacgtactgtgcgtctcccatgttcttggacgtgtcggacacgctggcccccgtatcgataacgggcgactggttggaaaagtagtaattcaaatatacggccacgcccagcgccacgattaaagtcgccaaaagcacctgttttttcccaaagatgttgctcactgttccccattcctttcctgctgacagtttaattggatttggtaacgcatacccgtttggaggaaatattcagcgccgtggtgatggcgtcgacgatgcgctgggataccgccgcgttatcgccgccctggcagaccaccacaacgcccttgaccgtgggctgaatctcggtgaccagcaatccctgccgcccctgatcggtatccaccacaatgatggacttttcagagtcgtccttctgcgaaaccttattggaatcgccgttggtgtcttccacccggttggtattgatcttgtcctgggtggcatacacatactccacaccgttttccagggtgaccatcacctggcaggatcccgcgccttcgatgctgcccaccaaggcggccagcttggtctccgtcttagcgacgaactcctcggccgaggccttggcggcggccacctgcttgtcagattttggcgtccaaaaattggacgccaaaatcagccccattcccaccaggccaaccgccacaatgattttggtgccttttccccctttcagaaacgccgaaaggcgcgtaagcgtcccgctgccgttttctttttcttccatggaactcttccatcctttccgtcaatccgccgactggacgatgacttccacctccagccgcttttccattacctgtttggcgaccatggcgtctcggatgttttgtttgtccatgtaaaggacgatttgtgtaatacatatgccgccatccgccgaagtatccgtctttgccacgactttttccgcctgggtgttataatttttcaaagtatcgttggtgacccgcagcagcgcggcgttaatttgccgttccacctgcccgttgacccgttcctgtagcacatccgcccgcacatcctccggcagggcgtcgatatccagctgggtcatggatttcagattcatcaggggagcgatcatacagcaaaggaaaaaggccgcgataatcagcttgaacagccgccccatgcctcccttgggggccagcatatgcagcagggagcagccgaccgccgccgcgcacagcgcaatggcccatgccttaatcccgtccatgtctgccctccctccgtatcgtcagcacgattgttcaacctccccgtcccgccagggtcataatactggtggcgataatcataaacagcgagcaggacgccagaaggccgatcagggtattggtcaccgaccgcaccgccgtcagcaggccgctcatagttttcagctccagcatatccgccgccatgacgcacaggctcaggcagagagaccaggccgcgcattccagcatgggcggcaggacgatgagcacggtggccagaatgccgaagccgcccagggtcgacttgagaaggcccagacaacccttcaccgtgttaaaggcttcgctgagggcgcctcccaccaccgggacgaagctggacagggaaaacttaatggcccgccctcctagcgtgtcggccgccgcccccaccagactctgcagggacaagagtccgacaaacagggtggacgatatgctcagaagccaaacggcggttttattgatgaagccggccacggcgtccagcttcatgccgctggtgaccgatccggtcatgccgagcgccaaggaaatagtcatcaagggcaggatgatgctagtggccagccacgaaaacagctccgccacaaacagcacaatggtttggtaggaggcggcggcggcaatttgtccgcccgtcagcaggacgccggcataaaccggcacaaagctgaccataaacaccgaggtgctttccgccgcttcgcagaccgaccggatacagccggaaaccggaatcagcgccgccgcacaggctgcgagggtacagatggtttgaaacacatcagaaattgccggctctcgcaccgcttgcttcatgccgtccatcagggcgcacagcaggataatgcccagcaggatccccgccgatcgcagcggtccgcctgcctggtcagccaaaagaccgagcaggccgcttaaggaggcttgaggcgtcaggccggacaggctgtccttgtctagtccggtaatccccagattgtccagcagccgccgcgtctcctccggcagcttatcccaaatttcctgcgcgccgctggcctccagctgttcctgatacagctcatcggcactgggctcttccgcttccgccgccgcaggaatcgtcgcggccagcagcatagtcagcagcacaaacaccaggagaaaaatccggcgcgtctttttcatgaaatcgcctccccattgatcagggaagcggccagctgggcgattttctcaaacaacggcagggccagcatcagcagcatcagcttgcccgccagctccgccttggatgccagcgcggattctcccgcatccttacaggcgtcggcggccagctgggtgagcaggcagataccaagcgccttgaataggatcgccccatattcctccggaagggccgccgtgctcagcaattcccgcagggttccgatgacgggtaaggccttggacagcactagggccaggatgccgatacctgccgccagactgacggccatggcctgctcaggccgctgctggcgcagcatgacggccaggaaagccgccaccaccaccacgcccgcaatcatcacgatatccatggcgtcacaacccgaagaccgatttgaccgtgctgaacaaatcaccgatttccgtgacaataatggtcagcaccacaatcaggccggccagggtggtcagcatcgcctgctcctcccgaccggaacgcaccaacagctggttgagcaccgccacgataatcccgaccgccgcaattttgaaaatcaaatccacgtccatccaatttcccagcctttcttatccgtgcaaagctttatccgcgttacagcaacaaaagcgccagtccgatgccgccggttacccccagggttacgtacagccggcttttggtggccgcgtcccgccgggcttcctccagccgctctcccagctgctccgcgtacagccggcaatttgtcagctgcccctccacgtcggtgcggcccaagccgtcgccgaaatgaaccagcaattcccgatcggccgccgtcaggccactggcttccccctgctccttgacgccctgacgccaggcagtatgaaaatccccgtcgatttgcagatccgctgccgccgctttcagaaagggcagactctggaattccggggaggaggcggcggcggccagcaattcgcccaccggggcagctgtataccggatttgagagcccagctggatcagcagccgctggattttttcaagagcagccgcccggcgactcagaccggccgccgccgaaaagcccagaaacgcccccgccgccaccaagagcagcaggccgatgactttgataatcatacagctcccccgtttcgtaaatccgccgccagacaccgggtgatttgcggccgtccaaagccaccacacagtcgaacgcgccgctgtccagggccatacggacgcaggggcggcgcagcaaagaggggatatcccggcaatgggcggaagcaaccgccgccactccggcattgagtcccgccagcacggcttgtacctcctcggccgatcccaattcatcgaacaaaatgacgtccggagctaagcagcgcaccgcctgctgaatgccggcgcctttggggcagtgcagcagcacatcgcactcggacaggccaccctctcccgagagttctccccgctcgtccaccaccaccgtccggtaacgccgtcccatccggccgccggccaactgtctggccaaatcccgcagcagactggttttgccgcttgagggctcccccgcaatcagggcactgcgcaggccggaaggaccgatcagctccgccgccagggcggaggcgcagccgtcgtgccgccgggcgatgcggatgcatatcgacgtgatatggcgcatggtgacaatcgcgccgttttcggtgacgacgctgcccgctatccccgcccggcagccgctgcgggtgctgacatagccgtccttgatttcctgttgatgggtatgtaccgaatattcacaaagccgctgaaaacagtcctcgagttgaagcggatcgcaggtcagcaggctgccggaggataattcggtaacttgtccgctttttgtcaccagcaattcgccggcaggggtagacaataccaccggagcccccgcgcgcagccggatctcctgtgtcgcggtctgaatcctggccggcactccgatgatcacatcgcgaattgacggcggcagatacgccgccccactcaaaaaatctcccatgcctgtcctcacctcgtcccatacttatgtgcctgtcccgccggttagaacaaaaaaataggacgggctctcttttgaaaagagaacccgtccggttggtatgagcttcagttgtcaggctcggcctccagcagctgcataaattcctcttcgttgattatgcggatgcctaattgctgggctttggtcagcttactgccggcgtcctctccggcgaggacgatgctggttttcttcgagacgctgccggcggttttgccgccgtgctgctcgatgagggcggccgcctcctcccgtttcaaagtcgggagggtgccggtgagcacaaaggtcatcccggcgaagcggacatccgcccgctcggctttgcaggtcatattgacccccgccagccgcagctgttcaataaaatgccgggactgggggagggagaaaaagtgcacggcgctttccgccataatgccgccgaagccgtcgatggcggcgatgtcttcggcgctggcgctcaggatggcctccatggtgccgaaccgttccgccagcagtttggccgctttctggccgatgtggcggatccccagggaaaagatcacccggaacaaatcgcattccttggatttttcaatggccgccagcaaattgtcggccgatttctcccccattcgctccagcgcttccacggcttcccgatcgaggctgtacagttcgtaggcatagctgaccaacccgttgttcaccagctgctcgagcaccgcggggccgaggccctcgatatccatggcgtcccgcgaggcaaaatggatgagattgcgcagcttctgcgccgggcattccggattggtgcagcgcagcgccgcctcatcctcttcccgggcgacctgcgcgccgcaggaggggcagacatgcggcatctggtagacgggagcgccctcctggtgagacaccacccgcaccacctcggggatgatatctccggccttgcgcaacaccacccgatcgccgacggccagctgcttttcgtgaatgaaatcttcattatgcagggtggcgcggctgacggtggtaccggccagggtgaccggctcgaacagaccggtaggcgtcagcacaccggtgcgcccgacgtttatctccacatccagcagggtggtttccttttcctccggcgggtatttataggccacggcccatttggggaattttgaggtgctgcccagctgctcccgctgtgaaaagtcatccaccttgacaactgcgccgtcgatgtcgaagggcaacgtgccgcgcaccgtgccaatccgctccacctcggcaatcacatcgtcgatagaggccgtgcgggtatagaacggaatgatatgaaagcccagctccttcatgcattccagggaactggcatgggaggcgacggtctccccctcgatcagctgcaggttaaacacgaaaatatccaggttgcggccgcgggtcaccttgggatccttctgccgcagggaacccgccgccgcgttgcgggggtttttgaaaggcttttccccgttcagctcctgcccttcgaccagagcggcgaagctctggcggggcatatacacctctccgcgcacgatgatgcggggcaggggccgtttcagctttttcggaatggaacggatggtgcgcaggttggcggacacatcctcccccacctgcccgtccccccgggtagcgccccgcaggaactggccgtcccggtattccagcgcgatggacaggccgtcgattttcggctccaccacatacaccggctccgggatggtttcccttacccgggcatcgaattcgcggagttcttccaaagaaaagacatcctgcaggctggccagcggcacctcgtgggcaaccggggtgaacaggttggacagttctccgtgtatccgctgggtgtaagaatcggcagtaattaattgaggatattccgcttcaagctcacgcagctcccgggtcagtgcatcgaattcgtcgtcttcaatttccggcgcgtcttcgtcgtaatatcgtttactgtgatactcaatacgttccctgagcgcctctacccgctgctgtgccgcttcaaaatccatgactggatcctccctttggtttcatgtcctttagtataccaaaacttccagggaatttctacttggaatcactgccgtaggcgaatatttttccaagcagctcggcctgactgccgtcgacctcggtgtaggaatccggcaccttgcccaccagcacggtttccgccaccacaaaatccgtttccactttgatgtagttggtatagccggggatggtggtcacaatctgcgattcgatatgcagtgtgatctggtgggaggtctggttgatccccgcgctgctgaaggcgctattcatggtagtgagggcgttgccggacatggtcacccgcagagggatgcgcgggccgcgatcgttgaacatttcccctcccagaatactgcccaggggaatccgcatctctagatgcgcgtactccttcaatcgctccagcaccacggtggtaatttccgctttcagacggttgattttgctgatatccgcctccaccgatacgatatcgcccacttcgtttcgagccaccgtcaccaaatcctcataacggatctgttcatcggtcagcacctgggtcaccgcctcgtttatcgccttggtggaagtgaatttcgcctgattttctccgaaagatttgaccagcggatggatctgatggtcaagaaaaatgatgagcagaatcagagcgatcagaaaagccagcaagcgccagaccgccaggttctttccagcgcccgtcggccatcggcgcgcccgccagccccggtgggatttcagactttttcgcacagccagcatccgccttacccccttgtgctgttgtttaacccatcttacgcaaggggccgggcaggggttcgcggatttttgaaaaggagccgcttttcttgaattttggggatgattccgttcgtattacagaaaaacagccctgcggccagaattgccgcagggctgttttaggcactcaggaaacggcggtcgtggtggtggccgccggcgttgtggcggcgggagcgttcttcggatcctcaaacgtcaggtattgcccgctgacatatccgaccagctgcaaaatctggattttataccaatcgccctccttggcgagaatttgcacctgttcccccatcttggtgccgccgatcgcctcataatcccggcccggcccgctgcgcacatgcatcgagtccgctgtcacccaagcgacggaaggcagggtttcgtcccgcgtcggggcggtcgtgcccgtggtgggggcggctgtggaagccgtggaggccgtcgtgccggctccctccgtggtttgcgtggacgcgttggaagcggggtcctttttaccgagatcgcaagccgtcagactacatgcgagcagcaaggcactgccgccggcggccagccgttttttccaatcgatgatcatcgccgcattcatcctttcctctgaccgtgcgttattgctgtttagtatgggatgcttagcatcgattgacaaggggaaacgcggtttttcggcgtgaaaaggggtgctggcggcgttgtcctcgttgccgggcgccagcccggcggcctcgtccgccttgccatctcctctttttcactgccgaaaaactccgaaggacctgccgtcggccaaaaaggcggccagcaaagaccactgaacgccgcaggccacctttttggccgacggcaggcgtgttcgcccttgtcaatcgatgctatacatatcctaacacattttcgtgcacaataaaagaaaaagaatcgtaaattttttgggggccgcttcattgatcatcctgtaccgaattcttcccgccttcgtctgcctttgccttctaagcggctgcacgccgaaaccgcagccacggacgccggccctggcccgctatgccgtatccttcgtcgggccgctggacaccgtgacgaatttcaccgcctattgccccacgcaagctgttttcgatcaggtctccaatcaggtggaagccgaattgaaccggttggatactttattcaaccactacaatccggacagcccgctggcacgcatcaacgcggcggccggaacggttccatcagaagacaccccgccggaaatcctggagctgctggcctactgccgagagaagcaaaccagcgtgcagggcgtcaacgtcgcgatgggagcggtcctgtcgctatggaaccaggcgcgggaaagtggtgtcccccccaccgccgcagccgtcgaggaagcgatgcggcacgtgtccatggacggcgtttgcgttcgggacaagcggctgacgctgtcggattcggccatgacgctggatttcggcgcggtggccaaaggcttcgcggcgaaaaaactcgcgcaaatcgtgaccgaagcgggcatcggcgccttcctgctggactgcggcaccagcacactggtgtgcgccggcacaccgccggataaggatggctggcaaatagcggtgcgccatccggacgccgcgctcaacctgtccggttccagccagccggatgaaattcttggaacgctgtcgctgcaaaaccgctgcgtgggcgtcagcggcgattatcaaaagtattttgaagcaaatgggacatactatgcccatattctctctcccgataccgggtggccagcctcctattaccgcatggtctgcgttctgacggatgacgccgcggatgcagattattattccaccgccctgtttgccctgccctacgagcagtccaggcaaacggcggaggaagcgccgggtctccaggccctgtggatgatggaggacggcagcatccggaccaccgggggattccccgcattttcctcttagaaaggcaggagatcgtgttgagtcaacccttcagcggcggcatcgccttcccccatgacgtggaaaacaaggcggcgaccagcgctcttcccattgaaaactttacacccgcccgtttggtcattccgctccggcaggggttcggcgctgcctgcgtgccggtggtggacgtggggcagaccgtcaaaaagggacagctcgtcggccggccatccgaggacggcgggacgccggtgcactgcggtatttccggcaccgtgcgggccctatcccccatgccggttatcggaggcgaggaagtcctctgcgtcacggtggagaacgacagcttccatacgccggaagcccccctgtcctggaacaacacgccggaggggattgtttgcctgatggcggatgcgggcctggtgggcatgggcggcgccggctttcccaccgccgtcaagttctctaccgacaaacctattcatcaggtgctgatcaacggctgcgaatgcgagccgtatctcacatgcgatcaccgcctgatgctgcaggaagcggaaaaggtcatcaaaggcgcccaagccatgggccgtgtggtggaggcggcggtcaccatatgcgtcgaggacaacaagcccgacgccgtaactgctttggaacaggcggcgcgggacgccgacgtgaaagttttatcactgccggcccgctaccctcaagggggcgagcggcagctgatccaggcggtcaccggccttgaggtgccggacgggaagcttcccgccgacgtgggcgtgctggtctccaacgtggccacggcagcggccctggcggatgccatggacggcacgccgctgacccatcggatcgtcaccgtttcgggccaggtcaatcggccggccaatctgcgggtccccattggcaccctgctggccgatttgctggcacactgcggcgggatagcgggagacgac

SEQ ID NO: 2655 - DNA, 17631 bp, Unknown
  16S sequences of unknown bacteria
cgccgctgaggcggcgtcgggtttgagccgggagaaagtaaaaaaactttacttggagatgtggatattcacacacggcatcgcggtgatgctggcgacgaaaatcgcggatttcaccgaggaggagatcagcggtatgctcacggacgcttttatgggcatcaaaaacaaattgaaaggagaagaataatggagaaaaagattatctctgttcgcggtctgaaaaaatatttcaaagacgtcaaagccgtggacgacatatctttcgaggtgcgcgaaggggaactgttcgccttcctcggcctcaacggcgcgggcaagagtaccaccatcaatatcctctgcggggtgctgcccaaagacgcgggggaggtgattgtggacggaacggatatcgacggggacatcgacgcggtgaaatcaaaaatcggcattgtctttcagggcggcgttctcgataaagagctttccgtcgcggacaatctccgctataaggccgccctctacggcatcacgggcaggatttacgccgaaagattagaggaacttagctcgcttctcggcttagaagatcttttaaaacgtccgttaggtaaactgtcgggcggtcaaaaacggcgcattgacattgcgcgggcgctgctgcataagccgaaaattctcatccttgacgagccgacgacgggactcgatccgcatacccgcatgatggtatgggattgcctcaataaactgagaaaggaatcgggactgacgatttttctgacgacgcattatatggaagaagcgtcggaggcggattatgtggtgattctcgacgccgggcacgtggtggcgcacgatacgcccgtgggcttgaaaaacgcatacgcgtccgatttcatcaaagtatactgcaaaaacgaaaaactttttgagatgatcgcccgggaagaattgagcgcggaagaaaaggaagattacgtcgtcatcgaagtgccttccgtcgaggcggcgaaacgcctgatcgtcacttatcccgacgcctttgaggatttcgaagtggaaaaggggaaaatggacgacgtatttttaaaggtgacgggcaaacagctccaaggaggggacgcaaatgcttaaaaattcttccctgcgtaaaaatttcactgaccttcgctatctcacggcgaggcatatcaagctgtacttcaaagataaacagacctttttcatgtccctcatcacgccgctcattctcgtggtgctgttcgctacttttttgaggtcggtatacgtttcctcgcttttgagcgtcctgcccgaaggggtggtgctgcccgataagctggtgaacggctttgtaggcggctggttgatttcctctattctggggacgacttccgtgacgctggcgttttgttcgcagacgattatggtttccgacaaggcgaataagcgcattgaggatttccacatcgcgcccgtcaggcccacggtcatctctgcgagctattttatcgccactgtcttttccacccttctcgtttgccttgtctgtcttgcattgggacttttctatattgccgtctgcggctggtatctttccgcattggacgttttgctgatcgtaggcaatctgattttatgcacgatgttcggggcgcttttcgcggtcatcgtcgaaacctttttgaaaacgcagggggcggcgggcgcggcggcgacgctggtttcttccatgtacggctttctttgcggcgcgtatatgcccatctcgcaatttgccgcgggaatccgcaatttcgtcacgtttgtgcccggtacttacggcaccgtgctctttcgccggttcttcatgggcggcgccatcgaagaaatggcgaaatacgcgcccgccgaagcgatttccgcgctgcgggatgcgttcgattataatatttatttcttcgatcatctcgtacctgcccccgtttgttttgcaattttgggcataacggtgctcgtgctggcggtcgttttcgccgtcgtcgtgcactgtatgcacaaagtcggaaaaaccaaaagaaaagggaactcttaaaaatgcaaaattttggaatgtccatgctgtggttttgggtatgctactttttagtgacggcggtgggagtattgcatacgatcttcaacatctgcgtcctgcacatgaaatcgatgaaagagggaccgggcatgggcgagggctatgaaaaaaccaagccgtggcatcccctttataatattattttattttcccttttcggttggctgtatatgcgcggactcgtttcgccgtcgctaagagaggcgtttttcacgggactcctctggatgggaatttgtatcgttttcgatctggtgggctgggtgctgatcaaacatccctggcggctgaccttcaaacagttttacgtcgagtatcagccctggatcactttgatttatctcgctatttttttaggaccgctcgtgggatacctcttggtacggatataagaataaaagcggaccctcggcggtccgctttttatgtttttagttttttcaaaagaaggcgagcggaacgataaagaggaacttcggcgaaagccgaagtgaaaaacgcgtttttaacgcggcgaaattttttattgacggaaaaagtccggaggtgttatactctttttgcggcccgaaagggaagcgaataaatctcgggaggaaaagcatggagaaaaaaacggaagcgcgtttttcgaagcgagttttggggctgttcttgtgcgccgcaatggttttcggctacacggcggccgcggcgccgcagcgacgggcggaggcatcggaaaatacgcaaggagaaacgagggctttggaaagcgatattaaaaacatggggctgggcggctacgtcggagaaaatctgacgggcaatatcaagaattggcagacaaacgcgtataaggacaatcccaatatcgtggaacagatcgcgcagtcgaaagacggcaagctcaatctcgacactttattgggaacggactatttcggcgtggataattatttcgatatcgacgtcgaggagaacgacgacgttttaaacggcggttgtttcgacgcccttttaagttatctcccccgcaaggcgggcgcgtatttcggagatgcgggatatcggctggacaggacggcttgccccggagtcaccgattggacgggcgcggaagaaatatggctctatatcgacgcgcgggaatacggggcggaaaacgtaaaaattcgtctgaattttgaagaaggggacttcgacgattcggggaatcccacgggcgtcaacgaagcgtacacgctcacgcgcggcagcaaagtaaagttgctttccgcgtcgggcgaagattcggaagcggaagtggttttggacggagtacataacgataattttatcgtactcgacaaaaatttccacggcttcgtgcggatggatctgtctttggaacagttttggagatatttcaacagcgcggacagcgcaaacgggatactcgatctgaaagacgtgcatcagctgacgattgccgtcggcggcgcggacgaaaacgccgtcgccactcccctgtacttcgcgttcggcgtcgtggggacgtttgaggacggggaaccgctccctgtgggcgagatagagggaaagagctttaaaaacgttctgcctttttccctggatttatttattcccgatcttacgaacggcgtatggacgggggatttatacgcggattgggacgtgcttatggcgcgcgggcgcaaaggatatgcgggcaactctctcagatggaccctggaaaggaccaattccgaatacagtgaccgtgatatccgttttggaaacgatacgaacgcggtgacggactggacgggcgcgaaggaactttgggcctatgtggacgcgagcgaggtgaaagcggacgccgaggtgcggtttgccttcgaggaaaacggcgtcggacgcgcttcttatcgcttgaaacagggcgccgagataaagttgcaaaaaaacggcgaagatctttcccgtatgcgcaaggtttcggcgggcgcgggcggctatgtgacgctgccgcggggctttgcggggttcgtcagaatgccgctcgacgaggaaacgtttgaaaagtattggggcgaaaacgacaacaacgttctcgatttgaataaagtcgtgcagttccagctgagcgtaaaaggcagcgacgccatggtgggcaactccgtctatatggacagtttcgccgtcgcggggaccgtcgacggaacttctttccccgtgcagacggacctcggggaagagaatacgtatcgggaaatatggaatttagagggacttcaacctcgcaacggctacgacggcggcgtgatgatctggtacggcgaatttgcgggaaaacttctcacgggcatggcgttcggctataaggcgacgcaggacgcggagcttaaaacggcgggcgacgagttagtggcggacctcgcggcggcgcagggcgcggacggatatctcggcacttattcgggcggagccagattctccatcgatgcgaataactgggatttatggaatcattatcactgcatcgtcggtcttttggaatggtatgaaatcacgggcactcaaacggcgttccggacggcgaaaaaagcgctggactgcgtgtacgaaacgtttaaagacagaagctatctggtgggcggcggctttgaaacaaaccgcggcatcgcgcatggctatgcgatgatgtatcaggcaacgggcgagcaaaaatatctcgacgaagcggaacgaatcatccaacaggattgtcaggacgccaacgggtggtataaaaaggcgctcggcgggggacacttctatcagtcgagctcggcgcgctgggaagtgctgcacatgatcatgaccttaggcatcctctacgaagaaacgggcaaccgcgaatattacgaagtgatggagagtgtgtggtacagcatcctgcaaacggatattcacaatacgggcggcttcaccaccaacgagggcgcgtgcggcgacccctatcgtacgggcgtcatcgaaacttgctgtacggtggcgtggatggcgttcaccaacgagtattataagtattccaaaacggtggaggcggcggacgaattggaacgctcgtatctcaacggaatgctcggaagtcttttggaagacgataagtatgtttcctacaatacgcctatgaacggcgtcgtcggcacggcgggcggctatgacggcagacgggtgccctctcagcaggatatcgctttccaatacaacggcggttctcccgatttcaattgctgccaggccaatctggcaagggggctggggcagatcgtcgaatgggcggcgatgacggacgaagacgaattgtatctcaactactacggcgaaagcgctatccaaacaaaagtggcgggggctgctgtcaccttgaaacagacgacgcagtatcccttaaacggaaatatacggctggaaattcaaggcttggaaaagaatacctcgtttgctttaaaacttcgtattcccgcctgggcgcaaggaagcagagtggcgttgaacggcgaatccctctacggcgtgcgcgcgggagaatactttgaaattcaaaaagaatggaaaaacggggacgtcgtgacgctggaacttgcggtttccttccgctattggacgggagaggatacgctgacggggtgcgctgccgtgtattacggccccgtattgctggcgctggatcaaagttttgcgcccggctatacgcagaatacccgtttcacgactcagcagctcgaaagcgcggtgattacggaagggacttatacggacaccatgctcaatttcacggtgaaactcggctcggaaacggtgcggctggtggattttgcgagcgcgggcaaatataacggagggagcgttccttccacgtattggtcctggttaaaagtgcccgacgcgcccaaggcgatagagtttgaaaaaggcggcagggcggtgtggcagaacacggcgcgcagggaagtttccttcggggaacatatccgctttgaaaacgccatgtacctgccgggcgaaacggtttcctttgccgtggaagttcccgacggaaaacaggtggacaaaatccttgtttccggcgtggaagccgtcgaagaaaaagacgggagctatgcgttcgtcatgcccgcggcggaagtgcgggtggaagttaccttgaaagacggacagcagacggattcctcgggcggttcggaaggcgaaagttcttcttcgggatgcgggtcgatcgtttccggtgcggtcggcgtgacggcgttggcgatcgcggcggcggttctcgggaaaaagagaaagaaataggaataaagaaactcagccgcggagaaattttccgcggctgtaaagtcttacgggcagaacgacgaggaggaagtatggaaaaggtaaaagataaaattttcaccgtagaactcgcagaggacaaaagactggacgcgatcgccaaagcgttcggatgcaagacccgaaggaatatcctgcgtttgctcgccaaagagaatctcagcatctggaatatcgcgcagcagctggatactcccgtcagcaccatttcggaacatattaaaattttggtgcagtcgggcatcgtttccttgcaggaacggcacatggaaaagggaagggaaaagatcgtcgtcagacaatacgaaaagatagagatacccgtcgtcaattccgaaacggatcccacgggaaagggaaaacatacggtgcatattcccatcggcagctatacttccttccatatcaaaaaatattgcgggatgatttcggaagagggctacatcggcgttacgcgcgataacgcggacgtcttttacgatcccatgcgcttcaaagcgcagctcctctggtttgacgaaggatatctcgaatacgtcgtgcccattcccgaagtgaacgagctggatattctctccctttctctctctttggaaatttgttcggaggctcccggctataacagcgattggaagtcggatatatttttcgaactcaacggacacgaggcgtgcgtgtatacttctccgggcgatttcggcgggaggcagggattgcttacgcccgcctggtggggaacgtactgtacgcagtacggagccatgaaaaaagtggaaattacccgcgaaggaacttttttggacaataagctggtttcggatttaactttgaaagacttaaatctgaaagggtcggaattgctcgtttttcgcataggcgtgagagcggacgctaaaaataagggcggtatcaatcttttcggaagcaaattcggggattataagcaacatatctatctcaacatcacttacaataagccttccgtctaatctttccgacgggaattgtttagagaaaaacggttcgcctttctccgtcgtccaagataagatttgtccgcaggcgttgcggttaaataaatttgttttttatttcagcacttgcattttttgcgacgagagaaatacggaaaagtatttttaaacggacccccgagcgaatggtgttcatcgatcggggatccgttttcctaaaagaactgtttttatagagcggagaaattatggaatgcgctcgcctcagacatgggtggcatcgtcgggatactttgcagattcgatgacgcctccgccgatacactcctcgccgcgatacaatacggcgtactgtccctcggtcacggcgcgctgcggttcgtcgaattctatatgcactctgccgtcctctctgatttgtacgcgtaccgcttggtcgggctggcgatagcgaaactttgccgtgcactcgaacgctcttttttcgggcggaaaggggatccagttaaagccgctcacttcgcaggaaacggaataaagcggggtttcgtcgccgtgtgaaacgtacaggacattgttttgtaaatctttcttgacgacgaaccacctgccctgttcttcctcgcctttgacgccgcctaaatccagtccgcgcctttgtcccagcgtatagtacatcaatcccatatgttcgcctacttctttgcccgaaagatcgagaatctttccttttcgggcaggcaggtatgtgctgagaaactttctgaaatttctttccccgatgaaacagatgcccgtggagtctttcttttttgcggtcgcaaggtcgttttccagcgcgatttttctcacttcgggcttttgcatctcttgaagcggaaagaggacgtcggacaattggctttgagagagttgattcaaaaaataagtttggtccttatttgcgtcggcggcttttaaaaggcgatgaacgccgttttcgtgagagatcttgcaataatgccccgtagcgatataatcggctcccaattttttcgcctcttcgagaaagggaccgaatttgatttcacgattgcacagtacgtcgggattgggcgttctgcccgcttggtattcggcgagaaaataggaaaagacccggtcgagatactctttggcgaaattgaccgtgtagtagggaatgtcgaggagggaacagacgcggcggacgtcggcataatcttgttcggacgtacagcatccgttttcgtcgtcttcctcccaatttaacatataaagtccgatgacgttatagccctgctttttcaataagaacgccgcgacggaactatccacgccgccgctcatgcctatcaccactgtttttgccataggaataccgccttttttaaaaatttccgcccgtctttgccgttttgtagggcaaaatgggagaaagatgggaacgtaaaaaaatttttttacttttttgaaaatattataccataaacgcttgcaaaaaggaagtaaaaaagggtaaaatatacttgcgcgtttaagagagcggatttgtcggaaaaactttctgaggtgcagcggcatggcgaaagagaatttctccttatctgcgaaagattttgccggaacgtttttcttcatgaatgtgcccgtagtggaattggataccataaaggcctccgacgccttcggtccgggttcgagccccggcggacacaccaataataatgtcgtattttttcgaaagataagatacgacgtttttttattcttctatattttttttaactgaataatatattcgggagaattaaataatgattttaaaaaagcgtataacaattttttttgctgtcagtttaatcctattaagcggttgtggctctgcgccttctgaacaagaaaaaattacagaaaaatttttaatttatggcggacaagagtatttagtggatgttgaatacaaagtctgcaatttaacacaaccgataatagtctttttccctgtaattaccaataaaacaatcactgatacacaattcggcggagtgggcgcaaagttaaaattatcaagcggaacagctactgtaaaattagcaaacgatacacaagaatttttaaatgactattataacggttactatgtttcatttcttaaatattgcgtatccattgataatagtaattgtttacaagctaaggatagcatagagctatgtgatacaacaatttgggtatatcacgattcagaatttcaaacaataaagatagctgatacatattttcgaatattcatagtggaaaatgatagcgaaatatatttacccgattggaatgccttaacagataatatgaaagctgatattcaatcaagaatttagagttccatccctatggataactgttacccttttccgtgggttagtactctacttttcattcattatggacaaaagcgcggtcaatcgaaacatcgattgaccgcgcttttgtctattcggaaactttggagtcaaaacgaatgacagcggcttttcgtttcattgatgctctatggtcgcctttggttcccgtattatcgaatcggttttttttcagcatactatattgcgtggaattcggtagccagggcggatgaaaaaacttttaacggtgttgtttgcctgcgttttggcgtttttcgtcggatgcgcgaaaacacgcagctataccgtgacgtttgacggcaacggccaaacgatcggcatagcggcgcagacggtggaggagggcggacgcgcgcaagagcccgcccctccctccgccgagggcgtggatttcggcggatggtatgaaaacacggagggtcttggcgagcggtacgattttaaaaccgcggtgacgaaggacgtcacgctgtacgcccgctgggacgcgcaggctcgggccgtatccacggccgaagaattctttgcgatgggggacgggaattaccgtctggaatgcgatatagacttcaaggataaggaaatcgcgcccgtcggcagtctggaaaagccctttgcgggcacgctggacggcaacggattcgctttgaaaaacctctgcggccaatcctccgtctttgggtgcgtgacgggcacgatcaaaaatctccgcgcggagttcgtcggcaacgttcaaagcgcggataaaaccgtctatataggcgacctcgcaggctttttgaagggcggcgtcatcgaaaactgtttggtgaacgcggagatctccgcgacctcgtcctcctcgcgtctttccgtctacgcgggcgggatcgcgggcagaagcgcgggaggcgaaatcaggaaatgcacggcctatgcggagatctccgcgcaaaacgcggccgaggtctacgcgggcggcgtcgtcggctacaacggcggcgaggcggaaatcgacggaatcgtggagtcctgttcccattacggcagtgtgtccgcttcctcgcagctcgaaaccgcagcggcgtatgcgggcggcgtcgtgggctataacgcgggcgcggtccgcgatagcttcgacgtatccgtactcgtaaaggcgtcctgcggccgatatctcgcgtacgcgggcggcgtagccggggacaacaacggcggaaagctaatccgctgtttctcggcggccgacgtttcctgtgaaacaacgggcgggaacacttttctcggcggcgtgacgggcagaaatttcctcgactatgaggtcgaatcctgctacggctgggacggacagaatatctccctgcaacggacgggggagggctcggaaacggaacgtcacctccgcgcgccttgtcaaacgctccccgcggccaagctcaacgccgcggcctggtataaggaatggaagctgaacggctggctcgtggaggacggctttcttccctatcagcaatacgcgcagcctaaaagcttcgcgcgcgcggcttcctacggcacggcgggcaatccgataaaaatcggcactttgcaggaattggtttccatggacctcgacaaggcgtacgaactcaccgcggacatagagctgggccgctgggagccgatggggacgtatacggcgccgttttgcggcagtctggacggaaaagggcataagctgtacggaatccgtcccgacgcggcaaacggttacgcgggcgttttcggctatctgaacgggagcgtcaaaaatctgaaaacggaaatttcctattcctcggaaacgcgggcctcctcgcagatttttgcgggcggaatcgccggctacggagttgccgccgtgatagaaggctgctcgtccgaggtgaaattcgaggtgaaggccaagggcggaatcgcgggcgggatctgcggctatttggacggcggcgtaatctccgaatgctccgcgaagggaagcgtggacgtatattcctctaatccctcggcgtacgcgggcggcgtctgcgccgtaaacgaaggcgggaaggtcctccgctgccgcagcgaagcggacgtatcctcccggggcgcccagggaagcgcggcgggcgggctcgccgcaaaaaacaacgggctggtcaaggactcttacagcgtaggaacggtcgccgcgtcggcggacggcgggaaaggcaacgtgtacgcgggcgggctcgtcgcgtgcaatttcggaagcctcggcgacggatacgccacgggagaggtaaagggcgaaaagggcaaaacgtccgcgtcgggcacggtttgcggcgcgaactacggaagcgtggagaattgctacgccgcgaaagcggagggcatgggaacgctcggttacagtcccgccgctacggatacgcgcgcattggaaacggacgagtttgcatcgctggccgaaaagctcgacggctctctcggcgtttggaaaaacggccggaacgggtatcccgtactggcttggcaggaggcgtgagtatgaaatcgtttggtatgaagatcattttagcctttttattgacggccatgctggtctggcaggcgccgcccgtgcgtatctcggcgcttgaaaaagcaaagccgtcctattccgcctcggctacctccgaaacggaggggcacggcgcggaaaacgcggccgacggaaatacggaaacttactgggaggcggacaaaaacgacgtccttcccgccctcgtctgcgatctcggcgagcttcgcggcgtaacgggctataagcagatatttttgacctccgacgtttggagctttgccgtttacggcgcggcgggggagggcgagtgggtgacgatcgccgattataagtcgggcgcgcccggaaaaatgttcgccgactcggcgaacgggttttaccgtttcgtaaaaatcgaattttacggctcggagaacgcttccgcgtttacgagctgcgaatttaccgtggacagcgcgccgttgtcgcagggcacgaacatagccctcggcatgaagggatacagcggcagctgggcggcgggcttcgaacacgagaaggcctttgacggggatacgggcagctattactgcgccaacgacggcaactttccccaatactgcggcgtccgctgggaatacgaatgcagcgtgaagagcgtggaagtgtatttgcaggactacggttcctatgaattcgaggttacggccgagggcgcggacggaaagacgactctcgccgagcgcgctgcgcggaggggcacgtatttttgtttcgaaacggacggactctactcgtccgtagagtttaaggtgtattccggacccggctgggccaatctcacggagatgaaggtcaacggctttaaggacctcgcttcccccgcctgcgggcaggctgccgaaggcaaggccgaggacggaagcctcgtgtatttcttcccctacggcgcttacgtggactccgttcagggagaggaggtgttcgtgtccgacgacggcagcgcctggactaaggcgaatcccgcttccgtcgggaccgtgtgcaagttcgtaaagatgaagaaaagcgacgcggcaaagctgttcggggtgccgctcgtcaaggacctggcgcagggcttaaagggcgccgtgtccgattattccaacgagggattcaacgcgctgaaatgcacgaccaatcccgagcacgaggacggaaaaaaccagttctggtgcgcggaaacgtacgacggcgcgcattggctgcaaatcgatctcggcaacgtctgccgcgtggaaaaggtcgttcaaaggtttcaggaccccggcagctatcaatttaaaatcgaagcctccgcggacggaagcgcgtggacggcgctctataacggagaaggctcctatgcgcagggacagacgtttgaagcggccacggcagaggaaaaaatgttccgatacgtaaagctgacggttatcgacagcggatgggccaacagcaaccagttccagatattcggcttcggcgaagccgtgcccgaaagctggtggctgcgcgaatcgggcgtggtgcgttactatcctaaggaacagaaggtgtccatcgccgaaatgacggagaaactcgaatattaccgcgcgaacggctttaaagtgatcgaaattcatcagccgtacgagggcgtgggggatagttggtcgggattgggcgctacggacaattacaacgccgaccccgtgaacggtacgctggacgactggaacgcctttttggataaggcgcactctttgggtatgtacgcgtttatgttcggcaacgtgggctacgcgcgcagcaccgctgaatttttccgcaaagcctgcctcgattacgccaaccatatcaagtcggaggagcgcgactggtttttgttcagcgaaaattgtcccgatctgacgaagtggttttggagcgatacggccaacgcctattattacggattttggggagagaacggacaaattcccaactacaatttcaacggcgccgcctggcagcgcgagtccaaaaaatatgtgacgtactgggcggacttcggttttgacggagtcgcgctggacgcgccgcccgcctactatttcggctcggaaaatccctccgaggtcacgtacgagtgcatcacaaagccgctcaacgcgcgcaacatcatgatcctgcccgagggtacgggggattcgaactatatttattcctatcattatacggccgttcaaaactacaatatgggaggctggggcggcggcgcgtggagtttgggcatcgacgccgtgaccgactgcaacgcctcgacggtggacgatttcatcaaatcggggagggataacgtcgtttccttgggcggctccgccattgcgcctctttcgttcgagcaaaaatacgaaaacgtggaggactataagcggaaggcggaagcggcgcttctcaccactagcgggcacatggctttcctgcactcgggaacgagcgcgttcgtcggtcaggacatcatcgaaaaagactggtccgcagaccttagagattccgttttcgagctctttaccctgcaaaacagctacgccgcgtttaacgcgggcggtatgcgttatcgcgtgcccacgaacgacgattccgtatattacgcttactgcaaggcggataggcgcggcggcacgagggcggtggtcgtattcaactattcggcgtccgagaagcagatcgaagtggatctttcgggcacgggctttggcggcgcgtttgtggatatgcttacggggaaagctgtcgaaggcgcgggaaaaggtttgaagctcacgataccgggcggatcctacaagatcctcggacagttttaggaggtcattatgaaaagatgtactgcgataacggcggctgttctttccgtaattttcacgtcgttcgcgctcgggtcctgcgctgtcggcgtaaataaaaattcgtcggggtcttcctcgggggcgttctcgtccgattcggtgcaatcggagtcctcctccctttcctccgaaacgactccgcccgaggccgagatccccgacagggcgatctcgctcgcttcgtccaatcgttttaatacggccaccgcgtattttgacgcttcctattcggaggagggcgtcatgctcgacgcctacgtaaaggacgacgatatcaaaacggacattttctattcgagcggattcaacgacaacgtggaatatctgatcggattggaatacgacgcggggacgggctggaacgcgggaaacacgctgcactttctgatcacggctgacggcaatacggtcatgcagagggcggtgtcggccgatcggctgggcgaggattatgcgctcgaactcctgtgcgtcaacggctggaatttcagatattcctacgaatataccgattacggctataaaaacagcgtatttttaagctacgagctgttcggcgtgacggcggcagaggggaagaacaatttatacgtctgccccgcgatgcgcaacacgcacgactacgcggacagcgtatggacgccctttaaggaaagcggctgtaattggagcaacgcctcctcttttataagggtggacgaaaacaagggctacatgaccgacttcaaaaaggaagcggacgttctcttcctgggggattcgcagctggatacggcctactggcgcacctacgcttcggacgtaggcaaaaaaggcattatgaatatggcgtcgtcgggaacgaagatttcggactggcggggacgggcgcaggctttggcggaatacaatcccaaaaagatagtcttgtacgcgggcatggacgaagtgaacggttccgccgcgggacagagcgccgaaaagatcgccgaagaaatcgcccttacggccgacagcctctcctcggcgatgccgggtgcgaagctgtacgtcgtgacgctggcgggcgcgtccgacggctcgaacgcggaaaaaatcgcgcggatcaacgcgctcgtcaagcagacggccggctcgaaggacttggacggccatagacgccgcgggcaggctgtcggagaatgggcggcttaaaaagggcttcgccgcgccggacggcgttcatctcaatcaaatgggatataatgctctttccgctcttatgcggcaggctttggatttggcgggaggctcttccgcttcgttcggggacggttctatgtatttctcctcggcggccgtaaaagaaacgcccgacggcgttactgtgctcgacggcgtatacgatcagtatacctatttccaaggctgcggaagcgaggaattctatgccgaaacgcagctctgcgcggaaacggtgtataacgccgacccttatcccaagttcggaatcgtcgtgtcctccgcctcttcgacgttgttcttctacgtcagcggctacgacaatctttccgccaatacggtgggatacgtgaagtacgaagacaacaatacgtggaattggagccaaagcgtggaaagcacctgcgagatttcctattcgaacggcgaattctgcgggctttccgtcctcaaatatcaaggttctttgttcctttttgtaaacggcgaagtcgtgtttacgatcgacgaccttgcgggttacggaatcgcgggcaagtgcgacgtcggaattcttgccttcaacaccaagctttctcttcgttccgctttttatacggagagcgggctggaaaactatatcggctgaggaaaatcgggaaactccgcaaaggatttcccgattttcctttgacttgcgcaaggcttaaaattgcgcctcagcgcgcgaaaaattgtttgtaagccttcctgccgatccatgactcggaagggctctaccagctttctaaacggctttaaacgtatttcaaaagcggggacgtaaccattcttaaatttttcctctgtaagagcgcgggatatgataggaatcgccataacgactgtccttactatttttgttgtagtagcatatggattgattatagacttttttggaaaataaattaaagaaagtagacctaccgattttcgacaacttcactaaaaacttctcggaatttctccgggaagtttttttgtgccttgtaccatacccgagagggaagaaagaaaacgtaaaatgtacggcggatgaatttcctatatatctgattggcaagaataaaattacactttctttattttaagaaagtttatattaaacgcggtttataaaaagttaaaagctaaaaaatgaaaaaaataggaaaatatataaaactttttt

SEQ ID NO: 2656 - DNA, 5154 bp, Unknown
  16S sequences of unknown bacteria
tgcagaattgcgggagctgcttcgcagcggagcaattcgtaggcatcagttggggcaaaataccttttgaccctggtatcatcataataaaaatttgtgcggcatcattacggtagtctaaatggtattatcctggcatatactgtaaaaagagcagtccggagcgaatgctatgaaaaaatggatatcctgccttctggcagtattgctgctgcttggacacgtaataccggtgcaatctgcgtctgaagcaccgaagcttcagacgccccatgcctgcctgatggagctgtccaccggagagcttttgtatgaaaaggcagcggatgaacggctgcatccggcgagcgtgacgaaaatcatgacgatcctgctgatctttgagtcgattgcggacgggaagctgtcgctggatcaggaggttgtgacgagtgcacacgcaaggtcaatgggagggtctcaggtttttctggaggaaggagagcgtcaaacagtcgagacactgctgaagtgtatcatcatcgcatccgggaatgatgcggcggtggcgatggcagagcagatctccggaagcgaggaggagtttgtcgggcagatgaatgcgcgggcggcagagcttgggatgacaaatacacattttgttgactgctgcgggctgacggatgcgaaggagcattatacttcggcaagagatgtggcccttatgtcgcgggagcttttaaagcgatttccccaggtcgtcgaatattcggatatctggatggaggacatcacacatgtcacggcaaagggaagcagtcggtttactttgacaaatacaaataagctattgcgcagctatgatggctgcgacggactgaagaccgggagtacgagtttcgcaaaatactgtctgagcgcaacggcgagaagggatggaattcgactgatcagcgttgtgatgaccgcaccggattcgaagacgcggtttgcggaggcggggaagcttctgaattacggattttcgcgctgctccttgtactacgatgaggagatgcctgcactgtcgccgatcacagtacgtggtgcggtggaagaaacggtggatgtcggttatccggatgaattttcttatctgtcgacctcgggagaggatttttccggaatcgaacggagcattgagtggggcgaagtgccggaggcaccgtttgctgccgggacgcaggtggggacgattatttacacgcttggcgaaaagaagatcgggcagatgccgatcgtgacaaagaccggagcccaaaaagcagggtatttcatctggctgatgcggagcctggaacggctgtacatatagttgaaattgaccccaacatccaaatatggtacaatcgaaaaatggctgtatagctgtaatcgtgaaaggataaatcagcatgtcagattttaaagtgacgcggtataagctgcgggcatcggggatgagcgtccggggaccggaagagccgttttcgatcgtatttctgagtgatcttcacaataaaagttatggaaaggggaatgaacggctgctgcaggagattcgcaaccaggatccggaagccgtgctgatcggcggggatcttctgacgagtgccgatccgccccagatggaggctgctctggagctgatgaaggagcttaccagatggtaccccatctacgcagtaaatggcaatcatgagcagcgcttaaaggagcagacagaaaagtacggtgatgcctatgattattattcacaggcggtcaggagctttggtgtgcatctgctggaaaatacgtcggagtatgcggagttttgccggatgccatttcggatctggggctatgagcttcctctggattattatcgcagagggcggagcttcacactgatgacggagcaggtgacagaggcgctcggcgctccgaaggaaggctgctgcaatgttctgctggcacataatcccgtctattttgatacgtatgcggcttggggggcggatctgacgctctccggacatctgcacggcggcatcgtccggctgccgttgctcggaggggtgatcagtcctcagatgaagctgtttccggactatacccgcgggtgttatacaaaggaaaatcaccgcatgatcgttggcgcggggcttggcagccatacgatcccgattcggatcaacaatccgccggaacttgtggtgatcgacgttatgaactgaaagaggagtcgttatgggaattcccgtaaagcttgaggcgtttgaggggccgttggatctgctgctccatctgatagagaaaaataaagtaaacatttacgatattccgatcgttgagatcacagatcagtatatggaatacattcatcagctgccatcggaggatctggatgtcatgagtgaatttcttgtcatggctgccactcttctggatatcaagtcaaagatgctgctcccgccggaggtcaacgaggaaggggaagagctggatccgcgtgaggagcttgtgcagaagctgctcgagtataaaatgtacaaatatatgtcttatgagctgaaggatcgggagaaggatgcctctttttgcttttataaggagccgtccattccggatgaggtaaaagcataccggccgccggtgtcaatcgaagagctgctcggcgatatgacactggcaaagctacatgcgatcttccgggatatcatgaagcggcaggagaaccggatggatccggtgaggagtaagtttggtaatctgaaaaaagaggagattgacctgagcggtacaatgcggtttgtgcagaagtatatgcgcaagcgcaaaagctgtctgttcagcgaaatcttatcccttcgtccgggaaagctgtataaaattgtcaccttcctgacacttctgcagctgatgaaagaggggaaagttgaagttacgcaggaggagacctttgcagatatccagattgactggaccggtccggaagaggacggggaagagatggatctggcacaggactatgactagtaaaaaacaggagagatacggtggagataaaacaggcagaggcggcaattgaagcaattttatttgcgatgggagattcggtagagctggagaagatcgcaaaggcgatccagcaggatacggagacgacgaggaaaatcatcgggcatatgatggatggctaccggaagaaggaccggggcatccagatcatggagcttgacggagcctatcagctctgcacgaagcaggagctgtatccgtatctgatccgggtggccaggcagccaaagaagctggccctgacggatgtggtgatggagacgctgtcaatcattgcctacaagcagccgatcacgaagctggagattgagaaaatccgtggtgtcaaatgcgaccatgcagtgaataagctggtggagtacaatctggtcaaggagctgggacggctggatgcgcccgggcgtccgctgctttttgggacaaccgaggaattcctgcggtattttggcctgcattcactcgaggatcttccgtcactgaatccggtacagattgaggatttcaaggcggaggccgaggaagaagtgcagatgaaaatggacgtggaggtgtagacctgacgaacccgattcaggaatgtcaaaacagcatctgttcaagaatgcctcggcattcttgctgcgagatgcgcgtcatgcaatgcatgacatacttcttctgcgcatctctgcaatcctgccggaggctatatcagatgggggattgactcccaccactgatactgatttgttgctcgccacctacagaggtgggagtcatttcacatctgatatacaggcgtgtaattgacaggacggcatgtataggaggatttgaatgctggaaaaaataaaaagacagatatgtttatggctgtgttttcttttcatgcttgccggatggacttcggtgcgggcagaagaggacgcagccttttctcttcacgcccgcagtgccgttttgatggatggtgacagcgggcgtattctttatggaaaagaaccggatacgccgcttgcaatggcgagtacaacgaagattatgacctgtattttggcactggagcttggaagcgggaatcagatatgcacagcgtctgccaatgccgccgcgcagccgcaggtgaagcttggcatgcgggaagcagagcagttttatctgcaggatcttctttattcgctgatgctggaatcgcacaatgatacggcggtatgcatcgcagagtctgtggccgggtcggtggaggcatttaccggaaaaatgaatgaaaaggctgccgggatcggttgtcgggatacctgctttctgactccgaacggacttgatgcgggagaggaaaatggtgactggcaccatacgacagcggcagatctggcagagattttgcgttactgtattacggaatctccgaaggcagcagcatttcttaaggtgacgcagacggtcggctattctttttcaaatgtagaaaaaaccaaagactatgattgtgtgatccataatgcatttctgacaatgatggacggggcattgaccggaaagacaggctttacggcgaaggcaggctactgttatgtcggcgcgttgcaggatgggggacggctgtatatcgtatcactgcttgcctgcggctggccgggtcataaaagctggaaatggtcggatacgcggcggctgatggaatatggactcggatcgtttcagaaacgaatgatcgaggatgacagccttgcagaccggattcttccggtagagggcgggaagatcagttcggtaccggtacgtgcggatacagggacatttacgtttctgatgcgcgatacagaggagatcacgcggcaggtgattttaaacacaccgcttacggcgccggtaaaagcggggcatcaggttggcagcgtgcattattttctggatggcgaggaggtggcagtaagtccgatccgggcagctgcaaacgtggatcgggcagatggcatctggtatataaagcaaattcggaatctgttttttctgtgatgaagcaaaacatcatgatacaagggtcaaaaggtcatgcgtttcatgcttgcatgaaaaagcatgacttattgacccgcaaaacaccgaaaagta

SEQ ID NO: 2657 - DNA, 11536 bp, Unknown
  16S sequences of unknown bacteria
ccatatcccgatacaggaaggtgacgatctgggcccgggtacagggcagatcgggggagaaggcatcggcactggtgccggtggtaatgccccattccaccgcccagaggacggcatcatagtaataggcctgggaagtcacatcccggaagggattatgagtgctgctgggcgcctgttctttctccatccggtggaggaaggtgacgatctgggcccgggtgcagggcagaccgggggagaaggtattggcactggtgcccgcggtgatgcccttttccacggcccagagcaccgctttgtagtaatagtctccctcgctcacatcggtgaagggattggttttgcccgaaggctccggctgtcccatggcccgccacaggaaggtgacggcctgggcccgggtgcagctgctgcccggggagaaagtattggcactggtgcctgcggtgatctggggcgtatggttcaccgcccagaggacactgtcgtaataatagtcccatgtgcccacatcggtgaagggaaccgattctgtgatttccgccgaggcacggcccgagctggttatgccggcgtaggtgatgacatccttgtagttggccgaaagattgccgtttgttacggcttttccatcggacagcttcagggagaaggtggtggcgcacagttgcccatcggtggcagcgcctgcatccaccggtgtcagcgtgccgctgagggccatgccgccctgctgcacctggatattctgggtgttcaccgaagagaggcgcaccggcttgtcaaagcgcagcatcacagaagagtctccggctttccccgaaagggtcagctgggccgcggcctgggaggtgaggcccacattgacctcggtctgcaccggaggcaccggcagccattggctgtacacggtgtcatagccttctttttcgtactttacctgccaccagccgtcgggaaccatccacaggtactggccctgggcgtcggtggtcaggggattctgctggccgaagtctgcggcattccagcgctggctttccgaagcgttgcctgtgggctttgcacttccggcactgtaatagagggtggtggtcaccccggacaggcggttgctttcgatcccttcatatacatagccggaggggtcccggatcaccgttttgtcccggtcgggcgtggaagccatcaccgggtctttgggcggaatcagtttttccagaaggatgggcaggaactcccggccgatgaccagaaggcccgtacccagcagcacgccggccactgcatatccgttggttgccacaaagggcaccagtgacaggcccagggtgagaacggggtcattgagcatatgccccagatgggaatccggatccaccatgccttgcaggacgcctatcagcaccggcagggcgatgccgtagagattcatttttcccatggggttgccgcccaggagaaagcggttggcgggagtgggtctgggctggatttttccctgtatgttgggcgtacccttgttctgaaccggtggattgggcttcggggccggttctgcttccttgggcggaccgaacatttcgttgagcttccggagtctttgccctgcctggtgctcttttttgaacgagtccacataatcctgtgtcgtcatgcctttgacttcgaactcatggctgaatacatcgccaatctctccgccgaaggcgccggagagatcgatcatggacacggggttgttgtacacgaagcggtacaggttgagatcataggactggtaggccgggtccgggctgaggaagctaccggaggcggcggagacatagcgggcccggtgatagcgcaggccgttgccgtcgtctgcgatcccatagattcctgcataggtgtagggattgaacaccgtcccgctggcagagagcacattgccttcctggtcgtaggcatagcggttggcaatggcgccactgccgtcggtgatctccgtgacagagcccagcaggttggagtgataaaagtacatttcgtccccggttctggcggcggtcagcatgccggccagggcgtagtgctgttcgccgaagctgccgtaggcggccagggcgtagccgtcgcccagaggatcgttcacatagcgggtggtctcgccgttcaccgtcacccggctgcgcaggccaaaggcatcgtagccgtactgatagaccgtgccgtcaaagtcggtgcagcccgtcagctggccctgggcgtcataggtgtagcgggcggtctgtccccccttctgctcggtgagcacattgccattctggtcgtaggtgcgccgcacctcgccataggccgtgtactggttcaggctgtttgctgtatagtttgtggttttgccgtcggttgttttggccgtccggtttccggctgcgtcgtaggtataggtggtgacggtgccatcgggggccgtagcctgggtgagctgcccggctgcgtcgtaggtgtagcgccaggtgcccgccggctctttcagggaggtcacatggccctggctgtcgtaggtataggcataggaggaaaggacggccccggctgcgtcataatggacgatggaagccagctggtcaccggaatagctgtactgggtataggtgccgttggcgttttgttggcgggacaggcgcccgtcgctgtcgtaggtataggtcaccaggggactgctgccgtcggtgacggcggccacccgtccctggctgtcatactggtagccggtggtatagacgccgtcggatacggaggttctgcggccctgggcgtcataggtgtaggagaccacgctgccgtcaggggagtggatggcagtcaggttgtcgctgccgtcataggtcatggtggttttctggccgttttccgtgatcgacagcaggtttccgcggctgtcaaaggtctgggtgacggtttcgccattgccgtacttcacagcggtcagattgccactctggtcgtaggtgtaggacatcgtggttccggctcggtcggtatgggtcacgatctgtccctgggaatcgtaagtgaaggactcccggctgccgtcgggataccggatggcggagacatggcccgcatcgtcacggtcataatagacggtgagacctgcctcgtcggtcacagagagcagcaatcccagctggttaaaggtataccggctggaggtgccttccggggcggtgacggtggccccgtaggctgcgtcttcgtcagagatgggctccatccgggtagtggtgccgtcatcttcctttatgataacagcatccccttcgtaggtgtaacgggccgaggaggttccgtcggagttggtgatggccaggatctggccctggtcaccgtactccactttaacagtgccgccggtaccgtcctcgaaggtaacgctgttggacacctcgtccacctggaaagtatacccttccgcttctatggcggtcaggttgccgctttggtcgtaggtgtaccgggcggtctcaccgccgtaggtgaactccgccacctggtcctggccgttgtaggccagggacagggtcttgccgtccagagaaatggatgccacccggccttcctcgtcataggtgtaggagccggaggactccacatcttcctgtcctcggggggtgtattccacccggaaccggtagggaacggtgtcttcggtaaaatcggcgcttcccacccaggcgtccttggccgcctgatagcgcaggggcacacgggtctcttctcccatgcggtcggtggtcaccacggtgacgctgccctgggccgaggcgtccttttcaaaatccacctggaagcggaaggtggggtaatccggccaaaaggtgtaataggaagcgctgtcctcgccggtgagaaagtcgataaccagggtttcttccaccggcgggtcggcatcggtccggccgtggacttcgttgacaaccgtcagggtcttgacggcgtcggccgccgggtcatagtatacgctctgggcctctgtggggaagctgtcgctgccagggggcgtcacctgggcatataccatgtgctctccgggaacatcgggcaggatgactgtgccattccaggtgcccaggctgttggatgagacccggcccagaagggtgctgtcctcataaaaggcaatggtgctgccgggaacagccgagccggaaaccgggatttccagccgggatgtttcgctgggcagggagagacggaaaccttccacagtgaaatccagggtttcctggtgactttttccctctgctgtggtgttggccgtcagtgtcatctctccggtccggctggacatggcgctgaaacggatgacgccgtagccttcgaggggaaccgtcagcggtttggtgcttacaggctccactggctggctgtccaccgtcaggctgtccggcacataggaaacgccgtcgggcagggggaaggaaaccgttccttcttccgctcccaggctgatcacggcccggacattgaaccgggcgccctgggtaatgaggccgctgggaatggacagctggcagtcatacacccccagggaccgtcccccggagatggtcaccgaactgccgggaatctgccggaggaaatcttcgtcaatggggatcatggcgccggtactgttgttcacagcagacatgccggctcccacaaccacggaggattggctgtcggtggtcatcagaacattggcattctgctgttccagatggatggtgccgcccagcagggccagcacgccgtcggtttcacaccgcaccggcacattggtatccgctccacctttcagggaagcagtaccgtccagaatggtggcctggcccccttcccgcaggtgaagggcaaaatccgcgccgtgcattgccagctttccgccgtccatgaggaaggagccgtattccgacacgaaaagttcccgccccgtcaggctggccgaatcgtccaggatcagacggctggccacgatctccatcacgccgccggaggcatcgctggagcttacggtgacgcttgcatcatcggtgatggtcagatcggtatagtctgccacaaaggtgcgccgggcgccgctgccgctggtatccaccgtcaggctgcccggtccggtgatggtgacgctggtgcgctcagccatgtcgccggtggagaaggccggggccgcctctccatccgggtccagataccggccgtcgttatagatggtggaatctcccagcaggacgacggtgagggagcctctgaaaatgtggatcatttccagagaagcatctttgagtgtgagggtctttgtttgttcgtcgtagctcacgccctccggcatggcctggacggcatggccgtcctttaccacatggtcgccgtcgatgacaacggtggtcccgctttcttccgccgcaaaagccgtggcgggcagcagggaagcgagcagggaaacgatgagcagcagtgctgtcagtcgttttcgcataggcttttcctccttttttctgcggatatggggaagatcggaatatgcagatttttccggatacttccgattattgactatatcatgccataaaagaaactgtttgtaaagcaaagaataaattacagtattttgctgtggaaaaggaaaggaagatgggtgtttttgttggccttttcccctggggaagggcctggaacaaaagatggaaagaaacgggggaaggggttgacagatgtgaataattatgctattcttagcataaagaaacaaaaccccacagggaggacacgataaaatgaaaccggaaattctttttctcaagcaggaagatgtgatcaaggccgggctgctggatatgaagatggtgctggccgaaaccgaaaaaaccttcaaaatgatcggccagaaccagatcatcaatcccaccaaggtctttatgggtatgcccagcaatgaaaactgggattcttactgtatgtccatgcccgcctacatcggcggcgatgtggataccgccggattcaagtgggctgccgaatccaaggccaacgcccagttggaaggggtaccctatggcatcgatatcgtcattctgtccgatcccaagacggtgttccccaaggccattctggacggcaccatcaccaccgccatgcgtacttcggctaccgccggtgtcatggccaaatacaacgctctgaagggcaccaaggtggcctgcctggtgggcgccggcgtcattggccgcaccatgatcatggccatgatggaggctgtgcccacattggaagagatccacatggtggatctggtgaaggagaaagccgaaggcctggccaaggagtttgagggcaagatcaaggtcgttccctacaccgatgtgaaggaagcggtgaaggacgcccagctgctggtcaccgaaactacctcccgcaagcctttcatcaaaaaggaatggctgaagcccaatatgaccgtcatccagatggagggccagagctgcgaagaggatattctgctcaccgccgaccgggtggtgctggacaactggagccagatgtcccatctggtgggcatcctggtgcacgagctgtatgaggccggtaagctgaaaaaagaggatatcgtggagctgccggaaatggtgggtggcgttcaggtgcgccagaatgaggatcagtttgtctattgcggcagcgccggtgtgggcagcgtggacattgccatcgccgccaagctctatgagaacgccaagaaaatgggcatcggccagaagctgaatctgtgggataaccccctgtgggtctgagtgtgtcgaaaaagtggcgaaagccactttttcgagtttatgcaagggtctgcatgcagccgattggccgctgaaagcggccaatcggccacactggccccttgagaggtgcaaaaaacgccgcacaggtcgccgttttttgcggattgatgaggggtagggcgaaagggcctctcacgcaacaagggtttttcgacagacggaaccccttgtgggtctgatttgaattttgaacaaaaaagagatctccggaaacctttcggtttccggagatctttttgctatgcaggcagtatcctgcgggagtgctagcatgtgtggatggaaaaggaatggaaagaatgggcggacttttgctccagggcgttccgggctttcaggtgctggaatgcctcatcgatctgccggaggaggcaaggctccacctccagccggtggtggccggggcggagtgcggtcaccggcaaggcggccacccgatgcaccgatgcagcaaaggcgtaaggatcggtggtgggatagaaacaatccagctttccctcataggccaggtcgccggaatacagggttccgcgctccggctcccagaaacacagatggccgggggagtggccgggagtgtggaggcagaatacctgccggttgcccagctggaagcaatcctcatcttccaaaagccctccggctccgttctgatagatctggtaagcgttcggatcaaaaccgggagggaaggggggagcgccgtgggtcagattttgcagtacggcctcccgggacagggggaacttttccagccaaggcccttccagccggtggacccacggggccgggaacccgttacagccgccgatgtgatcccaatgggcgtgggtcagagccactgtgacgggcagggaggtgagagaccggacggcggaaaacagatcgcacacccccagcccggtgtcgatgagcagggcccgctttgttccggccagaagataggcgtgggtttcctcccagtgccggggttcgctcaaggcccaggtgtccttgtccagctgctgtatggtcagccagtccatggaatgtcctcctttgtgatgagataactcaagtataccacactaccttttccgaaagccggtgggatttttgcacaaaattcacctatcctatataggaatgtggtatactgataataggaaaagaagatcacagcaaagaaggaggttttttctatgaaaaaagcctggctgcaatgcatgatgctggcggggatgctgcttctcagcgcttgccagaaggaagaaacacagaaagtgaccccggccctggcccaggagacccaggtctcggcccaggaatttacccagggcaaaaccggaagcggggtatggaaggtggaaaaggacggggtttcctatctgctcttttatggggaaaaacgggaatattccggggtgcaggccgattacgatgagaaaaccggtacgctgacggtgaatttccattcggccgatggcgccggagacccgttgctctatcgcctggagggccagccggatacgctgatcctgctggacaatggccagcaagtggagctgcggtcgtagacaaagtcccgtggcgggacggccatactttctttgcctttcttcacacaacctgccgggtgcggcagcgcaatacggcagcccaggcactgggccaaaataacacgccgccaagagcaaaagaaaaaatcccccggagaattagcggagtgttcgtaagaccgtaaaataggtaaaaggcgtgaccgtgaaggtcacgccttttttcttgagaggatagccgctttcgcggcgcaagggatgcagtcccttgttcggaacgcagtaacgcaacatgcacatactgggattgccccgtatagaagtgcgccctgtttttcaacaaatcggaatttatcgttcagacataaactgctcaaggtttctttcatgatgatattttattgaggcttttttatctttctccagaataacatcattcaagtcgatttggtttaatgatgcaatcgcaaaagcgtaatgaataacatccaccaattcattggctaattgagatttcaaatcttcgttaacagaagcctttctcccgtcccgtttatttagaacctccgcaacttcacctacttcttcaactaatttcataaacaagctggtatcaataccatgactcttataatggtcaaataggtaatcttcataatccgcaatgctgattttcatcgtacatctctccaaatttcgatttgtaggtccgtttaattttatattatcacatcacaggaaaaatacaagaacagccaccgcggttcgaaccatggtggctgttaactgtcttacgaacacctgccttttctccgggggatttttgcagcaatcagaattggaaacttagttggctgccgatctgtgaaaaacagatgcagtaaggccgctggggaagcaatcggtttcccggcgcacaaagccggggagagtatggaaacggcagcctgccgtcagtggatatattcaaactcgaagccgcacacattgacggtgtcgtgctccttgacgcccttttcctccagcttttcaaacagaccggctttccgcaaggcccgctcgaaatacatccgggattcgtaatccgacaggttcaccgaagcaaagatccgctcgatgtgccgcccggtgacatagaaggtgtcgttctcccggcggatgatgatatcctcttccggatcggcttccttttccgggatgatctcggcttcgtagacctcgatgggaggcagcttctccagctcctgccacagggcatagaccagctcccgcacgcccatctgggccgccgccgaaatctcaaaataagcgcagcccagctcttcggccttttcccgcagacggcgggcgttttccccatcgggggcaatgtcggtcttgttggcggcgatgatctggggccgggaagccagggccgggctgtattccttcaactcccggttgatggtctccaggtcctccaccgggtcccggccctccgagccggatacatccaccaggtggagcagcagacggcaccgctcgatgtggcggaggaagtcatgacccaggccggcgccttccgccgcgccctcgatgatacccgggatgtcggcggccacaaaggactcaccttcacccacatacaccacgcccaggttgggggtgagggtggtgaagtggtaatcggcgattttgggccgggccttggagatcaccgaaaggagagtgctcttgcccacattggggaagccgatcagacccacatcggcgatgagcttcagctccagagtgaccatccgctcttcaccgggcaggccgggcttggcaaagcggggagcctgacgggtgggggtggcaaaatggcagttgccccagccgccccggccgcctttggccgccacaaagggctcgtccccggacatatcctgaagcagcgctccggtttccgcgtcccggatcagagtgccacggggcactttgatgaggatgttttcgccatccttgccgctgctgcgcttgccggtgccgttggcgccgttctgggccacatatttccgcttcatgcggaagtccagcagggtggaaaggttgtcatccacctgaaagacaacactgccgcccttgccgccatcgcctccatccggcccgccggcagcgatgtatttttcccggtgaaaggagacggcgccatcgccaccttttcccgccttgataaagatccgtgcaacatcaacaaacataattgtaatcctcttctctgtgcttcgcttcatgcctatggtggggtgcggcggctcgccgctccagtcttattataccattataccatacggagttataagaaagacccgggccaaaaggcccgggtcaaagaagcaaaacagatgtgggccaaaatttgtgtatccaacccttcatcaatttgcaaaaagccgcgacctgtgcgcagattttgcacttctcaagggccaagtgtgcgccgcaggcgtgcatgcaggcccttgcaaaaatacaaaaaagcggcttatgccgcttttttgagagagcccgggccatgcggcccaggtcttggggttcttactgttccaccttgatgaccgagaccttcttgcggtcgcggccgaaacgctcaaagctgacgcggccgtcagccatggcgaacagggtatcgtcagagccgatgcccacattcaggccaggatggatcttggtgccccgctggcgaaccaggatgttgccagccagcacatactgaccgtcggcgcgcttgacgcccaggcgtttgctttcggaatcgcggccgttctttgtggagccgacacctttcttatgagccatgagttacacctccgattggtttaggatgaaaaaagggaagaacttaagcctggatggcttcgatggtcaccttggtgtagggctgacgatggccctggcggcgacgatagttcttcttggccttgaacttgaagaccatgatcttcttgcccttgccggtcttgacgaccttgccggagaccttggctccctcaacataaggagcgccaacggtcatagccccgtccttttccactgccagaacattgtcaaaggacacggtttcgccatcggcggcttccagtttctcgatgtagatggtgaaaccgtgtcctt

SEQ ID NO: 2658 - DNA, 32759 bp, Unknown
  16S sequences of unknown bacteria
gagcatctgccttacaagcagagggtctcgggttcgatccctgatgcccccaccacatgcgggtttagctcatctggtagagcgccaccttgccaaggtggaggtagcgagttcgagcctcgtaacccgctccagtatggcgccatagccaagtggtaaggcagaggtctgcaaaaccttcaccaccggttcaaatccggttggcgcctccaaaacagagtaccgctctcagcgttctgctgagagcggtatttttatgcggaaaggaagtttgtgatgggcaatacaatgatgaacgcctcttatcaggtggggaccatggcagtctggctgggcacttttgcggacccggaagaattttaccggtatgtacagacctgttactgcacactggatgaggctgaactggacccggagtatattttctccccggcggaatttgaagagcggcttcacaagctgttccgtccggagaatggggaacgccccgaggaagctactctgcgccgggctttccggacccagtacaatgcgtttgagtatgacttcggtctgctgtttgatgaggactttgcagtgtgcgattactgcatggagcctacggaggatctctccctgctgctggaggagtggcctgagctgcttgaaccggtccgcaagctggtccaggagcagaatttccaggagccggtcaactgcattttcgcggtgccgtcctgcatgtataccgggtcggtccggatctccaatccccagggcggaacactctggttcgtggggaatatgaaggagggcgccttctccgactctgtggcggaggattacaatatcaagtccgcagagctggcagaaacagccgaataggtaaaaaaaacacagcctgtatccaactgaccgggtacaggctgtgttttgcttttatggaagattacagggactttccgacttcggggccgggggtcagcacctcagcggattcgggagtgacgatcacaatacccttggtcttgaggccgaactgggaagtcttggcgttgccggctgccaccagatcggcatcgtcggtccagcgggcagtacccttgatctgatagccctccaggccctcatagacaaccaccgaaacatgggcgtccttttccaggttggcaagggtcttgttcatgaacacatcgcagagcaggatctcgccctgggcgttgatctccttgaacatgatcacaatggtgttggggtactctccgttggtggagagggtgcagtttttggttttattgaacagtgcgctgacacgctcgttgagctgatacatcgttgtttcctcctgtctgggattgcttgtatttcgcagctgctgatgttataataatcccaatgcatggattttacaagtatgtacctttttgtaatataacttaccaaatagtaagtaacacgctaatgcggagggaattatgacagagaagggaatttgtccgattcagacggtatttgggattctgggcggtaagtggaagcatcgcatcctgctggaactgcatccgggcccgatgcgctataatcagctggcagccagcatcgggacgatcagctataaggtgctgacccagcagctccaggaactggaggaagacggcctggtttgccggaaggtctatcccgaagtgccgccccgggtggaatatgctctcaccgaaatgggggagagcgtctttgtggtgttccgggaaatgcgccgctggggtctggaatgtgacccggtgcatgagccggtgtgcagccactgctggaaatgccggggacgggaagagaacgcttccggttccgcagatgcgtaaaattgccctgtaaacgaaaaacagctccccattttggggagctgttttggcgttatgggaaaatttacttggcgttcaggtaagaacgcaccagagtctggagcagttcgtcccggtcgattttccggatcaggcttctggcattgttgtaggtggtgatgtaggtggggtcctccgagaggatatatcccacgatctgattgaccggattatatcccttttcgttcagtgcctcatagacttcagtcagtacctgacggatctggtattctttttcgtcccgaatggagaacgctcttgtcggctcctgtctcatcaaaatcacctcttaccaataagcatacacgaatccggtcaaaatagcaaccgcatttgtaattttttacacgaaacttcttcagcttctcagttcggcgcccagttcagccagagctgccactgccttctgtactgccgattcgctttcctcatcggtgatggtgcggtcggcacggcgcagtaccaggttgaacgccacactcttcttgccggcagggatatggctgcccttgtacacatcgaacagcacgatcttttccagcatcggaccaacagcggcacggactgcacgctccatggtcagcaccggcagatcatcatcacagaccacagcgatgtcacgctgagcagcggggaacttgggcaggggagtgtactcccggttggggttgtagtgagcgaagagcttctccacatccagacgggcagcataactgcgggcatccagctcatagcgctcggcaacgatgggatggatttcgccgaagcgtccgatgggatcaccgtcgatcaccagctcggcgcagcgacccggatggtaggtgggatcgtccttgaccggaacgatgtcatactcttcaatgcccaggttttccaggatggtttcgatggcgcccttgatggtgaagaaatcgcagtcgccatacatacctatggtcaggcgtaccggctcataggggagctgctgaccttccaccggaatatactcagttgccatctcatacagacggacatccagggtgcgatggctgtagttgcttgccagcacttccagcatcgagggcagtgcggtggtacgcattacactggtatcctcgcccagggggttgaggatctccaccgaatgacgctccggagcatccgccggcagaccgatcttgtcatagtacttggggctgatgaaggagaaggtggcgatttcgttcatgccctgagacaggagcagttcgttgagcttgcgctcgaacttctgacggggagtgagctgggcagcggcctcaccacggatgatggtggtggggatcttgttgtagccgtagaaccgggcgatctcctccgcaatatcagccttgccttccacatcggcacggtaggagggaacggtgatcatgtcgccgtccagctggaagccgagctgggtcagcttttcccgcatgaactcctccgagatgtcatcggtgcccaggaagcggttgatccactcaggctccagacggatctgacggggattatggttggaattgtcaatatcaatgatgccgtccactacatcaccggcatccagcagttccaccagctcgcaggcacgcatgactgcgggcaggcaggtggcaggatcgaggcccttttcataacggccggagctctcggtacgcatgcccagatcacgggcagtgacacggaccgacgggccgaagaagttggcagactcgaaaacaatggtagtggtatcgtcatagataccgctgtacttgccgcccttgacgcccgctactgccgacggcttttcgctgtcgcagatcaccagcatctcaggagagagcacacggtccacgccctccaaggtgaggatggtttcgccttcccgggcgttgcggactacaatctgaccgtccttcatgtgcttgaggtcgaaggcatggaggggctgaccgtattccagcatgacatagttggtgatgtcgacgatgttgttgatggcacgcatgccgctggcacgcagacgctcccgcagccaacggggagacggcccgatgcggacattcttcacaactcttgccatataacgggggcagagctcaggattttccacccggacgctgagatagttatggatgtcatcgccgcagccctttacttccggctgatgcagcttcagcggtacattgtaggttacagcggcttcccgggccagaccggtcaccgacaggcagtcgggacggttgggggtgatctcaaactccaccgatacatcgtccagaccgatggccttgcagatgtcggtacccagaggagcagcagcttcctcgccctgcaggataaagatgccgttttcatctgcgtaggggaagtcatgggttgtcaggcccagttcacccagggagcagagcataccgttgctctcctgaccgcgcagctcacccttgtggatggatacgccgccgggaagggtagagccgtccttggcaacgggcacaatatcaccggccttgacattcttggcgccggtgcagatctgaatgggagcgccttcgcccacatccaccttgcataccaccagatggtcggcattgggatggggttctaccgagagcagcttgcccactactacattcttgatttcagcagtttcatcggcatagccttccaccttggaaccactcatggtcatgtcgtcagagaactgcttgggagttacatcaatgtccacataatcggacagccatttcattgaaaggttcattcttcacacactcctaaaactgcttgaggaatctcacatcgttttcatacagcagacgcaggtcatcgatgttgtaccggcgcataacaattcgctccagaccaataccaaaggcaaaaccgctgtatacttccggatcgatgccgcagcgctccagaacacgggggtgtaccatgccgcagcccaggatctcgatccagccttcgcccttgcacagacggcagccttcgccatggcagtggaagcacatgatgtccatttccgcactgggttcggtgaaggggaagtgatggggacggaaccgcaccttggtatcctcgccgtacagacgctttacgaatacttccagagtgcccttgaggtctgccatggtaacgcccttgtccactacgaggccttcgatctgatggaacatgggggagtgggtggcatccacctcatccgaccggtatacacggccgggcacgatcacacggatcggaggcttctgcttttccatggtacgaacctgcatgggcgaggtctgggaacgcaggaccacattgtcatcaatatagaaggtgtcctgggtatcccgggccggatggttcttggggatattgagtgcttcgaagttgtagtaatccagctccacttccggaccggtcaccacatcaaagcccatgcccaggaagatttccttgagctcatccagaaccaggttgagggggtgctgatgaccgattacctgcttcttgccgggcagggtcacatccagacgctcctccatcagacgcttctccagagccttttccttgagttcggcaccggtttcagccagcagggtttcgatttcagcccggacctggtttgccagctgaccgattaccggacgctcctctgcggagagggagcccatctgcttgagaatggcagtcagttcgccctttttgcccagatagcggacccggatatcttccagtgccttggcatcctgagcctgttccagctctgccttggcagccgccagaatgttgttgagtgcttctttcacaatattcacctcttcatagttttcgaaaaaagggaacgcggttttggctgatccgccgggacaaaagaaaagatcctccgccccgaacagggacgaaggatcgctacaccgcaaactccgtggtaccacccagcttcctgcgccagaaacggcacaggcactcacagagggacaaaatatccctcccggcctgtaacggggcctgccgcagctgcctacttctggttcagcagtgcgctcgtgagtgaacttcggcagagccttcgggcatcgctttcagccggtgacgatgctctctggtaccggaggggaatctgtctactctctcagtcatcgcgtttggaaagtatgaaactttagctactatgatagcacagcccatttgaaattgcaaggtgtttcccggattttgacaaaaacaggctgttcagcaaaggagggcccaaaatttccggcggcatccatttgaaaaaatcccgctgctatggtagtataaaaagagattttcagggaaaggggaagatatggcatgaacggcagtgtgggaatggatcttgcggagatttcccggattcggaaagccatggaaaatccccggttcctgctggaatttttcaccgagaacgagcgggcctatatcacagcccgccatacaccggagcagtccgcagccggagcctgggccgccaaggaagccttttccaaggcggtgggcaccggtgtgcggggctggtcgctccgggaggtggaagtgcttcacgatccattggggcagccggttctacggctgcatggacgggcagcacagcagttttcagactatgcgttttcactgagcatcagccatacggataccatggcagcggcagttgtactggcagaaaaacagggagggaaatgaccgatgtatgcactcagttccgcacagatgcgggctttggaggaccgctgtgctgaagcgggaatccggggattcaccctgatggaaaatgccggacgggcggcagcccttgccatcaacggtaccattccggtgaagggcaagaagtgcgtggtgttctgcggaagcggaaacaacggcggtgatggcttcatcgtggcagcggagctcaagaagctcggggcggaggtgcaggtgatcctctgctttgacctgcccaagggacgcactgcccgggaagcctatgaaaaggcctatgcggcagaagtgcccatggtggatctggcgatcagtccctgcggctgtgagctggcgatgagcggtgtggatattgtggtggatgccatcttcggcaccggcttccatggagagctgcctgcccgggcaaaggctgcctgcaagatgatcaattccgccatcgccgcggtatttgcgctggatctgcccagcggcgtggaaacagacagcttccggtcggatgccgactgcgtccgggcggattttaccgtggtgtttgacagcctgaagccatcgcatatcatgccgctgaccgccaagctctgcggcaacatctgcattgtggacattggcattccgtccgagttcaaggagaacctgacctatcgctatgcgctggtcaatgaggcactggcgtcctccttcctgccggtgcgggcactggacagcaacaagcatgaccatggctatctgctgctcatagcgggcagccgggactacatcggagcggcagtgatggcgtccgagggtgccaagcgcagcggagtgggctatgtatgcgtggcttcggtggacgaggtctgccgcacggtggcctccaagagcccggaatgcgtctttcttcgcctggacgagaatgaaaacggacgcatggatctgctctccttcgggcggctccagaaggccatggaacgggccaccgccatctgcatcgggccgggtctgggcattgatgacgatacccgggcgctgtttgcctcggtgctggaaaacgccaaatgcccggtgatcatcgacgccgacggcataaatattctgtccgagaatataaatgttctggatagtgtgactgtgccagtggttctgactccgcacatcggggagatggcccgcctgttggcagtggacagccagagcattctgagtgaccgctatgagctggtgggcaactttgccaagcgctatggtgtcacagtggtctgcaagggttaccgtacctttacggcacccgctgccatgggcgcctatatgaacaccaccggcaacgccggccttgccaaggcgggcagcggagatctgctcagcggcatcatcggtgccttgctggcacagggccttgcgccggaaaaggcagcgtctgccggggtatattaccatggcaaggcagcggatctctgccaggcagagctggggcagatgtatatgcagcccatggatgtggcacactatctctcgaaggcttatcccaaactataagagagaacagggtgttggatttgaaacgaatatttgccggagtgctggcggtctgtctgctcagcggctgtaccgcacgggagcaggatcaggagctgctggaacagagcctgaatacaccgtttgaaaccacggcgcatctgcagtatcagggggtggatgcccggatgaccatccagggggatggggcagcccggagctataccctcagctttaccgaaccggcttcgctggcagatgtggcgatggtattcaccgaggacaaggtcaccgtgcagtaccaggatctgtcggtatctgtaaagccggaaaccttgacagatggaatggctggggatattctgatggatacgctccagacagcgctgggaagcgagaatgtggagctgtcccggcaggacggggtattgaccgtcaagggcaagctggacagcggcggcaattttgagctgcggctggacagtcagaccgggaattttctctcccttgccatgcccgagagtgacttctatatggagttctcggggtttgagttctaccgctgagccaggggagaaccatatagctgaacagaagccgtccggggattcccggcggctttttgcatgaaaaagaggcctgccccgttcaggggacagacctctttgtgtttgatcggaaacgggatcagcgatggtattccatcatcatcttggcgcacttgtttacatcgccgcagccgagagtgatcaccaggtcgccgggctttgcgtggttcatcacatattctgtgatctcctcgaaagtattaaaccacacactgccggggatcttgtctgccaggtccttggtgtagacgccgtaggtattgacctcacggctgcccatgatctcggacattaccacatggtcggcaatggggagcacccgtgcgaaatcgtccatgagcatcttggtgcgggagtaggtgaaaggctggaacaccgcccagacttcattatagtgcatggtcttggcagcctggagggtcacttccagttccctgggatggtgggcatagtcatcggcgatggtaatgcccatattctcgccgtggatctcaaagcggcgcttggctccgtggaagccctccagctcccgggcaaactcctccggagtcacgccctgctcaaagcaggctgccgcagccgccagcgaattggaaacattgtgaacgccggggatattgagcactacctcagtgagctttctgccgcagctcatcagatcatagacggtgcggccctcggatacccggatattatcggggtagtaatccgcctcagaggtgtgtccgaaggtgatgatccgcaccggcagaccttctacagccttcatggtgttggcatcgtccaggttggcgatgatcgccttggaagccttggaagcaaaccgccggaaggaggcgatgatattctccagggtaccgaagtaatccagatggtcggcatccacattgagaatcacggcatagcccggcgcaatgtgctgatagtggtcactgaactcgcaggcttcgcagaccatgatctcactctgaccggcccgtccgctgccgccgataatgggcagcttgccgccgattaccgctgtggggtccttgccggcgcccatcagtacctgggtgatcatcgaggtggttgtggtcttgccgtgggtgccgctgaccgcaatgcagtccgcatagttttcggacagcagacccagcagttccgcccgttccagcatggggacaccgctggccttggctgctaccagctcaggattatccggcaggattgcggcagtgtagacgatgagatcagcgccttcaatgttctccggcttctgtccgatggtgacggagatccccagcttccgctccgcgtcgacggtatcggtggggttgttgtccgagccggtgatgtgatagccggctgcggccaggatctgcaccagcggatacataccgctgccgccgatgccaataaaatgaatatgctgcttccccttgaggatattggtatcagaaactgtgttcatcgcaaacaagacctccgcgtcccggaactgactccggtttggtatgattatgattctttgactaattataccctattatggcgcaaattccaaatgaataatcgccaaaaccagggaagaatcgccctgattttgtcaaaatcccgtcagagtgtcggatttggcccgattttgtcaggtttctggcgatccgctctttctaacatcttattccagatccgaaaaaagggttccttttccagatcccgggcagaatccggcccgtttggaaataaaacagacggcgaaccaaatccgccgtctgccggtatgccggggatcagtcctcccaggcgagggtgcgggaaactgccttttcccagccatgcagcagtctgctgcgggtttcatcgtccatagcgggctcaaaggtgcggtcgatctggacattctgccgcagctcatccagtccgctccagaatcccacagccaggcctgccagataggcggcgcccagggcggtggattcggcactgcggggccgggtgaccgggcagccgataatatccgactggaactgcatcaggaagttgttggcgctggcaccgccgtctgcccgcagggaagtgatggctgcgccggtatcctggatcatggcgtccagcacatccttggtctggtaggcgatggactccagcgaagcccggatgatatggctgcggttgctgccgcgggtcaggccgaagatggcgccccgggcatacatatcccagtggggcgcgccgaacccggtaaaggccggaaccacatagacaccgccgttatcctccaccgaagtggcaaagtattccgaatccttggcagagatgatgaagcgcatctcgtcccggagccactgcaccactgcgccgcccacaaagacgctgccctccagcgcatagctgactgtgccgttcagcccgatggcgatggtggaaaccaggccgttcctggagatgcagagctctgagccggtgttcatcagcaggaaacagccggtgccgtaggtgttcttggcgtcgcccttatcgaagcaggtctgtccgaacagggctgcctgctgatcacccgccacaccggcgatgggcaccggtacgccgctgaggttgacagtcccatagatctcgctggaattgcgtacttccgggagcatacaggcgggaatgtccagaatatccaggatgtgctggtcccagcagagggtgcggatgttgtagagcatggtacgggaagcattggtatagtcggtgatgtgcactgcaccgccggtcatcttccagatcagccagctgtccacggtgccgaacagaatttcgcctttttccgcccgttcccgcaggccgggaacatgatcgagaatccatttgatcttggtgccggagaagtaggcgtcgatcagcagaccggtgttctcccggatgtactcctcatggcccgccgccttgagttcctcacagatctccgcggtacggcggcactgccagacaatggcgttgtaaaccgggcgtccggtgtccttttcccagaggatggtggtctcccgctggttggagatgccgataccggcgatctcatccggggagaggtcgcccttcgccatcacttccgccagtaccccggactgggaagcatagatctccagggggtcctgctccacatagccgggacggggatagatctgggtcagttccttctgagcagaggcaatgatgtttccctcgtgatcgaataccatggcccgggaactggttgtgccctgatccagagcgataatatacttcttcatgttcttgctccttgctgatggatttggatattttttctctgaatgctatataatagcacagctgtttctgtccggtcagagccgcagacggaccggcagattttttggcgtattgtaccacagaacgccagcggcggggaaaagagccataatatggcacaatagccatctttatcagctattatactccacccgcagagaaatgccaagtattgcgcaaaaggggctgaatgatccatgcgtcgccgattctttcacagccggaaaccgctttcacccggcagccgggtgatcttgttcctcaccgggctgatcgtttccatctttctgctggatctgcgggtgcgtccgtatatccagagcatctcctcctatcaggcccagatctatggcacccgggtcatcaatgacgccatctatgaggaacttgccaaggacaatgtccgctatgacaacctggtcaccctgacccagaatgcccagggggagatcacctccctgcagaccgatatggtggcgctggggcggctccggagccgggtgaccgatgcggtgctgcaggagatcgatgagatgggcaagcaggacatctatctttcgatgggtacgctgtccggggtacagctgctgtccggacgggggccggatctcaacctcaaggtggtgccgtccggctacatgaccagcgagatcgaaaaccgctttgattccgccggcatcaaccagacccggcaccagatcatgctgaagatggatatgcgggtactggcgattattccgggctatacggtggctacggatattcatactgaatactgtctggcggaaacggtgattgtgggcactgtgccggataccttcctggagctggcggacagtggcgatacccggcagatctacgacctcaccgccctgcagaacctggggaatgaggagtaaagctgccgaagaatgcggcgggaactcatggaaattttgcatgcggtgtggtataataacctctgaatggcattctctggtccaggcatgggccggaacctgccaaaaccattgcagaaagcattcggaggtgcagctatgagtgatgagattctcaagaagatcatagaactcaccaaaacagttgaaaaatacaattaccagtattatgttctggatgatccgctggtaccggattatgaatacgaccgcatcaaccatgaactcatggatctggaaaagcagtacccccagtatatccagcccaacagcccgtctttccggatcggcggggcggggtacaacacctttgcccaggtggagcacaccgtgcgcatggactccctgcaggatgtgttctccctggacgagatccgggactttgaccgccgggtgcgggaaacaatcacagcgccccggtacgtggtggagcacaagattgatggcctctcggtgtcgctggagtataccgacggcatcttcacccggggttctacccggggcgatggctttgtgggcgaggatgtgaccgaaaacctcaagaccatccacagcattccgctcaagattgagaacgcgccccatttcctggaggtgcggggtgaggtgtatatgccccggtccagctttgaaaagctggcggagcggcaggaacgggagggcggacagcggttcaagaatccccggaatgccgcagccgggtctctccggcagaaggaccccaagatcactgccagccgcatgctggatatcttcatcttcaacctgcagcagattgagggcaaggagatcacctcccatgcccagtcgctggagtacctggcttcgctgggcttcaaggtatcgccggagtactttgtcaccgacgatatcgaagcggctgtgggacagatcgaaaagatcggtactctccggggcaagctgccctatgacatcgacggcgctgtggtaaaggtggacagcctctcccagcgggaacagctgggtgtcaccgccaagtatcccaagtgggcagtggcgttcaagtacccgccggaggagaaggagacagttctccgggagatcgagatcaacgtgggccgcaccggagccctgactcccacggcagtctttgatcccattaccctggcaggcactacggtaagccgtgcggtgctgcacaatcaggatttcattgacgaaaagcagatcgccattggcgatactatcgttgtacgcaaggcgggggaaattatccccgaagtggtgacagtggcaaagcatgccggcggcccggtgtaccggattcccgaccgctgtccctcctgcggcagcgaagtgacccgggaggaaggggaggcagtgatccgctgcaccaacatcgagtgcccggcacagctgctgcgcaacctgatccacttctgttcccgggacgccatggacattgacggtcttggcccggcgatcctggaactgctgatccaggagaagatcatcgcctccgccaccgatctctactccatggacccggcccgcatcgcggcactggagggcatgggggagacctcggcagaaaatatccgccgctcggtggagaaatccaaggggaatgacctctcccggctggtatttgcgctgggcatccggggaatcggcgctaaggcggctcagcttctggcccggaaattcggcaccatggatgcgattgaggctgcttcgccggaagaaatcgaatccattgatggatttggcaaaataatggcagaaaatgttgcagaattcttttcacatcagccaaattgtgatatgataaaaaggttaaaggatgccggagtcaatatgacctgtcaggatcagccccaatcggacgaactggcaggaaagaccttcgttctgaccggaacactgccgggactttcccgcagtgaggccaagaagatgatcgaacaggcaggcggaaaggtctcctcctcggtatccaaaaagactgactatgtagtagcgggggaagaagccggcagcaagctggacaaggccaacgaactgggcatagcagtgatcggtgagcaggaattgcgggcaatgcttggcagtacccaaccggtagaataaatttggaggtaacagtatggaaatcgacatcaagcacattgcgaaactggcacggctccgcatcgaagatgacgagatggaagaagtgcagaagaagatgctctcggtactggaaatggtagaaaatctgcctgagatcaccggcaagagcagcggtcttgaccgggagaatcccatggaactgcgcaaggacgaggtaaagccttcgatgaagcgtgacctgatcctcgccaatgcacccgagacccgttcgggctgtctgctggtgcccaagactgtagaagtggaataaggaggaagcgtatcaatggaactgtataaactcagtgccgccgagcttgcaaaaatgcttcgggagggcaaatgcacttccacccagattctggattcgatctatgagcggatcgacgctgtggaagataaggtagaggcttttgtcaccattaccaaggaacaggcctatgccaaggccaaggaaatcgatgagaagttcgccagaggggagaagctccatccgctggctggtattcccatcgccatcaaggataatatctgcaccaaggacgtgctgaccacctgttcgtccaagatgctctataactttgtaccgccctatgacgcaactgttatgcagaagctgggtgactgcggtgccattctggtgggcaagaccaacatggacgaatttgccatgggttcttccactgaaacctcctacttcaagaagaccaagaacccccgcggtctcgaccgtgtacccggcggttcttcgggcggttcggctgctgctgttgctgccggtgaggctcccatttccctgggttcggataccggcggttccatccgtcagcctgccagcttctgcggcgtagtcggcctcaagcccacctacggtgctgtatcccggtacggcctggtggcatttgcctcctcgctggaccagatcggtcccttcggccgcactgtggaagacgttgccatgctgttcagcgccatctgcggccgtgaccccatggacgccacctcttccaagcatgagcatgaggatgtaatggctgccctgaacggcgatgtcaagggcctgcgcatcggtatccccgctgagtacttcggtgacggtattgacgctgaggtcaaggagagcgtgatggctgctgtcaagaagctcgaggagcagggcgccattgtcaaggagatcagcctgcccagcaccaagtatgctctgccggcttactacatcatcgcttcggcagaggcttcctccaacctggcccggttcgacggcgtcaagtacggctaccgtgccaaggagttcaccgacctcaccgatatgtatgagcgcacccgcagcgagggcttcggtgaagaagtaaagagaagaatcatgctcggcaccttcgtactgagctccggttactacgatgcttactacaaccgcgccaagctgctgcagcgtcagatcgcggatgagtttgccaagggcttcgaggagtgcgacgtcatgatcactcccacatcgcccagcaccgcattcaagttcggcgccaactccagcgatccggtcaagatgtatgctgcggatatctgcaccatcaatgtcaacattgccggtctgccgggtatttcggttccctgcggcgtcggcgctgacggtatgcccatcggcatgcagatgatcggccccaagttctcggaagctactctgctgcgtactgcggccaattatgagaagatctgcggcggcttcggctccgtggcagatctggactaactaaaggaggacaacacaatggattatgagatcgtcgttggcctggaagtccatgccgaactgaatacacaaaccaagatttactgcagctgcaagaactccttcggctcggaagtaaactccaactgctgcccggtctgcacgggtatgcccggttctctgccggtactgaatgagaaggttgttgactatgccatccgcatgggtcatgctctgggctgcaagatcaacaatgtctgcaagcaggaccgtaagaactacttctatcctgacctgcccaaggcctatcagatttcccagtatgatgttccgctgtgcgagcatggtcatctggatatcatcatggacgaggaaggcaataccaagagcatcggcgtaacccgtatccacatcgaggaagacgccggtaagctgctccattccgaccgtttcgccggctcgctggtagacctcaaccgctgcggtgttccgctgatcgagatcgtttctgagccggacatccgttcctccaaggaagccaagagctatctggacggcatccgtgccattctgggctacctggacatctccgactgtaagatgcaggaaggctccatccgctgtgatgtcaatgtatcggttcgtcccaagggcagcgataccttcggcacccgtgtggagatgaagaacgtcaactccttcagcgctgccgagcgtgccatcgactatgaggcagcccgtcagatcgctgttctggaaaagggcggcgttgttctgcaggagacccgccgttgggacgatgtacacggcgtcaacgaagtgctccgttccaaggaggacgctcaggactaccggtacttcccggacccggacctgctgaccatcgttgtggatgaggagcatgtggaagagctgcgccgttccattccggagctgccggttcaccgtctgcagcggtatctgaaggactacggcctgccgtacttcgattccaacctgctggtggagaatgtggacaaggctgagttctttgaaaagactgctgccctgggggctgctcccaagagcgtaaccaactggctgctgggtgatgttaccaaggtgctcaacgagaagaactgcctgctctcggataccaagctgacccctgaaaagctggctgagatgattgctctgatcgacaagaaggagatctccaacaacgccggtaagaccgttctggatgagatcatcttctcggacaagaccccggctcaggttgtagaggagaagggtctccgtcagatcagcgacagttccttcctggagaaggtcgctgacgaggttctggctgccaatcccaaggccgtagaggactacaagaagggcaagaccaatgtagtcggcttcctggtaggacagtgcatgcgcgcttccaagggccagggcaatcccactacactccgtgagatcatggagaagaagctggcagccctgtaattcggtacaatcggcatattatatacaaaaccggacaaaaagccactgcttttgtccggttttttcgttgccggaagccccgaggcttgattcttatatcgatccattgtaaaatataagggaagttctgtaccagtatccggtgggtaaacggatgcagtttggtcagaccggaaggagtttgaattatggaaatcactcgtgtcaacctcgtctatttcagccccactcagaccacccgcaagactctgagagcaatggcttctgctttctctgtggaggtcaaggagtatgatgtcaccaccaaccgggagatcgaaatccccgtattcggtgccgatgaactggtcattgccggtgtgccggtctatggcggacgcatcccgctgctggtagagcctttcttccagggtctgaaggccaatggtactcctgccgctgtggtaggcgtatacggcaaccgtcactatgacgatgctgtcctggagctggctgactatctccgggaagatggctttgttgtctgcgctggcgctgcctgcctggcagagcattccttcggacatgaaatcgccactggccgtcccgatgcagaggatctggctaaggccaaggagttcggcgaggctctgcgcaagaagctggaagctgctgaagatgccggtaagctcactgctccggagatcccgggcaaccgtccttacaaggccagaggtactgctcccaataccgcagctcccaagaccactgacgcctgcatcaagtgcggcatctgcgtcaagaactgccctgttggcatcatcgatccggcagatcccagccatatcaccgatgtatccaagtgccagcgctgcttcagctgcgtaaagaagtgcccgaagcaggccaagtactttgacgctgagggtatcctcaagggtatggcaatgctcaaggccaactgcgctgcccgtcgtgagccggagttcttcctgtaatccgtaaatcccttatagcccatcaaagccctggatttccagggcttttttattttgcccgaaagcatggcctgtccggttctaacctggcggggacaggcatataagtggagtgtaaaggagctgaaaatcatgggaacaccaaataccagagaatttgatgaggtgctgcgcagtctgtgcagtccctggcgggaagaacttgaccgcctggagccggggaagaaggcgatggtcagtgagctgcgcttccggaccggatgcccgatgtgcctgaccatccggggagagccctggttcatggatcagcaggggcttctgcaaaaagctccgatcgggactgcccgcaggcctacccagcccgaaatggatgaactggttgccgccctctgtgactattcggtccatacccatgcccaggagatccgggagggctatatcagcctgccgggtggaagccgggcaggactttgcggacaggctgtcctgagcggcggggagatcaaaggcatcgagcaggtcacctcgctgaatatccgtattgcccgggaaattcccggcgtggcagccccactgatggaagctgtgctcaccatgcgctatggaatgctgatctatggcccgccgggatcgggtaaaaccaccctgctcaaggatctgatccgtcagctggcgggcggggcacatgggtaccataccgtggctgcggcggacgagaggggagagctgcacctggaccagaccgggctggtgactctggaccgcctgctcgggtaccccaagcatctggcagtgacccacgctgcccgcaccctggcgccggagtatatcatctgtgatgagatcggcaccgaggaggaggtccatgccatgagctatgcactgggcaccggcgtcaaactgatcgccactgtccatgccggctccccggaggagttccgggagagaaggatcacccgggagctgaccgaggcgggattattcgactggtttgcacagctggattcgggcagaaatccctgtaatgtacttcggctttacagtaaaaaggaggcctgctgatgcgctttctgggagctgcaagccttgcgctggctgtgctgatgatcgggctttcttccatacagacagagctgtcaaggcaatccctttacagcctttccacggcattctggagcgaattccggcgcctccttgctgatacgcatgctcctccgggagagatcctccggcggctatccgggtttgcaaggtaccgggagttggactttgtgtcgggaactctgcagcttctcccggagcaccggtttcaggaggcctaccgtctggcactggaacagagtcaggtgtgttcgctggaactctatccgctgctctgccaggccggggagatcccgggaacagtgagcctggagcatcagctggaacagctggatgcccttctcgcccggatgcgggagatcacctctgcccaccagcagcgcatcgattcgtccctccggctctggcacagtcttagcgtctttggggcactgtttgtctttatttttctcatttagggaggattccgaactatgaatgtcgatctgattttccgtattgctgccattggcatcattgttgcagtgctcaaccagcttctggtgcggtcgggtcgggaagaacaggccatgatggtgacccttgccggcctgatcaccgtcctgctcatgatggtctatgagatcaacaccctgttcaccacggtgaaaaccgtgttcgggctctgaggccatgtggatcatagccgctgccgccgcgggactggtcggcactgttctggctctgatcctcgggcagtaccgcccggaattccgtatgctggtcaccgctgccgtcaccctgctgctgatggcgatggtactggaacagctttcgccggtgctggaacagctccgcagcactatggagctcaccgggctgaccggggactatgccgccatccttttcaaggcggtgggcatctgtctgctgactcagctggcaggagatgtctgccgggactccggggagagttccatcgcctccaaaatcgagctggcaggccgtaccgccatccttctgactgcaatgccgctgattcaggaagtgctggcctgggcctgggaactgatgaatttataggagatcaaaaccatgaaactgcgattccttctgatcctgccctgggtgctggcgctgctcctgtcctgccgggtcgccctggcaggcgacagctttcccgtgtcggcggcagactatttcgataccgatgaggtcaccgacgcgatcccgcaggaggggcaggaagtgctggacgatctgggaatttccggctggtcggaggaaagccttctctcgctgacgccggagcagttcctgcataccgcctgggaggcctttgcgcaggcgttccggcagccggcccggatgcttgcggtgctggtgggcgccgccctgctgaccatgctgctggagggcacccaggatctgcacacggccaaatccattcagccggtattcgggactgtgactgtcctctgcctggcggcggtgctgtccgttccggtgctggactgcctgcgatccactgtcgaggtaaccgacggcgccgcggcttttctcaccgcgtatatcccggtaatgaccgggattctgctcacagccggacgcaccgcctctgccgcctcctacaataccctgatgttcctggggtgtgagggtgcggcgctgatgatccgcagtgtctttctgccggtggcaggcattctgctcgccctgggggtcacagggtctgtcaccggggattcccggctgcagggcgtcggaaagatgatccgccgtgctgccggctgggcgctcggcctggtgctgatcctgttcatagggctgatgaccctgcagacctctgtatcagcggcagcggataccgtgaccgccaagtctgccaaatatctgctgggcagcctgatcccggtggtgggatcgtcggtttccgatgcggtcatggcggcccgggggtgcatcgatctgatccgcaccagtgtgggcggctttggaattctggtgatcgcagccatcttcctgttgccgatggtccgggtgctggcctggtactgtgctttcagcatcggctcctttctgggggagctgctgggcgccaaggcactgcgcagcctgatggacagctttgcatcggggttcggcctgctgctctccgctctgactgcctttgcagctgtttctgccgcctgtaccggcctgctgctctcgatgggaggtgccgcatgatggacgctgtccgccagtgggcattttcactctgcgctgccgccatggcctgcgctgtgatcgaactgctgctgcccagcatttcccttgcaaagatgacccgcctggccctgtcggtattcttcctctgtgtcctgatccagccccttggtctggaggcgcaccggagcgaaatctctctgaaaaccgggcagggaatggagcaggcagaggaatacgccgctgaaatttccgggcagatcggggaggacctgtccggttcggtacgcagtgcggtggaggaggaactggctttgatcgggctgtccccggcggaatatgagctcgagatcggactgggatcagaacagatccttgtgaccgtcctgcttccaaaggacagcaccgcggacccggcagaaatcgcggattgtctggaacaggaccccatgatccaaaccaatgtgataaaggaggaagcagaatgagtcaaacagatccgggcaccctgatggagcgcctgcgggacggcttccggcgcctgaccgaaaaccgcatgaacctgattctgatttgtgcagtcacagggataattctcattgcggcgtcatatatatgggacgaacaggcagaaccagcggaatcggtgagcgatgccggcacgctgctgtctgccgatacccggaccctggaacagcggctgagtgaaatggtctcccggatcgatggggcaggacgcagctgtgtgatggtcaccatggacagcacacgggaagcggtctacgcccaggatctccgggaaacggaggacaccagcagttccagcgagtccggacggaccaccgaaagcgggaatatcagccgggaacagacgcatatcctgatggacagaggctccggcgaggaaccactggtggaaaaacagatcgagccgcaggtgcgcggcgtcatgatcctgtgtgaaggcgcggaaaacccggttgtagaacagcgggtgaccgaggctgtcaaaactgtgcttggcattccggcatcacgaatctgcgttgagaaaatttcaaactgaggaggaatactcgtatgaaaatcaaaaagcccacactgcccaaggtaaagatgaatatggtggttggtaagcggcagatcgttctggcggctctggtcatgggtctgggctgtgctgtgtatctgaactgggaatacaccaagatggacaccaatatcgatactgccgtggcggaaaccggaaagaactacggggacgcgcagtttgtcagcagtgaggaagaggacgcctattttgccgaggcaaagctctcccgcaccaagtcccgggacgaggcagcggaagcactcagtgagatgctggcagatgccgagctggaagccgatcagaaagcggaactggcgatgaaggcagcggagctggcccagtccattgagatcgagggcaagatggaaaatctgatccaggccaagggctttgatgaatgcatggtctactatgataccgaccgggtggacatcgtagtcaagacggacggcctcaccgatgatgaagtgatgcagatgcgggatattgccatccgggaaacttcggtaccggtggagaacatctccattgtggagatcaacaactgaatccaggatacagacggagaagggcattttccgtctgtttttttataaaaattcatgttccggcaacaagtctgacccatttatttttgtattataggttgagaaacacgaaaaatatggtataataacttcagaagttgtgcgcacaaaatggtaaattcggaacttgtacgcacaaatgtgatatagaatctatccacaagaccgttctgtggggattcccacagaactgagatacaggagggcgaattatatgaaccatgagatcaaggagccgatcggcagtctgcgaatttccaaagatgtcctggctacgatcgccgcaaatgcaaccaaggaaattgaaggcgtagctggtattgcgccgtttactaccaatatcaagaactggatcaccaagaagcagtcggctgtgccggtaccggtattcatctcgctgcatgatgacatcgctgtgatcgacatcaatgttgtcctgctggaaggtgccaatattcccgctgtatgccgcaatatccaggtggcagtcaaggaagcagtgcagagcatgacctcgatcaatgtttccaaggtgaatgttacagtggcagatatccggtttcatggggaaaagggtgcgaataccgctgattgaccaactgattcctgccctccggtcatttttgataggagggcatcttttatgcgaaaacaccctgaggatcattacagtttgacggaggactttgaaagatgacaagaagtgcggcaagagatttggctttccacctgatttttgaacgggcattccgggatgagagcatggaggagatcatcgcagacgcggaagaggcccgggctattgaagaggatgaatttgccatggctcttaccaactgcgtcaatgaccatctggcggagatcgatgcggagatcgaccgctattcggagaaatggaaggtaaaccgcctgcccaaggtttcgctgaccgtactgcggctggcaatcggagaaatgctctacttccgggatattccggtggctgctaccatcaatgaagcagtggaactggcgaagaaatactccatgcaggaggatgccgcctatatcaacggtgtgctcggtgcatttgccaaggccaacagaaccggagatgaacagtaacgcatggcatattactttgggattgataccagcaactataccacctcggctgccatctatgacacggatacccgtgcggtaacccaggtgaagaaactcctgactgtacggccgggagagcgtggcctgcgccagagtgacgcggtttttcagcatacccgtcagctgcctgaattaactgaacaactgttttcccagaacacctaccacctttcggcagtaggtgtttctgcgtttccccggcgtcaggagggctcctacatgccctgtttcctggtaggggaaggcacagcccggaccctggccgctgccagcggactgccgctttaccggttctcccatcaggagggacacatcgcagcggcactctattcctgcggacggctggatctgctgaaaaagggcgaattcatcgccttccacttctccggcggcaccactgaatgcgtgcactgcctggcggaaaaaggcgagatccgggtgcagctgtttgcccataccgatgatctcaacactggacaagccatcgaccgcatcggtgtgatgatgggcatgcagttcccctgcgggccggaactggagcgcctggctgcccagagcagccgcactttccgggtgcgccccagcttcaaggacgggaatccctcggtttccggtctggaaaataaggccgctcaaatgctccaggcgggtgaaacgcctgcagatgtggcacactatacactggactatatcctcgctgtggtggatcagatcacccggaacgctcgtgagaaattcggcgacctgccgctgatttacgccggcggcgtcatgtccaaccgctatattgccggggagatccagcggcggtacggcgggttctttgcggagccggcgttttcctcggacaatgcagccggaattgccgtgctcaccgctctgaaaggcggtgccctgtgatccggggccgggctgcggtgctcactgtatcgcagctcaaccggtttgtccgctctaccctggaggagaatctccggctgcgggaagtgtatgtgcagggggaactctccaatgtggtgcggcattacagctccggtcatatctatttcgcgctgaaggacgatgccgccgctgtacggggtgttatgttccggagcaatgccatgcggcttcagtttgagccggaaaatggcatgatggttctggtgcggggctttgtgaccctctatgagcgggacggcacctaccagatcaacgccaccgatatccagccctcgggcatcggcgcgctgcaggtggcctatgaacagctcaagcgccgtctggaggctgagggcctgttcgacagccagtacaagcaaccgatcccgtccaatccggagcggatcgctgtcatcacttcggcagggggagcggcgctccaggatgtgatccatgtcattacccggcgctgtccgttggtggagctgactgtgttcccggcggcagtccagggcaaggattcggtacccgaactgctcgctgcctttgcggctgtacgcaaactggcagaccggttcgatacggtgatcctttgccggggcggcggctcgatggaggacctgatgtccttcaacgatgaacgggtggtccgggctgtgttcgcctgtcccataccggtcatctccgcggtggggcatgaggtggacttcaccctctgcgattttgcggcggatctccgggcgcccacaccatccgcggcagcggaactggctgtcccggacaccatgcagctgcggcggcagctggaacagtattctgcctggctgagagatcatgcatacagaatgctggacagctgtgccggacagcttgagcgggcaaaaagccgggaagtcataaaatctccgttaaaattctgggatatgaatagacagcggctggaagatttgatacacttattacaaaagctctcggaagatgaactggaaccccgccgccgtcagcttgcatatttatccgttctgatggaggaactcagcccactgaaaacactgggccgcgggtacagcatcacatatacagaccatcagctgctgcgctcggtcaaggaggcagcacccggcatggaactgaaaacagttctgccggacggcacggtcatttccaaggtggtagcagtcaatgaaaaagaaactgaaatttgaggaggcaatccggcggctggaggagatcaccgaccagctctcagccgggtgcagcctggatgaagcgctgaaactctatgcggaaggggcggaattgatccgcaccagcagtcagcagctggacgaggccaagctcaagattgaaaccctgttcccgcaggaagtactgggggaagatgacgatgaataattcacttcagacgatgtatattgaaatggtggagaaggcactggaccggtatgtcagcacacagcgctgtaataacgaccatgtgctggaagccatgcgctattctgtcctgggcggcggcaagcgcatccgggcactgctggtactcaacttcaaccgcattctgggcggagcagccaacgatgccatggaatttgccgcagccatcgaaatgatgcacgcctattcgctgatccatgacgatctgccctgcatggacgacgatgacctccgccggggaaagccctcctgtcatgtggcattcggcgaggccattgccctgctggcaggtgatgcgctccagaccctggcttttgagacccttgcccggaacacttcactggaaccggctcaggttctgcaggcagtccggcaactggcagctgcggcgggctcgagagggatggtcggcgggcagacggtggacatcgagggcactgcccagacagtggaacagctcaccggcatgtgcatgatgaaaaccggcgccctgatcaaatgcgccgtacgcctgggatgtctgtcggtaggggcggatgaggcctctatggctcaggcggatatttacgctgacgccatcggtctggctttccagatccgggacgatattctggatgtcatcggcagcaccgaggaactgggcaagccggtaggcagtgacgctgagcagcagaaggcaacctttgccacagttctgggtacagagcgggcacagagtctggcggaaaaactcacccgcactgctctggatgccctgaaacagctgaatgtagcggaagacgacccgctctatgagatgaccgtggagctctgcagccgtaaaaaataggattggatctgatcgtatggaacttctcaaattgcttgtgagcaattactttatagatgttgcggtgatttcatggttttccgctcagcttatcaaaaccctgctgttctatctgcagaacggaattctgcaggcagagcggatggtcggcgccggcggtatgcccagtgcgcattcggcttttgtctgctccatcaccattgccattgccaaaaaggtgggctattcctcgccggaattcgcccttgcgctggcatttgcctgcgtggtgatgtatgacgccatgggtgtccgccgggcagccggtgaacaggccaaggtgctcaaccgcatggtgctggatctgagcaatcccaacagcctttttgcgctgctgggcagtcatccggaaaaggaactggatgaagacgaggaccgggaacagaaggaactcaatgaatttctgggccatactccgctggaggttctgggcggagctttgcttggcattctgatcgcgatgatagtgccggtattctgatccgtatgggaatggaggagatccatgtatcttgaatcgataaaatctccggcagatctgaaaaaactcagcctggcagaacagcaatacctggctggagagatccgtcagaggattctgtccaccgtatcccggactggcggtcatctggcttccagcctgggcactgtggaactgaccctggcgctgcacagtgtatttgactgtccccaggataagatcgtctgggatgtgggccatcaggcctatacacataagatcatcaccgggcgcaatacccggtttgataccctgcgtcaggaaaacggcctgtccggattccccaagcagaaggaaagcccgtatgatgcctatctgggcggtcattccggtgtgtccatttcggcggcactgggtatggcagaggccatgcgcctgcatggggaagagggctttgccatcgctgtgatcggtgatggctcctttggcagcggtgttgcctatgagggcatgaacaacgccggacgcagcggagaaaaaatcatcattgttctcaatgacaatgatatgtccatttcccggaatgtggggaatgttgccaactatctggcgaaaatgcgttcgtcccggcagtatttccgcttcaaggacaacgccaagagttttctgggcggcgtgccggtggtgggaaaacccatccggaatgccctggccaattccaaaaagaccctccggcagatgatgtaccactccaatctgtttgaggacttcggactgcgttacttcggcccggtggacgggcatgacctggaaagcctccgggatgtgtttgaacgggccagggaatatgcccgcccctgtgtggtccatgtgcacaccaccaagggcatgggctaccgtcccgctatggaaaaccccagcaaataccacggagtcagcccttttgacctgaaaagcgggctgccgctcaagccctctgatcccggattttccggggccttcggcaagagcatctgtgagctggcccagacccgcccgcagatcgccgtgattactgccgccatgaccgatggcaccggcctggaggaatttgagcgccggtatgcggctgtcgggcggttctacgatgtgggaatcgctgaggaacacgctgtgagctttgcctgcggcatgagcacccagggaactgttccggtgtttgcggtctattccaccttcctgcagcgcacctgtgaccagctgatccatgacgccgccatcgaaccgaagcatatcgtcctggcaatcgaccgggcgggaattgtaggcgccgatggagagacccatcaggggctttttgatgtgtccatgctgcggatggtgcccgggaccgtgatctattccccggcgacctaccggcagctggaagccgatctggctgaagcggtggataacggcaccggcatctgtgcggtgcgctatcccaagggcgcccagccggcactgacggcgtctgtccttgaagagagcaccgacagctggttcctggagagccggggcggcgataccctgctggtgacctatggacggcttgcggaggagctgttccttgcccggaaatcgctggaggaacaggggagagcggtggatgtcctggtactcaaccgcatctatcccattccggaagcagcactggaacagatggagcgctaccagcggatcttcttctatgaggagggaatccgcagcggatccatcggggagctctgtgccctgcatctgatggagcagggataccaggggcagttccggctgtttgccatagaaaaccgttttattccgcagtgtggcgtggagcatggctatcagctgttccatgccgaccatgattcgatcatcaagactgtattgggagagagtttgcattgaaaaaaagactggatgtagtgcttgtggaacaaggacaggcacagagccgtgaacgggccaaagccatgattatggcaggcatcgtctatgtcaacgaccagaaggcggataaagccggaatcacggtcaaggaggacgaccggattgaggtccggggcaataccctgcggtatgtcagtcggggagggcttaagctggaaaaggcaatggcctccttcggtctggaactggagggcaagacctgctgtgacttcggcgcttccaccggcggctttaccgactgtatgctccagaacggcgcagtcaaggtatacgcggtggatgtgggctatggcgaactggcctggtccctgcgcaatgacccccgggtcatcaatatggagcgcaccaatatccggtacctcaccgatgaacagatccccgagcccattgacttcatctcggtggatgtatcctttatctcgctgaccctgatcctgccggtggtgtaccgtttcctgcgggaaggcggcagctgtgcctgcctggtcaagccgcagtttgaggccggacgggaaaaggtcgggaaaaacggcatcatcaaggacccggctgtgcatctggaagtgctgcagaagatctaccggttcgccctggaactgggcttctcggtgcggggactggatttttcccccatcaagggcgccaagggaaacatcgaatacctgatgtatctgtgcaaggacagcgaaccgtccaccgtgtctgaggaggatctctccgccattgtgggctcctcgcacgaggatctggatgactgattgattgggagggacagccatgcgcttttatctggttgtgaatctggataaggccaatgcggcagactgcgcggctgaggcagccgcagagctgctgcgctgcggcgcggaagtgctgctcacacctgagctgaatgcggtgctgaactgctccggctgtcaggttctggacgaacgggaagccatgcaaagctgtgatgccgccatcagcatcggcggcgacggcaccatgatccacaccgcactggacgcgctggaatttgaccgcccggtgatcggcatcaactcaggacggctggggtatctcacccagattgagccgccgttcggggacagcctgcagaagctggctgccggacagttcggcatacagccccggaccgtgctttccgttacagtccgtcagccggatggcagcacctgtcagagctatgcgctcaatgatgtggtcattgcccggcagatggtcgccagtatgatcgacatcgaggtgttccggggcggagccgcatttgcttcctaccgggctgatggcctgatttttgccacacccaccggttccaccgcctattccatgtcagctggcggagccatcgtcgatccgggtatggactgtctgatcgtcacacccatctgtccccattcgctggcggaccgcagtgtggtgctggggccggatgccccattggaagtgcggctggtcacccggaacacacctccggatgccggtgtcgcagtggatggcacaaccatctgtcccatggtggatggtacccggcttgaaatttccgctgccgcccggaaatcccgttttatccagctcagcgcgagcagtttttatcagactcttggaaagaaactcacgggaactgaacccgctgaaatagagagaaaggcgtgatcgcatgaagaccgaacgacatcgaaaaatcctggaactgatctcggataatgctgtgaccactcaagaggaactgatggcaatgctgtccgatgcagggttccgtgtaacccaggccactgtatcccgggacatcaaggaactgcg

SEQ ID NO: 2659 - DNA, 1881 bp, Unknown
  16S sequences of unknown bacteria
gcgcacccgcccggtggcggcgatatactgccgcttcgcaagcagaaactctgcatccgcagtccggctgtcacagccatagccggtaattagttttccgttgtcggtcttttgcggatttgccacataatcaatgatgtcgctgactgcctgactttcggtgcggcccttgccgatatgcaacggcatgatgcgtgtggttgccatagggggggaacctcctttccaaaaagaaaaggacagctgtgtgagctgtcctttggttaatctgaattttcaacaggctgctgtgcttttaaggctgcaatccatttggtgtccacaaaatgagttgcataccatttctcaatttccgagtttccgcttttgctgaaccgcagcggaatcaccggcttgtgtccctgcccatttttctttttcacgccccactgcttgtagtaacagaaggagggttttaagccggttttctgtgcgtacacccgcatctggtgcatgatgaatgagagtttgcgcagattgacggtgcagacccgttccaaatagtccacccgtccaaaccgccagtcctcatatttctgctttggcaggacaccgacctccatcagcacatccaccggagccgcataaccacggcgctggcattgatgatagaccgctgaatgtacttttccaatcagttctttttcagtcatggcggttgtctttcttttcgtgccagtttttcaagacagcctctacctgagcaatcagctgttccttatccggcatatagagaacataccgggatgcgaagatattgttggacagaccgcccagggcatattctgccgcgatgctgtctttttccgtacagaggataataccgataggagggttatcgtcagggtcgttgacttccgccgcatagtagtttaagtacatattgagctgaccggcagcctctggtgtcagttttttcgttttcagttcaatcagcacataagcgcggaggattttgttataaaacaccatgtccacatagtagtgggtattgttcagggtcacacgctgctgggttccgacaaacatgaagcctcgtccaagttccaaaagaaacttttcaatctgtgccacaagagccttttccaaatcgctttccaacatgggtttgttctccggcacacccaaaaactcgaacacatagggatcacggatgatgtcagctggctgattgatttcaatccctttctgcgccagagagaggaccttttctttattcacatctccgctggaaagtagcagccgttcatacagcgagctgtcaatctgccgtttcaactcccgaactgaccagcccgaattgacagattccttctcataaaagctgcgcttgttctcatcggtaatactcaaaagctcgcagtaatgggaccaggacaatttgccagacactgtctggcatttttcataggcaagataaaatgcccgcatattttgtagattagaacgagaaaagcctttgccgaattcccgtgttagttctttggaaagttcctttaaggtttgttttccatagtctgcgcgaatctgattttgctgttcatactccacgataatccggccaatgttccagtaggttgtcaaaagctgcgtattaacctgctgtgcaacattttttctggcgttttccagcagctctcggatttccaaaatcatggagttgtttggcgttaattgattttccatacacgccctcctttatctaaaactatccgcactcggcggcagaatatattcttatatagtatatcctattttttagggaaagtaaaataacatcagtgacatattttatccataaaccaaatcctgaatggcaaacttcaagtcctgcaccttgcc

SEQ ID NO: 2660 - DNA, 8662 bp, Unknown
  16S sequences of unknown bacteria
atcggcggagaaaagaaaaagtccgcctcttactttgagacgaactgaaaaattcgcggtaccactcaaattgcatatttctatgccactcatcggactcgaacaagccctgtacactaacgcggtacgaacggggaattattactcagcgtgacagcttttcctttcccgactcggaagtgatagcaaagccttttccgtatccgcattacaccgccgcggactctctgaaacggtttaaacgacccgcctgtcttcgtcacagtcattataacttgtatcgggtattataacactcttctgtcgttttgtcaagagataaccgtaagtttttgtttactttacagttcgcaaaattttatgtaccccttaagtaaaaacatggcttgaaaatgccgctttgttatgatatacttaatcaagtttgttaatcatctacattaaaccaaaggagaaacaaatgaacaacaacaactacatcggcagaactcaccataagtttgagtccgtgctgaacttctatgccgcgaaaatcttcaagcccgttctcgacatagaaaatgtgcttgctctcgaaactaaggaacacttccgcactcctccggaaaaatccgctatgcacccgatagaaaaaggtacaaagtggggtgaggaatacggcaatatctggctccgctgcgaagtcactgttcccgcggaatgcgaaggtcatctcataggcgctgttcccacaggacgcgcaagagagattctctgcttcaagaacggcgaacctgccggaatcatcaactcaaagaaccgtttcatcggcggcgaacacagctgcatgataatctcaggctcggctaaggcaggcgagaagatagacctcgcttttgaatgctatgccggtcacacggaattcggatgcgcaccttacgaatcatatatgcgcgacgaggacactcttgacagctacaacctcacctttgaaggcgttcagcttgttgtgctcgacgaggttataaataatttcgtgttcgacgtagctaccgttcttcagctctcccgtctccccggcgaaaactatgcttccatgaaggctcatcaggctctcatcgacgctttcccctacctcattcaggatatcagaagtgcgtccgacgaagaaattcacgcctcctgcaaaaaagtatcggaatgcctcgctcccgctctcgaaaaaggcacaggcgaccgctccagaggatatctcggcgtgatcgggcactcccacatggacaccgcatggctctggcccgtttccgaaaccatcagaaagtgcgcgagaacctacgccgaagctctcacactcatggatatatatccaaactacacattcattcagtcctccgcgctccacctcgactggatgagagaatactatccctctatatttgagcgcatcaagcagaaggttgccgaaggcagatatgaaccgaacggcggcgtgtgggtcgaatgcgactgcaatatcaccggcggcgaggctatggtacgtcagttcctctacggtcagagattcaccgaaaagtatctcggctaccgctccgactcgttctggctccccgatacattcggttacaacgccgctatcccgcagattatgcagaagtccggcgtaaagtatttctacaccacaaagatgggctggaacgatctcaaccacttccctgccgacacattcatctggcgcggaatcgacggctccgaagtcatcacccacctcaaccgcacgcacttcatcccagacgtcgaaaacctcacaggaatcatccgcgacaacactgacaagagctcctgcgacatgagacttgcggcatacggcttcggtgacggcggcggcggacctactcccgctatgcttgaattccttaagagagcgaaagacctcgacggtatgccgaaggttgaggaaaccacaatcagcgcgttcatgcacaaggttgaagaaaagaaggacaagctcccgctctacgacggcgaactttatcttgagcttcaccgcggcacactcacaaagatgcatgaagtaaagaagcacaacagaaaagccgaggttgctctccatgactttgagcttatgaatgtgctctcgggcgagaagacaagcgaaaagcacgacgaatactacaaagtgctcctcaagaaccagttccacgacattctccccggcacgtgcatcccgaaggtatacgagattgaaattcccgagatggacaagctcattgccgacgtaaacgcagagacagccggatatgccgacaagatgactgaaaaagccgacggcaagttctccctcgtaaataccctttcattcgacagaaacgacgttgttgttctcgacggtgaaactggcatcgcgggacgcacatcacagacctacaccgactttgacggaaacaagaagaccgcgttcaccgtaagcattcccgcaaattccgcggcagttctcgaaaagacagctcccgttaagacaggcagtgcgttcaaggctgacggcgacacactcgaaactccgttctaccgcgtaaagttcgacgaaaacggatatatcgcttccctctacgacgttcaggctgaccgcgaagttagaaatctctccggcgcttctctcggcacactctggttcggcgaagatgttccgaattcatgggacaactgggacatcgacgacgacgtattcatgaagatgaaccccgtaacggagcttgtttcccgcgagactgtatccgacggcgaagttgaataccgcgtaagaagcacatacaagctcggcagacattccaccgctgttgtcgacacagtattctactccggaaaccgcagagttgattttgagacaaagctcgactgggacgaaagacactccatccttaaggcaggctttgacgtaagcatccgctccgcattcgtaaagaacgaaatccagttcggtcacatcgacagacccacgacacgcaacaacactatcgaagaagctaagtttgaagtctgcaaccacaagtggtccgatatgtccgagacacactacggcgtagcaatactcaacgactgcaagtacggtatgtccgcggaaggctccgacatgagactcacactccacaaaggcggcactcgtcccgacccgttcaccgacacaggcattcagacaatgaagtattcccttctcccgcacattggagcattcgacgcggagaccgttatcaagcccgcgtatgagttcaactatgctcccgtagaggttgaaggcaagtgcgaacttccgaagctcttctcgctcacaggaaacggtatcatctgcgaagccgtcaagaacgctgaagacatcgaaaacgcatatgttctccgtctctatgaagctgaacgcaaccactccgtatgcaagctgaacgtaggcggcgcaaagaaggcttacctcacaaatatgctcgaagaaaaggaagaagagcttgagattaaggacggcgaagttactctgcgcttcactccttttgaaatcaagactgttcttgtagaaagataaaatgaagtacaaaacagaactgcactgccactcaaaggacgccagcggatgctcacatgaaacggctgaaggcattgcggaaaaatattacaaagccggctacacgacgatatttctgacaaaccactttgctcctgcagacggagacgccgagaactgggaagcaaaggttgagaagagatatcacgcgctcgagcttctcgaaaaggcgtctgccggcagaatgaacatcctcatgggtcttgagttccgctttactcaaagctcaaacgactaccttgtgttcggttttgacaaggaatacctcttaaaccaccgcgatatgctcacaatgggagtcaaaaacttcacaaaaatggctcgcgaggacggacttctgaccattcaggcgcatccgttccgcttcggcatggttgtgacaaatcccgactatgttgacggaatagaggtgttcaacggacatccgggacacaactctaacaacgacatagctgaggtttgggcggaaaagtacggaaagataaaaacctccggaacagaccaccacgaccccgagcatcagccgcgcggaggaattttaacggatttccccatcacaagcgaaaaacagcttatagaagtattgagaagcggcaattacgagcttataaaagactaaaacaaaaaaattctgccgtaagtttcggagcaaaatccggcttacggcagttttttgttttacaaatttatatgattcagtgcttctttgcgactgctgcgcctgcgagagatacgattcccgcgatagccgcaacaacgcctatatcgaatgtctgtggagcggtttcttccgtctttacggtttcttccactacttcgggagcttctgtttcagcctcggtttcgggtgcagcttcggtttctggctctgtttcaggagcggcttctgtctcagcaactgtttcagcttcagtttcgggagcagtctctgtctcgggagcagcctctgtctccacaggtgcttctgtctctgcagcggctgttgtgtctgtgccgagtacgagaacgggagctttttcccagtcatttactccgacatactgcgcctgatagtttgtaccccagagagtgtgctgaccgtcgtcgctgtcccatccgtcctcgcaaatgttaacggcgcaccatgtaactctgatagagccgctgttgtaaacctctgcaaagtcatccatcgaggacatgagaaccttagcttccataacgtatgtgtcgccgtcaaccttagttacagctaaagcattttcggcttccgtcaggtcttcggaggtggactggtcggcgtccatgaagaaataaccgatgtgaggtgttcccttcttatcggaagcaaggagctgaagtccgtactgtacgccgtattcggtatcgtagaaccacataagtccgcagtcggatgcatacggtgtgtggaagttgtcggttgcgaagttcatggtggagtccttacgtgtcatgaggatgtacatatatgtaccgtcgcacatgaaggaaaggcttgttgagaagtcgtcgtcggtgtggttgtaggtcttgtagccgtcggagcctacgatacccgcgccgccttctgtccatgttgaagtgtcggagatgttgagagtgagctttgtcgcgccgtcccattctccatcctcgacaataccgtcgactgttgccgccttctcgggaacatagcagtctacaacaggatcagccgcaaaaacgcttaccgctgttaaacctgttaaaagtgccgcgagaataatgctgagttttttcatattttcctcccaaaaatgttattttatctgctctgctgtataaaataataacatgataaattacagttgtcaatacggcaccttttgattctgcataattcacagcacatggcatatttaaattgtatcaagttattgtattttagacaatataacatattttgcggagtttaactcattaattattaatattgttttcattacagatgagcagcacgttaactccggctgaaaaatgaaaaaagtatgccaaaactgacataccttttcatattcgcttacggaagagtcttgccggatgcgcggtaaagctcgtaccattcgtcgtgtgttattgtaatatcggcggcgtttgcgatggttttgattctctccggatttacagtgccgatgatgggctgcatctttgcgggatgacggagaatccatgcaattgccattccggtggagtttgtgccgtacttttcgccgatttcttcaagctttttgttaagctcctcgtagttcgggtttccgatgaatgttccgccgaagaaaccgaactggaagggagaccacggctgaatggtgatgtcattgagacggcagtagtcgagaaccattccgtcacggtttatgcccgcgtccttgtccatattgacgttgagaccgcagtcgatcattccggtgttggtaatgctgaactggagctgatttacgagaatgcgtctctccggctgcatatacttattgagcagttcaatctggtagggattgtggttcgacacgccgaagtttctgaccttttcgctgtcgtagaggatgttgaacgcctcggcaactctttccggctcacaaagagtatcgggacggtggagaagcagaaaatcaagataatccactttaagtctcttcagactcttttctacgcaggaaatgatgtattccttatcgaaatcgtaagaaccgggtttgattccgcactttgtctgaataaatatctcatcacggagagaggggtttgcgcagaggaagttgccgaacttttcttcacatactccgccgccgtagatatccgcgtgatcgaagtaattgatgccgttttcgatatcggtcttgataacctcgtcgatctgagcgggagtaagtccgccgattctcatgcagccctgagccacacgtgaaacttcaagtcccgcgagtgtagtatatttcataaactgtactccttttttaattttatcagtattatgataacatcacgcgcgtcttttgtcaagaaaaatctcaatatcggcgagaggaagcaaattccgaaatatgacaattccctggacgtataataattttcctattgtaaacaatattaccgcagaagcaaaatttattaaaggagcttatatatgaaagctactggaattgtcaggcgaatagacgacctcggcaggggtgttattcccaaggaaatccgccgaaccatgcgtatccgcgagggcgacccgtcacagactacattgacacggtgggagcaattttgcttcgcgatggaggatttagcgaagagacaggggtggtaagcggtacccctgcaaccaatctgcgcatgataacaattcatcattttttcattaatgaaacatacattgttaaacgcagatcgctgatgttaatagaaaattcccataacttaaaaattctcatcgacatcgttccatttcattgacaaatccacttatatcctatataatattttcgtcgaaattttatctttttctgtggaggactaaaaatgaaaagcaaagtattacctatagaaatgccttggtcatgtacataccttgtacccgcatccgaatttgcggttatgcagtcatacgaaaacagtcgaaaccgtattttaaaccgttttatgcagacgcgtatgtttgaagatatcgtttcgggtgaaagttacgatgttggtttcagtatgataaccgaaccattcaccgaaagccctcatttttatacaagtgtaatcccgtcaaaatttcaatacataattggagatctcgttgattttatcatgacatgcattgacaacgacacatatgtgtatatccacagatatatagatgaattttatctcagcgattcacgatattacaacagcttcaaaatgatgcatatgtttatattctatggatacgatgcagacagaagagttctgtatactatcgggtacaataaaaaagcgattttttcaaagcttgaaatcccgttcgacgagtttgaaaaatccattgactatacggaagacaaagacggtaaatacattaccttgataaagcacaataatgatagcgatgaaaaattaaacctgtatgatgtcagattctggcttgaccaatatttgaacagcaaaaactcatatgcaacaatgcgtggcgtcaacaatgagcaggcaatgtccgagaaactgatttatggtataaaaacatacgattatttaactatgtatttgtactatatcattagcggaaggatctctctcgacaacatagatacgcgtccgtttcgacaactgtatgagcacaaattgatcatgatggaaaggctaacagctttagctgaaaacaaacttatcgatccgatttttaaagagcagtatgaacctgtcgtgaaaaatgcaatgatccttcacaactcgcaaatcaaattcaacttaaccgagaatgtcaatattataacggggatgtttgagagagtgaaaaagctagctgaaaccgaaaataacattttaatgaagttgtacggtgaaatgtaaacaagcatttccggcatagctaaagagattacatataccattgctacccgtaaacgggtcaggctctgcgagcgtcagctgactttcaaattcatcctctttcagctgattggcatagccttttctgaactttccagcctagcctgaggttttcggaagacaataaaaaaatctgcctgagttttcagacagattttttcttttgagattgacaaggaaatataaacaatcatttacaaccaatctcgtaggtataataccacaaaatggattggattgcaataggttttgaaaaattaattggatttaattattgttttcattagttcccgaggaagggatttttaactctctcatggttttgtttatcactcgaattttaggattgattttgagcagttccgcaagaaagttttcatcatacatacattttgccattacaaggtgaggaaaacatttttgaaattcttcactatgaaagtatcaatgaagatgtggtactgtcccttgtttccgaaatgctcaaagctattg

SEQ ID NO: 2661 - DNA, 9775 bp, Unknown
  16S sequences of unknown bacteria
gccgcacctgtctgatgcggctggcactttttgcacgccgcgccttgcggcgagaagaccgactgggggagagagcatgacggtaatgacggatctgacctgcactgagttcgtcgagatgttgggctcggcggctccgacgcccggtggaggcggcgcggcatcgctcgtgggagccatcggcgcggggctcagcaacatggtgaacgccatcacggtgggaaagcccgagtacgagtcggtcaaccagagcgtcgagacggtgtacgccaaggccacggctctgcaaaagcgccttctcgacctggtcgagcgcgatgccctcgtgttccagacgctgttcgagacttacaagctccccaaggagtctggccccgacaaggtgtaccgcgacatcatggtggacgagcgactgcgcgactgcgcggacgtcccgctgcagatcatgcgcgcgtgtgccgaggtcatcacgctgcacgaacagctcgccgacaaatgcccgatcagcgtcgtgagcgatgtcggctgcggcgtcatcacctgcaaggcggcactcgtctcggcccagctcacggtgctgagcaatacccgtctgatcaaggacgccgagtacgtgaagtttgccgaggcggaagcgcagctcctcgtggacaagtacagcccgcgcgccgacgccgtctttgccgccgtcaagaagaggatcgtggaatcatgagcgcgcagctgctgaagggcgccccggtcgcgcaggcgctcgacgggaagactcgcgagcgggcgcaggcgctgcgaggacgcggcgtcgtcccgatgctcggcatcgtgcgcgtgggcgagcggcccgacgatatggcatacgagcgcagcgtcctgcggcgcgcggagaaggtcggcatcgaggtgcggagcgtcgtgctcgacgagcgggccgaccaagaggcgctgctcgcagagattgccgcgctcaacgacgatgcgcgggtccacggcatcttgctgttccgcccgcttccggcgcagctcgacgagaagggcgcctgcgaggcaatctctcccgcaaaggacgtggatgcggcaacgcccgcttcgctgaccggcgttttcaccggcacgggagagggcttttcaccctgcactgcgcaggcgtgcatcgaggtgctcgaccattacggcatcgccctcgacagcgcgcgcgtcgtggtcgtcgggaggagcctcgtcatcggcaagcccgtggcgatgctcgcgctcgacaggaacgcgacggtctcgatcgcgcactcgcatacgtccgacctcgcggagctcacgcgcggtgcagacatcgtcatcgcgtgcgtcggccacgccaggctgctcgatgccgcgtactttgcgcccgggcaggctgtcttggacgtggggatcaacttcgtcgacggtcagatggtcggcgacgtggacaccgagagtgcagcgcggatcgcgggcgcgatcacgcccgtgcccggcggggtgggtgcagtcacgacgagcgtgatgctgcgccatgtcgtgacggctgcgcagcggctttcctagtggggcgcgaatccaagggacgcatgcccgaggagcgcggggacgctacgcgagctcaatcaggcaggagaacatgcgctcgccttcggcgtctgatcccttgacgagcactgtaccgtcctcgcgcttgacgaagacgtcgatgtcctgcccgaagcgcacctctttgcggtagtcgatctggaacgtcttgatgtggtcgttcgcgcctggcacccatgcgttcagcgcgaagttcgcgtacttggtgttgttggtgtgcccgttgacgtcgatatcggtgtaggcggggcgcatccgtacgggctcttcctgtgcctcgaaatccttcaggcgcttgacctttgcaaagttcttctcgtccgagaagtccatcgggccgtcgtagatgtctctcgcgctcacgaactggcgattttcccagtccatcatgatccacagcgagctgcccttgaccagcacgttgccgtcgaggtcgctgagcaggtattcgcgctggaagcccatcgcagtcggggcgaggggccaagtcttcgcgatgatgcgctggtggagtgccggcatcttgacgatctcgtacttgatgcgcgtcactgcccagaagatgccgcgctcgtgcatgtccttctcggtcatgcccggagtctgctcggcgcttatgccggcgatatcctggaacaggtcgagcaccgacgagggctgcagctctgcgcgcctgtcgaagtcgcccgtcctgagttggtattcttgttcgtgtgcaatggtcatgtctgtctcgattacgcgtcgtgtctgttgaaaagccggcgtttatgaatgcgggctcgagagtcgaagtatatcgcgcgagaaggtgtagccgaaaggcggttcggcgacaaagtcaccgcggaagtcgcgcgtggtggtgctcacgctcgtccccgtgcgtacggtgaggtactcgtccgaccagatgtcgcggtcgaagctcaagaggtttcctgccgggtcttcgaagagaaccgcctgcacgacacgcagctggttgaggcgacgtgaccccttggagagcagcgcggtgtcgaccacgacgagcacgtcgctcacgtacgagccgacctcgaccgtgctgacctgcttgcccggcgggcaccagattgccttggcggcggcatggtcgagccccatgacggcaaactgctcttcggcgtaatctggcccgagcacaagctcttcgtggacgttggtgaggtcgaggtcgatgccgtcgaagtgtagacgcgccagcttgtagatgtggtcggtgccaaagggggtgtacgcctcgtaggagagtagcgtgtgcgctctgcacgcgcgcagcatgttgagcgtcgggtcgtcgaactgcttgcttacgttgatcatgctcatggtgtctctcgctttcgtcacggggattatacccgagggctgtgacacacatcccacgtagaatgcgcgagaagcgtggcagtgccacggatcccacgtgatgtgtgcgagaagcgtggcagtgccacacatgaggcgcaaggggcgcgagaagcgtggcagtgccacgaatcccacgtgatgtgcgcgagaagcgtggcagtgccacggattttgtgcgagggcgggtagatgcagccccggagcgtagcccgagcggtatgatgggcaggcactacccgaggttagcgaggtaaggagacccgaacgcaatgatcgaacagtcgcagtctggcgcgccgcgcgcgattgccatcgccgtcgtcatcgtgctcgttcttatcgtcggcattgcgacgggatacttcgtttaccggcaggtgcagtacaacgacacgcaccgtccccaggcggtgacctttaccgtcaacctgcagaactacggctccgacgacacgcccatcccgctgcacgttgtcggcacggatctcgatggcaagcctgtcgacacggaggtctacgtcaactccgatggcacgggcgcagaaatcctgattggcacgtacacggcaacgatcagcgagtcgccgctcacaaacgacggaaagatttactacggctcgggcaccgagctcaacttctcggtggttgaagaggccaagaccccgggtgtcttctccgatggcttcacggacgattccgagaccaccatccagatgtacgaggtcgcacccctcgacatccaggagagctgggtcacgaacgcctacaacgcagcagtcaaatcgggcttcgaccagagcaaagcgtacgagtaccgcgaggccgcgctcaaggcgcacgaggacgcggtgaacaaaaagcaagtcgagcagaacaagcaaagccaggcgcaggcgacgcaaaaggccgcgcagcagacgagcgatgccgaggcgaaggccatcgagggcgcgacctggtatgcgggcaatctcggggcggacggcatcaccgccgtctcgcgcgacggggccaacttcacggtggcgggcaagacgatgacggcgccgacgcaggaagacgcccgtctcaacaccaatacgaccgatgtgaaggagacgtcgcttaagttcccgcttgcgagcagctgcttctacttccagatctcgccttcggggacgaagagcgccgtcgaatcagatcccttctacaacgggatgaccaccaagatcagcggcaacagcgaccagcgcctggtctgggcggtcaagaacaactccgtcgtggcggtctacctgtacgagtactagcgcttccgaagaagcggcggatgagctgcgggccagcggctcatccgccagctagcccgcccgcattgctccctagccgagcttcgcctttgcgaacgccgcagcggcacctttgtcgaaattgccgtcggtcgccgcggtgagcgcgcccatgaccttgcccatgtcgcgcaacgaagtcgcgccggtctgctcgatggtctgcgcgaccagagcctcgagttgctcgccctcgagctgcgcgggaagcatgccctccaagatctcgatctgggcggcgaggcgctgggtgcgctcctcgtcggtgcccgccttgacggatgcctcgtgggtctcgcgtgcctgcttcaaggttctcttgagcgaggcggtcacgtcctgctcggtcacctcgtcgcgcccttcgtccttgacggtggcatcgacgtcgcctttgacctggcggatgatggcaaggcggtctttgtcctttgccttcatcgcgtttttcatctcttccttgagttctgcatagtccatcttgggaatgctcctctcgtgtatacgcattgttgtcgattcggttgccggcatttgattgtaatcttgcgacgttacaatgtgatgccacgacggtcgccaggctgaaggaggatgcggtgtattgcaaaaactgcggtaagcgcgtgaacgagggggagcggttctgcgcatcgtgcggcgccccgcttgccggcgattcagcagacgagacggcgcatctcgaccccgatgagaccgtcatcgcctatcccgaaagcaccgcgcctgcaagcaccgacgacaccgacatcatctaccatgctgcccccgggtccgctgcccgtctggacgacaccctcatcacccactccgacgacaccctgctcgtgagcagccccgtggcatccgaggcgtctgccgatgcggcgcccgatgacgtcgcggcgcatgaggcggatgctgcccctcagtccctcgaaagcgaggacgaagacgaggtgggggatgcggcgtttgcccccaaggagggcaactacatgccgaccgtcgccatcccgacggtctcttcggcgaacgacgagacgacggacgcttcggatggtgcgggcaagccgccgtctgccaagcccaaggcgcgcaagccgctcatcatcggcatcgtcatcgcggcgattgccgtcgtggcggtgctcctcggcgtcttcgtctccggaaacctggtgcctgcgcctacgagcaccgtggtcaacgtcaggttctccatcgacgcgccgggctacgattcgagcgattctgcgcttcccgtcgaggtgacgggcacgacgtcgggtggctctgcctacgaccaagacttcttcatcgaccccggcggaaacggcgtccaactcgcgcctggctcgtattcgctcgcagtcaaggcatcgccgctgctcgacgacggcaacctgtacacggttccctcgagcgggctttcgttcgagattccgcaggcggtccaggatggggcgacgttcgaggtgcccaacggcacgatctcgctgagctacgcgtctccggccgatatcaccgacgcgcagatcgacagctcctacgacatggccatcacttccggcttcgacaaggcgacggccgacgcgtacaagaaggcgctcgtcaagaaccgcgacgaggcggtcgctgccaagaaggcggcagacgagaaggcggcagcgcaggcggcgcagcaggccggggcggcagaggccgccaagaaagctgccgaggaggccgcgaagcccgtcacctggtaccgtgccaccgcccatgcgccctctcgggcggacgaggcggtcatctactccctgtctgcctcgggcaacacgctcacggcggatgccgcgttcgaggatgcggccagctacgaggggctcgccaacgtgaaggcgccgcaggcgcgcaagacctacacgttcaccctcacgaaggacacgaagtgctactcggtggggggcgaaggcgccccgcagcagatttcgatcgaccaggtggcccaggcggtttcgagccaaagcggtctgggcgtcatcatcgaggtgcgcggggacaatgtgctcgaggtgcgtttggcaagctaggggcttgcccacgggaccttcaaactcgtgctctagactgaagcggcgcacgtggaacaaacgacacgatcaatcaacaaaatgacggcgagaggaaacagacgtggcacaacaggagcaggccccctcgggcacggactcgaagcagcccaaagacctcgacgtaggcgaatacgccgagagctttggggcgctcaagacgagcatgtcgcagggccgcgacctgaggaagcgcaaagcagacctcaaggcgtatcgagagcagacggcaagggacaaggcaacgtacgaggacgaggcgaacatcctcgccaactacgaccagatcgtcggcgagcagcgtgacctcatcgcaagcacgcagcacgagctcgacgttcagactgagcacatggaccggctgaatgccgatctggcgcaggccaaaggcgatctggcgaccacccgcagccatgacgaatcggcgctcgcagacctcaagcgcgagctcgacgctaaggtaaaggcgtcagaatcggcatacgaccaggcaaaacgcgcaagcgagcaggcaaagacgcgtcacgagcaggcacagggcacttcttccgaaagcgagatgctggaagtgctcgagcgcaccgatcagcagaaggcggcggccaaagacgccttcaaatccgagcgtgacaccgccaagcgtgcctacaagaagcaaaaagacgcattcgacaaggcggaaaagcccctcgagacgaaggtcggcaagctcgaggacgaggttaagcagctgagcgccgccatcacgaagaaccggggcgccatcgccgcagctcagcagcgggtcgcgtactgcgagcaggtgcatgacgatcccgcgcgggtcgagacgctcaaggcagagatcgagcgtcgcgaggagcaggctcagcgcatgcaggcagacatcgatgagctcgccgaccagcgggccgaggtcaagaagtcgaccggcaaggcgaaaggcgcgctcatcgcccttgctgtactcgtggtcgtcgtcatcgtcgcgatcgtcgtcgtgacgacgcgtggcttctgatgccgcatgctggcgcgggccacggctgctggcagtcatgttcgccgcttgctctgactggccggagataacgaagagagccggaaaggacgtgccttttccggctctcttgtattgttgcgcgtatgctgtggtgacgcttagttcgtgggggagccagtcgtgaacgcgatgaccgccatgacgacgacaacgacgatggcgaggatgatgcacgcgcgggagaagctgtgggcgcgcttgtcgatatcggcgacggcctcgacgccctcctgcttgattgccgccatacgctcggcggcctccttcttgagggtgtcgacgtctttcaggacagatttgcaatgagggcagatatcggtcttatcgggaatctctgcattgcaagtggggcatttcacttcgggtacctcccaaaaatctccatattacagcagtgcaattatacgcattcgcgcgcggcagcgggcgacgagctttggacatggggattggcagctcgcatgagggctcggttaggttgaatcgcaggcgtggcagacgggcattgggcgcgcgctgcccgagtgggtcgggtactatagggcaaacgcgaatggacgggaaagcggaggcgcacatgccggagctgacgggctatcgggccgattccacagaccaagccgagctggagaagctcgtcgaagtgctctcggatagcgagaggcttctcgacgagacgattggcgctgcgcttgccgagactgatgtcgaccgggcgatttccgatgttctcgagcggctcgggacgcaggtgggcgcacgccgcgtcattttgtgcgagatgatcggccgcaacagggtcacctgcacctacgagtggtctgcccacggcgtcgagccgctggccggcagctttgcgaatttcaacgtcaagcccttcagcgacgcctgacgcgactcgttcaatgaacagggggttgcgaaggcctcggcaggcgaggggctcgacctgtgcggtgccgagcgcgtcgtggccgtgcccgtgtgtgtcgagggccgtcgcgtggggtacggcgtggttatcgacgcgtcggaagacatgcaggcagattacgtggggctgatgcggcagagcctcgccttcgccggtgtgctgctgcgcaaaagaaactacgccaacgacaaggaccggtggaatcggcgcgattcggcaacgggcgcgcagaacagggcctctctgtatgctcaggcacggcatctcgacaggtccgagccactcgggctcgtgagctgtgacatcaacggcctgcgggcaatcaatcgcgtacgggggttcgaggcaggcgatgccgccatcgcgtggctggcgcaggccatgctcaagtgcttccgctctgatgacgtgttcaggctcggggacgacgagttcctcgcctggctgccggttgtgaacgagctctccttctcgaagcgcgtcgagaagctgcgcgcgaagatcttgcgcgggcaggtcgacgtcgcgtttgcgcagaagtggtacccctcgtgggagaacagggatatcgaccagctcatcgacgagatggacgacctgcgcatcaagggcaagcgcgagggccgatagagctgatgactcggtttgtccggaacagctcagtccatgacaaagcgccccttcccggctcgcagttgcgattcggaaaaggggcgcttcgcaaaatgcacttagcagctgcctgaaggccgtctgctatttcgcgcccgcctttacgcgttgagcaggaacgcctcgtagcccttgcgcgcctcgtagaggtcggccttgctgatgacctcccacggcgcgtgcatcgacagcacgggcacgccggagtcgatgacgtccatgtcgtacttggcgggcaggtaggcgatggtgccgccgcctccgatgtcgaccttgcccagctcgcaggtgtggtacacgactccggcgtcgtccatcacgcggcgcacgagcgcgacgaactcggcagacgcgtcgttggagccgctcttgccgcgggcgcccgtgtacttgttgaacacaaggccaccgtgcaggtagccggcgttcttggattcgaacacgctcgcgtaactcgggtcaacgcccgcggagacgtcggaggagagcatgcgggaattcttgagcgcgcggcgcagggcaatctctccgccttcacccgcgagctccatgacctcgcgcatcgtgttctcgaagaagttggacgccatgcccgtcgcgcccaccgagccgatctcttccttgtcgacgaggatggtgacggcggggcgcttgggggctttgacgg

SEQ ID NO: 2662 - DNA, 5850 bp, Unknown
  16S sequences of unknown bacteria
gtgtaaaaccccgttccgcaaattgtgttacatagaaatcttcaatcttattcttcataacgcatttcactcctttgccacgatagcgcaaacttatatcttgataacgcaaacatccttccaaactattgtaagaaggatgtgaatagagtatctttgatttgtggttaacgctatctaacctaaatataacataagaaatggggagcgtcaaggtaacgcttctctgaaaaggaggatttggatatgtctgcacaatcgtcgtatctgaacaaaaaaggtcttacggtcaaggaccttgtaactattggtatttttactgcactatttttcgtgtttgagcttatcggctcccttccgtttgctccaaaccctgcgcttactttctatcagccgtttgggattgccctgctctgcggacctgtgtatcttctgatggtagcaaaagtaccaaagcgtggtggtattgtcgttttgggcattatcaatggtattatctggtatgtactcggaatgcactgggcaatggatttgggatatatcgtcatgggcatcatagctgaaatcgtcgcaggtgctaaaagttatcgaaacatcaggtggaatattgcttctttttctctattctgccttgggcctgccggtgtatttttggcttatttcgccgatcctgctgcgtgggctgaaacaatgctgaacaatggaacttcgcaggaatacattgacatgatgactgcttctgcacctgcgggaatgttgccggttatccttttgggaactatcatactgggaattatcagcggccttgtaggaaagaaattgctcaaaaagcagtttgaaaaagcggggattaccgcatgagcaatggggaaaaacgcggggggctttggatagacccccgcacaaaaatactgctgttgctcttatgtgtcctgtcggcaacgatggctccatcccttctttatgaaatgcttgtcgttgcgctggtagcctgctttggaactgcctgtgggaaaatacgctactccattattgggattattgtctatggagttttctacttgttgacacaggcggtgttgcagatgccgaccggcaatgtacaggtaatgttgattgctttcctggggttggttcataaggtttatccttgtggcattttgtccggcattatcatttcaacgacaaaagtgggggaatttctctctgccatgaaccgaagccatatttcacagaagattgtaattcccattgcggtcatgctgcgctatgtacctacaattcgagaggactggcattttatcaaagacgctatgcggatgcgggatgtatcacctaatctcaaaaattttatattacatccggctatgacaatcgagtgcatctatgttccgctgatgatggctgcatccaaaacagcagatgaattgacggttgcatctgtaacaagaggaattgaaaatcccacacaaaggacttcgtatgtaaggattggctttggcatagccgacctcatagttgtccttgccttccttgccatgtttcttgtggggcaattctatggggaggtgttttgaatgattgaactgaaaaacataaccttctcatacgagggacgggagcaaggcggtttgcggaatattaacctgactgtcaaaaatggggaatgcatcttgctgtgcgggcgaagcggctgcggaaaaacaacaatcactcgacttgtaaacggactcattccccgattttatgacggagaattaacaggccaggttgtgattgatggcaaagatattgctgatctgactatgtataaaatagcagaaaaggtaggaagcgtattccaaaacccgcgcacacaatttttcaatactgacagtgacagcgaaattgcgtttggccttgaaaatcaaggaatgccaacggaggaattgcgccaaagagtagaaaccacagcggcggatttagaaatccagtcactgcgtaatcgttccctacacgcattgtccggcggcgaaaagcagaaagttgcgttcgcctcagtttatgctatgaacccggacatttacttgctggacgagccatcctctaatctggatatggatgccatacaagatttaagaaagcatctgaaacttgttaagcaacaaggaaagacaattttaattgcggaacatcgactctattatttgatggatgttgtggatcgtattgtctatatggagcagggacaaatcgccgggatttacacgccagagcaattcagggctattgaaaaagacgagcggaagcgcatgggactccgggctgtggatctccatgaagtacatccgcaattcacaagtccaggcgcggcagaaaacaaaattctgaaattgcaggatgtgggcttgtattataagaaacaagccattgtggaacatatcaacctttcagcaggaattggagaaatcatcggtgttgtcggccataacggtgcaggaaagacaactctttcccgtactctgtgcggactgcataaagaagccagtggacaattcctgtggaatgaaaaaccacaggacaggaaagaaaggctgcaccgctcctacatggtcatgcaggatgtcaactttgaattatttgctgatagtgtagaagcggaatgctcctttggtatccgcaatccagacaaatcgctaattgaaacaacaatggatagcctgggcttattaccctatcgcacccatcatccgaacacactcagcgggggacaaaagcagcgggtggcggttgctgtcagcatgatttgtggaaaagagcttttggtatttgatgaacccacaagcggtttggatttcgatagtatggagcaggttgcgttgctaatccaaaagctctctgctatggggaaagtaatttttgtcgtaacccacgattatgaatttgtctgccgtacctgttcccgcgttcttcatattgaccacggagagcagtgcgatgatcttccgttggttccggataatgaagaaaatctaaaaaagctattttctatatagccgttgaatggatatgaaaggagtgagtttatgcagaaggagaaaaagagcagttcaatcagtctcttgctccaatgggctggaaaagaaaaatattggatgtatctggcggtcatcctatcctttttcagtggaatttgtaccatgatcccttattacgggatttacagtctgatgagtgctgtctatacaggaacctgtactacagaatttgttattcgggatgctggcataatcgctggcggtatcgttatccggtttttattgtttggtgcatctggtgtggcatctcacaaaggggcctaccgtgcattgctgaaggtgcgctgtatggtaatcgaccacatggcaaaagtacctcttggtgcgctgaatgaacgcagcaccggcgagattaaaacggttctgaatgaggacattgaaaagctggaactgtttctggcccacaatgtgcctgaattgatctgttaccttatagggccggtggtggtgtttatttaccttctgaccgtaaatgtacctttggcattggtatcgctggtgcctttggtattggcgttattcgtcatgtgcgggatgtttatgggagcatccagcatgatggggcgtgccaatcaatctgttgctaatttgaattccgtcatggtggagtatatcagcggtatgaagctgataaaagcctataacatgggaagtaaatcatttcagaaattttctgctgctgtaaaagaggaaaatgatgtttggaatgaaatgtctaaacggatggggccattttacgcttcttttatcgttgtgattgagtgcgggatgctgttgctggtgccgctgggcggtatgcttttcctgaatggttccattacagccagtgtattcctgttgtttgcttttgtcggttccatgtacctgacggagatccgtcctttgcaggaaatatccagcaatatggcgcaggtactcaaggcggttacaaaaacagaggaaattttagagctgccgatttatgagggcggcggtgattttccccaggcacacgacattgaactgcggaatgtgcggttttcttacgatggtaaggtaaatgttctggaacattgtaatctaaaagtcaaaaatggagagcgtatggctctggtaggtcgctccggcgcaggaaaaagcaccgtgattgaattgatttcccgtttttacgatgtgcaggaaggcgaggtactgataggcggtaagaatgtcaaggagatcaactacgaaacacttttgcagaatatagcgattgtattccaaaagacctttcttacccgtgacagcgtgtttgaaaatatccgtatgggcagcaatgccactctggaagaagtgcgggctgccgcaaaagaagctcagattgatgattttatcatgtctttaccagacggttacgatacgaaggtggggagtttcggttcccgcttctccggcggcgaaaagcagcggattgcaatagcgcgtgctatcctgaaaaatgcgcctattctgattttagacgaggctacaagtgctgcagaccccgaaaatcaggtggagattgataaggctattgaaaacctgtgtaaaggcaagacggtaatcgttgttgctcaccgtttgggagccttgaaaatgtgcaatcgggtagccgttgtcgaaaatcacacgattacgagtgtaggaacacatgatgaagtccggcaggataatgcttattacaatcaggcatggacagattatgaaacggcccgcaatattacttatcagttggaaggaggtgcagatcatgcgtgaaaagccattaaagaaaaatagccggttttatcttggcatggttctaaatgttgcggaaggtatgctgtccggttttaactttctgctcctttatgaagcgatgaagatgctgtggaatggtacaatcaactcgccctcgctgctccggctttccctgtttttaggaggcgttttcattctgcgtattgtgatttacagcattggctatacacaaagtcagatcggaggtgcagcggtcagcaaccgtacccggctattcctgggagataaaataaagcgcatacctctgtccaggtttacgcaaggccagactggacaatacatcaacatcgttaccagcgatgtcaataactatgaaaaaatccttactcatacagttggggatattttgaaacatattaccttctgcacgatgatggttatttttgtaggctgtatctggctgccgggaggcatcatccttgcctgcgtcgaattggttttaattccattcctctggctctctttccgggttgtccgcaagtatggtacagagaaaaacgctgtcagcgccgaaacagtcagtagcattgtggaatatgccacgggtattcagacctttcgggcctatggtattggcgggacaaaaaatgagacggtaacatctactctaaaacatttcagtgatgtgagctacaactacgagaaacatggtattccgacaaatgcaatacaatgtatttttttgtggatcggactacctgtaatgatatgggcggcttctatccctatgctgtccgggaaactggacccgatttcctatttgttgatttgtatgctgcccatgctgcttgcaaaactttcggactccatctcccgtggcctgatgagttacaaaaacttgaaaatctccaaagataaagttgtagatattattgaagaaccagaggaaaccggcagtatggagccgcttcatactgccacacatgaaattacctttgacaatgtggacttctcgtatgtaccaggagagccggtg

SEQ ID NO: 2663 - DNA, 32759 bp, Unknown
  16S sequences of unknown bacteria
cttcttctcttatcccctctttcttcctcatcccactgagtttgacgaagagcgagaaacattgccgcaaacgcaatttatcggcttctgcgaatgccgcgcctttttaatgcaataaacgccagcgccaagcctcctaagaaggcggcagccgcctcaggctctgggacatgggttatgactgtcgataagatattggaagtttcgtcgtatatgaaatcggctgcaaacttggagtaatccattcccaaaatctcgaagtcgtcgttaagcgattccccgaagttggaaattgattccgccgagagcaagtcatattttacggacgaaccgagctcgatggcatcataatctgcggaagtcagattcaagtcaaatacgagtttcccgtcgccgactttttcgaggattccgccgatttgcaagttgtcgcgcgaagcactctttacgtcgagctcgagaacgccgccggaccagtggaaacccgttgttaaaaagccattcccggaataaagaatgccgagcctgccgccctccaaataagtgtcgcccgcgcttttttggttaaagaggtacaatgtcccattctttaccgtcaccgtgccggtatagaaacaattatttggatcttgcggcgagaggcgctgtatgccttctccgtccattacaatattgatcttggagaggtggacaccatctccggcgccatatccgccgtccattaatttaccgttgtaagtataatcggtaccggcggcatttttaaatataagtgtggtagaagttcccgcggcatcgattgcatttgagacttcggcgcactgttttgccgccacgagcccgccaagttccacagttacagcggatcctgaggtggcgttaaattttaaatttgcagaattagtccacgcttcggcgtaaagccccacgattccatttatctttatattggtagcattcattacgagagccgttcgggagtatagcttaacatcgttctgaacagttatcgagcttagagcctttgaggtgcgcccaagattgagctttgccttatgcgtcataatgttagtcgccttcgttccgtcggccatcatttctattgaccccactgaaagatgtattctggggcctccgagcgtttcgtcgattgaatcgtccgtataagtaaaacttaaaacttttgaattgtctgtaaaagagtttttagaggcgtcccaaacgccctcaacccctgtcacggatatttttccggaaagatcccagtacacgtcctgggccattacctcttttccggccgatagttcaaagtcgtttttaaggtttgaaataatcaaatccttgccgtaattatctggtatagtgacatataaaatatttgatttaatatagtcgccgtcaaacacaaggttgtcttcccactgcaggggctgtctgtccacgggaacgagagttccgtcaacgaagtgcgaccaagctcctgatgggtgtccggtagttggagtgccaccgcctacaaaataataatcgtcggcataggcggccaccgcgattaagggtaaaataaagtagaacaaatttttcatggctcagttgtcctcgattggaattacatttttgtttgttataaatttatacaacaattgtcaatagataaagaatatgtcagcaataaatgagcgctctctcagaattcgcaaaaagtcaaaatagacaaaaaaacggatttctcatccgtttttgtctttgaaattaaatgttgcaaaaccgcatccgcgccagctaatcctgccggcttttgcgcctgcggagagttgcggccgcaagcgccaacccgcccagtatcgcggcaaccgttgccggttccggaacattcgagaacgatactgtaagaatgtcgccattccattcaaagtttgcaaaaccgtttgtgaggtttttggcgtaaaaattgtcatttgcgtcggcagagaagccctcgcgttccatttccgaagccgatatgaggtcgagcacagtgccatcgtcgataaaagtagtcgggtcaaagccgtcaaaatctacgccgattttcccatcgccagattttataaaagcaccgtcgattcttatcatatcgatatcgccgctaccaagcgtatccttattataaaagataaaatcgcccgcaaaccattcggcgcctgaaacgataactccgccatctatgcccccgaaagctccaccagtcatagtaagcttgccaagagcattggtacttttgattatgagagttccgctttcaacttccactgttccagtaaattttgagtccgcatggattatttgttttttcccgtcggcacctgccattttcacgctcattattgttttaaccgtgtctgactgtccgtcagtgaaatctccggtgaactcgcaatctgtctgatttgtaaatataagcttaagagtgcttgcctcgagagtccttgaattattggtcagctttccgtttccttcgagccctccgagttttacataagtgtcggtagcgcttggcgcagggtctccagtggcccatgtaacggttgcgcttctactaataacatgccataccggcgaagcacccgagccgctaaccattcttactacgccgcctatcgatatgtcgggattttcttcggaatgcagggcgtccttggaattatcccagacattcatataaatagcagagttgccgtaaatattaaagtcgcccgtgatggtcaaagattttggcccgcctgaatcggacaatgaaacggcctcgcctttttttacgttattttcgtctattgtcgcatagcaagtacccgcagcatcggagcctacattaagttgcgtaacattcccgatttgcccgatattcatctctccaactactatatcggcttggcatgcatcgtttaccgacgatcccaaagcaactcccctatcgtaagatccattagcgcccgtataggtaaatgttccgatcttccaaacggaattagagacatttgaaactatttttatggcagtactgcctccggtaggatgatatacgccatcagtgctgtaataggcagtttcagtggcattgtggttttctaccaatatagaatttagattcagatttgcagattttattctataataaatattgtcgcttctgccggaaatcggcaagtaggcatcatagtcaaagacccaattcgcatcgggagagtttacatttgcgccttcggggagggcaacatacccagtgttcgacgagctccaagacgacgcttttagcgggtcggcttcgccccatgctctttccgcgcccttccacatataatatctattatctgcggcatttgcaaataatgccgtcaacgtaaataatacagaagaaataataaccgccgaatttttcataattttttattattggatatatttattcaagcatttgtcaaacaattcataaaaataaaaaaaattgcggaaacagaaaacatacaaagcttatcaaaagcataagaagaaaacaacctccaccccgcattcatttgcttgcgcgcaatataacaaatacacctatatcaaaaaatatccgctccccatcgtgtaagacggatatttatcccaatataaagcaatcagagaattgcaaaagcggactttattataagctaaaagaggttatcgtgtactgcgcggaaacagcgcccttcccgtcgcccgcgaaagacgcctctgcaaccgatatgtatggcctcaacgcttttagctccgattcaaatttcattatcgaagacaaatcggttgtcttggaaatattcattacagtcttatatattttgaacttccccatgctcgatgaggtcacggacgaaagcttgtactcaactcccgcggcgcgggcgcaacggtcgatttcagcctggaacttatcgtctgacagagtttttgaaggatcgaaagattttgacaattccgcctcggcggcttcgacgcccggcaagcccgcgattgcagcttttgccgttgccgcacggcgggttagttcgaggagcttggtttggcaatcggaattcttatttgagagcagagtaaaccacaaagcggcaacaattaccgtacagcacacaagcatcactctttccctcggtttgcgcgacgcccaaaaactctttattttttcagcaggcttcattttttgacggctccggatatcgaaaacttagacgccgttttcgaggaatcgctcttagacacaacattcgcgaaaagcgggattgtttttagtttggatacaaattcgttaatttttgagagatcgttggcagttcctgcaagctcaaaggagtcgccttttctcgcgaaggaagttattgtaatgccgtccggccttgcggaatttatttttgcgagcaattcgagcggggttggctttaattttgtcatatttgcgaacgacgcaaccctttcgactctcgcctcaatggctttggcctccggctcgattatgacgagttcctcctccatgtttgcgacttcgttcgccttaattattacatttatctgatacgcaaaaagtcccgcaaagacgattggcacaagggcggctcccaatattgcgagctgccgttttctctgagctttttttacattttttaggaagttcgccccgcggatgtcgcaagttgtgaatgcggaaaacggggcgctccaagaaatattcttgaaaccgctgccgtcgtcgatttttgcgttaaattttacgtttttgctgtttacctcaaacgtttcaagctctacgcacttgggatttccggaaaatccaagcaatttagagagggctttttttgcttcctcaggattttgtggcgattctaccgcggcgaaatcggccgctgcgcaagactggagtttcactgcgcatattgaacccccgcttgaaaagaaatattcgccgtcgccaagcttggaggaaaggaaagcgcaaaacgatggcattacaatatcggcagtagcaatcgtctcttcgtccaaaccggctaaggccgaggactcgattgccccgaaagcggttgcgcttccgtcaggggctctcatagcgccgcatctaagcctatcgggcgacaccggcgcgcttgccgaaatttccgcaaacgccatcgacgcgaggtctgaatctgaaattccgccgaccgcgtccaattttttaacgaaatacgcccctgagggcgccaatgccattttgcgcgccatctcttattttaacatttcatatcacacaaagtttcacaaagggcaagtaaaagtttttgcggcgcaaaaattgcgctttttagggcatcgggcagcacattaaaataatcccaaattttgcggatcttgccggcaaaaaaagagcctccgctgtttgcggaggcgttgggcaaataggctctatttgcgtttttattagttttcgttaaaaatgctctttaggtttattgcttcgagaatattcatcgcgtgcgagttaaccctttcgcaagccgacagtatttcaataaacaaaatgccgccgcgcgtcacgccgcccacttccatctgtgaaattgcggctctcctgagcgatttccttacgctgtcgagcttcttgcgcattgccgccgcgctttctatgtcggcctttggaattgatgttttattcaggctcttgtcggcgaaatcgacaaacttgttcatttcggcgcaaaattctatgaaagccggagactgcaatatttgatccataagctgcctgcggtatcttttgcgggcgagagtaatgagcctataacaggaatcgcacatttcttcgagctcagggacaataatcatgtttctggtgacgatttttatgctgttttggcttagctcatgggaggaacattggacgaagaatgaggtaagagccatcgagagcttgtcggattcctcctccaagtcgcgcaatctggcgacttcctcgcttaggtcttcatttggcttctgaattacctttacgaaaccattgaacatatcgcccgacatttccgcgagcctcacaagttccttttggccttcaaatagcgcgagctctcccatttccgcaacattgctcgacagatattcgaggcgctgcactgcggtgcggtgtttcctgtccggcttgcttctgagaatccagcaagttattttttctatttgcggaacaaagcttaaaagcaggcagatattgcagaagttaaacatcgtatggaacattgcaagacgctctgggattgcgagcttcatcagcgcggcttcgcgcgcggcgcccgtcagggagtcgaaattggaaatgcccatggcggcgagagtcgcggcgtcgggatttggattgagcggcacgagccatttaatcatttcaaggaaaagatagaatacgcacaacacccacattacgccaagaacgttgaatacgaagtgcgcgatagctgctctttttgcggcgagatttgccgtgattgccgcaatgttggcagtgatggtagtgccgatattttcacccaaaataatagcagcggataggtcgaagtctatccaccccttggccgccatcgtgattgtgattgctacagcaacgcttgaggactgcacaataatcgtaagcagcacgccaaacattaggaatagtagcaccgacaagaaccccatattcgagtatcgttggagccattcgagagcgacggactccgggttcatatccggcacggacgattttaggaagtcgagccccatgagaagcaggccgaggcccacaaatagctctcccgtgcttcgccaccccggttttttgcagaacgatattattacgccgaatcccacgagcggaagcgcgagggacgaaagttcgagtttaaaaccgagggcggcgataatccaagccgtagtggtggtaccgaggtttgcgcccattattacgccgatactttcgcggagtgtaagcaggccggcgtttacgaagcttacgaccataactgtcgtggccgaagacgactgtatgacggccgttaccagagttcccgagaaaacccccttaaatcggtttcccgccatagagcgcatgactgttcgcaggcgttcgcccgaaactttttggagcccttcgctcattagtttcattccgtagaggaaaagaccgaggcttccgagaatttgtaatgccgttcccatatgatataaaaatttggaactattaattgcgaaaaaccctacaatatgcaaaccaaaatacagacgaatgagattttttgcggaatttctgcacacaatatactggttttcacaccattaagaatagagataaaaagtggcgattacgcttgccttgcggggagttggatgcaaactcgtaaaataaatgggaagtgatagcggaaaagttatggttgtgtattcgggcgggctcgactcgaccgttttattgcataaacttgcagcgcagtcgcgcgtggcgggcgcgattggttttttgtacggacaaaggcattccaaagaattggagttcgccaaggaaaattgccgcaaattgaatatagacttttatctggcggacatatccgcactcgcgccgatgttcgggaataattcccttaccgacagggacgttgaagttcccgaaggcaagtactacgagtccaatatgaaatccactgttgtccccaacaggaatatgataatgctctctcttgccgcggcgcgcgcgatagcagtgggtgcgcaagccgttgcctacgcggcgcattccggagaccatgccatataccccgactgccgcccagaatttacggaagccatggaaagggctttggcgctctgccactactatccgattggcttggagcgcccgttcgttggcatgacaaaggccgacatagtaaggctcggagccgatttgggcgtggatttttcgctcacatggtcgtgctataaggggggcgagaagcactgcgggaagtgcggaacgtgcatggagaggcgcgaggcatttgaactcgccggagttccggatcctacggaatatcttggctaatgggctcgaaagtcacagtaatacgccacccgcgtgaaaatttgaaaaagtgctcccttaggcatctgcacgggagggccgactttgaattctttaaggctaccgaaaattttttgttcgacgctggaggatttattcttcttgaaataggcgcgccgccaattacgcccgcagacggcggaaagccgatactcttgctcgacagcacatggcggcttttgccgtcgatacgcgccaaagtgcgcggcgactttattccgcgttcaataccacaaagcgtgtgcaccgcctatccgcgggtttccaaggtattttccgaccccgatggcctggcgacaatcgaggcgctgtacgccgccttgaaattttcgggctcgcccgaccctactgtattgaagggctacccgttcgccaaaaagtttatcgagataaacgggtggctttccgacattccgtccgctgactttttcgacgaatctgagagcgtattttgcgattgagcaaagttggaattttaatgttgcccgcgggattttttgcgggaataatatttatatgaaacctcaaaatttagcacaaacattcgggcgcagagaatttttgagcgcctcgacaatgtcgctgctgggatatacgctgatggtgagcgtgccggaggcgcgcgcggacagcgccgctaaaagtcccataggaagggcgatagaagccaagacaaccggcaggaagttcgatttcgacgccgagccgaacatggcgaaagaagagcttgattgcgacgttatggtggcaggcggcgggcttgcgggaatttgcgcggcgctcgcttcggcgcgcaacggcgcgaagacgatactcgtccaggataggtcgaggctcggagggaattcgagcagcgagataaaaatgcacccgctcggcgttgacggcgacaaatggggctggcgcgaggccggaataattgaggagctaaaacttgaaaacgccgccaacaatccccagaggtcatgggacatgtgggacctgatgttgtacgacaagtgcgtgaccgaacccaacctcacccttttgctcgacaccgccgtatattccgccgataccgacggcggcaagataaccgcagtgtatgcgcgcagcgacaaaacgctaaaaatctaccgtataaaggcgaaaatctacatagacagcacgggcgactcgcgccttgcgatggaatccggcgctgagcttatgaacggcagggaggggtccgagaaatacggggagccgctcgccgacacttacgagaggggcaagcatctatgcagctccataatgtttacctcgaaagactgcggaaagcccgtatccttcaaggcgccgtcgtgggcgaagaaaataaccgaagacgacctaaaactgcgcaatcccgctaaatggggattcgactacggctactggtttatatcgcacggcggaatggcggacacaatccgcgacaacgaagtaatacgctttgaacttttgtcgatagtgctgggagtctgggactatataaagaacagcgggaaataccccgagactgccaaccgcgcgatagattttatcggtatgattcccggcaagcgcgatagctacagggtagtcggcgagcacatatttacgcagcacgacatagagaagaattggagctcaatgcccgaccagataggcgccgtgggctggccgcttgaagaccagacctccgagggcttttacgcgagcggcaagaagcccgctatctacggcggcaaagtgccgttttacaaccttccgctttcgataatgtgcgcgaagggattgtcgaacctaatgatggcggggcgcaatataagcgctagccaccttgccttcacttcgacgcgcgttatgaattcgtgcgcggttggcgggcaggcggcgggaacggctgccgcgatgtgcgcaaagtccggctgcgccccgaaagacatatcggcgtcgccagaactcgtcggcaagctccagcagaatcttctcaaagacggccatataattttgggcgttaaaaactccgatcctctcgacctcgcgcggaaagcaaaaatatcagcgagcaattcgagcggcggaaccaagcccgaaaacataatttccggaatgtgctacgacatctcaggggcagtcgaaaaccgctggaaagcgccgatttccgaaaagccggagctttcgctcgaatgggaagccccgcagaaaatcgggaggctgatactgaacatcgacaccggctcgaggctgcttacgccgacgcttgaaaccggatttgtaaagcgggtgatacagggtccgcaaccggagtctctcaaagacttcacagtgcgcgcaaagctcgccaacgggcgcgaaaaaactctcgccgaaataaagggcaactaccaaaagcgcgttgtaatagacttccccgccgaagccataaaacgtgtaacgataaagtgcctttctacaaacggcgcaccggaagcctccattttggaggtgcgcgcatacgggaacgcatagcgccgcagcacgcggcacacccgcgcgcggcaaacgctttcaacggcattccaatgcgccgaaaagtgttgccttgcgcgggcttaaagaaaaaatggaaaatttatgaatagttcaaaaaagattttaatattgggagtcaacggattcataggttcgtcgctggcttggaaaattttaaagaagacaaattggtcgatagtcggtgccgatttggcgtcgaataaaatccagaactgcctggggcgcgagcgttttgaatttcaaaagaaagacataataaaagacgcggactgggtggaggaacagataaaagcctgcgacaccgtagtgccgctcgttgcgatagcaacccccgcgctgtacgtcaaagatccgctgagggtttaccacctcgactacgaagccaatatagacatagttaaaaagtgcgtaaagtacggcaaacgcatagtcttcccgtcaacttccgaggtttacggaatgtgccccgacaagcagttcgacgaatacgaatctccgcttgtgctcgggccgatagcgaaggagaggtggatatattcgtgcataaagcagatgctagaccgcgtaatatgggcgtacgggaaacacgaaggattgaaatttactctgtttaggccgtttaatttcatagggccgaaactcgacgacatcaccgctccgaaagaggggtcgtcgcgagtgctcacgcaatttgcgcacaacataataaacggcaaaccgataatgctcgtggacggaggcgcgcagaagcggagcttcacgttcatagacgacggagtcgaatgcattttaaaaatccttgaaaacaaagacggctgcgccgacggaaaaatattcaacataggcaatcccgatatggagtattctataaaagagcttgccgagatgctgatagagctgtttggggagtaccctgaatacgccgccgccgcgaaaaacgcgcagataaaagaaatttcggcgaaggattattacggcgagggctacgccgacgtttcgcgccgggttccgtcagtaaagcaagccgaaaaagtgttggggtggaaaccttcgaccgacttgcgcaccgctctgaaactcactctcgactaccatcttttgaagaaggactacgaactcgccgaataattccgcgggttcagccgtatgaaaatagcaataaaaatagacgtcgacacctatcgcgggacgcgcgaaggggttcctgcgcttgcggcgctgctaaaaaagcattcggtgcccgcaacctttctgttttcgtttgggccggacaacaccggcaaggcgctgcgccggattttccgcaagggatttttaaagaaatgcctcaggtcgaacgtagcggggaactacggcataaagacgcttatgtacggcacgctgctgcccgcgccaaaaatcgcgaggctgtgcgccgataccatgcgcgccgttgccaaagacggctttgaatgcggcatacactgctgggaccactttaaatggcaggactacctgttcactatgcgcgacaccgaagttgcggctgaattttcaaacgccctcgccgaatttgagaaagtgtttgggagtgttgcgcgctgctgcggagctcctggctggcagatatcgcccgccgccctcgcattggaggattccgccgggctgctgtacgcgtcggactctcgcggagagtcggcattcattcccaaaatgggagggaaaactttcaagaccattcaaattccctcgacacttccaacgctcgacgagatactcggcattgtgaaaataggcgatgtttcgcaaatgcacttcgacaaaatggcatcgcaggaatactccgtgatgacggcgcacgcggagcttgaaggaatggcgtatttggaatggttcgacggatttttgtcggaggcgaagaagcgcggagccgaattttactcgctcgaaaagcgcgccgaagagctttccgcgaaccgcgccgccctgcccgtttgcgagattgagatgtcgccgttccccgggaggagcggacttctcgctgtccagaaatcttaatattcaactctaaaaaaaccgatgggaaaaataaagacggcattgtgcatttttgcggcatgcgcctgcgcctttgcagcggattcagacatagcgaagataaaggaaaaagccgacgccggagacgcgcaatcgcagcttgcgataggcgtgctctactcgtccggcaaaggcggagttcaaaagaatcccgcgcttgcgcttgaatacataaaggcggcggcggaaaagaactttgcgccggcgcagacatttttgggctgcgcgtacgccgagggcaaaatagtcccgcgcaatatgcaggaggcaatacggtggagagagcttggcgcgcaaaacgggacaatcgccgacaaatggtcgcttggcaatgcgtttttatacggatatctcgtcccgaaagaccagataaaggcggtatactggattacccaggcggcggacaagggacaccctgaggcaattttaaaacttgtcgagatttataagaatctccaaaagcctgaagatgagaaaaaatgggcgaggaaatttgccgagcttgaaatagaggcggcaaagaaggggaatatcgaggcaatgacgtccgtcgcgaaccagtacatgagcggcaaaggcgggctggagcgcaacaggccgcaggcgatattctggtacaagaaagctgctgacatgggcggcaaagaggcaatggagaaagtcgcccaaatgtacgcgaagggaaggtttctgcccaaaaagcccgaaaaggcgcaggaatattttgagaaactcgccgctctggacaacgcctactgctttaaaatttcctcattttacgccgacggatcaaacggatttccgcgcgacgacgatatgtcaacaaaatggctcgaacgcggtgcgcaaaacgcggacgactccaccaaactatacgttgcctggcgattctggaagggatttgagaccgccaagaacccaacgaaggcaatatactggtgctcgaaagtgctcgagacggcgccgaaaggcgaggaggcgcaacgcgcgatattcggcgcgttcagagtcgccgaaagaatgatttcagatatatccaacaatctgcctccgccggagaatttcgggaaatattattcgcaatattcgagcaaatttgcccaataggctgaattaagtcagcataatccgcattggcggatgagcggggagcggacaacgttttttatcatatcgcgcaaaatgaaaactcagaagatattcacctttttctgggcatcgttggccgccgcattttttacgggcgccgatgccggaaccgtcgtaaatggattcgccgacaggggaaattttaccgcaatggattcctctcttgtgaaatcgcccgaaggaggcggcgaaaagatatttgttaattcgctaaaattaaaggccggcgaaacaaagagagttttctccacccgaagcggattattgaaggcgggcaaaaagtacacagcaaagctaaggtataaaatgcgctcgcccgaccctgccgcacttgcgaacttaaagctccacgcgcctggcgcacaacgccacctcggggcgtcggtgggcgagtcgtttgtaaaaatgccgtttgaagttccggcgaacaacgcgaaagcgtctgtgactctgaatgtgacgggccctgtcgaggcgtcaataagcgcgtttgagatagaggacggcgacggtgaaagttttataagcgcgaagtcgagcggaggggaatttaagggaaacctcgaaaaacttcccacgggctcgcctgaattttcggtggagctcccgaaagacgggggaataacagtaaacgccgccgactacggaatgaacgaacaaaatgaggattgcgcatccgccctaaacaaggcgatagccgcatgcagggaaaagaaggcctctaagctcattattcccaaaggcacatataaatttttcgggaaaacccctataactgttaaaaatttcacggatttcacaatagacggcaacggttcaacattcatataccgccgcgacggtggcagcgtaaatatgatggtaatagactgcctcaggacggaagtgcgcaatttaagtatggactgggactggcagactgagccgctcgccgcaatagtaaaagccgttggcgcaaagagcgacggaaacaatagctatgcggattttgaaatattggaatacgacaaatatccgctgtacgggaaaaacgtgcgcatagccaactttcagccctgggacggaaaagcgcgcatgataggaatcgaaaatgtaaacggcataggctttggatttcagcccgacgataaggggccaaaagtcgaatggctctcgccgaataaaatccgcgtgttttcaaaacactgtgaatattgcgcaagaaacaatataggcaggctctaccgcatgcagcactactactatggaatgggcggattttaccttagagataacaagcatttcacgatgcgcaatgtgaatatatactcctgcaaagggcacggcatattgtgcgacgggctcgaatactggcagcttttaaacgtaaacatatacccgcgcaccggcgacccgaagcgcgttataagcacgactgccgaccatttgcactttgcgcgttcgaggggatactttaaaatggaagggtgcaaatttgggcttggctccgacgactgcatgaatatacacgatattacatcgttcggagtgaaaatcgggccgcgcgaattgttgataaaaacaaacagagtgtcagtgcgcaagggtgacattgtcgagctgcggcacggggatttttcgccgagcggctacaagtcggaaatacttaaaattgagaaggacaaagacggaaaaacgcatataagtttccgcgacgaaattccggagcaaaaattcgacggctttgttcttttcagccgcaatttcaatagttccaacgcaataatacgcaactgcaaatttatcggcaaccgcgcgcgcgggctattgattttagcaagcaatataacgatagaaaacaccgaattttaccacaacgaaatgggggcaataaaattcgagacaggctatacattcaatctgtggtgcgaaggcctgggtgtaaaaaatgttgtggtgcgcaactgcgtattcgacagcgccaactacacgggaagaaaatatcaaggcaaaggccgcgacatattctttggcgtctatatgcgcaacgacccatcgtacgagcaaacccgctacccaataatttccgacatactatttgaaaacaatacttttaaaaactcttttgggcttgtcgcgctaatatcttcgagcggaaacataacgtttagaaacaacacatttgaaaatactttaaagagagccgcggagtatccgtacaggggcgcattttatataaataattcctcagacataaaaataataaacaacacttggaaagcgtcgccgctcgttcccaaccccggtgtttactacgacgccgatacggtgagcgggcttgttgtcgagggcaataaagtagtctcaggcgccggagaaaacagcaattagcttcttcgctttggggcgaaattttaggcagaaggaacgaatgctgcagtgcgaatgaaaagttttcgcggcagccgcattttttgcgttttccagggcaatagtaaggcgaatattgagagtttgtcagccggcaattccgcatgcgcgctccgtttaggcaatcatgcaagaccctttgcggagaattacaaaaaaatttaaagacggcaagcgacggggaaaatttaagtcgagaaaaattcaaaatgcgcgaatgcaatttgcctaagcttattaagtaaaataactccataattgaaagaaaagacttctaaaaaaatcgcattttaaataggtatgccgattttattgcgcttaataaaagtattgcaaaacgggagagtttcaaaggcttgaattgagacaaagaacatcttcacaagcaggggaaatttgaaaaaaacagttcccgcgcattcacactctataaaaaaagcttcggggaaaccccaaagcttttttgcgtaaaaattttaaatattttttaggattattttctgcggcgcactgcgaaagcgagagctgcaagcccaaacagggcggcaatagaagcaggttcaggaacattcgtaaacgtcacggaaagtgtgttgtcgttccatgaaaagtcggcgagagcacctgtgagatctgttgcaataaagtctacgtttgcgtcgccattcaaagtagtaagtccgccgaaagacgatataagatcaaaactcttccctatatatttcgaaccgtccaagccgtcaaaatcaatctcgatggggccttcgcccattttgaataactcgccggaaagctcaattttatgtccgttgtccaaagcagttttatcgaatataagcccgcctgcattccattctatatttgcagccgaaagattgccgactgtcatgctaaaatatccgccgtcgagcactagatctccgtctaatgaagcagccattcctattacgccctctgagacactaacgctcgtaagctcaacgcgggttttacttgtaaaatattgcgagcccgcacctgttttagtcatattgattgttttatttgctacaggattgctgtcccaataattacgcttattagagatttctccgctgtatgtgtaggattgcccttcagcaacattgattgtaagataggcatttgcaacagatgtattgtttttaacctgcaaatttccgccattaccggagatgcctccgacagtagtataatagtctccggaagaaccagttaagacaacacttccgcctccgttaaaatacattgcgccgcttaagacgagattttgattttcagcagttccagtgccagtgtattcgagcccgcaattgctgcctgcgccaaaggatatggaagtggcttttatatagcgggcagaaataattgcgacagttgtaatttccccttttatatttagggaaacattgcccatagagaaatttccgttgtatccgcttatagtaaatgagtcggcattaattgtaccgctgcccgtaaagcccgatgtagcccaaccggcaggattgtgattaaagtagagatcgcctactgtgatgtcgttttccagctcaacttttccggatttattttcgccgtaattgatactgacggaatcagcgcttccgggcaatgagcctgtcgaccagttgccgacagtgttccatttgttgtcaaccgcgccgttaaaagtattatcgtaggtctgggaattggcagcagcaaccattgccaatgatactaataaaaaaccgcctaactttttcatatcaattttatttaattttgtaaatttttataactcgcgggttaaaagagtcaacagaataagaatgcctttttaatccccacaatgagctatgattatattctcttttagatattttatcggcttttgttagaaaaataaaaaaatgcgcccgaaaaaactttttcttcgcgcgcattttgaagattgcggcagattgaccccttttagtcgcagatgccaaaaattattcccactcgatagtggccggcggcttcgaggaaatgtcaaggcacaccctgttgacgccctttacttcgtttattatacggtttgatattttagccaacagttcgtgcggaatgtgcgcccagtcggcagtcattgcgtcctggctttcgacaattcttagggcaataacattgtcgtaagtgcgttcgtcgcccatgactccaaccgttttgacgggcaggaatacggcgaaagcctgccaaaccttgtcgtaatatccgctcgagcgcatttcctccataagcacagcatcggcctcgcgaagtacgtcaaggcgctttttggtaatatcgcccacaacgcgcacgccgagccccggtcccgggaacgggtggcgccaaaggacttcgtgggcaagacccagctcggcgccgagcgcgcgcacctcgtctttaaagagttcgcgcaagggttcgagcaatttaagcttcatgtgcttggggagcccgcctacgttgtggtggcttttaatcagcgacgcgggatttccggcaatcggaacgctttcgataacgtccggatatagtgttccttgcgcgagaaaatctacttggcctatggattttacagttttatcgaacacttcgacaaaagtctttccaataattttgcgctttctctcggggtctttgacaccggcgaggcgttggaggaataacttttctgcgcgcactgttttcatgcgcattttaaagttgtccttaaagagcttttccactttaacgcgctcgtctttgcgcaacaggccgttatcgacaaaaacgcatgtgagctggtcgccgatagccctgtgtatgagagccgccgcaaccgacgagtcaacgccgccgctgaggccgagaataactttcttatcgccgacctgcctgcggatattttcgacagccctttcaacatagtccgacattttccagtcgcctgtgcagccgcagattttatatagaaaatttttgatgatttctatgccgcgcggagtatggacgacttccgggtggaactgcatgccgtagaagcgcctgttttcgtcttctatgagcgcgtatgccgaattttctgtaatgccgatagccttaaagcccttcggaagtttttcaatcttatcgccgtgggagttccaaacctgaatgggggaagtaatgccatcgaggagctttccgccgcctttgaatgacagagtgccaaagccgtattcgcgctgtttgcttgaaacgatttgtccgccgagcattttgcccattagctgcaatccgtagcatattcccaatacggggacaccgagctcgaagattttggggtccggcctcggagagccttttgataggacgctcgccggcccgcccgataggataattccgctaatattctgtttttttaagacggaggcctttgtattgaaaggcaatatttccgaatagacgctgcactcgcgaatacggcgggcaatgacctgcgtatattgcgaaccgaaatctaaaactactattttttgtgtcatacgcgtgccttgtatttaattttgtgttggcgtgtttagtggtttggcagtgtggttaaaatttcaattttgtgtttttatatccgcatttgggacatacggcggtgaggtccgaggcggacgaagtatagacgcagtcgcagcgcaggcaatggaaggttgacgactttgcgaggagttcctttgtgtgtttgcggcttcttgtgtgaatccacgcacccgcgcccgcagcaacgagtgccgcggtgattgcgaatgcgaaaaaagccgataaacccatagtttggaaaaaaacgcaaacgcgcccgtttagagcgagggcgcgttgcaaaacagttcagatttgcaaagaactcttattccttcttttcggcagcttcatttgccgtttccgccggctgtgtttcggcgggggcttcagcggctgcttcgggcttttcgccttccgcctttttagcggcggcttttttagctgtctttttcttggcagccttcttggcgggagccttttgcttcttgtagccttcgtcgtcggcttcgatgagctctataatcgccatatttgcggcgtctccgacgcgcggtacgagcttgtagatgcgggtgtatccaccgctgcgtttgaggaatttctgaaccttgtcggcgaagaggaagtgcacggcgctttcgtcgcggactttcgcgagcgcgaggcggcggaagtggagcttcttggcggtatcgtccgtagcggcagccttcttggccaaagtgattatcttttcggcaaagggacgcaacgctttggcatagccgagggttgtctgaattctatcgtggcggaagagagccgctgaaagcgacgccattatcgcttggcggtgctcttttttaacgcccaactggtgtctgtgtttaaggtgacgcatttgaattaattttctgtcttaaaattatagatttgtggagtcgatgaggcgctcgtcgattttcatgccgagcgacagaccgagctgttcgagcttgcccttgatttcgttgagggattttttgccgaagttgcggtatttcagcatttcctgttccgatttcatagccaattcgccgacagttgtaatgttggcgttgttgaggcaatttgcggcgcgaacggagagttcgatttcattgacgctcatgttgaggagctttctgagcctattttgctcttcgcttacctctttgccgaccgtctcgaattcgatttcctgatcgttaaccttgtcgaacacatcgatgtggtgctttaagattacagctgcgtccttcaaggcttcgtcaggagtgattctgccatcggtccagatttcgagggtgagtttgtcaaaatcggtcatttggccaacgcgcgttgcatcgaccgagtattttacgagctcaatggggctgaaaagcgagtctatcgcaatgacccctatcggctggtcctcatacttgttttcgtcggccgggcgccagccgcgaccgcacgatatttcgacttccgccacgaatctgcgctttgtgtcgagcgtgcagattacctgttcgggattgacaatctgaatgtcggcgtcgggctgaatatcggcggcagtgacagtcccctgcttgtcaacgtcaatcattaggcgcttattttcgcgcagggagcttttaattttaatctttttcagattgaggacgatgtctgtgacgtcctctacaacgccgtcgatgctctggaactcgtgatcgacaccttcgatgcgaatcgagctaatcgccgcaccttcgatggagcttagcaatacgcgtcttagcgcattgccgacggtgtggccgaaacccgtttcaaagggctctgccacatactttgcataagtgcttgttgcgctcccttcgtcttttacaagacgcttggggagttcaaattttccgaggcgtttggccattgctttctccgttttttaagttgatgattagcgagagtagaattcgacgatgagctgatcgtttatcgtcttatccatttcgtcgcggatgggcaagcggctgattgtgccgcggaaggcgtcctcaactctttcgatccaagcgggagtcgggcggagctgcgattcgtcgagagcgcgctgggcgagctggcgggaggaagtgcggtcgcgcacttctacgacgtcgccgggcttgcatgcgtagcttgcgatatcgacttttttgccgttgacctgaacgtgcccgtgtgtgacaaactggcgggcagccttgcgagtgcgtgcaaagccgagcgagtaaatcacattgtcaaggcgcgtttcgagcatctgcataaatatttcgccggtgacgccgcgcactttcttggcgcgttcgaatgtaaggcggaactgcttttcgctcagaccgaacatgaagcgcaacttctgcttttcattgaggcccatcgaatagtcggtgacgcgcctgcgaagatgcgggccgtgttgtccgggaatgtaaggtttcttttgcatcgccttgttttcggggaagagagccattccgaagcggcgattgattttagttgtcggtcctgtataacgagacatttctaaattctcctatctataataaattatacgcggcggcgttttggtgcgcggcaaccgttgtgcggaacgggagtgacgtcttcgatggacgttacgatgaacccgagcgcttggagggagcgtattgcggagtcgcggcccattccggggccctttacgctgacagcaacttccttcatgccatggctcattgcgactttgccggcgtcctgggtgacgacctgcgccgcataagcagtgctcttgcgggaaccgcggaagctcattttgcctgcgctcgaccagctaatgacattgccggcgggatcggtgaaagagactttcgtgttgttgaaagttgcgttgatgtggcagacgccggaatagacgtttttgctgcccttagccttgcgaactttaatttctccgacatcttcggaaaggaggtcggaggcggttggctgagaaggctttgcttcgacagcggcttccggctgggcggcggctttgttttctacggcttccgccgcttcttgtttcttttgttcttcgctcatttaaatgtccttacttcttggttacgacacctacggttttgcgcgcgcccttgcgtgtgcgggcattcgtgctggttctctgtccgcgcacgggcaatccctttgcatggcgcaagccgcggtaggattttattgcggcgaggcgcttcagattgcttaccacttcgcggcgaagatcgccctccaccttaaactggtgcttggcgattgcattcataatcttgttgatatgctcctccgtaagttcgttggcgcgcatggattcgggaattgagcattcttcgcagatgagcttagagcgcgtcggaccgataccatatatgtatctgagcgcgtattctacgcgcttgttgttgggaatatctactccgagtaatcttggcatattttttccgttgtttaaaaagacgttaaataatgaatatttttttttatttgaaaagttttttttgtcggtttttcaaaaaataacaattctccccgaaaagcaatcaagcccgcggcggcggaagctattccgaagccggtagggtcaggatctcgggatccgattccgtaacgagcaccgtatgttcaatatggcagctcggttttccatcggctgtgtaaaccgtccagccgtcgtctccgacaaatatttcgggattgcccatggttatcatgggttctatcgcaagagtcatgcctggccgcaagagcggtccagtacccgcgcgtccgtaattcggaacttcgggttcttcgtgcatgtttctgccgactccgtgccccgtgaactctctcacgacgccaaagccgagcgattcaacgtatttttgtatcgccgcagatatgtcgcccacgcggtttccggggcgcgccatatcaattcccagtctcagagattcggcggtcgcctcaacgagcttccgcacctcgggggtaggttcccctatataaacagtgcgggtgttgtcgccgacgaacccctggtaaatcgtcgcgcagtctatgcttactatgtccgagtctttcagaatcacgtctttcgaggcgattccgtgaatgacctggtcgtttacggatatgcaaacatgacatggatattttagagatccgcatttgtatttatacgcagcgctgcggcaatggtattgatccatcagccgtttggcggcttcgtttaagtcccaagtggatactcccgcgacggcaagcttcgatattttatcgagaaccgtcgccgctatctcgcaagacttgcgcataacccgcaagtctctttcggatttaataggtatcatagcgcgatgactttttgccggattattttaaagaacaaatttgcaactggctccccaagccctttcggacttaggcccatttgcgaatgacccatgccgcaagcccgatgaaaaatattatcaacaggggcgtccatagggcccaaaggtttttgatttcgctcgtgtcgaggatttggcgagtctggccgacgctgcggccgcgaatgcgcccctttttgaggaaaccgtcatagtgacgttgtaatagataagtctcgacctgtctcattgtatcgagagacacgccgacggcgatgagcgcacctgtgccgccgaagaagtttgcaattttcgggggaataccgaggtacgacatcaaaagattggggattaccgcgatgattacgaggaatagcgcgcccgcaaaagtcaggcgggtcattacgtagtcgaggaagcgcgcggtgggctcgccagggcggacgcccgggatatatccgccgttgcgtttgagttcgtcggatatttggaggggcttaaacattatggaaacccagaaatagctaaacgcgaaaatcagcgagccataaattacattgtaccaacctatgccaaactgcccgaaaatttgttgtgggaaaagcagaagagcggaagcgaagatgattggcataacgcccgcatagttgactttaagcggcagataagagctttgcccgcccataatttttctgccgacaaccctctttgcatactggactgggacttttctgacagcctgcaaaatcataatgatgctcgccgtaacgatgcagaggaatgcgagcatcaatacggcctgcggaacgcccatcgaggcgctttcggcgccgaccgcgcgattgaatacaagctggtacgcttgggcgacagcccccggtagcgagtctataataccgacggtaatgattattgagacgccgtttccgataccgcgctgggtaatctgctctccaagccaagttagaatcatacaaccggttgttagcaatattacgctgacaatgaaaaataccggtatatttccggcaattatgatattgccgaattgccctttgtcaaagccctggaacatagtctccgggctgtaaacgagagcgtatgttatcatcgtgccctgaattagggcgattacgattgttagatagcgggtgtattgggcgattttctgccttcccgagtcaccttcctgcattagtctggcaaggctcggcattacagcgcccataagttgtaggataatcgaggcgctgatgtaaggcattataccaagcgcgaataccgcgccgttaaccatagcgccgccagtgaacatgttgtacagccccgccaagccgccgccgtccgacgaggacgacgcatagtaggcttggagcggtgccgggtcgactcccgggaggggaatgcctgctcccactcgagcgataaaaattagtccgagcgtcaaaattattctttgacgcagttccggaattttaaagcaatttgtgaaagcgctaaacatgacttccctgtattatacccttgcgtttttttagtctgcggattattccgcggccgaatttaggactgccttgccgcctgcggcttcgattttctcaacggcgctcttagagaatttgtcggcttttacgacaaccttttttgtgagcttgccgttgccgagaatcttgacgagcggatccgaggcgcgtacgagccccgcaattacgagggagtcgcgcgtgatttcttcgagcccgagattttcgagagcgcctacatttacgacagagtattccgtggtaaatttatagttgttgaagcctctctgcgggagcttgcggtaaaggggcatctggccgccttcaaaaccgggcctgacgtggccgccggagcgcgctttagcgcccttttcgcccctgcccgaggttttgccgtgtccgctgccaacgccgcagccgagacgtttgtgggcgtgctttgcgcccttgggatttgaaagattgtggagtttcataatcagaacttatttgcccctgagggaattgatagtttcagccgtgcggaggcgatagagggcgttgagagtcgcattgaccatagccatatcgttgttagagccaagcgatttgctgaggacgtccttgatgccgaccgcttcgagcaccgcgcggacaccgccgccagcgataacgcccgtaccgaggcttgcgggacggagcattacaatgccgccgtcaaattcgccaaccacttcgtgcgggattgtcgtgtctttgaggctgattgtcttcatgcatttgcgagctctgtcggacgctttcttgatagcgtccggaacttccttcgccttgccatagccgagaccgattttgcccgcgccgtcgccgaggacgacgagcgccgagaatgtaaagcggcgtccgccttttacgactttcgcgcaacggttgatgtgcacgactttttcgataagctccggtccggcgtctttttctgcttcggattttttatttttaaattctctgctcattatttaaacgtgttagaagtttatgcccgcggcgcggacagcgtcggcaaagctctttacgcagccgtgataagtgcgcgagcctctgtcgaatactactgcggaaacgcctgccgccttgagtttgtctccgaatttcgcaccgagcgtctgcgctcccgcgacattggggagaattttctcgccgttgagttcctttgaagtcgtgcaaagggcgacgacggtctttccgacagtgtcgtctatgcactgggcatatatatgcttgttcgagaagcatacggagagcctagggcgctccggagtgccggagaccttgttgcggacgcgccagcggcgtttttgtgcaagttgttttttcttcaaaactttcatatctataacctttcagagccgcgcaactacgcggttttcttgccctccttgcggcggacgtattctccgtggattctgacgcctttgcccttgtagggttcaacgggatagaagcgctttatgtttgccgaaacttggcccacgagctgtttgtcagctcccgaaacggttaagagcgggtttttgtcgttagtttcgccgatgacaatggttatgccgtccggaacttcgagaatgcacggatgcgcatatccgagcgcgagagtcagcgtcttgcctttgaggtcggccttaaagccgacgcccttgatttcgagaaccttagagaagccctcggcggcgccttttaccattcccgcgataatgcttcttgccgtgccgaacattgcgtctgagaaacgcgagtcggtagccgggctgacgcggatttcatcgccttcaagtactatttttatggcgtttttgtcaaaagagtgggcgactttgcccttgggtccttcgacgctgacattgttgtcggcgacggacgccttaacgcctgatggaattttaacagggagtttacctattctgctcatgacgcctccttaccagactttgcagattatttcgccgccgactttcttagcacggcattcagaatctttgagaatgcccttggaagtcgtgaggattgaaatgcccatgccgttgaggactctggggatttcgcgatattggaaataagtgcggcaaccgggtgtgctgacgcggcttatatttgtcagagctggaacgccgccgacatatttcaaaacgatgttgatggatttctccgccttttcgcctgtcacttcataagatgtgatgtagccttcgtccttcaaaatcgaggcaatgccttcgcgcaatttggagtactgggccttgcaggattcttttccggccttgctggcgttgcggataatggtgagaaagtctccgatgctatcgtgagtagccataataatgttcctttcgccttaccaggaggatttggtgacaccgggaagcttgccgtcgagggcgagttcgcggaaggtgatgcgtgataaaccgaatttgcggatgaaaccgcgcgggcggcctgttatagagcagcggttgcggatgcggattttggacgcgttgcgcggaatgctgcaaagtttgcgctgtgcggcaaagaattcttcgtcggatacgctgggatcggcgagcacttttttgagttccgcctttttggctgcgtatttctcaactaatttttgacgctttaaattgcgttgtatcgatgattttttagccatggtaatttattttttcgtgttggcggtcgtcgtcggtttgcggaagggcatgccgaggagtttgagcagttccctgcccgagttgtcgtcggaagcggtcgtcacgatggtgatgtccatgccgatgttcttgcggcccggatcgactgtcacttcggggaaaatcgtgtggtctgcaatgccgtagttatagttgcctgcgccgtccaatttggtcggcacgccgcggaagtcgcggattgaggggagaaccacggatataaatttgtagaggaagtcccacatattggcgccgcggagggtgaccttcacgccgttgggctggccttcgcgaagtttaaaattcgcgatgctcttgctggccttcgtgacgacgggctgctgccccgtaatcttggcgacctccttgactacttcctgaacccattccttcggcatttcgctgcgtatgccggagcttacgacgattttttcgaggttgggcaccagatggggattgtcgattccgagattctttttgagttcgggaacgaccttttcctgatatatttttttaagtgctggaatgctcattgttgttatttatttagtctccgcttacgcctttgactttttggagtcgtagcgcccggccgacattacgtttgaaatgtggatagatgcctcgcgttcgacgatggctccgtcgggatttttctggctcttgcgctcatggaacttgcggatatttacgccttccacaatgacacgccccttggacggcataaccgccaagaccttgccgcgctttcctttggccgaaccggaaattacgaccacctcttcgccttttttgactgactgcttcatattagagtacctccggtgcgagggaaatgattttcatgaaatttttggagcgcaattcgcgggcgacagggccgaaaatgcgcgtgcccttcgggttgcccgagccgtcgagaattacgaccgcgttggagtcgaagcgcagatacgagccgtcgctgcggcgtatcggagcctttgtcctgacgacaaccgctttcgctaccgtaccctttttgacggcggcgtcgggagtcgaagactttaccgcgacaacgattacatcgccgacatgcgcgattctcgtgcgctggccgaggcggcgtatcatggaaacttcttttgcgccggtgttgtcggcgactacaagctttgtttgcatctgtatcatgatcgtgacctccttattcagcgtttactacgggagccttttcgacgatgcggataacgcggaatctcttgagcttgctgagggggcgcgtttccatgacctctactttgtctccgagggcgcattcgcctttttcgtcgtggcaatgaattaccgtcttgcggcggatttctttgccgtaaaggggatgcggaaccttgtaaaaatatgtgagttttatgctcttttcacccgagagcgacgttacgacgcccacgatggttttgcgtgactgtcttgatttttcggacattttttagcctttacttctgtgtcttgacggtttcaaaacgggcgatgtcgcggcggagctgccttatgcgcgctgtgttttcgacctgtcccgtgcctttgcgtatgttgagattcaacagttcgtcgcgcatgtcgcggagttttttcgcctgttcttcgggggaaagttctctgatttctttggctttcatctgtgtcaaatctccttatagaatttcgacgccttcgcgtacgataaacttgcatttgaagggaagctttccgtcggcgagcctcatggcttcgcgggccatagaagcgggaacgccggaggcttcgaatagtattgtgccgggcttgatgaccgcgcaccagaattctactgcgcctttacccttacccatacgggtttcagcgggcttcttagtgacgctcttctgggggaatacgcgcatccataccttgccgcggcgcttgaagtgcctgttgattgcgacgcgcgccgcttcgagctgcgcggacgagcatttgccgcgttcggtcgcctggattgcgaaatcgccgaaagcgatggtgtcgccgcccttggccatgccgcggttgcgacccttgtgaaccttgcggtactttgtttttgctggaagaatattagccatggtgtgatttcgctaagattagatgttgtcctccgatttgaggcagagccagcattttacgccgattttgccgtaaacggtattcgcttcggtgaagccgtagtcgatgttttcgcggagggtgtgcaagggtatgcgaccctttctttgccattcggtacgcgcgatttcagcgccgccgagacgtccggaaacttgtagtttcacgccgtcggcgcctgcggacatgcagctggaaatggcctttttaattgcgcggcggaacgacacgcggcgttcaagctgcaaagccacgctctctgccacgagatacgccacgaggtcgggcttcttgatttcttgaatgtcaacgagcacgtctttgccgaggaattttgccaaatcggctttgagcgtttcgagagcggatcccttctgtccgattaccacgccggggcgggctgtatagattttaacgcgtatgcgctgtccggcgcgttcgataaatatgcgcgggacgcttgcagccttcagctttttgttgaggaattcgcgtatgcggtagtcttcgttgacggcttcggcgtagtcgcccttgcctgcgaaccagcgcgattcccaatcgcggcgaaccgcgagacgaaaacctttaggatttactttctgacccatattgttgcctattttaaattatttttcgtcgctgaggataatcaagatatggcttgttctcttcctgatggggtgcgcggagccgcgcgccacagggcggaaacgcctaaatgcaacgccctggttgacaatcgcactcttgattttcaagttggcggccgcaaggccgttgttgttttcggcattcgcaatcgcgcttgcgagggtcttggcgaccaaacgcgcgcttttgcgtggcacgagcttcaatatttccaaagcttcggcggcattcagcccctgaacttcccgtgctatttcgcgcacttttttatcggacatgcgcgcaaactttgttaaagacttaacttccataattgtttcctattgtaaatcgggttgtcttttaatgtaaactttgtctccggacaagaccgcctcgtctgaaaggactttggccaccgaagcgtctcttttcgcttcgaccaccacggcttgggttataaatgcgtcgcttctgtaaacgtagcagacggaacctatcgccaaaccgctcatggagcccgtatttatttttatcagaacggcgtcgccttcggtcttaatttcgcggactgtcgaaggaatgttcgagtaccccgcgagcgaccagtcgggacctgcggccgaagcagtttgcagcgcggcgataactgccgccaaaacaaaaatgcctctgccgaagaacgccatattacatcgtagccttctttgtgtgcggttgatgtcccttaaagaggcgtgtgggcgagaattcgccgagcttgtggccgaccatgttttcagtgacatagacagctacaaatttcctgccattgtggacgttgaagttcaagccgatgaagtcgggagtgattaccgaacgcctcgaccaagtctggattggcttgcgggagttcgtcttctgcgcttcgtcgattttatcttggagactcggatctacaaacggaccttttttaattgaacgtgacatttatctgctccttcgaattacttcttaaattttttgccgttgcggcgtatgagaatcatcgagttggacggcttgctcttgatgcgcgtcgggtagcccttcgcgagctgaccccaaggcgaaacaggatgtccgccgccggaagtgcggccttcgccaccgcccatcgggtggtcgacagggttcatcactacgcctcttactctcgggcgtttacccatccagcggttgcggccggctttaccgaggctctggttgcggtgttcggtgttgcttaccacccctattaccgcgcggcagttcgcgttgattatgcggacttctccgctgggcattttgactgtcgcaagctctccttcaacgccgacgagctgtgcgcctacacccgcgccgcgggctatttgcgcgcccttgccgggctgcatttccacggagtggattctcatcgccggggggattagtttaagcggcaggcaaagtccgaccggaaattcgctctggcgcttgccggttgtgaggattgagtcgccttttttgagtccgtcgggggcgattatgtagcgct

SEQ ID NO: 2664 - DNA, 17733 bp, Unknown
  16S sequences of unknown bacteria
accgtaaactccgccagatagctcccccgaagtgttccatcttcccgtaccatatatttaaagctgatcaggcttgccatggatgcaatcagtgtgccaagtccgccaagatttgttccgataatcagcgcctgatactgatccgtaaaaccagagagcagaatcgctgccggtacattgctcatgacctggctcgcaaataccgcggtcagtacttcccgcccctgcatcgcccgctgtaaaaagctgctgaatgccggaattctccccagattgccgataaaaatgaacagcgccgtaaacgtaccaagcagcgaataatctaccttgcgcaggatctcccgtttccagatcagcccatacaaaagtaccagcacaaacggtatctgccagaccagaatacggccaactgccagaaggctgatcccgaacagcatcccccatgccatcagtgcttttgtatccgttgccatccaacccccgcttgtttcttccggcttccagaccttcccggactctgtattgtcctgccgctcttctgcggactctctttgcatcaaaaagggcagccagatccagagcagcagcaatgccagtgatatcaagctgtacggaagcatcaggcgaaaaaaagagcttatattcattcctgcccttccatacagatacaaattctgtggattgccaatcggtgtgagcatacttcccagattcgccgcgactgtctgcatcacaacgcacttcagcatccatttttttcgatctgcctcagaaaactgcttcatgatgatgagcgccagcggcacaaaagtaatcagcgccacatcattcgtaatcagcattgaaaggaaaaagcaaagcagcacaagaatggtcacaattccaccaacacctgccacatgtgcaagcaacccctttgccatccggtcaaaaaccccgatctgctgcaagcctgccacaatcgtcatcaggcagaacagaattcccagcgtccggaagtcaatataagccagatatcccgcatccggccgcacaaaaaacacagaaagcagtgccagtacgactgcgattgacagcaccgcttcttttttacagaattgaatcatcgatttcatttttctctcatccctccaaattcttgtatggtagccctcctatcggttctacctgaacagtctttgttacagcataccatatccactgaaaaatttccaataagcaaaaagcgctgccgcttcccttccgggtcgccacagcgctcctcttttaattttcttcggaatacccctcgatatcctttctcagcaattccattgttccggcaagatcacgcgcctctatacagcaacagatctctcggtgcggagtgccgtttacggaatcaaccatgctgctccagctattccagcgctgctgcgcgtaggtccgctgcaggatacccatgcagtcctttaaaagtttcatcaacaccttattaccagagaaggatgccagcagaaggtgaaactcctcgttgtcctcccatacctcccagacatccgtgttttgcttggcctctgcctgcttgacctgctttttcagctgatgcagctcctccccggatatgtggtcaaaggaaagcttcagggcctctgtctccaaaagcatccgcatctgcttcgcatcgcgtgcgtccttttctgtcatccgcacgacacgatatccaaaacgcgggacattgatcagcacatcttcactgcaaagcttgatcagcgcctcccgcaccggcgctttactgacaccgagcagctccatgagcttcttctcagtcagtaccatctcttcttctgtcgcatttttgataatcagctccaaaatctgatcatgcacccggtcagtcagggacacctgtcttgccgggataaattctgtcaacacacgattcatactttccccatcctgttctacacggtctcgcatcccatacgaaaaggatgcctttttttcatcataacatgctcatttcattctgtccagcagtgcaagcacatcttcctttgccatgggataaaatgcgccacaggtctgtgtcccatgatttgtcactaaatctgcgatctcctcaaatttctccgtatcaatgccagcctcctttaaggtaagcggcagtcctaccccgtggatcaggtcacgcaatctgcggataccctcaagtgccgtatccttcggattttcaaaattcatctcgacgttccagacacgtaccgcgtattgcacgagcttcggcagacactcttccttgtcgcagagatattccatccacgccggtgtcgaaatcgcaaggcctgcgccgtgtgcaatgtcatagaatccgctgatctgatgctctaatacatgattgaaccagtcctgctcgcgtccgcagccggtcatatcgttctgcgcccaggtaccgcagagcatgatctcagaacgcgctgcgtaatcgtccggatgcgccagtgcgatcggcaggttgtgaatgaccgtcttgatgatcgcctcggtcacgcggtcagtcatctcgacattcggtgtccgggagaaatagcgctccatcgcatgggacatcatatccatgcagccacaggccgtctggtacgacggcagtgtgtaggtcagctccggattcataatggaaaataccggacgcatcagcggtgagccaaagccggtcttcatcgggatcgtctcatcggatacgatacagctgtcgctctcctcacttccggctgccggaagcgtcaggatcgtcgcaaccggaacccgttcggtacccggacgtaccttgcaggaaatcaaatcccacacatccccatcataataaacgccaaagcccatcgacttacacgtatcaatgacactccctccgccgacagccagcagaaaatcgatcttttctttcctgcagatctcgatacccttgcgcacgagcgagacacgcgggtttgggacgacacccggaagctctgtaaaccatagtcccgcatctgtcagagacttcaccacacggtcatacagtccgcttctcttaatcgaagaaccgccatagacaaagagtacgcgggtcgcgccatatgctttcagttcttcgccaaccttcgcctccgttccttttccaaaaatcatcttcgtcgcacactgaaactcaaaatttaccatttctgtcactccttttcttctctcatcctgtcaaatccggcattcgtatgtcatgctgctcatgggtggattcgcgtcactacttgcagaatcacaggatcagtaaaaattctaccgcaaactgaacgcttacaatataatcaattctttcggactcgttgccagatcctcaaatccgtcttcccggaccacgatcatatcctcgatccgcacaccaaagcgtccttttaaataaatgcccggctctactgtgatcacaatgcccggaatcagtttttctgtgcagacctcgttaaagcgcggattctcatgcacctccacaccgacactgtgccccaaaccatgagaaaagcagccacgatatccctgttcataaatataatcccgcgctgccgcatcgacctctttgcagatcgctcccggacggatcttgtcaaatgcgcgtttctgcgcctcttttaccgtctcgtataccttcctctgctcatcggatacatgaccaactgcaacggttcgtgtcatatctgccagataaccgccatacaccgcgccaaaatccatcgtcacaaaatcaccgttccggatcatccgattcgtcgcaaatccatgcggcaatgaactgttctcacctgacgccacgataaagttaaaattccggtcatctgatccaagttgtgtcagcatcacgccgatttcccttgagacatccagctcggtcaatcccggacggataaagccacaaatatgagaaaatacatgatccgtgatctgctgtgccttccgatggcaagcgatctcttcctcatcctcctccatgcggagcgtctcgatcagcttatgcagcttcaaagaaatatcaatctgcaccggatacaataccgtggtcattgctatatgctcttccagcgaagtcagtccggaatgaatgcttaacgtcctcacgccctcttccagcagcaaacctcgaatctgctcatacagtgctgtttcttctattacaatacagttctttaccttcttttcagcatcctcaaaatatcgaaaatctatgataagccacgcatgcttcttcgtgacgactaccgtaccggcagatgaacgcattcccgtcagatagaaccggttcgacggatcacggaaaatcgccgcctccattctatccggcatcgccttttgaagtcgtttaattttatccatctgtccgttcctccctttctcatttgataccaatttccattcacgtcttatcattttacaacgtttcagccattcaccactcactaaggtaagtcaatcctgacagcagcatctcacagttggttcttcaacagctcataatagcacttcgccgcatcctgcacatctttgatatacgccgactcattgtccccgtgcacaccgcgtccctgctccggtgccgcatgcatcggcgaaaagcgcagcacctgatcggtcacatcgagaaaatgtcgggaatctgttccgccgcccagtacgaacggaatgatcggaagacccggatacgtctgctctacgcttcgcttcatcgccagatattcttcggtatccatccgactctctggagccgcatccacgccatccaccagttcacagatcagatcgtggttttccgcgagtgcctgcagcttctttgtcactgcctgctctccttccacggacgctacgcgcacatttgccgcgaggactgcctttttcggcatgacattcatcgccgtaccgccctcgatcatcgtaaatgcgatcgtaccgccgagcaggttacgcgcctccggcgtcagctgataaagtgttggatagggtgcatcctctgccaccgcctttttcagctgttctgccttttcgccctcgctgtaagctgcgattgcttttagcatcgcacggttgccatcgctcagtttccggataaagaggtcttccttctcgacgtcatgtatcagctctgccagacgcacgatcgccgaatttggctgcgggttcgccgcatggccgccggaagaaaacgcggtgaaacgatattccagcgagcctttttccgagattccgaacagcgccgcacggccatcgaccaatcccataaaattctcacagatcgtaccgccctcatcgaataccattgcaaaatggatgcccatttttttcaaccatgccgccgccttggtagtcgtctgaccaccaatttcctcgtcacaggacagatacagccagatctcccgctccggcttccagccctccttcaacagttcatccaatgctgaaagcaacgcacagtgcggtcccttcatatcctgactgcctcgtccccaaatgcagccgtctacaatcgccccggaaaatggcggatacttccacgcagcctcatcgaccggtacgacatccatatgaccggtgaagagcaccggcctctttttcttcggatccgtcccctcaatgcgcagcaacagcgcctcgccgattgcgatccgctccgcacttccaaacaggtgcaaaaactcctgcgccagatattccttatagcgcccgatctcatagagcgcctcattgccttttccgctcaccgtcggtatctgtaccatcccggagagccgttctgccgttcgttcaaacatgacttcctcctgttctgtcagcccttcagtccactgactgcaataccttctacgaagaaccgctgtgcgaagcagtacagtaccagcagcggcagcatggaaatcagtgctccagccagcgccggtccagtctccctgacgccctcgccaacgaacatggccagtccggctgagagtgtacgcatcttcgtagagtttgtcatcatcattgggtaaatcagatcgttccagtttgaagtcaggcagaaaatgaagaatgtcacaaatgccggcttacacagcgggaacatgatcttccagtaaattccaaactcatgcataccatctacacgtgccgcctcttccagttctttcggtaaacccatgtagaacgatttcataaagtacattccataggctgacgcgatacgcggaagaatcagacccacatatgtatttaaaatatggaatatatgtaactccagatacaacggaatcatgatgatctggaacggaatcaacatcgtcagcaatacgatattgaaaataatctcttttcctttaaactccagtcttgcaaatgcatagcctgcaagtgagtccagcatggcagagctgaccgaaacagctcctgcaaaaatgattgtatttttaatataacttgcaagcggaattcttgaccatactttgatatagttcttgatcgtccatgcctttggccaaattgtcggtggccatttgatgatatccttctgaagcttgaaggtactcaaaatcagccacacaaacggaaatacaatcaaaaatagtacaaacagacacaaaactatgcggatcgcgccatatattttcagctttttcttctgtctcattgattcgccctccttacatgttctgtgcagttttacgatccaaataacgcttgaataccagaataatcactgcaattataataaacaattccacacacatcgctgaagcataacccagatcatacggatccgagaaacctctgctgtaaatatactgtaccattgtctcggtcttataaagcggtcctccgccagtcgtgacatatacaacatcaaatacctgaaatgctccgatgatcgtcgtaagcaatgtaaagctgatcgtcggcatcagattcggaatggtaatataaaaaaactgctgaattttatttgcaccgtcaatttccgatgcctcaaaataagtatttggaatatcgttgattccggctaccagaataatgagcgtctttccaaacgctttccatacagaaataaagataatgaccggcatcgcaaaccgctcatcgctgaacaacgcaatcggctcacctgtaaatttactgatgacatacgggatataacctacggtagaatttaacatcagaccgaacagaataccaatggcggtaaaggaacaaagcaccggcacataaaataccgaacggcagagcttgttgaaaaaggtcggcttgtacagccagtatgccagaatcaacgctactaatagctgcaccggcacagaaatgattacatagtaaaacgtatttttaaatgcattccagacacgtgcatccgacagtgtccgtttaaaattgtcaagtccaatcatatccggccacgccagaaagatatccagatttgtcagactgatgataaaggatacgagcagcggtataattgtaaaaataaataataccgatactcccggtaaaatgaacagatatcccactctgtctttattcgtccattttgcaataaaccttttgaccggactgcttttttccatggtaagactcccttctcctgtatgctgatgcaaaatgcctccgggaaggaccggtaatacggctacccggaggcattccttaaatcacatcattccctgatgtctgtttctatctgctcttacttattcagaatatcctgtacaacatcattgtacttatccagcgtctcctgaatgtcagcgcctgcaaagatttcctgcattgccgggtaaagggcatcagatgatatctggcttacgccgtgcttcttctgctcgatgtgtccataagtcagtggctcagaaagtgcggaagtaagcggatcgtctgcaaaattcttctgtgcagaaatcaaatatgccggtgtaccacactcctttgtccactttgtgcagatttcttcagagttccagtagttcacaaatttgtaaaccagttccttgtgctcatcggaagtggtagatggaatagagaagcctaccggaataactgctgcatcctgcttgataccggtgcatgccggaacagcctttacaccaaagttgatctcattctctcttaaaccattgatgatccacggtccgttgatgaactgtccaagctgtccgcaaatataagtattatcatccgtatcctgcggagagcatgcatacagctccttcagagcctcaaatgcctttacattttccgcagaattgaatgctgcctgtgtctcatcctcattggtgtaatgtccaccatatgcatacatggtatactgtgccggaacgttattatcggtcggaatacagaatccatactggttcttacttttatccgtcaaaagcttcgcattttcaatgatctcctcaaaggtctcaggcggattttccggatccagacccgcttcctcatacagatccttgtcccagtagaaataatgggataccatctgcatcgggatacctacgcacagatcatcatagtacaaaagatctacgacgttctgatcgaagtcatccttatttacttctggaagatcatagaaatcacttacatcctggaagctacccgcatttacatacggaacatagtatccggaagagcaaagcacaaagtccggtgcatttcccgctgcgatcgctgctggaagcttctcattaaaagtcgcccacggcattacatccatctcaatcgtgatgttccactcatttgtctcattgaaatcatctacgatctgctgcaaaacttctccatctgtactggtaaatccgttccagaatgtcagggtagtcggctcatattctttctcctctgccgctgcgccaattccggtaagtaaactcatcgtcatcggaattgccaaactaagtgatactacctttctccaattcttcatgtctttcttcctttctttttcttttttatacgcaaggcttctcgtcctttttgtattcccccgccagttgttctgtaaagacttatttttatcttgtgtttgccagttatattctttattgtctgatatatattgatattaattatatattatactttttcttctatatatttaaaattatatcagatacttcttgctgcctctaccacccagcgaatccgctcccagtcgagcttggaatcgatcgtacagtcaccgccgagcatcaggccgatctttccatggttcaggatcaggttctttgtgtactcctgcagctcttctttcgtaccggtgtaaatgatgccctgctgtgtgtgctcatcccagtgcgtctcgaatccgccaaggctcgttctgccatgtacgaagtagcgtcctgcatccagtgacagtccctctacgaataccgcccagttgacaaccttggccgggtaatcttcccagatcgcgagctggttgcggtttcctgcccagccgcacatgtgcagcatattgttgtcggagtagcggttcgcatgctccagtacatacagatcactcggtgtgatcgtcgcacggtactcttccggtgtgaagcggtcatactcaccgccctgtacacagtagtaaactccgtcgcagccagcctctgtaatcagcagctctgccagcagtgcgttggactgtgcaatgacatccagtgctttcatcactgcagtgcggtcggtgcggatatactccatcacctggtcgtcactgataccgatcgcatctgcgccaaaacgcagagaggagaacggtgcaaatacgttatagaatacacagcgctcttttccaatatcgtccacgatcgcttttgcacgctcaacctgctcacgaataaacggatgatctgcggtcagcggcttcagagtcgtccagtcctctgccttctcgatcttcggcaacgggtacggaaagtaattatcgcacatgatctttacaaaatccaaatctgtctcgcgatagtatttcagatgtgcctgaacgcacgcatctccgactgcttcctctccgccaaagtgaaaccagaagcctaccggcacatgatccacttcctttttgttcattgcatttaatactcgggttctcttatccatttttttcatcctcctgttgtgttttatcgcttcgtacaggggattttatgatatcctgcacgaccaattctactgtttttgccttgtgcacttgtaactgtatgtgactgtaaattctctttccattctgagcaccagcctttttatattgcctgcagtcacattcgctatttcatctaaattgcgcttttaacctgtcatgtatttacaatccaattcatttctgtgatgtatttctgtttacatctcaccgacacaccatcatatccagaatcacgcgatccgtatctgccatgccgcggttacccagttctcccagattccggatgctgttttccacatccgctcggacaattccgtccagttctccggcacccaaatcccgaagtgccagaagagagcactggtatgcgctggagatgaccgttgcgatcttcaatgcacaccccgcctttgccccgtcacagatgataccggacacatcggcaatcatattgttgatcgcacttcggatctgggaaagtccgccgccctgcagataagtcagtgcgcagccgactccgattgaagaccccataccgcaaccgcacaatggagaaagctttccaataaactgtttcacatgaatcgtaatcagacagctcagtgcaagtgaccgatacaacatttcctcatccgccttcagggaaagaaccgctgcgatcaccggaagcgtcgctgtgattccctgattgccgctgccgcagatcgtcatgactgccttcgtgccgcccgacatccggacatccgccgctgccgccgccgtggcaactatgtagttctgcatgtcatccgctttgttttctgcgcggatactgtcataaatatttttccccacaccgaggccatactgctttgtcaggccttcctgtgagatcgaccagttcatccgaattgcatcatccagaaaataaagcttttcgaccggaatctccgtgatcatctgataaattccatccacgctcagtccactcttgtcgcactctgactcctcgatctccccacagctactgcgatcatagatgtcctgctctccgtgagtgatcttcgtaatattcgtatgactgtcctcaatgatgaccgacgcatgatcgtctgccgtactgagcaacacttcgatataaagcttcttcagcgtatccttctgaatgacctccacacctgcctttgcaaattcctctgcctgatgaatctgctccggtgtcactccatcgagcacctcaaggatcgcatcactgttgcctccaatgattccgagtgctgcagccatctccagtccgaccatcttcgttcccggaatcccgacacccatcgcgttcttcaaaatattccggctgaccagaatctttgcgcgatccggaatcgctcccagcaccgctctcgccttcgctgctgcatatgcaatcgctaccggttccgtacatccaagcgccggcacaagctcctgttttaatatctgaagcatttcttcctgtgtcattctatttctccattcttctgcattcacccgctgctgcttcttctgctgcttttgtcatgcactttttgatcgtatttctttgaccgtatttcagatattatctctgatatttttcttttcttattactaatcatatcagtgatgtcatcaatatacatccatactctgaaatttgcaagtaatttccatgaatttattctattttgtccttttagctaaaagcatacggctgattttgtggagaattgtcaaaacatatgtttctttcctgtcacaccacatgattctccgtgtgtctgaagcatgagaatgctaaacagttccgctaaaaaaagacgggcatcgccaaaccagcgatgcccatctttttttactgtattatctgcccagatgccagatgtcgcggtcatattccgcaatcgtacggtcactggagaaaaatcctgcctttgcaatattgacaaggcacttgcgccgccagccaagcggatcgcaggcgtagtcgccaagcgcctgtcccttgcgcaccacataggcgttaaagtccggcagggtctggaaccaatccttgtggatcagctcattctgcagacgtctgagattttcctcatgccctgcggccagcatctgcggaccggtcaggaaatccacagcacggcgaatgtttggatcaccctcataccactgagaagcaatgtagtccccggcttcatagcgatggatgacctgatcagagctctgaccgaagatatagacattctcctgtccgacctgctggctgatctcgacattcgcgccgtccattgtgccaagcgtcagcgcgccgttaagcataaatttcatgttgccggtacctgatgcttccttggaagcaaggctgatctgctcggacagatcgcacgccgggatcagcttttccgctgctgtcacattgtagttctcaacaaacacgacctgcagccacttggagacctcaggatcctgcgcaatgaccctagataaggtaagcagtgcatgaatgatatccttggcgatgatatacgccggtgccgcctttgcgccgaagatgctgaccagcggtacggcaggcagatgccccgccttgatttcataatactgatgaatcaggtagagcaggttcagctgctgacgcttgtactcatgcagacgtttggactgaatatcaaacactgcctgtgtgtttactgaaacattctgtgtgtgcagcagccagtctgccagtgcctgcttatttgcagtttttacagctgtcagctcattcagcacgtcctcatccctggcaaacgccagcagcttttccagctctgaggcatccttgcgaaaacctgagccgatgtgcttttccagcacctgcgtcaaacgcgggtcacattccagcagccagcggcggaatgtaatgccgttggtcttattgttgaacttttccggatagagcatatagaaaccgtgcagctcggaatttttgaggatctccgtgtgcagtgccgccactccgttggtggagtgagtaaaatggatatccatgtgcgccatatgcacccgtccgtccctgtcgataatcgcaaggctctcgttctcggtgcgggtgcgcgccagctcatccagcttttcaataatcggcatcagctgcggcacaaccacatccagataagcgcgcggccacttttccagtgcctccgccagaatcgtgtggttggtataagcgcaggtcctggtgacgatctcaacagcctcgtcaaacccgatgcccttttcgccgagcagacgaatcagctccggaataaccatactcgggtgcgtatcgttgatctgaatggcagcgtaatccgccaggtcatgataattgcagccgcgcgcagcgcactctgcaaggatcagctgtgcaccggcagaaaccatcagatactgctggtacacgcgcagctgacgtcctgcctcatccgaatcatccgggtagagaaacagggtgaggttcttgtcgatggcggtcttgtcaaaggaaatgccatcatgcacgatactctcgtcaatactgtccagatcaaacagattcagcgtatttgtgcgcgcaccgtagccggtgaccgcaagcttatacagacgggcggtgtactccttaccggccagctgcaccggataggtgatgtccgttttttccgcccagctgtgagctgtaagccacgggtcaggctgctcgttctgaataccgttttcaaaggattggtggaacaggccaaaatgatatcgcagccctactccgtctcccggcaggccgagcgtcgccagtgaatccagaaagcaggctgccagacgccccagaccgccgttgcccagggacggctccggctcgacctcctcgatatccgccaggctcttgccagcagcggcaagggctgcccgggcatcctcatagagtcccagattgataaggttgttggacagcagctttccgatcagaaactcggcactgatataatacagcttgcgccctgtgacaggctgcaccttgtcggcgctcttgtgtcggacgatctccaacaaagccagatacagctcctgatttgtacagtcagacagcggtttgccggtatagccttgcagcatttcggtaaagttcataaataagtcctcctttactgtaacgaccagagtttttcctctgtacctcttcaagaatgcctcggcatccttgtatcatcagatgatgatggggtcaaaaggtctgtgatgattgaatgaccttgaatatcaatagtataccacgcataacgagaaaaaacttgtgcatttaccgcaatatatggtactatcctatcatcaggaggaaaaatccatgaacaatcactcttctttgcaggaaaccaagcaccatggtgcagtgcgctttccgttcaatatttacccctgcaccattcccggggactttcgtcaggtagctgtccactggcaggacagcatggagctgatctatataaagcgcggcagcgggcttgtgcaggcaggtgcacaggtctacccggcgcaaagcggggacatctttgtaatgacgcccggtacgcttcacgcgatacatcaggctgaaaaccgtaccatggaatacgaaaacatcatcttcgatgtggagcttctcggcggcacaggggatctttgcgtagaaaaatacctgcttccgctgcaaagcggacgtctggctctgccaaagcatatcacccccgacgaagcatggtattctcaagccgcctcctgtcttcgggatgccgaggaagccagccgatgcaggcagcccggctatgagcttcgcataaaaggggcactgctgctctttttagcactgctgatcgcgcagagcaaggcgctgcccccagctgaaaaagcaaacacccagcggctgaaaaccgtactgcagtggatctcggctcattacagcgagcctgtctgcgtagcggatgctgccgctctttgccagtgcagcccaaaccacttcatgcgctggttccgacagatgaccggccagacctttatcctgtttttgagggagtatcggctcaacgctgccgccgaggcgcttcacacaacagatgacaccgtcatgagcatcgccgaacaatgcggatttgaaaacctttcctactttaacagagagttcaaggcacatttcggtatgacaccgcgggaatatcgcaggtaagcgatttacgccgcccctgtttctcctgcactctttatggtgtcaggcattctctgtcttttcttttccgaaaaatataaaaataagtgagcttatcagcagcatatacggatacagcagcattggaaggatatcaaatgcactgaccacctcacccaggccggctgcggcagagactgccacaagcatctgcgctccgtaaggtaaaatcccctggaaaacgcaggaaaacgtatcaagaatggaagccgcttttttggagctgataccgtaatcccttgacatttcctttgcgatcggattcgccataacaatggcaaccgtattatttgcagtagcaatatccattaagcctaccagcagacccatgccaagaaggccgccttttcttcccttgaatacttttttgatccaaaatagcaaagcagcaaatccgccatactctttaatcagagcacaaatcgcggctaccagaatggctaccatactggtctcaaacattccggctgcgccggttcccatatttccgatcagatccgtcggcgcgatcattccggtcgcaatcataataattgaaccgcttataatacctgtgatcagtacggaaaatacattgaatccgagaattccgcctatcagaaccagcatatacggaatgatctgtatcaaatcatatttttcttcaatgaagccgccattgtaagccttaaccgacagaacaaacagaatgatcacactggcaatcgctgccggaagtgcaataaaaaagttttctttaaatttatccttcatttcgcagccctgtccgttacacgccgcaatcgttgtgtcggatataaaagacagattatctccgaacatggcgccgctcatgactgaaccgatacagaccggaagtgcgaatccggatacgcttgatactgcaattccaatgggaacgatcagggtgattgttcctactgaggtacccattgcaagagaaacaaaacagcttaccacaaaaagtacaacaaccgcaaactgcggcggtaccagtgacaaaataaaatacgcaacactgttcgcagaggttcttccaacgatacccacaaaaatcccggacagcataaatatgatgatcatggtaataatgttcggatcgctgattccctttcccataagctcaagcttatcattcattttaagctcatggttctgtatacaggcaaccaataatgcgaccaaaaaaatcactacaaccggaatcttataaaatcccatttcgatattcaggccatattcaaacaagataccaagccccagatacaaaaccaaaaatactactataggaagcagtgcttttccatttcttttttccatttttctaaacccccatttttcttctttatcacggtactaatcgtaccattttttcatccttttcactacgatgaatctctcgcacaccatcacgcttcctcttctccgtaatgtttactcaatgagaaccctcttccacatacttctgtgactctgctaacaatcataaaagcctctggatctatatgtctgattaatttctcaacctgcggaagctcacgattagatacaatactcaacacaatctgagtttgtttctgccgatatccgccttcaccatacaacatcgtcacacctctgtctacctgtgcaagaatcgcctgacgtatttcttccacctgactactgataatcttcacttccgtcttggtatttcccatcatcagcactttgtccaacactgtcgtataaatcataactaacaacacaccgtataaaacacgctccggaggattatatacaatctgcagaacaaggatcaacatatcaaatatatttaaactaaccgagactgggattcgaaaatacttattcaacaccaacggcggaatatccattcctcctgtagaagctcccgttcgaatcacaatccccagaccaatccctattccaagtccggcaaatatggtattcagcattggatccgttgtaatcaccagatcaccgaaaatatgattggccgcttccaatgcgattggataagtaaaagaactgataactgtcgtcagtgcaaatttcttgccaagaagcgtccacccaactatcagcattacaatattaaacactaaaacaaacccggaaattgatgctcctgtaaaatgcttcactaccaggccgataccggttgtccctcccgtcatcagattccccggcaaaagaaaaagtttgattacgaaggcatagaaaacatttcccaaaataactgttgcaactgtacctgccctctttaaatatgcttgatccataataacctccttttttctcagtatagcatattataggaagaacatcagattattttcccatttcggaaacttttatt

SEQ ID NO: 2665 - DNA, 5127 bp, Unknown
  16S sequences of unknown bacteria
ctggcggcgggcatcctgctcccgcaggccttcgcgccgctgcggccggcggtgccgacgtttttcgcgatcatgtcgtttcaaagcgcgctcggcatcacgctgcgcggcctgaaagacgccgtggtgcatccgctcgccattgtgctcgcgctcgtgtacgtgcacgtgctgtcgccgctcatcgcgtttctggtgggcacggcgctgttcggcgccgactccgacctcgtcgtgggcatcgtgctcgagtactgcgtgccggtggccacgtcgagcatcatgtgggtggcgatgtatcgcggcaatctcgccatcgcgctcgcgacgctgctcgtgtcggtgttcgcgtcgccgtttgccatcccgctcacgctgcacctgctgttcgggacggtcgtcgaggtcaatgcgctcggcatggtcttggacatgctgtacatggtggtcgtgccgtcggtcgtcggaatcgtcgtcaacgaggcgacgcatgggctggggacgcgcatgctctcggcgtcgcttatgccgcttgcgcgcctcatgctcgtcgttatcatcgcgaccaactcctcggcgatctccgacttcgtgttccacctgacgccgcagctcgcgggcgtgctcgtgttcgtcgggctgttcgcgtcgttcaacttcctcatgggcgcggctctcgcctacgtgttcaggcagaggcgcgagcgtgccgtggcgatgctgttccagtcggggatgcgcaacatctccgccggcgcggtgctcgcgatgcagtactttccgcccgcatcgctgttcgcggtgatggccggcgttctgttccagcaggtgctcgccgcgctcttcggcaaggtggcagacaggctcctctcccgccttcctgcctgagatgcggccgctcccccgattcgtagtgtgaaaaatgttgaatacgtgttactcgggacgtagaatgcaccaatcggtattacgaatttgaggagagtaacatggctttttcgcgcagggagttcttgaagatcgcgggcgcgagcgccgccgccctctcgtttggcggggtgctgagtgcgtgctcgaatgggggttcgtctgcgggcccttccgacacgaatggcgtcgtcgtcgccatgaccagagaaagcgagcccgaagcgggcttcgaccccttctactcgtggggctgcggcgagcacgtgcacgagccgctgctgcagtccacgctcgtgaccaccgacaccgacctcaacttcaaaaacgacctcgcgacggcttattcgtgcagctccgatggcctgacctggtcgtttgacatccgcgacgacgtcaagttctccgacgggcagcccctcacggcgcaagacgtcgccttcaccatcaacggcatcaagtccttcgagggctccgagctcgacctgagctacgtcgacaaggccaccgccacgagcgcgacgcacgtcgacatcatgctcaacaagcccttcaacgcgctgctctacacgctcgccgtcgtgggcatcgtgcccgagcatgcctacgacgccacttcctacggggcaaaccccatcgggtcgggacgctacgtgctcgagcagtgggacaaggggcagcaggtcatcttcagggcgaaccccgactactacggcgatgcccccaagatggagcgcctcacggtgctgttcatggacgaggatgccgcgcttgccgccgtgcagtcgggaagcgtcgacatcgcgtacacgaccgcgacgctcgccgaccagtcgcccaagggctacgagctgctgagctgcgcgaccgtcgactgccgcggcatctcgttgcccactatcaagcccggagcggaaaagaccggcaccgacggggcgtttcccgcgggcaacgcgctcacgtgccacgaagaggtccgcaaggcaatcaactgcgccatcgaccgccaaaagctcgtggacaacgtcttgaacggccacgggaccgtcgcctacagcgtctgcgacgcgctgccgtggggcagcgaggacatgaaggtcgccaccgatctcgaggcggcggccaagttcatgaccgatgccggctgggagaagggcgccgacggtatctacgcgaagggcggcgagcgcgcctcgctcgagctcttctacgcgtcgagcgattccgtgcgccaggccatcgccaacgagttcatgaaccagatgggcgagttcggcatcgaggtcaaggtcacgggctcgtcgtggacgaccgatgcctccggcctgtacgcccaccagtacagcgacccgatcgtgtgggggtggggcgccaacagccccacgcagctctacaacctgacgtattccacgagtacgggcaactacgcctgctacgagaacaagacggtcgatgcgcacctggacgcggcgcttgccaagacgaaggtcgaggactcgttcgacgagtggaagaaggcccagtgggatggcgcgcagggcgtggccccgcagggcgccgcgtcgtgggtctggctcgcgaacgtcgaccacctctacttcaagcgctcggggctgaacgtggccgagcagaagccgcatcctcacgggcacggctggtcgctcgtcaacaacgtcgaccagtggacgtggtaggctggaaactcgtctttcagacggttcggtccggcttgctggggaagggcatatggcacaggtcatcggcaaaaatctgctcaagttcgtcgtgctcatgttcgccgtgagcgtcgtgacgtttcttctcgtgggcatctcgcccatcgacccggtgcaggcaaacgtcgggcaggccgcctacgcggggctgagccccgagaagaaggctgacctcgcggcgtactgggggagcaacgtgccggtttggcagcgctacctcaactggcttttcgccgcagcgcacggggattttggcgtctcgctcaggttcaacgcgccggtgacggaggtgctggcgacgcgctcgctcaacacgctcgtgctcatgctcgtcgcctgggtactcagcggcgtcatcggctttgcgatgggggtcatcgccggcgttaggcagggctcggcgttcgacaagttcgtgaggggctactgcttcgtgctcgcgtccactccgacgttttggctcgggctcgtcatgctgatagtgttctcggtctggctcggctggtttccgtttggcttctcgatgcccatcggcaagagcgctgccgacgtcacgatcttcgactcggcctaccatctcgtcctgcccgcgctcacgctgtcggtcgtgggcgtggcgaacatcgcgctgcacacgcgcgagaagaccatcgacgtcatggaaagcgactacatccgcttcgcgcaggcgcgcggtatgagcaggggcgaggcggcacgcgtgcacggcctgcgcaacctgctgctgccggcgatcacgctgcagttcgcgtccgtgtccgagatcttcggcggctcggtgctcgtcgagcaggtcttctcgtatcccgggctcgggcaggcggccgtcaccgccggcacgggcggggatgcggcgctgctcgtcggcatcgcgctcgtatccgccgtcatcgtgttcggcggcaacctcatcgcgagcatcctctaccagaccgtcgacccgcgtatcaagcgagggggcggtgccgtatgatcgacaccgaggcaaacctgttccacgagccggtcaagctgcgcggcgccaaccgcacgcgcacgctcgtgacgggggccgtgtgcttcgcgctgctcatcgtcgtggcagtcgccggcgcgcttctcgcgtcgcaggcgacggcgacggacctcgcggcgaaaaaccaggttccctcgcccgcgcatctcttcgggaccgaccgtctgggacgcgacatgctggtgcgcacggtctcgggcctgtcgacgagcatcgggatcggcctgctcgctgcattcgtgtcgtcggtcatcgcgcttgtgctcggcacggcggcggcacttggcggcaagaaggccgacgccgtcgtgacctggctcgtcgacctcatgatgagcattccgcacatcgtgctgctcatcctcatctcctacgcgctcgggaaggggttctggggggttaccgtgggcgtcgccatcacgcattggccgagcctgtgccgcgtcatcagggccgaggtgctgcaggtcaagcagagccgatacgtcgcgatttcgcgtcagatgggcgtgcgcccgctcaagatcgccctgcaccatatcgcgccagccgtgttcccgcagcttctcgtggggctcatcttgttgttcccgcatgcgatcttgcacgaggcggcaatcacgtttctgggcttcgggctgccgccggagatgcccgccatcggcgtcattttgagcgagtcgatgagctacctgtcgtccggcatgtggtggctcgcgttcttcccgggcatcgcgctcgtcatcgtggtcatgctgttctacgcggcgggccagtgcctgcgccgcctgatcgacccgcatcaggcgcagcggtaggaaaaggcgggagggacgatgagaagagagctggaaacgcatgcgggcgagatggcgccccagggacgcggcgcagaccacgagcccgggcacgaccacgagggggagttcaagcaccatcaccacgtgcatctgccgcacgacggcgcgaagcacgagcacgggcaccatctgctgcaggtggagcacctgtccatcggcttcgacatgtaccgcaaggcggggctgctctcgtccgagcgcgtgttctccaaggtgatcgacgacctgagcatcgccgtgcacgtgggcgagatcgtggccatcgtgggcgcgtcgggctcgggaaagacgctgctcgcggatgcgatcatggggctgtacgagcccaatgcgcgcgtgagcggcaccatctacttcgacggcgtgctgcagacggtggcgtctctcgtggggcaccgcggccgcgagatcgcgttcgtgccgcaaagcgtcaagtcgctcaacccgctcatgaaggtcggcaggcagatcggcgggagcaaggagcgacgcgcggagctgttccggcagtaccggctcgcgccggaggtcgaggacctgtacccgttcgagctgtcgggcggcatgg

SEQ ID NO: 2666 - DNA, 6321 bp, Unknown
  16S sequences of unknown bacteria
ggtatcgaacgacgctttatgagccacaagcattcttccgccgacaaaatcaagaaattccggcagaacctcggatatcggtctcgcgtcggctaccatttcgtccgtgattccggtaagctcggtgatgttctgcggtatcggaacgccgggatttacaaatgtgttgtactttgctttaatctcgccgttctgcatgattacagcgccgatttcggttattttgcacgttgcggcggaaagtcccgtggtttctatatcgaacacgcagaattcgtcgtcaaacgtgatgtcgtcacccttgtaagccgcgcgggatgtgtcgtcaacgtagtaagcctcaactccgtagagaatttttatctcatcgttgagtgcgtcggcggcaagcattgctacgggaaagctctgcaaattgccgtggtccgtaatagctatcgccttgtgtccccagcggtgagcggtttttacgatatcatcagctttgattgtagcgtccattgccgacatacaggtgtgaagatgaagctccactctcttctcgggagcgttgtccattctcgcgcactctgatatttttatgatatcggtgtactgcatatagaggtcgttgtcgtatgtgtcacgcttaatatttcctctgaccgcgtactgttttccctttgagaaaagcgtttcagtctcgggggctgcttcagtcggaactgtcattcgtatgtacaaggacgcttctctgtcggtaaccgcgactgtgaacatgaccttgtcgcctttgcgcgtctctttctgctgtacgtcaaagacctcgcacaggattattacgccttttccggtgttttttatcgtacggaggggtgtagtgttttcgattgtgaacagctcgccgtagataagctcgggctttgaggtgttgaacactatcctgcctgacttaatcttgccttcttctacaacctccgctctttcctctccttcaaaaagagaagcgactcgcggaagaaccggcttttcttcgggtatggcttgtgcggcggcttcggtgtttcttgccatttcttcaaggcgggcgtgttcggcgacgatattctcggcttcactgttgagcttttcaagctgatgcgccatgaattcggcatactgctcttccgcgtcacggctttgctttatctcgacttttattccgattccgaattcgctggagattattccttcgataacatgagcggtttttgcgaggtcgagaagcgtgattccgccgtgtgaaaacggtatgtagacattcatcacgccgtctgtcatttcaatatcgtatttatcgaaaaagccgtttatgactacgcctactctcgcggcttccgtgaaaacctcgctcatgtagtcctttgagaacagctccgcggggtaatgcgtgagtatcattatgctcttcagctcatatttttcttttatgatattctcgagcgaatatatctcacgctttttgtacagctccggaagagataccgacgcctcggcgattctgtgttcacggtcgatttttactttaacgtccgttgctttttcaaatatttccttgtgtcttcccgtgactaaaggagcgacttttttaaatatatccgaaagcgatctttcagccatttctttctcctgttatttttctccgtcttcaagagcttttttcgtctcttcaagcagaaaatctaccgccgcgtcttcttccacacgttttacaagctgtccgtccttgaagaatacgcagaatccgtcgccgcccgctattccgaagtcggcttcctttgcttctcccggaccgttgaccgcgcatcccattacagcgacgttcagcatttttccgtgtgtgtcaagctccgcggcgcgtcttttgtactccttcatcagtccgatgaggtttattcttgttcttccgcaggtcgggcatgagacaacgttcactcgtcctctcgcgttcattccgacagcggacaaaatctccattcctgcgcgcacttcttctacgtggtcggcggtgagcgaaactcgtattgtgtctccgatgccggacagcagaagtgatccgattccgatggagtttttcacaagtcccgtgtagtcgtctccggcttcggttactccgagatgcaggggatatgatgaagcctcacgcacgagggtcgacgcctttaccatttcggcgacgtttgacgactttattgagataacgatatccgaaaaaccgcagtcctcaagtgcttccgcttcggtgagagctgactccgcgagagcttccgcacacgggtgagagtattttgcaaggagctttttgtcgagcgagccgccgtttactccgattcttatcgggattgacgcgtatttgcaagcttcggcgacttccttgaccttccatttttctccgatattgccggggttgattctgaccttatcgacgccgtgtcttacacattcgagagcgattttatagtcaaaatggatgtcggcgacaagggggcattttactccggctttttttgcgagagaaaacacttccgcacactcttccttcggcacagctaaacgaacaatatcgcatccggctttttcaagctgttttatctgttttatcgagttttcaaagtcctccgcgggaacattcgtcatcgactgcacgcttatcgaattatctccgccgacgggaacgctgcccacgaaaaccgtttttgtttcttttctgttatacatcagaacagtcctattatatctttaattccaattactaccatgaggagcatgagcatgacaagtccggcaaagtggatatatccctctatctcgcgctttattggcttgcgtctgataagctcgattatctcgaacagcagtcgtcctccgtcaagtgcgggaagaggaagcaggttcatcacgccgaggttcatgcttataactactgtgaggtacacgaggtctccaacaccctgctcagccgcttctccgagagcttttgtcactccgataggtccggaaatgctctctgctccgtatctgcctgtgacaaggtcgtagagcgattcccatatcatttttattgtggaagccgagcggaaataggcgtgtttcagcacattcagcggagttttagcctcgggaatgaccttgaagtccatgtttccgtatcttgtgccaccctcaactattgtagggaacacgcagtcctcaagagttatcgtctcgccgtcgcgtattaccgtaatgtcgatgggattaattcccttgcgcattatttcgtatatggtttcgtttgctatgtgtacccttgtgccgtctactttgattatcttgtctcccagtctcagtcccgatgagtacgcgtagttatatccgtttttgtcctcaacaaatgcgcctatggtatttgacggaagagtaggttgtgttgcgacaagaatcgacattaccaatatgcctatgataatgttcataaacgctccggcgcaggtgattattatcctctgccatacgggtctgtttgtgaatgcgttttcatcctgtgattccgaatcctcgccctccatgctgacaaaaccgcctatggggagcgcacggagtgaatactttatcccggattttttggattttttcgagacgagcgtaggtcccatgcctattgcgaactcttcaatggttactttgaacagtctcgccatggtaaagtgaccgaactcatgaatgaatatcagaaatccgaaaatcagcagcgccagaatgatataccaaatattaataagctcacaccctttgcttaacgtaattgccgatagtttcacggcacttgagtctcgcttcgtcaaccgccgccatgatattatcggtgcttatattaaatgatacactaatttttccgagtgtttcaagcactacagatgaaatatctgtaaatcctataccgccgcagagaaactcgtctactgcttcttcgtcagccgctatcagtgaagccggagctgttccgccttttcttatcatagctctcgcggcgttcatgagagggaattttacgtcgtcaggctcaaagaacgtaagtctcgacagcttagcgaagtccagctcatctcccgcgatttttgcgctgtgcggagcggttgcggcgtatcttatgcagtcccgcatgtcaggcttaccaatctgcgcggttactgtgttatcattatactcaaccatggaatgtattatgctctgcgggtgaactacaacggcgactttatcctcgggaaaaccgaacaggcgcaccgcttcgattatctcaaagcctttgttcatgagcgttgcagaatctatggttatctttttgcccattttccacgttggatgtgcgagggcttgttctgccgtgacgtttttcagctcttccatggaactgaagaagaacggtccgcccgacgctgtgagaatgagcttttttatgtccctcttgtcgtgattttcgagaaggcggtatatcgcgctgtgttcgctgtcgacgggtacgagctctccgccactttctctcagtttatcgaaaattatatctcccgccgcgattatcgcttccttgttcgccattccgacgcgtttaccggattcagccgcggcatatgcgtagtcaagtcccgcaagtccgccgacggaatgaaacacgatatccgcctcggtctcacgtatggcagagagcacttcatcccttttgtacagtatttccgtatgagcatcttctccgctcagctcgttttgcaggcgatttgcgctctcttcgtccgctacagccgcgattttgggtgaatatttctttatctggcttgcgaggagagtggtatttcttcctgccgcgagcagctttatttccagtcccagcttatccgccacatcgagtgtttgaagtccgacggagcctgtggagccgagcactgccgctgtggttatatttctttcttttgccgacatgacaacctcagattaaaaatcccgccgttatcgggagctgtgaaattatataaagtatgggcgcggtcatgataacgctgtcgaagcgatccataactccgccgtgtccggggaagataaatccgtagtcctttattccgaagtgacgcttaacggctgacgcggagaggtctcccacctgcgaaacaatcgaaacgagtgcgcccgacactgccatgacgatataattcggggtagcggttgtgtcaaagttcttgctgatgatgaacgcgtacagcacatacgagagcgcggcaaaaattattcctgctacgcttccttcgacagtctttttcggggacacttcgggaatgagcttatgcttgccgagaagtctgccgaagatgtacgcaaaggtatcgcttacccacggaccgatgaacacgagaagatagagatacttcccttctccgcggagcagaacgatggaggtaaacgaaaccgctatataaaatactcccatgaaagtcgaggacgagagagtataatcgagctttccttttgagaacacgtctgtcgcgtaaactgcaataaggtaaaccacgcagagtgcggcgatgattttcagtgtgctttctcccgcgaagaacggtacgataggcattgctccgaaaacaagcgatattccggctaaaatataatgctttctgacaccgacacagccgagcatttcaaaaactccgataacggaaagcagagccatgacagccggaaacactacagtatcggaatagatgcaaaccggaatgaacagcgttatcgcaacgactgctgttatagttctttttaacataacttctccttattcacacgtttccccatcggcgtgagcgtctcgcaaagtcaaacacggcttcgtcaacgtcggcgggtgtaaagtctggccacattttatccgagaaatagtactccgcatacgcgctctgccagagaaggaagtttgagattcgctcttcgttgccagttctcactacaaggtcggggtcgggacagccgcgtgtgtagagtgcgttgttcaagtcttcttcggtaacgcttttcttgccggaagcgattagttcgtttaccgcgttgacgatttccgctctgccgccgtagttcatcgcgatattaagtctgtacggtctgccgagagtttctttttcgagcagtttggcttgttttccgatattgtcgctgagcttttccggctctccgatgaatttgaactcaatatcgcgctcttccgccgcttcctttatgtactcgataaacaatctgaatatagcttcgacctcatggcgcgggcggttgatgttttccgttgagaag

SEQ ID NO: 2667 - DNA, 32759 bp, Unknown
  16S sequences of unknown bacteria
ataatcgatttgggcgatgtgctgacatatacatctcacgagcttgcaaaatcagaccagctcagaagagatttaatagcaaatgtatcccacgacctcaagactccgcttacaatggttaagtcttatgcggagatgataagagacctttcgggcaacaacgagcagaagcgaaacgagcacctcgccgttataattgaagagacagacagactaaatctgctggtagacgatatgtttaccctctctaagatgcagtcgggtgtaataagtcttgagatttcagagtttgatttctgcgaggcggtaagagagatagtccactcctacgacatattagtcgaacaggagggctacgatatagtactggacgttccagaaacctgcacagttgcgggcgatgagtcaaagctcaagcaggtaatcgcaaatcttgtaaacaacgcggtcaaatactgcggtgatgacaaatatatatatgttgcggtcagaattgataatgacaggggcaaggtaaggtttgaggtttcagaccacggcagaggcatagcccctgaggatctgcctcacgtatgggaaagatactaccgtgtcagcagcaattatcacagaagctccaagggtacaggtctgggactctccatagtaagagaaatcctcaagggccacaaggccgaatacggagcagacagcaaggtcggcgagggaagcaccttctggttcgcgctcgacattaaatagacataaaaaaacaggtagcagaggtcaaatcctttgtttcctgttttaattatatcttcaaatatacagttcccacatagaaacggcctgcaggaggcgtcagcccacgctctcccgtttcagcctgtcaaagcggaatttcaggtatctctcctttgcctctctgcttttgcggcgcgtaatatgaactgttctgccgtttctcagaacaaaatcctcgtcggtactcctgactacttcatagaaattcactattatgcccttgaccggtgaaaagaaatagtcgtagtcaagcagcagcatctccatctgattctgtgaaatacgaatccggtacggctccgcacctttcatatgaatagtaacagcatgattgaaataatccgtatatataatatctctaagaacaatccgatgcccgtcaggcagcattactgttctgtttttttcaattacatcaaggttcattcttttgagcataagccccacctgtctgctgcttacaggtttgcgtatataatatgaagcattcagttcatagctttctgcggcaaactcgttactgctgctgcaaaaaacaatacggacttcctcatctatactgcggatttttcgtgcaagatctatccctgtcagcttgcccatataaatatcaaccacaatgatatcataaaaatcgtcgaagcctttttcgagaaacacctctccgctttgaaacatatctattatgtaacctgtataaccatattcggtcaacttatctgcaatcatatcgtgaagctgtttctgctgaattctgtcatcatctataattgcaatacgcacaaaatcgcctccaatctgttacgaaataccctcgcttataaaaaaacattccttttttataaattatactcctgtccgcagatttctgtcatcctaccaaagtatgagacggcctgttttttttgaaaaaaatcatctttttttgtgttttttcgccaaaaataatgtgagtatacttccgtttttcactaaaaaggtcattttacgaccaaataagtcattcatattgaatttaaaaaataacattatatataatttattatgtgtatagatacgatatcacgcaggggagcgtcggctgttcggaacagcctcccttgaacatatataaattctttgggaggacagatatatgaaacacaacaaactatttgcagtgctgctttctctgactgtggtgcttgcgactttgcccgttgtgacaggtacggcggaagcagaggacaaagcagacaacatagcggtgcaggcggcgaccggctggcagcctaagccgacaagaacagtaacaagcagtaatttccctctgactgtttcaaacggagaaacagtacagataaacggcaccgtaaactatacggcggcaaccggtaaaagccctattacgatagcggcaaatgcctcagcaaaaataataataaacggcagcgttacacttaacggagcaaatgcaagcggcacaactggtgcaacagctgcaatatacgtaccaggcagttctacacttaccgtctacagtgcgcacgatgagacactgtccacatcgacagcagctccacaggacactcttacactaaagggcggtaatgctgctgcaggcagcaacggtggaaattcagtgcgtacatttttaaatactccaataataaaaacctatgaatggtataccggagccggcggcaatggcggcggcggagcggcagcagcaatcggcggcaacggtggcaatggcggctcaggcggtgcaagttataagagccctgttgtagcaagcgttatgcctcatggtaaagatatccaacacgatgatgaccatcgcggcgctgcaggaaatcagggaagcgccggtgcgcaaggcgccgttcccggcaaaatatatatttcaggaagacttaatctgaatgctgcaggcggaagcgctgcaggcggcggtaacggcggaaaaggtactggtggttattccaataatgtaggtaaagatgatatgatcggcggctgcggcggcggcggcgggggcggcggcggtcttgccgctcctgcaatcggtgccggtggagccggcggctcaggcggcggttcaggaggagaactgagttctgaccatagcggtaccgttgagggctgcggcggcggcggcggcggcggcggctggcctaacggcggcggtggtggcggcggcggcgctgaatgctccgatgctgaaaataaaaatgacaacacttcgtacggtggtgacggtggtgacggtggcgccgcaggtgctgcaggtaatgaaggcaagccaggtcacagtaccggtactaatggacacggaatcaataagaagggtagatacgatgccgaacccggaagcggcggctcaggcggcggcggaatttccgcatcagctgcaaacggcggctcaggcggaagagaaaaagataatagctataacggcggcaccggtggttcaggcggtaatgcggttgccaaggcttcatggaatacgcaaagcaaccttatattttcaaccgccagcaaactcaatctgtcatcaccgctttcatataattacggagacggacagggacagggcagtatgtattcaattacaccatatatagtttacgaccttatggactgtaaggttacccttgcagactgcacatatccgggcgaagacaataaggcgactacaacaatagcttcaatttcctacagcagcagcacggaccgtgacggcgcggctatcaacggcagtaaaaatattgccacaaacagagcaagcattatttatacgaataataaacattgcagttccggtacagctaccgtaacaggtacaagcgataactcaagagcaacggtaatgacaaataatgccgttgtcggcagcagaagcaatctgagctttaagattaaccaggcagcaatcaataatgtgcctatcagcggtaactttacaggcgcaaaacaaaatgtggctattgcagtatctgtcagtacctacagaataagttcgactgccgcatataaaaacctcagcactttgtgtaaaagcagcggagcaaccggcactccgacagtgaaatggagcgtgacaagcggaagcggaacttttgcaaacgccaacagcagcagtactacatttacaccgagcacttccggctctataaccatcaaggttactctgtccggaatgaatgacttcaaagattactccaagacaattactttcagtacgaccaagagagatttagatgtgcctaggctttccacatatgcgccacatccgcgtcaggatatctccgtcatactgccagatgatatcggagatgatgcagcaattcagtggtacaccgtatccggcagtactactacggcaattgccggggccaccaaggcaacatatactgtacggaatgctgacataggcaagaagcttgaggcatcggttactccatctgcaagctcaaattataatgtaaaaacagtgaaggaagctactcgcaaagctgttgaggatcatgattatgcaactcaaaaccacaatggattctgtacaatctgcggagaatatcagcctgcaactctggtgtccagcggtacttataaaggtttctacaacattaccaacggagggcagttattctggtttgcagcactggtaaacaatgatcatgaccacgcggaatttgatgcgcagaacacatctgcaaatgcagtgctttcacaaaatattaatttgggaaaccgtgactggactccgattggtgaagttaaaggtgtgaataattcaagcaattacaacactgttgaagctaacgcttataagggcatattctcgggcacaaaaacgaaaaagtcaatttcagggcttaaaattacaggtgcccatttaagacccggtttctttggaactgtatcaaatgcaacactggaaaacttcaatgtgtacggtaagattacacttcctgaggaaaatatatattacgacagccgttataactctgtcggcggtatcgccgctaaaatggacgggggttcgatttccggcgtaacctcggacattgacattgtcaacacagacggtcagtacaaacacgtcggcggtattatcggagagattcaaaacactactactaatgtcacaaagtgtatgtataaaggagagatacacgttataaactcagacgactgtgtcggcggcatcgtaggatacagcaaccagggcgcgcgtatcagttattgcgcaaaccttggcactgttgcctgtgtaaagggtactgcaggttcagatccgtacagcggagggatattaggttatgtgaacaatgagtatgctactgtaaaaaattgttacaattacggaaacgtaggcaacggtggtgaaacccatacaggcgcaatcataggatggtgcagaaacagtaataatcagacttcgcgttttgccgacaactattatctcagaaggtctgcacctgcgggaatcggcagcggaagtaagaccttaagcggctcagctgcacctgcagaaaaaaacaaatcagcttttgccagcggtgaagtatgctatctggtaaacggcaaaaccagcaaagattccgatgcgatatggagacagaacattgacaacaacataacaccatatgatgattatccattatttgattcagctattgtttactaccgcagtgacggtacctacagcaactataaagaagatgttcaggtagatataagctggggagctatgagttttaaatacacagacggcaaatggaaccctgatgagcattcatatgatgagggatcgtgggagccggctgcagatgacgcgaataaaatcacggtcacaaataacagtaatgtcgctgtcaatgcaggttttagctttactcctgtcagcaatattacggatacacttcctgacttcacagctacaatcagcggtgaaaactcgctaaggcttgaaaaggacggcagcggcaagaacacaactacagctctgctcacactgacttccggcaaaccgaaaaaagacattactaacgaaaaacttggtacaataaccataaaaataacaacagtgggaggtaacagttaatgacttcaaacataaatcaggacgataaaaagaaaaaaaagaaacttcttatcttccttatactgtttatcctgcttgacattattctgttagtggttctgcttgtcgggcgtactacactttcacctgattatgcgcctgtaaacgaagaaaaatacgcagaggatataggtgatgacggagcggacaaactcaagcagacaaagggaggcggcgcagtaagccttacttactccaccaatgtggatataaaccttgacaagaagcaggcaactttattctttgcaaatccaagcaaatccaatcaggatatggtactccagattgtagtccacgatgtagttgttgcgcagtcgggtacaatctcacctggcaagcaggttggaaaactggatttactgagatccggagcaaggaaacttcaggcaggaggttatgacggcaaattcgtagtcctctactatcagcctgacacacacgaaaaaacaatagtaaatacagatataccagtaaaaattacagttaaataacttacgttcacttcgcatatatgcgttttgaaaatatattgaaaaggagagaatctattatgaaaacaagaaaattatttgtagtagctttagcacttgtacttacactgagcatgacagcaacagcatttgcagctgccggcaatgaaaaagccacatctctgccatacagcaaagatattgatgttacaggtacatactcaggcagcacaatcggcggtgatgtatacagcgttgatatcagctgggacgcaatggactttacttatactgttgtaagcggtactcagtggaatccttcaacacatcagtatgattccgctgctgcacccggctggacagctaatggcggcaactctataacaactgtaaaccactcaaatgtaccggttgatgttgcattaacattcacaaaaaatacagaactcaatgctgccggtgacacctttgaaggttcattcgacaatgctagttacaaccttgcaactgcagagggcacaacttatgaccttgctccaaaaggtacttcggctcttacacttacaggagctttagatgcaagccatacaacatcagtaaaacttggtacaataacagtagccttaagcaaaactgtaacaccttaattactgtattaacctctatagaggaatgctctgtcattcctctatagatatctcatctatgatatttgccccggtccataccgaggtaaatatgacagatgaattatccgatacaggaggattacatatatgaaaaaactattgcttccggctgcagttgtaatatgcgctgtagctgcaataattatggtcataatgcttgtgacctcaggcagcggcaaaagtttcacaccgccgccgtttgaccctgctgcgcagacaggcacacctgatgtacctgaatcggcaggctacggtgacctcgacgcaggtgattttaaattctatgccgcaggcaatcttaccgcagaaaacggtaaaacagacatatggcttacaaaccctgctgagaataatatctggctcaaggcacgtctgcttgataaagatgagaatattctcggagaaagcggtcttataaagccgggcgaatatatacaatcgatagaacttgatgagattcctaagggcacctcatcaataacattaaaaataatggcttatgcgcctgacacatatcagagcgcaggggctattgcattaaatacagatttaaaagctgaataaggggagtgaattattatgaaaaaacttattgcggcaattatgactgctcttctgattttatgccccgtatctgcatatgcggcgcaaacacatatatcatatgttcccggcagtgcaaaaatggaggtgtacggcaattatcagaaggttaaagattactatgaaattactttaggtgtaccgggacttgacaccgtgcagcttccgggcggagtaacgctaagcggcagcaacgaaaacgaagccgataccaacatgcgtataattatcgtgcctgtaacagtctccgatgaacctgcagcgcacaaatggcttacaggcaatttaccaaaggctgacaagaattcaattccgtattatctgggtttttacgataacaatgataaacatgtaaaacctgcaggaaatgtcaccatcacgcttactatgcaaaagggctatgaagataccaagctgtattatatggatacaaacggacacctgaagcagctgcgttactctaagatttcaggcactgcaagctttacaatcggctctacaggctactatctgtttttaaagcagacaggaaacaataatacgccaaaccctgccaaacctgatggtaataacaccacacctacaaattcaaattcacctaagacaggtgacagcagtaatttatcattatggtttacactgtttgcctcaagctgctgtactctggcggctgcgctggcacttatcttaaaaagaaagagaaaacaatcctagctctatatataaagagtcggtgctctaacggtttattcccgctaatgcatcgacctttttcgtttctgcaaacaatgtcttgtatgtataaataatggtactgtaaattatcgtgtggttttaaatcaaaagcaggcagtcaagccgtattgccacggtatatttgccaaaatgaatatacacacgccactctttatagctgttctatctcttctgcatctaaaccggaagtttcagcaattatatcaatatcaacacccttagcctttagcgccttagccatctccagtttctcagcagctctgccggaagcctcgccttcgctcctaccctgctcaagacccttctcaataccttccttaagtccctgttctcttgccgccgaaagacctgaaccgtatctccataaaaacttctgccttgccagcattttctcataggctatatcatctgccgtcagttctctgaatatattctctgtcaaaatgatcgcctcctctccgctgtctatcagcttctctatcaattcttccttgttcgggtcatttgcatatctgaagtaaaccgacactctctcaagcggtgtcatatcagatatatccttagttttatccaccttgtctatttctattaaatgaaatctcaggttgccggacagccttttccggcttttttcacctatgatgccaaatatctcatggtatatatcttcatcatcaagcagttttcctcccgcaaatgccaccattgttgtttttcttattttatcatatttctcgcctttatccaatgctttatcgcctaatttcattacatacagcacacatctgtccttaaaatatctgtcaggctgcttctccatttccacatcaaacaggtcaccggtatctgtttcgagcctgatatcaaattcaacctgcttatagttctctcttttgcgatagtcaattggattaagtatattgatgtccttaataggtgtttccgtcagatcctctcctgttacggtattaagtaatgctatgagggctttttttgactcctctgttccctgtccatatatcatatgaaataccatatcatcagtaaagctgaatctctctctgcgattgtctgtaaataagcccaaagtttaacctcctttttgcatgcaattataatttttaacctcttttatttaatttagggattattagcaattacatccatacatcatgcctttgtcaagcattttttctaattgttggttatatattttatattttccagacaatcaactccattataataggcggccattacgaccgcctacattattcacgttatttacttactccacgtcctaagaccatatttacactgttttaattcagtctgtgctaccagatttccatcggtatcatataccgcaagtcttgccttgtaataatattttgtaccttttttacctgttgtattagtatatgtattctcagtctttgtaactgtagcgatatacttcgatgatttcttagttgacctgtagaacttgtatttaacagtatatcctgcatctttaatttccttaataaggtcctttaattctgatgtttccttaaccacagccttgacgttctttttagttgtctttgaggttctgactgtaagtcccagattaaggagcttttctttaaaggccttatcaatttcttccttagccggtggtattttatcaaatgttacttctaccttatctcctgttttaagtcctgtaatcttattatcagtaactgttacttcattgccgtttacagttacctttgaaatctgcataccgtcgtcaggggctataacaagcgttgtgccgttgttttcaagggttgccttgcctccctcgcctgtaatgatttcaggcttctgaacaggcacataagagcctcctccactgaaagcttttggagttatggtcattacgccctcaaagcagatagtttttccgtcatcagaaacagttacaggatttgcatctgattttaaatccccgccatttatatatagtccggtattatcatcaaacttatagtcacctactgctttcaacttgatggagtatctatactgtacatccttttcaaattcagtgattttaagatcgtttttctcatagtagctttcgtcggaataccagtatgtaacagtgcctgcttcgttttgctcaagcttttcccagcgctcgaaaagaatatcatatttatccttattagcgcctgccggcttggctgacgcctgcggggtgctgcccggctgatagtcgagtttcacattctcaacatcgacgatagtaatagtggtgcttgctgtcgcagccgcgatttttacaggaatatcagactttatctggcattggttagtatccgcgccggtctccgccatgtcatcacctatgttcagctgccccttgatcagcagggcggtgtttccggccttgccggtatccagggtggtggtgccgccggtgaaggtggcactactgctgctatccttcatctccaccaaggggtcagcgtatccgtagtagtcatctatagggaacacgataggcgtgaactcgccccaataccatgctgcatacagggtaccaccgctgacggtgagagtattcacatccaaagcagggcgaaccagcagattgttataatacgggttcttgcgcacggcctcccgaatggtaagcgtgccgccagatagactcagcgcatcagtgtcgatgccctgagtcttcatagtgccaccggaaatatccacttttttagctccgtacaactggccactgttcacaatggtgccgccggtaacggtgaacatgccctgatttttcatggcgtcgatcgtgtacatatagatttggccatttacggtttccagaatgccgtcgttgacagtaatgttgccggaatttgcgacggttttgtccccattcacagatatggcgtagccgagattcccattgtaatcgggctcttgggtactggtagctgtgagctttccgccctgcagctgtatgctgccgccggaaatatatgcggcacgggcaccggctacagccacctcagcggactgctccacggtcaggttgcccgcggaaatatacaggccgttggacattacggttgcttctgccatctccttcacgctctcggcgcgcagcttgccgtcgccggacacaataacactgccccggtacacttccacaccacgtgagaacaccgctcttttagtaccgccctctaccagctcatacgccttgtcggcaatggccgtaagggtgccgccagtgaccatcaacgctttattcttagtatcactatccatcttgacgccgtaagagaagcagctgccgtcagactccacacagccgccacgggtcgtaaccaggccgctctccacagtgaagttgccatctacgctgatgccggtcgaatagacccatccgtcaccgttgtttttgagagcaccagcctcaacgctcagggcgcctgtgccttccgtctcgcccttaatggtgaggctgcccgcagcgtccagagcgttgatgtaggtctgattcgagtagtcgccgcttacattcaaagtaacaccgccactttggatggtgttggatgttccgtccttgaggacgatggtggacccggcaggcagcttcacagccgttttggcagtggtggtgaagttaatgccgttcagggtgagagtcttgctgccgttatcccaggtagagttcgtctgacctgttttataatcattgagtaagtttattgcattctcacattcccctgtggtgaaatctgccgtttgtgttgccgaatctgccgcaaatacgcccacaggcattagcgccgctatcatacataccgcaagcagtactgccatcagtttttttgttaatatgcttctcataaacaatatctcctcctctaaagactctgcggtgatgttatataaatggaaccattcaccgcggcaatcttaaatttcgttatatataatgattgtagcattaccgaaatacaaattcagtatagttaccatgtgagtcaattgacacttgcggaaacttcggggcaaaaaaatcggcaaagggtattagccctctgcctcttgtgtctatttcttctttttgggtgccggaagctcctcatacatagcttcaagcagcttctttaaaaactctctgtcctcaagctcatctaccagcagcatatcctttgctccgtcatatggcttttcaaagcgtgcgttcggcatcagctcccttgcagcctgaacaggcttgactaaaaacctgtcgtcatatatgcctcctgccactttgcctctgtaatatatgatgtactctcccatcattgccctgtatgtaatatcgtcaagctccgacagctgctcaagtacaaactccagatattcctttgatgatgccataatctatttctccttttgtaaagccactgcatttttgcagctaagtaatatatgcgccggggcaaatactgccgcagctattacaagcagtatatatctgctcataatcccgcttgcaaggaatacggcagcgggaagcaccgacagcgctatcgcccgaaacattcccggctttctgaaacatataatccagataaggcagtaggctgcaatcatcagcccgtctgctacaaggtatatatgcagggcgctgtctgtttcaaaacccatataaacccccggtatattgaaaatcatcagggcaaagcagctgaatctgcctgcctgctctgcaatctcaacaaatctgttttgccacaggttttcaaacccgtctctgcacctgaccgcaaaagcaatattaggtatcataataactgcaatcattacaaggccgtatacattaatccatttcataatctactctttgtttcagtcatcgtcctcgttaaaaaagtcctgtatatagtcaagaaaatcctcaaaatcctcaaaatcactctgcacaaaatcatacagtatcggctctttgaactcatattttgaaaccagcgcaagatatttgctcaggtcacttctcctcaagtctctttcgaggctgtgaatgttttcgatactgtatgccgcagctatgagctgaccgaatgccgtaacataatatataccgtacacatcctcactcattttgaacactctcttgttgacatgctcattgttcttgttgaaaatcatatagaacctgccgttttcgtgagatgtaaccattgagttcagggaaagctccatcatgcccatatcgaatatttcagggcttgtaagtatatcatacactgtcacaaattcaggtcttgcaagcatcattgccgcctctgccgagctgaccttaaagcctgagcatttctcaaaatgagtaaccctgaaattctcaacgtgaacctctgaaaccagcagcgtgtatctctcgccggagtcgataaggctttcgcacatatatctgccctccgaaatctcatctatgacattgcggtaaagcgccgccgccttgcagtcgtcatacaatgtaacatctacgttgtcctctgcaagaaaccttgcagcctcataatcgtgaccgaagcatctcataagaaaatagtttgcagtctgatactccgaggttatcgccgtacattcctttttcatcagctcctgtttttcatcgtctgtaaagtcaattcttttttcggtcacaaactcgtactctgccgcatcaggcggaagcttgatattgtggctgttgttgaaatccacatatttttgcagcatagctcttgtctgtttctcagttatgtctatctgcctgccgccaagtcctcccgcaaaggactgctcaactatgacaatctgagccatatcattgcccttaacactcttgtagcgttcaaagccgtgctcctcgcagtcaaaatagaagaactggtgcaggtcctcatcatctattatccagtgtgcatacatgcatattacacccataagccttgtgtccgtcacataggccgatatgaatgatatgcttctgctggcagggctgtcgcacagccctccctttataagttttagttctgatttattcaaaagccttaccttccttttaataatcaatcacattaagtataccctattctgaagaaattacaagttgacaattgtgaagtatgtaatataatatatattatgttgaagaactaaatataatccttattaagagcggctgagggaataggcccagtgaagcccggcaacctgtatcaacaaggtgctaaatcctacagaatatcaattctgaaagatgaggaattcagtaagttatatgcctcttttcagaaaagaggcgtttttatttcgataaggattaaagattaaaggagataacacaatgaagaaactattcacatcagaatcagtaacagagggtcatcctgacaaaatatgcgaccagatatcagatgcaatattagacgccatatttgaacaggacccgatgggcagagtagctgcggaaacaacagtaaacacaggctatgcaatggtaatgggagaaatcacaacatcctgctatatagacattcccaagattgcaagagatgtaataactgaaataggctatgacagaagcgaatacggctttgacggccacacctgcgcaattatgacatcaattgacgagcagtcgggagatattgcaatgggtgttgacaacgctcttgaatacaaagagggaactcttcacgacgaggctgtaatcgaagcaacaggcgcaggagatcagggtataatgttcggatttgcctgcaacgaaactccggaattaatgcctatgcctatcgcgctggcgcacaagctggcaatgcagcttgcaaaggtaagaaaagacggaactcttaaatatttaagacctgacggcaagacacaggttacagttgaatatgacgaccaccaggtaaagagaatagacaccgtacttgtttcaacgcagcacgaccctgatgtaacacttgagcagatcagagctgatatgcttgaatatgtaatcaagcctgtaattccggcagagctgcttgacgaggataccaaatactttgtaaatcctacaggcagatttgtaataggcggacctcacggagattcaggccttacaggcagaaaaataatcgttgatacctacggcggatatgcaaagcacggaggcggcgcattttccggcaaagaccctacaaaggttgaccgttcggctacctatgctgcaagatacgttgcaaagaacatcgttgcggcaggacttgcagacaaatgcgaaatacagcttgcatatgcaataggcgtagcaaagcctgtatcaatccttgtagatactttcggcacaggcaaaatctcagaggaagctatatcctcactggttgcagagcatttcgatttaagacctgctgcaatcatcagagatttaggcctgagaagacctatctacagacagactgcggcatacggccacttcggaagaaccgatatagatcttccttgggagcataccgacaaggctgaaatattaagaaaagaagcaggactgtaaaaaatacagaggcgagggaaatcaatccttcgcctttaataatatgtcaaaaatctgtctgcatatttttttcatctccgcctgccttgtatttgtaagagctaagagataaaagtcctcttcgggacatatccagaaggccgatgaaaatccgtcatcaccgccgttatgcccataatatgtatatccgtttctctcatatatgaaccagcctgtgcccatatactcattcttattaagagtctttacctttggctgccatatatacctgtaggtttcctgtgccagcagcggcttctttgcctttccgaggcttccgtctatatgaagccgggcgaatttctcaaggtcatatacattcgatgtcagagtcgagcttggcgcgtgaattctgttatacggataatatttttcataaacaatatgctttgatatatccttggtatgaggccttaccagcatatccttatcgcctcttgcaaaggtgagaaacgatgaacttttcatttccgcaggcgcaaatatattctcatctatatactgttcaaagctcatacctgcaatttccgatatgactgctcccagtatgtcgtatcccgcatcactgtagcagaaacggttttctgacggcgctgacagcagggttctcttccttatttcatcactcagggcatactctttaagcgcagtttccgaggtttccggtctgtcccagtgcagatcataaaccatacctattcccgatgtgtgctgcatcaggtctttaactgtaattttctccgccctatcatcatttattttaaaccctgaaattatatccgccactctgctattaatatcaatctttccgctctctgaaagctgcattgcggcagttgaggtaaacagcttggcaacagaggcgcagtgaaatacatcgcttaactccatcggcttcttcgcaggaaaatccgaatatccgaaagctctcctgtatatcaaatctcccgcctttaccgacaccacaagacccggcaggtcctgataaaaatatgtgtcttcgagatatctgcctaaattcttcaaaactcgctcctttactttttttgatatattaagtatactaaatataatcagttttgggaaaggataaatactatgaaatacacaaattttaaagataacaaagtttccctgctaggaatgggatgtatgagacttcctctcggagccgatgacaaggtcgatgaagcagaggcaatcagagtcataaggcatggcattgacagtggcatcacatatattgatactgcgtatatgtaccacaacggcttcagcgaaagagtaatcggcaaagctctcaaagacggctacagagaaaaggttctgctggcagacaaaatgccgccatggcttgccagaagcgaggaggatatcgaaaagattttcaacaaacagctcgaaagactgcagacagactatatagacatgtaccttattcacaatgtaggcagcaaactatggaaattcaccgaaaaatacaatgtactcgatttcctcacaaagaaaaaagaagaaggcaagatccgccatatagggttttcgttccatgatgattatgaattctttaaagaggttatagataaattcccatgggagtttgtgcagatacagttaaactatatcgatgagaatttccaggcaggagtaaaaggtctgaagctggcaggtgagaagggtctccccgtaattattatggaacctctcaagggcggcaggctggcaagcacaatgcctcccgcagtagatgaaatctggtcgcagatgaaagaaaaaagaactccggtggaatgggcattcagatgggttgccgattttccggaggttacgacaatactgagcggaatgagctcctatgcgcagcttgagaacaatctgaggatctttgaagatctgaaaccgggcagcctttcatctgatgaaaagaaagtaatctccgcagtggcagataaattccatgaacttatcgaatatgactgcaccaaatgcagctactgtatgccatgtcctgaaaaaatagatatacctagaactattgatttatataaccagcttggcatatatgataatacagccggtatcaggatggaatacagctggatggcacctcatctgccgtcaaaatgtgtaacctgcaaaaaatgtgaatcccactgtccgcagagcctgcctatttccgatattatgaaaaaggctgcggctgaatttgaaaacaaatagacttttatatgaacaggacaatgctcctgttcatttttatctgagaaaaaaacaagcgaggtcatacgacctcgctattatctgcaatttaaattattttgaaactgcgtctaagaaagccttttcgtttaattcatctgcatattctgaatccatttctttgattcctgcagggaattcgtacttagcaagtctttctacgaatggatctggatcgaagtgttctggaccccatgcaccagcatcgttccagattcccttagcgataagttccatcatgattacaggacctactgcagtctgagcaactactgagttagtagtgtacttagcgatacattcctggttgtcagcgatctgatataagtaaactgatctgtacttgccgtctttccatccagttacccaagtaccagcgcagcccttaccagtcattgtcattgtagcatcaactgggctagggataactttgcatacgaagtctctaggagtgatttcgctgtcgccaaccttgatcttgtttctcttgtctgaaagaccatattcaaataataccattaatttctttctgaaatcagcaggtacaccatacttgaatgtacatctgttacaatcgatttctcttggtactaacagtacttcttcgtgttcaacgttgattacttctacgtcgccgattccgccagggaagttgaagatttcaggttctgagaactgttctgtacagaaccagtgtccttcaggatgctcttcgttcttttcccagattactggtggctgtaagcattcttcgatagttgtccatactgagaaaccaaagtctgaatcagtatttccgtagttatctccgtctcttacgttaacttcgtcgatcttgtcgaataagtgcttagctgcatacttagcaaatacgtcagccatacctggttcaacgcctgatccgcagatagcgatctttcctgatttttcccattccttctgcttagcgaactgatagtcaccaagtttgatgtttgttaattcataaggtttttcagggtgctctgtacctaatgtcatagcacagtctaagtatccgataccgatttctaagcaagtatcaaatatagtttcgttcattcttgggtcacaagcgttcattgcgaaatcgcaaccgtgcttctttgcaactgatttgatgctctctgcatccattgcgttgatctgttcaggaacgaattttcctccgccgcagatttcattagcaactttctttgctctttcaagatcatagtcagcaactactactttttctgcccagtctccgtctgctcctgctctagctataatcttagcagctgatgtaccaactccgccagctccgatgattaaaagtttcatatcattacctccattttatgttcagcattattgctgttttacacttgtctgtacttttattctaccatatcatacttttgatacaactatggttttgctcaaaattaatactaatttgctcaatgttccgaattgcaaacattgagcagatatatccttacatttcttcgctttcatcgtcgtcatcgtcatctgtgtcgagttcgagggaacgctcttcaagctcctcttcaagagacttttcaatcggctctctcctgacaaaatgagtatcataaaacttgccggcctcttttaccggtccgtcaaacgccaccttgccggaatctataacgatgcctctggtacaaagctgcttgttaagaagcatggagcctgaaacaaacagaagcgtgacgttttcatctgaaactattgatttcagcctgtttatacatttaattctgaaacccctgtcacctactcccatggcttcatctattatcagtatatcgggcttcatagtcatattaattgcaaagcccagtcttgcagccataccgctggagtaggttctgacaggctggtctatatattctccaagttccgcaaattctattatctcatcctcatgctctttaatctgctcatcgctccaccccagcagcctgcctctcaaatacaggttctgtctgcctgtaaattcagggtcaaagcccgccctcagttcaagaatagcatttatgttgccatttacctcaatctcgcccttagtaggaaaggtaacccctgttatcatcttcataagagtggatttgcctgcgccgttgttgcctataaaggctactgtttctcctttgtaaatttcaagagaaacattgttgacagcctttttctttttgtatttgccctttctgaaaagaacggatttcattctttctttgttgcttttgtagagtctgtagacctttgtaacattcttcacttttataataggttcactcattgccgccctcctacagaacatccggtatttcttttctcagtctcttgtaaagccacagcgcaatcattgcgaatacaaacagtacaaacaggaagcacagcagctgtttccactgttcaaaaaaccatatatgccttgcaaaacagtttctgtagccctcgactatataggttacgggattgaaataaaacagccttcttatccatacatacggaattgatttcacattgaaaagaatacccgaaagccagaacactgcggataccatagccttgagcatattgtgaaaatccctgcttacaacagaaagcagacctgtcgccatactccatacaatagtaaacagcagcataaatgcagtatataaaggaagctgtatccagtaaatcgacggcggaaatccgaagcagaagaacagaacaacaactccgcccatcagaagaacatggctgcacaggttagatacacttacaaacgtcggaattaccgaaacgggaaattttatcttggtaacaagctgcttgtacctgcggaagcacgatgcgccgctgaaaatcatatccctcatataaaaccaggctatcataccgacaacaagccacaggaaatacggacatacaattccgtctattgacttggagcctctgaagcctattgtaattgcaaaccagtatacgaatatcgtcattgtaggcttcacaaaagcccacagccagcccagtcccgagcctttgaaattcttgtctatatcaaccctggcaagacttattatctgctctttgtatgatatatgctcgttaattatctcttttaatactttaaacatagtttcccctgtcggacatacgtcaatacacctgccgcatgccctgtcctcatatagcttttaaaatttctatgagttattatattccatacagataaaaaaatcaacatttccccctttagcctgcctgcaattatttactttgagtctgacttatggtaaattatatatgattgactaaaaggaaacattaatgatgaaacttatattaaaaatattcaagctgcttctcagaattatatacgctccgatgaagctgtttcctgtgaacagaagcaaaattctgtttctcagcagacagtccaacgagacaactctggattttgcaatgcttcaggaggagcttgcaaagagagaggcggatcttcgtttcgtcaccatatgcaaacgctccagtgacagcaaggccgattatctttcatttggaatatgtatgctgagaagtatgtaccatctggcaacttcaaatgtatgtatcatagactcatactggcctgctgtatgtatgctgaaccacaaaagcagccttacggtaattcagatatggcatgcccttggcaaaatcaaacagtcgggatatcagactgtgggcaaggcaggcggcagaggcagacttgtggcagacgagctgtgcatgcacagaaattatgattatataatcgcgggaggcaaggcctggaacccttattactgcgcgtcctttggcacgaccgaggacaggcttgtcaatatcgggcttccgagaatagactaccttttaaatcaggaagctgcaaaccgcgaaaaaatatacaaaagctatcccgaatttaagggcaggacagtgttgctttatgctcccactttcagaaagggcatcgaagtaaactggctgccccttgcggaaaatatagattttgataaatatatacttgtggttaagggtcacccgaatcagcccctttcctgcgacataccacaggtctatacctgtgatgagttcaaatcggtggagctgctttcggtctgcgattatctgattacagactattcggccatagccatagagggcgcgatattaaaccgcaaaacatactatttcgtatatgattatgaggaatacacctcgaagaacggcacgaacatagatctgttcaaagaaatgccgggctgcgtattcaaatcggcagaggagctgtgccgcgccatagacggcgaatacccggaaagctcacttcaaagctacagacagagatttctgcctgaacctctgggctgctccacaaagcttttagccgatatgatattaactttgaaaggaaactgattatgcttaaatttgcaaggaaatgcttcaataaattaaggctctttgtcctttatttcagaagaatactgtttgccaaaaacaatttcaaatgttcttttttcaccaagcttcgcgccaacatattcggaggctatctggccgatcagtggatactctacgattttaagcacaacgacaaaaaagaatatctgtcggagtttgactggtacaggtcaaggtatatcaacgaaccgtttgactatcttctgaacaacaaaatcgcctgcaacgaagtgcttcagcagtatgtgaccgtacctaagatatatgccatgaagcgcgacagactgctgtttgatttcagcaattcaaatatgacctatgagcaggtttatgaaataataaagcaccacagtcctctgtttatcaagccttatgccaagggcaagggcaacggtgtattcagactggattacaaaaacggctgtccatgcatagatgagaagcaggtatcatatgatgatatgattgcatttctcaaaaagcaggaggactggatgatatgtcaggctatgagtcagcacagctattcatctcagatttatgacaagacagtaaacaccatcaggcttataactctcagagatccaaagaccgatgagttcaagatattctttgcggtacagcgtataggcaccaaggagacaattcctgttgacaacggcagcagaggcggacttgtatcaaagattgatcttgaaacaggtaccctgagcgaagcgagatgccttcacaatttagatgttcacaaggttcaccctgattcaggcgcgccgattgagggcgttcgcattccggactgggataatcttaaagagagtatgctcagacttgcaaagaagctcccttatatgtatttcgtggcgtgggatattctcatcacacctgacggattttgcattatagaggcaaacacctcttcgggagttaatataatacagctctggggcggacagagaaacggcgagcttggagatttctacaggcatcacaaagtaataaaataggagggcctatgaaatatattattatggccgacggcaaaggcaccagatggaacaactttaataatatacccaagcactttatagaaatagacggagagaaaataatattcagaacagtaaggcttctgaacgaaatggacccgggctgcagcgttattatcacctctcacgatccgagatacgatatacccggcgccgtaaggcatgagccttccaataacgtacttgagattgacaggtttacagaagagctgctggaggacaatgtatgtttcctctacggcgacacctattactcggagttcgcgctcaagactataattaaaaccaaagccgaccccatgatgttcttcggaaacgaccgctccataatagcagtcaaggtcggctcaggcgaggtgttcaaaaaacattttgacagaataaaggagctgtttcttgccggtaaaatcagccgctgcgtaggctggcagatatatgagtcctttaccggagggcctcttgaatcccgacagataagcggcagcttcatcaaaatctatgacggcagccgtgatttcaacactcccgatgattttcagaaaagcagagatttatagcaataaaaaaagtggaaatgtacggaattgaaattcctattcccacatatcgcacgtaaggtgcgataacattcaaggtactttctttgaaacatacggaaatatctacaggtcgatatttcctatgttataaaaaatgcaggattcaggttttcacctgtcctgcattttaattatgctatttttcttttttgtcgattaatataagctctgcgctcagtcccgacagatttgaagaaaggctcagtgtatctgaaaccgccagatctccaaactctacaaacggcagggttctccagttgttgagaagcgcgtttctcttgcttggcaccacctgaccgctgtcctcatatgccacaattatattctctcttgtcagcttgtatcttgagattttaaactcgcctgaaataccggagcatcttatcagaaactcaacattgtcggtgtagttcaaaatagccttgaggtcgtccgctctgcctctggattcgttaaattcctccttaagcttctcattgaagttatatacaagaatgctcaggctcttaacctcttcaggatatttggccgatgtagttattatataattgtcgcccgacgccacaacctgctctctgaggctcttaatcagattgtaaggtcttgcaatgaatttaagattttcgccctttaaaaactcctccacgctctgattctggtttttgtttacaatgccgaactggctgttgtagatattgacatcaattatgacaggtttggcagcgctgtttttcatataatcgctgtatattcctctcacctgagtccttattgcatcttctatttcctccggtgcggatctttcaatatctgccataacctctctgccgcttaccttgcccgcatattttttgcggtattccagcgggtgcattccaaaccaggtttcaaaatgctttatgtagtatctgactgccgaaaaacctgtttcctccgcaatggcccctatctttttgttggtaccaagcagaagcttctctgactcctcaactctgatatagcttaaaagctcctggaagctgagtcctgtagcctcccttataacatgggaaagataatatatgctgagatgctctctgtcagctatttctcccagtgtaagcttgcggctgtagttttcgtacatatagtctgtaattctgttgagtctgcccgaaaggattttgttacccttgtttctgacctcgtttacaaaccgtccgtcctccattacaaagtactggaaatctgagatcaggcaggcgataaggttgtgagtcgtttcgattaccttgtgctcatagccgtagcctttctgaagtatctccatcattatcttggcaagaagatttctgagaacttcaaggctttcatcgctgtcatcctccatatcagtaacaaagaaagagttcttgaggttgtcataatagcgtgagaagtatgagagatcaagctgcagcatcataaccatgttttcctcgtctgttgcggcaaagctgtgtatctctctgtcattgaatatatagatgtcgccctgcttcatcagatattcatagtgaccgtttttgagatgtatgcttcctttgagaatatacactatctcaatgtcgtcatggaaatgtatcgggtactcgcgtatgttacccaccactacatttaccggcagttcatccttgtaaaaatttttttcctttaacatttttgcttcctcgttttgtttttaacgttttatccctttattgttttcaatgtaattttttattccgctatatatgttttttgccatttcattctgatattcgtctgttctaagctttcgggactcctcatagtttgataaaaatccgcactccgcaatgacagtcggaaccttaacctgctgtaatataagcacatcggatttggccattgccctgcgcctgtttcccatctgctcctgaacacactctgcaagcattttgccttcctcagagcctccggcataaaacacctgcgcccctctgacgcttctgtccgccgtatagctgttaagatgtatgcttacggctgcatctgccgcagaactgtcgaatatctgttttcgtttttttaaatcctcggtctttttgcttctgattgtgctgttttgttcagaataaaggcctgtatcttcctcccttgtcataataacgttccagccgtcattctctgcaagttttttaagtttaagcgctatatttaggtttatgtttttttcaggagtaccgtcatctgcctgcgcgccgccgtcaacaccgccgtgtccagggtcaattacaattgtaaccgccgtcttatcggcagcagtctctgccgcctgtcttgtatgtaacagtaatcctgccaaaagaacaaccaatatgccgaccacaattaaaagcattttttttagctccataggcacctccctgtttcatatatatgaggcttatccacagtttagcacctttaatttaattatgcgtatacagcaaatttgtacttttttatttattatatactatttcgacacatttgtgctatactatttttaataaattcaaggagttttttatgaatactgtaaaactttatcaaaaaaatgtatatttaaaggaatttgatgcaaaaatcacctctgcccgtacagacggcgaggatattatcataactttagaccagacggcattcttcccaacaggcggaggacagagctgtgacagaggaaatatttcaggttttgaagtaaccgatgtatatgaagaaaacggacaggtatttcacagattaaagggcggcgcctccaaaggagagctcggcgagggcaatgaagtttcaggacagatagactgggagcacagatttgacaatatgcagcgccactgcggagaacatatactttcgggtatgtttttcagagaatacggcggcgtcaaccgcggctttcatatgggcgatgaatacatgaccatagatataagtcttgaggaaaagcccgaatacacggaagtgacatgggaaatggcccagcacgttgagctttgcacaaacgaggcaatatggtcaaacgcccccgttataactcgtcattttgacaggagagaggaagccgaaaacctgcctctgcgaaaggctctggcttttgatgaggatataaccatcgtgtgtgtgggaagtacagacaatccgtcagactgcgtagcctgctgcggcacacacccatccaccgcaggccaggtgggacttgtcaagctctacaaggtggagcctaacaaggggatgttccgtatatattttgaggccggaaaacgcgcccttatggattacgacaaaaagcacaatatacttacagagcttggcggcagatattccgcaggcaccgacgaccttatggataaaatcagaatacacgaggataagcaaaaagagcttcgctccgacttctttgcgctcaggcagactgtaatcagaaacagggccgaggaaatatcagatgaggtaaacgacggcagcgtgcatacatataccttccctgagtttaaaacagacgatctcagaaaccttgcaaagcatcttgattttgcaggttgcaagctggcggtgttctgtgacgagcatacactgaccgctctggtatattcaaacggcaaggttgactgcggcaagctgattaaggataacgcacctgttttcggcggcaagggcggcggcagagccgacaatgcgcaggctaagtttgacagcattgaaaatatgaagctgtttacagatgcggcagaaaaaatactcagataggagcttttatgaaaacctgttcaattatatcgtttatagaaaaagacgcagacaagctgctaaacagattagataaaaattcatatataatatgcgccgacagcggctatggatatgcaagggaatacggcataactccaggccttatcatcggagattttgactcctacagaggaaatctgcccgatgatattcctgtagtcactatgccgtctgaaaaagacgatacggatacaggcttgtgcatatcctatgccatagagcatggctttgacgatattacaatatacggaggtcttggcggcaggctggatcatacggtggcaaatctgcaacttattgccgctgccgccgaaaagggcgtcagcatacgccttttagatgaagcaaacgaggtatatgcagtatgctgcgacagcatggaaatttcacgcaaagagagctgctatctctcagtgttctctgcctccgatatatcagagggagtgtctgaaacaggcgttaagtactgtcttgacaacgtgacgctgtcaaggagctttccgctcggagtaagtaatgagtttgcggcagataaagccataatatcagtaaaaaaaggaactctgattatcattgtttcctatgaaaaatccgcataggctattgacaatttcagatttacatgtagaatattatctgttaacaatattttaatgctaggggagcaattgctgagattaacctttacggtttataccctcaggacctgacccggataataccggcgtaggcaagcatatcttgagttttttcttgagattatttaagttcccctcctggacatcaaggaggtttttttatgtcttatgataagctacagggattctttgaatccacaacaggacagattatatctgtcgcagtattagttattctttttatcggtgtgcttctggcaggcaaaaaacagaaaacaaccacaaaaacaatggttgcttccgcactgctggttgcgctttctatagttctcagccagattaccatctactcattcccgcagggcggctctgtatctctgttcggaatgcttccgatagtgatatgcgcatatttcttcggaacaagacgcgctgtaatgtgcggtatgtgcgttggtatgatagaccttatcttcaagccttatgtaatacacccgctgcagctgctgcttgactatccgctggcatttggcgcgataggtcttgccggccttatatttatggccagaaaagacggacttatccccgcgtacctgtttggcgtactctgcagatacatatgctctgtaatttcaggcgtggtattctttggggcatatgtaccggagggcttttcaccgctcacatggtcactgtggtacaatatcctgtatatgggtgtggaagccgcaggtacagttgtattactgctgataccatcggtacgacactcactgaaacgaataaaaacagagctgcaggtctaatctgcagctctttgcttatttcatctctgtaaggtgcttccggtatcttgccggcatcagtgtcttctggcacctcggatttgttctctctctgatagctatggtttcaaagtattgtttccacagtttctgatactgcctttcatcgctgcacggctccggcagctcctctcctgtaaaatatgtgacataccatatgccgcttgaggcaaccactgctttgtttcttttgatatcgtgaattataaaggggttgtttctgaaacggtccgcgaaatactccgcaagcagctccaggacctgatggtcaggctctatactgctgtaggcaatgccgccctcaagatatgaaaatctgacaagtccctccagcctgtgtacttcgtttgctacctttttgtccagcatctgaaactcatgcactatgggatttccgtgcagcttccacacattactgcccttggcaaagcccagccgtatatagtttaaaattatcatttctctacggggcgcatctgccagaaatactctgtatattctccgcaggtcgtatgccgtaagctttgactccaaagccctgtacactctgcctgcgcaggtttcatcagtctgcactgtataaacctgctccataagcttatgctgatattcgtcctctgtatatatgccggaggccttgtccgtatagtaatgatgataaacgcaggtaagaagcccctcaaagcttccgtcatacaggtaatccattgagaccacctcccgaaagcgccgcaagtccgctgccgaacatagacatctgtataccgttttcgataccgagtatctggtctttaatgtattcaggctccatatttctctcaccgtaatacctgcccgaacatgtaagaaaatatctggcccgtttaagaaccactcccatttttttgaggtcctcatatttgactgccgcaagcttcctctgtcgcactatgcgaagcgcagacacattgcccacgcccggtattctgagtatttcactaagcggagctttattaatctcgacaggaaacctgtctatattgcgaagcgcccatgatatcttagggtctaaatcagggtctaagtcgggatatttttcggtaagcagctcgtctgccgaaaagccgtaaaacctgagaagccagtcagcctgatacagtctgtgctctctggcaagctgcggagcctgctccggcagcagcgctgatttgactacaggtatataggcgctgtaatataccctcttcatcttgaatgtatgatacagattctctgtaagccgtataatctgtctgtcagtctcccctgatgcccctataatcatctgcgttgtctgtcctgcaggagcaaagacttccctgcgttttgacggcagcatcataatgcccccgggctcctcccctatagcaagagaaccgcttccgcgcagcttcatatctgaaatgtagttttcgggtgtgttgagtttctgacccttgaacatagtaccgggtccgaccagagcgtttcgttcaatcagtgtatttgtaatctgcctcataggtgaaaatatctcctttggtttcttctgaggagccagaagctgcagacttctctctgtgggaagctccatattgacgctgaccctgtctgcaagcagaccgatacgatgcaccagcttttcgtctgttccgggtatgattttggcatgtatatatcccgcaaatcccttgtcatatcttagtatccgcaggcattttatcattttttcgcaggtatagtcgggggatttctccaccgccgaggagacaaacagaccctctatatagtttcgcttgtagaattcaatggtaaggtccgcaagctcagacggctcaaaggaagccctctgcacatcggcggttctccggttaacgcagtattcgcagtcatacacacaggcatttgacataaccaccttgagtaatgagatgcatctgccgtctgccgaccagctgtggcatatacccgctgctgctgcgctgcctatggtaccgctgtttctcctgccgactccgctgctggagcaggacacatcgtatttggcgctgtctgccagtatctttagtttctcatatatatccaaattcccaccctccttttttcttacagttattatactctcgaaatataagtttgtaaacatatgtttatatatttttatgcatattgtagcatatactacagcttgtttcttctttctgcagtataatgataatatacacgtatcttttaaatgttttcagtcaaactacatgtaacggaggttactaaaaatgaaagtatcattaaataaagacgaagaaatcgtaaagaccataaaagagggactcaaacgcacaggcggctactgcccctgcaagctgcagagaactgaggacaatatctgtatgtgcaaagaattcaaagagcagatagcagatccctcttttgagggctactgccactgcagactgtattacaaatcactttaacagggaggaaaaatcatgtcagaattaatcatcacaaaagacaattttgaaaaagaagttttaaattcagagatacccgtactgctggatttctgggcagcatggtgcggtccatgccgtatgctcgctcctgcggtatctgaaattgcagaagaatacgccggcagggccaaggtcggtaaaatcaatgtagacgatcagatagagcttgcaatgaaatttaatatcaccagtattccgacggtaatagtattcaaaaacggcagtcctgcagcaacctctgtaggcttctgtaccaaggaacagcttgaggaaatgataaaatagcaccttgaatggtgctattttattagggttttactcagtttcatcttctctataactattgatttcagcttcacattcctgtctttgacaaggcacagcggcgggaacagtacgcaccaccagttttcaccctgccccttgcctatggttatattaagggcctcgtagtttccggcagggaaagttatgtcgccgtagtttttctctttaatccacctgacaccaa

SEQ ID NO: 2668 - DNA, 5195 bp, Unknown
  16S sequences of unknown bacteria
cctccaccccggctccgccgggggccctgcgggccgccttgcccctgcaccctcctgccgtttttttctcccctccgggttctattgccgtccgccgcgcggtaaatatctactaccaatgaccacggaggtgtcctatgaaaaagcttctgctctccctctccgcgctgctgcttttggccgccctcgtttttaccggcatctattttacccgttttcaaagcatggccgccctgcaaaaaatcactgattacagcgatggctataacctctaccgcatggatatccgctaccgttacagcctgaatgacctcctcgcccgcggcatcaccgatgaccaaagcatggtggatgccatcctggaagaggcgctgccgctgctgccggtcactatccaggcaccctccttcggctgcaccgcctttgccgtagtggagcaggatggtaccgcttgcatgggccgtaattacgattttcgctacgatacctccgccatggtggtctattgctcaccacaggatagctaccgctcagtggccttcgccgccttggataacatccaggccaacaccccggagcaaagcctgaaaacccgcctggctaccctcaccgcgccgttcatctgtctggatggcatgaatgaaaagggggtgtctattgctgtgctcaccttggatagcgaacccacctaccagcagaccggtaaacccaccatcactcccaccttggccatccgtctggtactggatcacgccgccaccaccgctgaagcagtagccttgctgcgggagtatgatatgtttgcctccggcggccgggattatcacttctacatcaccgatgccagtggagatgggcgtgtggtggaatatgactgcgatgatcccgcccgtcccctggtggatacccccgcggcagccaccaccaacttctacgcgctctacccggatcgggtcaaacccaaccagcgaaacggtatctacggccatggccgggaacgctacgatactgtactgaaaatattagcgcagcaaaaggatgtcctctccccccttactgtatgggatgccctgcgggccgtcgcccaggagcctgactccaaggatatcaccagcaatacccagtggtccatctgcttccacagtagcactctttccgccgatgtggccttgcgccgccactgggataatattttctgcttccgcctgactgagaatactgccactgcgctttcctaatccaaagcgcaaaaaatccccctttcgggggattttcattttgcctgttatcggttcagcagccatatcgcaatattaagatacgccgcaaagcacagccaaatgagataaggaatctgcagataggccgccttggggcttatctgctcaaaccgcaaagccatgaccatcaccagtgcaatgagaagcagcagccagatcgccgcaaagccccacatctcccaccggaagaagaaaaacggccacagcaaattcaccaccagctgcacgatatagagattccgggcaggcttagcatgggcctggtcggcgttccataccatcgccattcctatcgccatcagcagatacagtaccgcccacaccaccggaaacagccaccccggcggtgataacggcggttttatatagttttcgtagttgcccccgctgccggaaaggatccccgccaacaccccgcctgctatggtcggcagtgtcgcccacaggtaggctttccacggtttttgcttcattgccacgcccccctttgcccttagtatacgcaccgggtccatcctctatgcagccggcaaatggccgccccgcagggcggcgctccgcgccgtgacgggcctttcagcccgtccccgcggcctgcggccgcggcccctgcggggcccgccttctgctcctcctcccctcccagcagaatcctggccttggcggcagcccgcccctgcggggctgccgggcttcgcccggctcggcgcgctgcgcgcgccggggctgccgcccctccccttttgcaaactctcccccatgttaaaatatgttgcttgcttccccgccgccttttgtgccataatagcgggtagataccaccaagggaggtgatcaacatgctgggcgaaaatatccgcgcactgcgcaaagcccggggcctttcccagcaggaactggccgaacggctgcatgtggtcaggcagaccgtcagcaaatgggagcaggggctctcggtcccggatgccgatatgctggtgcggctggccgagtgcctggaggtctccgtagaggagctgctgggcgctccaaagccggaaagcaccgccccgctggaaccgcaagcggtattggcggaaaagctgagcgccctcaccagccagctggcggagcagaatcaccgccggcgccgcttctggaaatgggtcgccatcgccgccgggatatgcgggctgttgctgctgcagcagctagtgcttaccctgctcatgctggggtatggcctcccggccaatagcagcatcggcatcatcggcggcgcggatggccccaccgctattttcatcacggccggctttccctggggcctgctcttcgccatattgggctgcatcgccctggtgatactgggcatcattatgggccgccgcccggactaaggaggaacctatgaaacgatttttcgctattattcttgccagcgtattgctgcttaccgcctgcggcaagcaggtcaccacccaccacatcgaggataaagattggcaggtcgtcacggtgcagtccacccaggatggcagcatccttttcattgggaacagcatgcaggagatctaccccgatgccgcagtgcttgaactgacctgccgggccgagaatggcaagctcacttttacctccggcacgcaaagctgggagggcagctacacccggcaggatagcggcggtgtggaagccaccatttacagcctcaccgtaggggatgaaaccggccccgcggcggtatcggtcaccacccggcaggatggcagcgccgagcaaacgctggtgctgcagttgggcgggtactcgctgtactttgccgcggccgcttcgtaaagttttcggtcaagcctttttcaaaaggcttgcagtttccaaagacagcatctttggtcgcccatttcaatgggcgaaaccccttaaggccggagggcgctccgaaaggggatgaattgtggggatgacccagtgtggtcattcccacaagagggggagccctgcaagagagggcttccccttagtttcccctttagtaagctttcttttcgccgaacaggcgaaaaaagcatcggcagggcgtctctctgcccgccctcacagaaggcttttttcctccaccgataaagagcaaaaaccatcccccatcggtgatgagccgatgggggacattttatggcgtattcttttacttgttcaggtcaggcgccgatacgggcggacggcggaagtgagagtgctgctcaaacgcataagcgatctcgatgagcttcgcctcgctccagggacggccgataatctccatgccgaccggcacgccgatgggcgcgttctcatcgggcgcaaagcccgcgggaaccgcgatggaggggaaaccggtggaggagcacagcacgccattgcgctgctgctggttggcaccgatcttgcagaccagctgctgctgatgcggataaaccatggcgtccaggttgagatccgccatgatcttcagcacatgggtgcgcacaccgatcttgttatacatcttctccagatagcggggagaacccacctcgcgggtcatggcatcgcgcatattgctctcgctaaagggatggaacaggcccttttccagaatctccgccatgctgtggatcttccagtcggcgggcagggtggccagatacccgtccaggtcatgctggaagtcatccaggtggaccgaaacctcgctggtcagccacggctggtcaatgttatcggtcacaggcaccagggtagcgccgttctcctcaaaaaccttcaaggcattgcgcaccaccttgttggtggattcattgatctcttccttgccaaagaggctctccagcacaccaatgcggcggcccttcatgccgtccacattcaggtggtccatgtagcactcctcgtggccaacgctccaggcggtctcggcatcatcagggtcatagcccttaatgacatccaggcagcggactgcgtcctccacggtgcggcagatggggccggcggtatcctgcgtcagggaatagggcacgatgcccgcgcgggaaaccagaccaatggtgggacggatgccgaccaggctgttggcggaggagggggaacggacggaattgatggtatcagtgcccaggccgatgataccgatattgcaggcgatggaagcgccggtgccgccggaggaaccgccgggggtacgggtgggatcataggggttcaccgattggcccatcaccgagctgatggtctcgccccagatggcgaattcatgcaggttggtcttggccagaatgagagcgcccgcttcgcgcagcttcttggtcacaaaggcatccttatccggcacccagccctccaacgcgatgctgccggcggtggtgggcatatcggtggtattaaagttatccttcagcatcacagggataccgtgcagcgggccgcacagcgcgtggtgctcttttacataggcgtcaaaggcatccgcctcctccagcgccttggggtttacacagatgatggaattgatggccgggccctcgtggtcatacgccttgatgcgcgcgatgtaatcctcgcacagctcgcggcaggtcagggttccgtccagataggcggcctgcaccttggccacagtggtctccataatgttaaatttgctcatggggctactccttcctttttcccgggataagcactttttctcctacttacccattttgttattttcattataagcctccaaaatgccttcgtcaacggctttttaccgccttgtggccctttcacaacccgtctctcccccgcagcccgcgctttgttttctgcccctaacggtcgtcccctgcaaaccgaaaataagggcgcagcccgttccggcttcgccggaacccacgagcttcgctcgtggcgcccgcctccggcgggcggggg

SEQ ID NO: 2669 - DNA, 4691 bp, Unknown
  16S sequences of unknown bacteria
ggcactatccggtgggcaaaagcagcgactggccatcgccggtgcgctggctgcaaagaaggaactgatactgtacgacgagccgacaagcggtctggactatcgaaatatggagcgtgttgcgcagaacatcaatgcgctggccgaagccggaaaaacgcagcttgttatcacccatgacccggagttggttgaaaaatgctgcgattattacctgttttttgagaacggggagattattgaatatggcacatggtcggagcgaacaatcaatcgaatccgggactattttgatatcggaacatttgggcatgtgtgactatcacccaaatgataagcgggaatgaaattcagtcaggctccgacggccattgtagctatattgagttatgggcaatccaaacgaaataaaaggtcatagagaggcacccaatataaaagggtgcctcttgttaatcattggaataaaatgtgaaataaaaggtgtcgcaagacagccgctttgggaggaatgcaactgcaatcttgaagcatctgaattttttgcagaaacacaccttgacaaatcgcgtctcagaaaatgatcgtggccgacctgccgggcagctattcgctctccgccggctctgacgaagaaatcatcaccctggactacatcgcctccggcaatgcggatctggcgctggtcatggcagatgcctcccagctgaagcgcagcctttatatgctggccgatttcgtaggaatgcaggttcctgcgattctggtgctgaacatgatggatgtggcgaaaggccagggtattaccattgataccgaggcgctgtcccgcaaattgggcatcccggtggtgcctatgtctgccatccggaaaaaggattatcgaactctctatgagacgatagaagccgcacttgcgcaaaagcctgtgattacgggacaagccatggaatccgccaaagagaaaacagactacatcgacggcctgctgaacggcgtactgacggcagacaaaaccgcaaagcaggcattcagtaagttcgatcgtctggcgctttctcccgttcggggaaagctgctggctttcggcatcatcctgctgattttcctgctgtcgatgatcttctccggtgttgtatcgggtatcgcatcggcagtactgacgccgctgagcgatgttctgcgctccggaatggaacagattcatgtccatgggctgctgatttccctgatttgtgatgtgctgatcaatgtgctgtttttcgcactgatgatggcgtccttcgtgctgggcatcacccttggcttcaatctgatggagggaaccggttatctggcccgcctctccttcctgtttgaccgcaccatgtccaaagtcggcctgcaaggcaaagcgatcatgcctttctttatggggctcggctgcaccatcgcaggtaccacaggtacccgtgtcgtggacaactgggggcagcgggtgctggccattgccatgagctgggccgtcccctgttcagctacactgtcggtcgtgcccacgattgccattacgcttttcagcagtaccagcggctttctggcaatggtgtccatcttcctgtttatgttcctgatgatgtggatcgtctacagagtgttcggcaaatcccttgcccccaaggaggaacgggtgggcctcattatggagctgccgccctaccacaagcccgccttccgcaatatcctctatgtgacctttcagcgcacactggacattttcctccgggctctgcgggtcatctcgctggtgtctatcgtgttcttcgtactgacctacggctttggcggaagcgtagaaagcagcattctctacaaagtcggcgttgtgatcgatccggtaaccaggttcttcggcctgaaatggcaggcgtttctcgccttctgcgcatctgccatctccaaagagtccctgctgggcgttttgaatacgctttacggcgctggcggcagccttgtgagttccatcttcggcgcgaaggtttctgccgcagcggccggcggcatctccgaaattctggccgccaatttcaccaaggcggaaggtctggcctttatcttcgccatcagcttcaatatgccctgcgtcagcgcactggcggccacggcaagagaggcccattccgttcgctggacggccaaaatcggtgtattctacacccttgcgtcgctgttgatagcctgtatcgtttaccacattggagtgctgctcttctaagtcagccgtttgcccgcctgttatccttccctttgcagtcgaaaaaacagagatgtatttccaaaaaatgcaacttagtctgccgttctttctctgtattaaatctccgataaagtgagtcctcctgggaggtccatcatgaacctcccctgggttcagcaaatgggcgcagtcctcccttggcggaggactgcgcttttttacggacttactgcatggaatacaggttggatgtgctgctcccattgtcacggtagcgtgggatcttttgcaggcacccagcatttccgcaaagcccttgggatctttgatctgatactgcatatggttgaaattctgaaacacggggaaatgaccgtggggataggctttcatcacagcatcccggtatttgaaatgctcctcgatgctgccgaactcgaaaaatgtatgctcttgcagttcttccgggaatacggggaacggcttgtcctccagactgcacagcatctggcggcgctgagctttgtacgtcagggcttttccagcggcgatgaaataggcttgatgtcatcgtcatcgcaccacaaaatctttttcagtgtgccgccctttgaccaatacaggctcttgatggccaaatacaaaaacggcgccataatatggcgggtcaccttgccgattctcgcaaactgcccgccgtcaaaaaacacatgatgaaccggcagcttcgtttctgcaagaaacgcacaggccaggtctgcccccaaggaggacgccaccaacgcaagctccgtgatccgctgctcgaccagataagcctccaactgccgcagctcgtccgccttgctgatatagttctgtcccgcacagtagacggtagaggttggcattatgcagtaatatctgtctttcagatgctccgccaccggactgctgctcttgccggtcacacccatggcgtgaaagaacagaacggccgggttctctatatttccgactgtttgaaaaatcataaagcaccttcttttttgaatctacgtttccatttaatgttccgcaagctggaactcaattattttacgccataaaggatgccttttcgaaaagacagatagatcggcaggccgccgagtacatttatgaaagcgccaaccgcaaaaacaatgcaacctgcttttgcgccgatgatgataccgaaaattcctccgatcacaatcagcccgaagctcatattcctctggtatcgcaaagcaatttccttctcgtggatcttttcaagatatattgtaaaggcaattccaatcacgagaacgaccatatccgccacaaggaggtaatttaattgatgaatcgtgtaaacgattccactgatgagttgaattatccaaccaacatcacaaatcaatccaagaatcagaaaccatttatccggcatggttatcgtataacgcttccctgccttttcgaacgtttctaattcccttatatgatcttctgtacgcttacgctttgtatgtagtcgatcatttatagacatcatattactccttttcctctttggattcagattcgtcgacctcaacggaatttgaatattatagatccatcctccatgcttcggggcaaatctggagcggattgcttgcaatctccaactttatcatcaaatcagcacactgcactgcggattcccacaacaagagctgcaatgattgcagcaccaacgagccagatcgccgttaaaaccaaccttttcctaaacatctgcgtccaagactgcacataatccatatcttcaagccccggaataacccagaacttgctgaaccttacccagatctcatctatgataaatccgtcataccagttcatcacttcaagaaaaagcactgcctgtaggtacgccgatttgaaatcggatgcccgattccataaaccgataatccctaaaagcaaagctgccatcacaatatagaacgcgatcatgaaatgctttcgttttttcctgatcgtaatttcatcaataagcccgatttctaccgcccgtttctgcacttctctgggataaaaatagattccattcagggcattgtctcttactgcaatcttcaccataagtgtaaaaacgagcagatagacgataagctgaacagcaatcatcagttctacccccgcaaatagcgatttgtcagcagctccatacattatttatccactgtatggttttctctcccatgacgctgcgctcggcatagcacgcctccggattttccttctctgattttatgaagtacttgatctctgcgccgcagtattccagcatcatgtggctcatatggtcaaaagcgatatgctgatacggatgtgaatagctgctcgattccaaccttctgcacagaatttcgcagctttcggtggacggccatacggtgtcaactttcgtagacaacatgag

SEQ ID NO: 2670 - DNA, 8959 bp, Unknown
  16S sequences of unknown bacteria
gtgcgcgtccgccactacgtcgtccgcgcttttttccgcctggtagccgctggccaccatatggctgccggcgtcgatgacgccacgcagcacgctgcggtcctccacgatcttgatatactgcgaaacattggccgttgtcggcacaaggttggaaagcgtggtcaggtattccatgccgccggcgctttccagcgtgccctgctgattcatcttttccagcacggtgacaaggtctaccggctggccgtccagatgcaggctggccatggccgcatagatcttttgatggccgggggtatagaaatcctcggtcgtcagcgtttccatcgcctgggtgacggcattggcatccagcagcatgctgcccaaaacggactgctctgcctcaatgctgtgcggcggcacgcgctgtgcgctgctgctcatggcccttcctccttttttacaggctttccaccgttacggtgatcttgcaggatacgttggcgtacggctttagctccacggtgtagctgcccacctgcttgatgggctcggaaagcacgatctttttcttatccagctcatagccgaactgctggtgcagcaggtctgcaatttccttattggtgacagcgccaaagagcttcccggtctcgcctgtctttaccttaagggtcagctgctggccctccagcttttccgcctgtgccttggcctctgccagctgcacggcctgcttatgctgggcggccttttccttagcagcggcgttgttgatgttttgctgggtggcctctacggccagatttttacggagcagaaaattgcgggcatagccgtcggacacctcgacggtctgcccctttttgcccgtgccctttacatcctgattcaatacgaccttcatcgtctatttcctcctttatttttcaggcgctgcagtttcgcatcccatataggccctaagcgcctccgggatggcgatgctgccgtccgcctgctgataattttccattacagccgccaccgtgcgccccacggccaggccggagccgtttaaggtgtgtacgaacttcagtttgccgtcggtatcgcggaagcggatattcgcccggcgcgcctggaacgcttcgcagttgctgcacgaggagatctccacataccggccgtaggacggcatccagacctccaaatcgtaggttttggcgctggagaagccggcgtcgccggtgcaaagctgcaccacgcggtacggcaggcccagcgtttgcaaaatgcgctcagcgtcgtttgtcatgcgctctaggtcttggtagctatcatccggatgggcaaaatgcaccatctccactttattaaactgatgctggcggatgatgccgcgggtatcccttccggcgctgcccgcctcggcgcggaagcaggcggaaaatgcgcagtagcgcagcggcagctcctccgcttttaggatgcagtcgcggtacatattggtcaccggcacttcggcggtggggatcaaaaagtaatcctgccctacgaccttgaaggcatcctcctcaaacttgggcagctggccggtacccaccatgctgtggcggtgcacgatgtacggcggcagcacctcggtatagccatggtccgcatgggtattcatcatgaagttaaacaaagagcgctccagccgcgcgcccagccccttgtaaaaggtaaagcgcgaacccgttacgcgggcggcggcgtcccaatcgaaccagcccagcgcctggccgaggtcccaatgcgcttttggctcaaaggcaaactgcgtgggctcgccccagcggcgcacctccacattttcgctgtcgtccttgccgaccggcacgctttcgtgctgaatattgggaatggtcagcaggatctcggtaaagcgcttttccagcgcgtccaccttttgcttggcctcgacgccgtcctcttttttcatcaaggataaaaagcgctgcttactatcctcaaacgcatcgccggccagcgcgcccgcctcagccttttgcgccgcctccaaaagcagcgccctggcagcgccctccggcgtatctgccgcaaactctgagcaaaacgcctgcacgcgcccctgggccttggccagcgcgtccgcatctccattggcctttttcagctgctgcaaaagcggcataaaattggagagccggttgcgggaagcctgcaacgcctcgctctggccgatggcggccctccgctctgcgtccaccgccatcaattcgtcgatgacggccgggtccccattgcggttctgtaccgcggtcttgacaaactccgggttttgccgaatgaattttgcgtctaacatgcctcgtctctccttatggtatatggtatacatcctgggcccggcatgccgtttgcgcatccccggccttgttttcgtattgctttatagatccagcttcatatcgccgggcttgatccaccctgcgcgccgcatgccgttggtgatgaccagtgtcaacaaaatgggcaggataaactgcaaaatcgccatctttaataagatccacaccatcggctcgctacccgccatggcggcaatggtgccaaactggcccaccagcccgctggtgcccatgccggcgcccatggcgttgtttgtcatggcgaacaacgtggtggacagcggccccaaaatggcgctgacaatgatctccggcagccagatcacaggttttcttacgatattgggcacttgcagcatgctggtgcccaggccctggctgatcagcccgcccacgccgttttcccggtagctggccacggcaaagcccagcatattcacacagcagcccaccgtagccgcgcccgccgccaggccggaaagatccagcgaaatggcaatggccgccgaggaaatgggggctgtgagcgccatacccatcaccacgctgaccagaatgcccatcggaatgggctgtaattctgtggccaggttgataaacttgccgatgcccgtcatcatcgcattgatgccggggccaatccaggtagcgaccagcccaccgacaacgatggtgacaaagggcagcacgacgatatccaccttggttttgcccaccagaaggcccgcaatctccgccccggccagggacgccaaaaatgcgccgaccggcccgcccagcgtatagcccagcgccccggtggccgccgaggaaaacaccaccagcggcgcatgctttagcccataggccacagccacgccgatggccgcgcccaccaccgggctggaagcggacagcatttgggcaaacggcgttaaaaacgaaagcccgggaattttccccagctgctgaatgatgagcccgatgatcagcgaggcaaacagcccctgtgccatggcgcccagcgcgtcgataaaccagcgtttcaacaggcctttgataccgctttgccgtttggccattggtattcttcccctttcctgccgccggcgcggcgttgcctttatcgttttcccatgcgtttgtattccacccgaatgccctggttatccagcgcgatgaccagcggctttaggtctaaatattcatgaaaggaaatgaccttttcatcctttaggtgcagctctaccccaagggcgctgccatcataggaggcaaacgccacctggctgatggggatgatggtttccctgccgtcccggtgcagacgcacctccgtttcgccggcccggtagtaatcgcgcccgtatttgaggtatacggccgccaaatacgccacagcgccaatgcacagcgccgccgtcaaaatggtattcagcgtggtagggtccccgggcagcagccaaactgcgcccacagccaccagcgcatacaatacgccgcggctgagccttggcagcaaggccttccacgcatagatcctcttttgtctcatcctctgtcttctccctgctgtaactgtttgcagtgcgccgccagcagctggataaagccctggacatcctcatactggtagacaaacgccacgcgcttggtaccgttgagcaccagcatcatgcgcgcgtgcatggcgtcgtaaaacatgcctgtgatgtcgtcataggcgatcctggtggccggcaaaaaggttttgcggatggcaatgcccgtttcgtcggtacggatctcggcaaaaaagctctgggacagcaccatcagcccataccaggcaaacagcgcgaaaaacacgccctctaccgtttgcatgggcttggcgcgaaacgcttcctgggcccagacaatgccgagcgccagcataagcgcaccaaatagaaatttttgtgcccaccgatttcggttgatggaaaatgctcgcatattacatcctttccggcgatgcgatgcccaaaagccccagcccggtcttgagcacggtgcgcaccgcttttgtcagctgcagccgcgcggcggtctgcgcgctgtcctccgtgatgatgcgctcttcataataaaaccggttgtacgcctgcgccagctcgatgagcgcccggctcaaaaggtacggttcgtttttctccaacgccgcggccacggcgtccttccagccctccagcgcgcgcacgacggccgtggcaaacgggccggaaagcgccgcatcgtccggctgggcctcttgccatgccgggtcggctttccttaagacgctgcagcagcgcgcgccggtatattgcaggtacggggcggtctccccgtcaaaggagagagcacggtcgtaggaaaacgcaatgtccttgatcctggcattgtacaatacgccaaacaccaccgcgcccacgccgacctgctcggccaccgtctgtttgtccgaaaggtgcggagatttttcctccaaaatttcgcccgcgcgcgcgatggcgctgtgcagcacatccttgagcagcaccacatggccctttctggtggaaagcgtggtgccgtccgccatggagaccatgccaaaggccacatgctccaaatccttggcccaatcgtagcccatcttttccaccactttgaaccattggcggaaatgcaggttctgctgataggctaccacatacaagcacttggcaaaatcgtaggtttttttgcggtagaacgccgcagccaaatcgcgggtggcgtatagggtggtgccgtcggatttcaagatgatacaaggcggcatattgtctgcggacagatccaccacatacgcgccctcggagagggtcagcaggtgtttggcccgcagctcgtccaccacaggctgcatcttatcgttgtaaaacgcttcgccattgtagctgtcaaacgtgatgcccaagagatcgtagattttcatgacctcctggatggtggcctgcttgaactgatcaaacagcgccagcgcaatttcgtcgccgtcctcgatgcgcttgaaccaggcgcggccaagatcctccagctggggatccttttccgcttcctcgtggaatttaacgtacaggcgcgtcatctcctccacgcccttttcgcggacggcggcttcatcgccccacaattcgtaggcagccagcagcttgccaaactgcgtgccccaatcgcccaggtggttgatgcctacgctcttgtagcccatgaaattgtagagattgtacagggcatgtccaatggccgtgctggaaaggtggccgatatggaactgcttggcgatgttgatgctgctgtaatcgatgcacaccgtgcgcccatgcccgatatcctgcgcgccgtagcgctcgccttctaaaagcgcctgatccagcacggtacgggcatacagcgctttgtccacagtaaaattggcatagccgcccgccacctccgccttgacaacgcaggccggcattgcgctttccacaatgcttttggcaatcagctgcggcgctttgcgcagggttttggcaaaggcaaagcagggcagcgcataatcgcccagggccgggtccggcggggtttctatcaacggcaatacctgttccaaaggcgtatccagcacctgggaaacagcctttgcgatctcttgtttgaatggcaactttctcggctcctttgccctctatccgcccaggggcgcagagggatgcaaactttatacgtatacttagtttactatatcacaatccccctatgctttcaattctgcaccccgaaaaacaagcaatttttctgttgacattgcgccggttgtgatgtattatatttgagcaccatgtaccagtagctcagctggatagagcgtttgactacgaatcaaaaggtcgggggttcgaatcccttctggtacaccacaaaagacccgaaaccatatggtttcgggtcttttgttatttattttcgtctgttatggggcaaatacgaccgccatggtatacggcccgtcgctgcccacatccacgcgcgccacatgcccggcgctgtccaccacataccggcggtattgggcgccccataccgaggcatacggcgcttgttccgtgacatcggtttgcttcatctccacggtatagactcggctgccgttttcgcccggctcgcacgtgatggcctgtatctctcctttttgcaaaggggtcagatccaccccggcgatttcggacagcgtacggtactgggtggtatcgtccagcgccgtttccggaagctctccttccgggaggatcagcttgccgttttggtattgatactcgctttggacgccttccgcatcccatccctgatgggtaaaatagggcgctccgttttcaaacgcatactctacggcaacggacagcgattcgctgtcctcggacaggttcaaaatccgaaactgccccgcctgctgcgcattgagcgcctccagcgcctggttcagcgcctcctccggccgggcggcacagccgcagacggcgagaagcgcaaaggcagatgcagccacagcacagatggctctgaaaggatgacggttcattttcttccctctcttagtagtagaaagtattcgtttctataaagtcacggatctgggccgcctctaagtggtactcctctacagcccgaaccgcttgattcgcagggtattcagcaaagccgcagcgtttcatggtaagcaccgtaacagaggctgcttttgtatgccaataatctgcaacccctatataagcgcccgcatccgtaaagccaagcttcaactgaaacgtgccgactgtataacccggctttgtgataggatcgctgtacctgcggatagaatctctcctttgtgtacggatcttattctcgggctgtacttctatccatctcgcttctccgctctgaatatcctctagaagagtttccagttctgctttctccgccgggtcaactgacctatcgatcaattccataagccactgcgtattctcatccggcacggcaaacgccgttcccgagaaaacaaacacagacatcacaacagcaagcaacaaaccaacatatctatattttttcatctgtcaaaacctccgcatctttttggctccctgtctcctcctttgatccagcgcatcggaatcacgcctttccatctcttggtaattaaattattacatagaaacatataagtgtcaatgtatctttccgccgaacataaccgagaaaaacaaaggaaaccccgcgttttgtaaagggttggtctaaccaagatggcacccgccccatgtactcggtaagcgtttctctgcttggtaaagcagctgaagccctggtatacatacaagatggcaaagtattttccgcttcctatactacctctgccggggataccggcaagacaggggaacaatttcgtggatattcctccgaagtatacgctgccctttactcggctttcggtgaggctgacaaagaaaatacatcagccgatactctttcctatacccggctggccagcgatgagcatcccagcatcgtatataccgtcacggtttctacaacggattctatgaactccattttcctatcctatatagataagtaaacgtttgcggctatcaaaagcacctcttgctagggggcatttttatatcctctgcaaaaaatcccggtaaatctccttatattgctcggcaaactggctgcccttccgccagaggaaggaaaaatcatgccggacgtcaaaatccgcaagggggatggcgcgcagggtaccctgcgccaactcctctctcacggcggtttcatacaaaaaggtaatgccgcagcccgccttggccagggtttttaaggcagtgaggctgctggcctccacgcggcatgcaaaatcctggatggtcaggttttttccttccagatagtgctccaggatatggcgggtgccagagccctgttcgcgcacaagcaggcgctctgtaagtaaatcgtggatacggtatgcggcggctggcagcggatagtccgcgccgcagaccggcaaaaagcgctctgtgcaaaacagcagcgaatcgtatacgctttgggaaaacgcgccctctacgatggcaaagtcgatggcaccgtcatccagggcgcggagcagctgctctgtatccgccacgtgcatggagatctgcgcatccgggtgctgctttagataacgcgccaataccggcggcatcgcgtattcgcccacggtgagcgtagcgccaaagcgcagcacgggctgttctccgcccaaagaagcgatgcgtttttgcagctgcgccgcatcctgccgcatggtgcgggccgcctggcacagcatgcgccccgcctgggtcagcgccagctttttgccccggtaggaaaaaagagcggcgccgtattgcttttccagcgctttgatgtgctgggaaacagcgggctgtgtgatatgcagcgcttcggctgccctggtgatgctcatggttctgcataccattaaaaagctttcgatgcgataatccagcatggcgatccctccgccattatcataatatattcttatc

SEQ ID NO: 2671 - DNA, 12565 bp, Unknown
  16S sequences of unknown bacteria
tgttcgtttttgttgtcgcccggcttatagtagacggcatatttaagcgagtcgggaagatactgctgtctgacccaatgattttcaaaatcgtggggatagaggtagccctgtccctttttctcagcgtcctcgccgtcaaagtgcttgttttgcagctgccgcgggacggggccggccttgccctgctctatgtcacgctgggcggcggcgacggcggtgtagcccgagtttgatttgggcgcaagggcaatgagtattgcggcgtcggcaaggggcaggcgggcttcgggcataccgagctgaagcgccatgtccacgcaggatttgacgatgggaattatctggggataggcaagccccacatcctcacaggcggcgcacataagccgtctgcaggccgacggcatgtctcccgcaagcagaattcttgagagataatgcacggccgcgtctgggtcggaaccgcgaagcgacttgtgcagcgccgaaatgcagtcatagtgctcgtctccggttcggtcgtatcgctgagccgaatttttggtgagctggtcgacaatatcctccgaaatgacgacggggtcaacacccgccgggcaggacagcagacacatttcgcaaatgcccaccgcctttctcacgtcccctccgcaggcgtcgcatattttggattttgagcggtcggggagctcgattttcacgccgttttcctttgaaagaatggaaaatgcccgctcgacggcaggggcaacgtcggcaggggtcacgggcttgaattcaaaaacgctgcagcggctgagcagagcattgtaaacataaaaatacgggttttcggtggtggaggcaataagggtgatgccgccgttttccaccgtttcgagcagggactgctgctgctttttcgtgaaatactgaatttcgtcaagatagagcaaaatccctcccggggcggcaaaggtgccgatttgggaaatgacgtccttgatgtcggaggtggaggcgtttgtgcagttgagacggcacagctttcggtcggtttttgcggcgattatggaggcgagagtggtcttgccggtgcccgacggaccgtaaaaaatgaggtttggaatgttgcccgattcgattatgttgcgaagagcccttcccttgccgataaggtggctctgtcccaccatttcgtcaagacttgagggtcttatgcggtcggccagcggtgacttcatatttatgcctcctgttttgctaagattttgtccagtctcggtttaacaataaccgtgagggcggtgacggcggcaattttaatgcagtcccccgcaaggaacgggaccacgcacaccgcaagagcatatttcagcgccttgcccgtcagtacaaggaaccacaccgtaccgaaaaggtagagaacgaccgttcccgcaaccatggcaaggggcagcatgaattttttgcccgaaagctttaaaagaagtccgattatcaaaacgcagggaatatatccgattatgtatcctcccgtaacgccgataagcttttgaaagccgccctgaaatccggcaaagacgggaacgcccacagcaccgagaaaaatatatacaagcacggcgggaattgaaatcttaagctcggccgccgaggcgacaaagtaaatggcaagggtggcaagggaaatgggaatgggacctatctgaaacgacaggggagccagcacgcaaatgagcgccgaaagcagagcggtaaatactattttttttgttttcatcaatttttcacctttgaaattattgctgcggcggcaagtgcaacgaggttgaccgcaactatggacgcgcccaccggcaggtcgaggaagaaggaaatgcaaagcccgaaaaggaaacatatcaccgacacaaatgaggagaccgcaaccacggccttaaagctttttacaagccgctttgaaatcagggcggggaagatgatgaggcttgcaatgagaagtgtgcccatcattctcatgccaatgacaacggtgacggcggtgagcagcgaaataaagaactgatatagggtgacgtttatgccgcaggccttggcgtatacctcgtcgtaggtcaccatgaaaagacggttgtaaagcagaataaaggcaatgataacgacaagtccgaggggaatgctcagataaaggtcggcgtcggtggtgccgagaatgctgccgaacatatagctgtacacgtccacgttcatgccgccggcaagataggttatgattattccgattgacagcgcgccggtagaaaccacgccgattgccgtgtcgccgttgcctccgcttttttggcttatgagcattatggcaaaggaagcggctgcaacaatgggcatggaaacataaagaggcgaccacccgagagcaatggcgagggacagcgaggcaaagccgatgtcggcaaggccgtgtcctataagggcatagcgtttaagcacgagtatgacgccgagaagggcggcgcatatcgaaatcaccactcccacaataagtgctctgagcataaagggctgcccgagagcggacagaaattcagtcatggtgacaccccctgtgatgatgatagaaatgccaagcctcggcgttgccgtcaaactcgattttttggtttatgacggcgaccctgtcggcatatttgcctatttcctccatgtcgtgagaaaccatgactatggtcatgccgtcgccgttgaattttttaagcatggtatatatttcggcggaaatttgcgcgtcaagcccggcacagggctcgtcgagaaagagcagcttcggttttctgcatatcgagcgggcaatcatgacccgctgctgctgacctcccgaaaggccgcctatgcgttttgaggctattgcgccgattcccatggtttctatggcgcggtcggcaagcattttgtcctcctttgaatagaaggtgcaaagctttcgtccgcttttttgtgttccggtgagcacgacctccctgacggttgcggggaagcacttttccacgggattttgctgaggaagataggagatctcgtcgggggaaagcggggtggaaaccgaacccttttcaatgggaacaagacccataacggcctttaaaagggtggattttcccgagccgttgttgcccacaaggcagagatactgaccctcctccacatcaaggctgacgttttcgagagcgggagcctttccgtagcagacggtaagatttttaaccgaaagaatgttcattgggcaagacctttctttaaattatctaaatttcggttcataatgtcggtaaaggatacgccggagtcaaagtcggccttggacagattgtgtccggtgctgaattcaagcagctcgcagccggcggcgtcggcaatcgagcgggcgaccttggggtcggcaagttcctcgtggaagatgtatttaatgccgttttgctttatataatcggtgatttcggccacggttttggagctgggctccacgtcggtggtgcatgaggtgtagacggttttatagttgagcccatagctttcggtgaaatatttataggcaaaccgcccgccgaaaactattgcccttccgttcgccgcggcgaccgtgtcggtaaattcacggtcaagtgttaaaagctcgcccttgagagcctcgaaattccgctcaaaataatcggcgttttcgggggacttggcggcaagagcattttttatttcctcggccatcgtgacggcgtttttcatgtcgagccacatgtgcgggtccttttcgtcgccgtcgatgtcgtcaagaagggtgacaccgtcggaaaggttgaccacggtgtttttgtcggcaatcgaggccgatgacagcaccttttgcacccacggctccatttcgtcgccggtgtatataaaaaggtcgctttcgccgatttcggaaacgtcgcgaattgtggggtcgtaggaatgagcctccaccccgggggaaagaagcagtttaacctctcccttgtcgccggctattttgcttgcaaaatcatattgggggaaaagggtggtgactatgaaaagcccgtcgtcgctcttttttgtttgctcttttttgcaggacgaaagcccgagcaaaagcgaaaggacaagggcggtgcagataaaggcggataaaaattttctcataaaatcactcctctatgctctttgtggccttggcgttaaggtccatgccgtcggtgtggccggccgccaattcgtaaaacccctgaacccccaccatggcggcgttgtccccgcagtatttaagctcggggaggaaaagggtcttgccgctttttttacaggcggcggcgaggtctctccgcagcagcgagttggccgagacccctcccgccacggcaattttgtcaaagccgaagctgtcggcggcaagcagggtcttttttacgagaatgtcgcacacctttttgcgcacacaggccgagaggtcctctcttgaatagctctcgcccttttgttcggcgttgtgaatgatgtttatgacggcggttttaagccccgaaaagctgaagtcaaaggggctgccgtccaccgacggggtgggaaggcggaaggcgtcggcgctgccgagctcggcgattttgtcaagctcgatgccgccgggatagctcatgcccatggcgcgggcggttttgtcaaagcattctcccgccgcgtcgtcccgcgtgcggcccagcaccctgaattttgtatagtcctcaacggcgactatttgcgtgttgccgccggacaccacaaggcaaagatagggcggcgccaaatcctcgtgagaaatgtagttggcggcgatgtgggagcggaggtgatgcactccgcaaagaggcttgcccgtcgaaaggcacaatccctttgcaaaattcacgcccacaagcagcgcccctataagcccgggaaaggcggtgaccgccacggcgtcgatgtcggaaagggaaacccccgcgtcttcaagggcggcgtttaccgtataaactatgttttcgctgtgccgtctcgaggcaatttcgggaaccactccgccgaaaatacgatgttcctccacctgagaggccaccaccgacgaaagcacccgtctttcctcggttaccgcggcggcggtatcgtcgcaggaggattctatggcaagaattttcataaaaatcagtttcctctgttcttgttgtaaattatgttgagtccttcaagcagcaagtcgctgttaagcacaaaatcgcgtttgcagaaacgtattaccgaggcggctctcccgcccgttgccacaagggttgccttttgcccgagaacctcctcaattcggtcggccatgccgtccatcatggcggcggttccgtatataagccccgatttcatggaggaaacggtgttggttccgattatctcctcggggttttcaaggtcgatgtagggcagctgagccgtctttgaagccagcgcgtcgagagaaattcccattcccgccgaaattgttccgccgagaaattctcccctgccgtttatgacgcttatggtgttggcggtgcccatgtcgaaaattatgcagggcaggggatattttgccacggcggcaactcctcccaccacaaggtcggcgccgagctgcgcgggattgtcgatttttatgttgagtcccgttttaacgcccggccccacaaggcaaagctcaagcttgaggatttttttcacggcaaacttaagagcctcgttgaccgccgggacgaccgacgcggccacggctccctcaaaaacgccgaagtcaatgccctcgattttaatgagattgtaaaggtcggcggcatattggtcgccggttcgggaaaggtcggtggacattctcaccgaattgacaagcttgtcgttttcaaaaaaaccgatggtggtgcaggtgttgcctacgtctattgcaagtatcataagtcacacttccgaaattttattattcatctcattttatcatatttcccccgtaaaatcaatattcggcgaaaaaagaaaggcccacggaatgttccgcaggccgaatgatttataaggctcagttttccgaaacgccctttttgccgagaacggctttaagcacaaagagggttgccagcataagcacaattgcaatgggaagggaaatccatgtttggataagtcctgcgatgatgtaggagacaaaggatactcccgcaacggtcatcgcataaggaagctgagtcgaaacatggttgatgtggcggcattgcgctcctgccgaggacatgatggtggtgtcggaaatgggcgagcagtggtcgccgcagacggcgccggccatgcaggccgaaatggcgataatggtgatgtttccgtcggtgccgctgaaaacgctgagcacgatgggaatgagaataccgaaggtaccccaggaggtgccggtggcaaaggaaaggccgacggcaataaggaagattattgcggggagcatcatgcgaagtccgcttgccgagccctcgataagttgggaaacaaagacctttgcgccgagagaatcggtcatggtctttaaggtccaggcgcagcagagaatgaggattgcgggaaccatggccttgaagccctcgggaatggattccatgcattgtttaaaggagatgactctgcggcagaggtagaaaatgacggcgaaaataattgctccgaatgaaccgtaggcaagaccctcgccggccgagcagttggaaaatgcggttgcaaagttgcggaagccttcctcaccctcggtgaagaatccgccggtgtagatcataccgagcatacagagtatgacgagcacgataatgggaatgacgagatcgcatacgcggcccttggggttgtccacggcctcggccgattcgatgtcctccttgccggtggtgaagaggtcgccctttgtaacggcgttgtattcatgctttttcatggggccgtagtcaaatttggaaaccgccatgaatatcatcatgacaatggtgagcagcgcatagaagttgtagggaatggcgcggataaaaagctccatgccgttgttaacgccggcaccgctggcaaagccggcaacggcggccgcccaggaagaaatgggagcgataatgcaaatgggagcggccgtggcgtcgataagataggcaagctttgcgcgggaaacattgtgcttatcggtgacgggacgcatgaccgaaccgacggtcaggcagttgaaatagtcgtccacgaaaatgagcacgccgagcaaaatcgtgcagagctgagcgccaacgcgggtcttaatatgtttggtggtccagcggccgaaggcaaccgaagcgcccgttttgttgagcatggcgacaatggagccgagaagaataaggaagatgagaattccgatgttgccggggtcggctatggtctccataaatccggtgcggacaacatgaacaagcgagccctcgaaattaaagtttgcataaagcacgccgcccacaacgataccgatgaagagggaggaataaacctccttggtgatgagggcaagggcgattgcgatcagcggaggaagcagcgcccaaaatgtggcgtatgcgggaatttcggtgtgaacggtggcgattgccttgtccacgttttcttcaaagttttcgtcgctctgaagattgtcggcatagctgccggtgtagtcgatagcgccgagcactcccgcgtcctcgtcgcctctgacggcgttcaggtcgtattcggccgcgtcctcgccttctcccaccgtcaccgttccggcggtctgcgcggacggttcgtcggcggcaagggctccgaaagagagcacaagcagagaaagcatagagagagcgacaacgacccaagcctttttaagctttaacattgttcattcctccaaaaaagaaaaaagtgtgatcgtgaaccacgaccacacattacgggaaataggtaaatatgtgatagcgctccacggaaagtgacagtccgatacatattctgcatcggcccaacggcacgcccttcggggtggcaaaccgtttcggcagcatttcctttggcgaaagccgggcccctgccgctgttgcctccgctactgataaatgccgcgcctctatcaaacgatgataataaaaatatattccaaatgcttccgtttgtcaagatatttttacaaaataaacacacttttttcatatttggccgaaaaaacaaaaattccccgtgaaaaatcacggggaacttgattgaaaatcggaactaatctttcgtttcgcgggaatggagaaggttgttgagctcgtccataaaggtgtttatatccctgaattgacggtaaaccgaggcaaatctgacataagcgacctcgtcgatacccttgagcttatccatggcaagctcgccgatttgaagggaagaaacctctcggtcgagagaactctgaagagacgactcgatttcatccacggccttttcgagggtttcaagagaaacggtacgcttttcgcaggcgcgcataaggctgtttataagctttgtgcggtcgaactgctcgcgggatttgtccctcttgaccacaactatgggaaggctttccaccacctcataggttgtgaaacgctttttgcaggaaaggcactctctcctgcggcgtatgcgggcaccctcgtcggtgggacgggaatctataaccttgctttcttcatatccgcaaaaaggacatctcatgtgtttttacctgcctgtcaagattagttggtgatggttttttcggtttccttatcgaagatgtgaattttgttggtgtcgagagcaacggtgatttcatcgccggattttgcaagggtcgagggatcgacgcgggcggtgaagttgttgccttcgcagttgaggtagagataggtctcggcgcccatgagctcggtaacctcaaccttggccttgataagaccgtcggtcatggtagaggtgtacatctcctcgtcgtggatgtgctcgggacggatacccatgataaccggcttgtcttcgtagggaacaaggcagtccttgttgttcttggaggccggaagcttgattctgtatttgacgcccttgcgggtcttggtgtcctcggaaccgaattcggcatagaaggtgtcgccctctttgcgaagaacggcgtcgatgaagttcatttggggagaaccgataaatccggcaacgaaagcgttgcagggaatgtcgtaaaggtgctgaggagtgtcgacctgctgaatgtaaccgtccttcatgacgacgatacggtcggccatggtcatggcttcggtctggtcatgggtaacatagataaaggtggtttccagctttatgtgaattttggaaagctcggtacgcatctgagcacggagcttggcgtccaggttggaaaggggctcgtcgagaaggaagaccttaggatcgcggactatggcgcgtccgagggcaacacgctgacgctgaccgcccgaaagagccttaggcttacggtcgagcaggtgggaaatgtcgagaatacgggcagcctcttcaactctgcgcttgatttcctccttgggaaccttgcggagcttaagaccgaaggccatgttgccgaaaacggtcatgtgaggataaagagcgtagttctggaacaccatggcgatgtcgcggtccttaggagcaacgtcgtttacgagacggtcgcctatgtagagctcgccttcggagatttcttccagaccggcgatcatacgaagggtggtggatttaccgcagccggaggggccgaccagcaccaaaaattccttatctttgatttcgaggttaaaatccgaaacagcggtaactccgccgggatatttcttgtaaattcctctgagtgataagcttgccattaaatatatgcctcctgtttcaaacgccgcttgccttgtgcggcgtaatttaaatcgtaaaaccgataaaattataatagcagaaaaaccgcaaaatttcaaggtgtgtagttgcctaaaaatgaggcctgtcctttaggtaatttgtcacatagaacaaacaacctgcacaaaaacggggttcaaatcggcggatttttaacacaatggatattgtcgactttcaagtgtttttgcgggtctcggaagttttttgctccgattcggacagtccgtcgccgcccttttcctccgtatgacgggacagccgtttcgtcaggctcgaatagattttaagtcccgcagcgctgaccgccgctccgcaaacaaaaatcaccgccgcctttgcatagcttttgtcggccacggccgagccgccggcaaccgacagcagaagagcgggggttcgcgcgacggtggaaataacgagaaaatcgcggaattttatgcgggtcagtcccgcaagataggtgagcacgtctttcggtgcgccgggaatgagaaaaaggataaagatgagccgttcaagcttttgttcattatttatgaactttaaaccgtcgatcttgtctttgcccgcaaaaagctcgacaagccgtcctcccacaagtctcgtgagggcaaaaacaattgccgaggcggcggccgcccccaaaaggcagagaagagttcccgttaccgctccgtaggcatagcccgcgcctatctgaaccacctcgccggggataaaggcgatgacgatttggattatctgaaggccgagaaagacgagctttccccatgcgccgaaggagtttatataatttttaaactccgccgggtcggaaaattttccgaaaaagtcaatgcacagccaggtgagccccgccgtcagaacaacaaaaacaacggccgcaaaaacggcggcggtgcgctttgcccgaagcttttcggaagaaatttccgatttttgtgtttgtgaattttcctttgaaagccccaaaaacatcacctttaaaaaacggtgaagctcaaaagaacctcaccgcgcaaattgtttgccaaaattaagccttgttgattttttcaatcagctcgtcgcaggaaatgccgtgaacggcgcaggcctgctcaacggtctcgcctcttgcggaggggcagccgaggcaatgcatacccatttcgatgaagatgggagcggtttcgggcttggcgtcaagaatgtcgccgatgcaggtgtcttttgtgaattccatgataaagtctcctttttatatttttgtgcggacggccgatttattcggcggccatggcggccttgaagcagtcggcgtccattttctcgttctcaaaaagatattttgcaatttcatgaagtttattcatgtgctcggtcaaaattttctgagcgtgctcgaactgaccctcgacgatggatttgacctcctcgtcgatttccgacgcaatttcgtcggagtaggtctgagtcgtgccgagatccctgccgaggaacacctcgtcatgatccttgccgtagacaataggtccgagtttttcgctcataccgtatttcatgaccattttctgtgctatttcggtggcgcgctgaatgtcgttggaggcacccgtcgtgatgtcgtcctgagtcagcttttcggccacgcgccctccgagcagcgaacaaatctgctcggtaagctcggttttggtggtgtgtccgcggtcgtcggccgggcggtacatggtatagcctgcagccatgccgcgggggatgatggaaatctgatgaacctcgtcctgagaggggaggaagtaggaaacaatggcgtggcccgcctcgtgatagcttgtgatgagcttatccttttccttcatgacgcgggattttttctcaacgcccatgacgaccttgatggtggcctcttcgatgtcggcctcggtaatggccttggcattcttgcgggcggcaagcagagccgcttcgttgagaagattttcaagatcggcaccggtaaatccggcggtggtctgagcgatgattttaaggctgacgtcggggccgaggggcttgcctctcgagtgaaccttgagaatttcctctcttcccttgacgtcgggatagccgaccatgatctgacggtcgaaacgtccgggtcgggtgagcgccgggtcgagaatgtcggaacggttggtggcggcgatgacgatgacgccctcgtttgcgccgaaaccgtccatttccacaagcagctggttcagcgtctgttctctttcgtcgtggcctccgccgagtccggttccgcgctgacggccgacggcgtcgatttcatctataaatacgattgcgggggaatttttctttgcctggtcgaaaaggtcgcgaacgcgcgatgcgccgacgcccacgaacatttccacaaagtcggagccggaaatggagaagaagggaactcccgcctctcccgcaacggcgcgggcaagaagggttttacccgttccgggagggccaacaagcagcacgcccttgggaattctcgcaccgaggtcgttaaactttttgggatccttgagatattccacaagctcggacatctcttccttttcttcgtcggcacccgcca

SEQ ID NO: 2672 - DNA, 3698 bp, Unknown
  16S sequences of unknown bacteria
gatgggcagtcagccggaaatggggcaggaaagaatggcagaaaggggcggcagtcattgcgcgaactattataaaatcaattccctcgtccacaatggattttttcagcggcgaggcgtcggcaagctgaggccagatttttgctggacgattattcgaataaacccccatgccggcgcgaaggcgcagcaggcctttttcggggcgcatattaccggggacgtcgttccatttgtttccgcccaccgcgccgagcagcacgctgtccgagccgacgcatttttcaagctcgctttgaggcagcggatcaccgtatttatcaatggcgcagccgcccatatcaacatcggtataattaaaggtgtgtccgtaaacctcggcaaccctgtcaagcactctgattgcctgacctacaatttcgggaccgattccgtcccctcttatgacggcgatatttttagtcattgcttttcccttccttcagcgatttaagcagtccgccgcatttaatgatattttggataaagggcgggaagggctgtgctttatatgtttttccggttgtaatgtcggtgatgattcccgtgtcaaaatcaaccttgacttcatcgtcggcgtttatttcgtcggccgcctgctcgcactcgagaatgggcagaccgatatttatggaattgcgataaaaaattctcgcaaagcttttggcaataacacagccggttccgcaggtttttatgacaagaggtgcgtgctctctcgacgagccgcagccgaaattccatcctgccacaataacgtcgccgttatttacctttttgacaaaatccttatcaatgtcctccatgcaatggagagcaagctcctttgcattgggcgtgttaagataacgggcggggattataacatcggtatccacattgtcgggatatttgaaaacctttccttgcgtgttcatgttcagtcctccttatactcggtgatatagcctgtcagcgcgcttgcggccgcagtatgcggagaggcaagataaacctcgctgtccacatggcccatacgtccgacgaaattacggttggttgtggaaatgcagcgctcgccttctgcaagaattcccatataaccgccgaggcagggtccgcaggtgggcgtggaaacaatggcgcctgcgtcaataaacgccgtataccatccgttttcgacacagtcgcggagtatctgcatggtgccggggataatgatgcagcgaacgccgtcggcaacctttttgccgtttaaaatgttataggcggcttccatatcctcaagtctgccgttggtgcaggaaccgatgacgacctggtcgatttttatgtcgtgaagctcgcttgcggggcgggtgttttcgggaagatgaggacaggcgaccgtgggaactatgcccgacaggtcgatgtcgatgattttctcatattccgcgtcggcgtcggcctcaaaaacggcgggcactctctcgcttctgccctcaaggtatttcattgtgacgtcgtcgacggggaaaatgccgtttttggctcccgcctcgatagccatgttgcatatgcaaaggcggtcgtccatggaaagaccgtgagcgccctcccccgcaaactccatacttttgtaaagagctccgtccacacctatcattccgatgatagtaaggataacgtccttaccgctgcagttttcgggaagactccccgtcagattgaatttgattgccgaaggaaccttaaaccaggccatgcccgtggccattccggccgccatatcggttgaacctacacctgtcgaaaatgctccgagagctccgtatgtacacgtgtggctgtcggcgccgataatgcagtcgccggcggtcacaacgccctgttccggaagaagggcgtgctcgattcccattttacccacgtcataaaaatgactgacgcaatgctcgcaggcaaattcacggcaggttttggattgttccgccgccttaatgtccttgttgggcacaaagtggtcgagaacaatggcaaccttgtccttgctgaaaaccttgtcaaagccggcctttttaaactcgttgaccgccaccggcgtggtgatgtcattgccgagcacaatgtcgagttttgcatttataagctgtcccgcggtgacgctgtcgagtcccgcatgggcggcaagaattttttgggtcattgtcattcccattttaatttcctccctttgtcatgttgtgaaacgcgctgagcagcgcctttgtgtttgcattgataacgtcggtgtcggtgccggcgccccagaacatatttccgtccttgtcctcaaggccgatatatgacgcggcgacgctctgagagccctgaccctgcatactgtgctgagtataaacctgaagggtgtattcttttccggtatacgcgcaaagagcgttgtttatggcgctgagtgtaccgttgccctcggcctccatgtcggtctcttcaccgtttttcataaaggtaatgtcaattttcaccgaatcgttttctctcacgaaatcaaaatcggtgacctcgatgtcgctcttaagattgagataattgcttccgaaaatctcaagcacctcgtcgggtttaagctccttgtgctcgtggtcggaaatttccttgcagagatagctgaaattctctcgcatttttgcgggaaggttgtatccgaaggtctgctcgagaaggtatccgatgcctcccttgcccgactgggaattgaccctgataacgtctgcgtcgtaggtacgaccgatgtccttggggtcgatgggaatgtagggcaccgtccactgatgaagctttttcttggcacggaatttcattccctttgcaatggcgtcctgatgagaaccggagaacgcggcaaacacaagagcgccggcatagggcgcacgctcgtaaacgtgcatacgggtgcatttttcatattcctcaacaagacggttcatgtcggaaaagtcaagcttgggatctacgccgtgggaatacatattcatggcaagggtgataatatcgacgttgccggttctttctccgtttccgaagagggtgccttccactcggtcggcgccggcaagaagagcaagctcggtgtcggccacgcctgttccgcggtcgttgtgggggtgaagcgaaagggtgacgaattcgcggtatttaagattttcgctcatatactctacctgggaggcataaacgtgaggcatactcatttccaccgtcaccgggagatttattataacattgttggtttcgctcggctcgagaacgtcaagaacggcattgcacacctcaagggcatattccggctcggttcctgtaaaggattcgggagaatattcaaagcggaaattgccttcgtattccccggcaagctttttgacaagctttgctccgtcaacggctatcttcttgatttcttccttggactttttaaatacctgttctctctgagcaacgctcaccgaattgtaaaaatgaatgattgcgctgggcgcgcccttgcaggcgtcaaaggtcttgcggataatgtgttcgcggcactgggtaagcacctgaacgctgacatcctcgggaatcatgttgttgtcgataagggttctcaaaaattcatattcggtctcgcttgctgcgggaaaaccgacttcgatttccttgaa

SEQ ID NO: 2673 - DNA, 10548 bp, Unknown
  16S sequences of unknown bacteria
aaggagggctcccgtctctttaccgaggttaagtcggtgcgccccgacgttctgattatggacgcatttatgcccaaaatggacgctctcggtgtgctcaaacagcttgagacaatggaggcgagaagccgtccgctgaccatggtaatgtccaccggaggtaatgaaaagttagaaggagagctgctttcatccggtgcgtcgtattatcttttaaagcctgtcgatatggacatgcttgccgagcgcgtggttcagcttaccggatggagaaaagcctcgggactgaccaaggagcagggctcctacataaccgacaccgagcttgaaatgatggtgaccgaaataattcatcagctcggcgttcccgctcacataaagggctatcactatctgcggacgtcgataattctttcggtcagggattccgaaatggtcaatgccgttacaaagctgctttatcccaccgtcgcaaagcagtataaaaccacatcttcaagggtggagcgggcaattcgccacgccattgaggttgcttgggacagaggcgacattgacacccttaattcctatttcggttataccgtaaataccggccgcggcaagccgacaaacagcgaattcattgcgcttattgccgacaaaatgagattaagattaaaggcggcgtagttgatttattattctgaaaataatatttaaccacaatatatggtaaaaagtcccggtttcggtgaaaaaacacgaaattggggctttatttttttctgccggcgtggtataatagcacagtatggatagtctatgaaagtgtgcccaaaggaaatgccgaaagggcgcgcgtttcgacattccatttaatttaatttttaccttttggttttgtttttgcgttttgcaaagaagtgtactttaaaaaaataaacgggagtgcataacttggacaagtttgttataaagggcggaacccctcttcgcggcgaagttaatataagcggagccaaaaacgcggtggttgccattatccccgccgtaatactgtcggacggcgtgtgcgtgcttgaaaacgttccgcgtatttccgacgtcagaaacagtctccgcatcctttcggaaatgggcgcgaaggtcagaatgattgacgacaatacggttgaaatagacccgaaaaatataaattcctacgttgttccccacgaaatcgcaaagctgatgcgcgcatcctattatcttatcggcgcgctgctcggcaagttttccaaggcaaaggttgccatgcccggcggatgtaatctcggtccccgccccattgatcagcatttaaagggctttgaggcgctgggtgccgaaatttcggtggacaacggaatgataggcgtttcggcgcaaagtcttgtgggaagccaaatttatcttgatgtcgtttcggtgggcgccacctgcaacattatgattgccgccgcaaaggcaagggggctgacggttatcgaaaatgccgccaaggagcctcacatagtcgatcttgccaacttcctcaattccatgggcgccgatataagaggcgccggaaccgacgtcataaaaatccgcggcgttgagtcgcttcgcgggacaacctattcggtcattcccgaccaaatcgaggcgggaacctttatggtcgccgccgccgcaacgggcggagacgttgtcgtaaagaacgtcatcccaaaacaccttgaatccataagctcaaagctcatcgaggccggtgcaaaggtcatcgagggcgatgattgggtgcgcgtctataccgacggtccgctgtcccaatgcgtcataaagacgctgcctcaccccggttttcccaccgatatgcagccccagttttccacccttctttcggttgcaaaggggacaagcgttgtcagcgagggtatttgggacaatcgttttaaatatgtggaccagctcaccaaaatgggcgccaacattcaggtcaacggcaaggtggcggttatacagggggttgaaaagctcacgggagcctgcgtgcgcgccgacgatttgcgtgcgggagccgccatgctcattgccggctgtatggccgaaggcgtcaccgaaatcgaaagtatacattatatcgaacgcggatatgaaaaggtggtcgagaaattcaaaaatctcggagccgacataaagcgcattacaatgcccgatcctgtcgagcgggcggtttgaagaatacaaacccttttccgtttttggcgaaagcacgccgcttaaggaaaaggatttgtttttaaaggagttttgttatggcaagggtttgccaacttttcagcggcagcagcggaaacagcacctttatcggaaattccgacggaggaattcttgtggacgcgggagtgagcgcaaaacggctgtcggcggcgctgaccgagcgggggatagaccccgaaagcctttcgggagtgtttgtcacccacgaacacggcgaccatattgcgggtgtcagggtcttttgctcaaaatataacattccgctttttgccacaaggggaacgctggaaattctcgagcgggacggccatataaacggaaaattcaaaaccgtggagcttgactacggcgaaatcgagcttgacgggtataagataaaaaatttcagaacctctcacgacagcgccgaaagctgcggatataaggtcgagcttcccgacggaagaaaagcggcggtttgtaccgacctcggctttgtcagcgaggaggtaaaaaaagctctttgcaaaaccgatttgcttgtttttgagtcaaatcacgatatagatatgcttaaaacgggaatatatccctattctttaaaacagcgtatcatgagccccatcgggcatctttcaaacgacgcctgtgccgacgcgcttccgctttttgtaaaaaacggagtcacaaggataattctttcccatttaagcgagcacaacaacctcccgatttacgcaaaaaaagcggcggtttcctccttgctttgcgagaatatgagggaagggacggattaccttctcaccgtcgcaaaaaagcaggacggggaaatgacggttttttaaaggagaactatgcagaatatttacatagcggccgtgggaaaactaaaggaaaaatacctgcgcgacgcctttgcggaatatgaaaaacggctgtcggccttttgccgcttccgcgttatcgagattgacgaggaacggctgcccgataagccgagcgaggccgaaataaaaaacggaatagaaaaggaagccgacagaattttaaagaaaattcccgaaaaccgttttcttgtgtcgctctgcgttgagggcggtcagatgtcgtcggaggaattcgccgacacggtaaaaaaaagtgccgttgacggtttttcaaatcttgtgtttgtcatcggcgggtcattcgggctttccgaccgtataaaaaagcagtcgcaaaagcgtctttccttttcaaaaatgacctttccgcatcagcttttcagggtcatgctttccgagcaaatctatcgtgccgagcaaatcatcaacggcggaaaatatcataaataggagtgagaaatttggcgagaaaaaaggaatacaacgacgacagcatatcgtctctcaagggcgccgaacaggtcagataccgtccggcggttatattcggttccgacggaattgagggctgcgagcactcggccttcgaaataatttccaactccatagacgaggcgcgcgagggcttcggaaataaaatcgtcgtgacaatgtattcggacaattccatagaggtcgaggatttcggccgcggaattcccgtgggatataataaaaaggaagaaaaattcaactgggagcttcttttctgcaccctttacgccggcggaaaatataacaatttaagcggcgacacctatgaatattcccttggactcaacggtctcggccttgcctcgacccagtttgcctcggaatatatggacgccgaaataaagcgtgacgggaaaaaatacacccttcattttgaaaagggcgaatgtgtcggcggacttcgcgaggaggattacggcgggcggtcaaccggaacaaaaatccgctggaagccagatcttgaggtttttaccgaaattgacattcccgtcgaatatttcaaggatgtgctcaaaaggcaggcggtggtcaacgaaaacgtcaccttccttttgaggcagcaaaacggccgcagttttgacgtgtatgaattttgctataaaaacggagttaccgactatgtcaacgaaatagccggcgacaaggcgctgacctcgattcagacgtgggaaaccgaaagaagcggaagggaccgcgaggatcttcccgaatataagctcaaggtcaaggcgtcgctttgcttttcaaacattgtaaaccgcaaggaatatttccacaattccagctttctcgaaaacggcggagcccccgaaaaggcggtcaaaagcgcctttgtttcccaaatcgacgcctatataaaatccgccggaaagtatcagaaaaacgaaagcaaaatcacctttcaggacgtggacgagtgccttgtgctggtcatttcctccttctccacccaaacgtcctatgaaaatcagaccaaaaaatccataacaaacaagttcatccaagaggccatgaccgactttttcaagcatcagcttgagatttactttatcgagaaccgcaccgaggccgaaaaaatcgccgagcaggtgctcataaacaagcgttcgagagaaaagtcggaaaaggagcggctcaacattaaaaagaccctccaatccaaggccgacatgacaaacagggtcaagaaatttgtcgactgccgctcgagggacacctccgaaagagagctgttcatcgtggagggtgactcggctctcggctcctgtaagcttgccagagaccctgattttcaggccgttattcctgttaggggaaaaattctcaactgcctcaaggccgattacggcagaattttcaaaagcgacatcataaccgacctacttaaggtgctcggctgcggcgttgaggtaaaggccaaggccaacaaggacctttccaattttgatatatcaaagctgcaatggaataaggtcattatctgcaccgatgccgacgtggacgggtttcagataagaacccttatactgaccatgttttataggctgaccccgactcttatagagcagggcaaggtgtatattgcagagacccctctttttgaaatacgcaccaaaaagcagacctattatgcctattccgagcgggagaaaaacgatgttctttcttccatcggagacgagaagatagaaagtattctgcgctccaagggtctgggcgaaaacgaacccgacatgatgaatctcaccaccatgaatcccgccacccgccgccttatcagggtcatgcccgacgacgcgaaaaagacaagcgatatgtttgatctgctgctcggggacaatcttgagggacgtaaggaatttattgccaaggaaggcagcaactatatcgacatggccgacgtgtcataaataaaaaacaaacggagttgaaacagtttggcgccgaaaaagaaaaagaaaaccgaaaatatgcgtgaaaaaaatctcaacgcaaccataataggctcgggtcttgtggtggaacagccggtggccgagacgctggaagtcaactatatgccctatgccatgagcgttattgtctcccgcgccattcccgaaatagacggatttaagccggctcaccgaaagctgctctacatgatgtatgatatggggcttttaaaggggagctttgttaaatgcgccaacatcgtcggtcagaccatgaagctcaaccctcacggcgacgccgccatatacgatacccttgtgcgcctttccagaggcaacgaaacgctgcttcacccttatatcgagtcaaagggttccttcggtaaggcctattcaagggacatggtgcccgccgcctaccgttatactgaggcctgtcttgcgaaaatttcatccgagctttttgccgacatttccaaggatacggtggatttcgtcgacaactatgacgcctccatgaaggagccgactctgctgccggttacgttcccctcggtgcttgtaaacgcaaacaccggcattgcggtcggtatggcaagctcgatatgctcctttaacctgaccgaggtgtgcgaaacgaccataagatttctccgcgacccggattttgacataatcgaaacgcttcccgctccggattttcccggcggcggcacggtcatgtatgaccgtgaggaaatgaaaaagattttcgaaaccggccgcggcggatttaaggtcagaggacgatatacctatgataaaagctataactgcatagatataaccgaaattcctcccaccacaaactgcgaaagtataatcgaaaaggtcattgagcttgtaaagcttaaaaaggtgaccgagataaacgacattcgcgacgaaaccggccgcgacggaatgaaaataaccatcgaccttaaaaggggagccgatcccgacaagctcatgcagaagctttataagctgacccctctcgaggacacattctcctgtaatttcaacattctcattgcgggaacgccgagagttctcggggtcagacaaattcttgaggaatgggtcgccttccgaagccaatgcgtcaagcgcagggtttattttgaccttaaaaaggcaaaggataagctccaccttttaaagggactttccaaaattcttctcgacattgataaggctgtgaaaattgtcagagaaaccgaggccgaaagcgaggttgtgccaaacctcatgatcggtttcggaatcgacgaaattcaggccaattacgtcgccgagataaagctgcgccaccttaacaaggaatatattctcaacagactgagcgaaatcgacggacttgaggaaagcatacgggacatggaggatctgttgtccaaaagctcccgcataaaatcggtgattatttccgagcttaaagaggtaattaagaaatacggccagcccagaaaaaccgaaatcgtctttaaaaccgaggaaaacgacgccgagtatgaggaaaaaattcccgattaccccgtcacgcttttctttaccaaagagggctatttcaagaaaatcacgccccagtcccttcgtatgagcggggaacaaaagcttaaggacggcgatgaaatcgtcgaaaccgccgaaacgacaaacgatgtcgagcttatgttctttacgaacaagtgtcaggtttataagacccgcgccgccgcctttgccgattcaaaggcaagcctgctcggcgattatgtggcttcaaagcttgaaatggaggaaggggagacggcaatatatatggccgttgtgcccgaatataagggcagtatgctcttcttctatgaaaacggcaaggtgtcaaaaatcgaccttgcggcttatgaaaccaagacaaaccgcaaaaagcttataaacgcatacagcgacaaatcgccgttgacggcggttttcatggctgccgaggacggcgagtatctgcttcattcttcaaacgggcgtatgctgctctttaattcggcggccataaacgtcaaaaccaccaaaaacacccagggggtggcggtcatgacccagcgcaagggccatcgcctcatgaaggttgagccctatgttgagggcagtctgctttcgccccaccgctatcgcacaaagaccctgccctctgccggaagcatcatgaaggccgaggaaaagggcgagcaaatgtcgcttatataacttttgtgtgtcaaaaaattgctttttaaaataaaaaagcgctttctttcggaagccgcttcaaagggaagtgtctgccgttccgccgcgaatttttccgcagaggttaaagaaaacgctgcggaaaaaaacagcaaacgcgcttttgtcattcccgcataagtattatatccgaatttttcggatatatcgattcttttaaaaaaatgtcttgatttttctgtttgtatatggtagaatacacaggatgttaagaaacttttcggaggtataaatatatgaaggctgttgaaattattttgggcgtgctgctcattctctttgcactcgttattattgccgttattttgcttcaggagggcagaagatccggtgttgccggcgcggtaagcggcggtgccgacaccttcctttccaagaacaaggctcacactctttcggccaagcttcagaagatcaccaaatacatcaccgttgtgtttatgctcctcgttattgctgccgatgtgatttccattctcggcaaataattttaagattaaaagtcgcaggcgtcctttcgggcgcctgttatttttttcagacaagccgcatattattaaaaaaagccttggaggaataataatatgcaaacagctgtgaaatacggatgcgtcggatttgcggtggcggcgggaatacttttgcttgtggcgctttttaaaaacggaaaacccctgcggacccttttttggtcgggaacggcaggggttatatgtcttgcttttgtgtgttttttcgggaaatatgccggcacggcggtggcctttaacggctattccctcggaatttcctttttcggcggagtccccggagttattgggcttgtcgttgcgtcaagccttctcggaatgtgaattcagattgccacgggaacctttttcccgagcttgtggaattcatagtcctccacaataaaatcgtcaacggtgaaatcgtaaaaatccttgacgtcgggattgagccgaaccttgggagccttaaagggctccttttccattacccctttgacaaggtcgatgtggcggtcataaatgtgagcgtcggcgatgacgtgaacaaattcgccgggctcaaagccggtcacctgagccagcataagggtcagagcgctgtactgacaaacgttccagttgtttgccgtcagcatgtcctgagagcgctgattgagtattgcgttgagcttgtttcccgtgacattaaaggtcatgctgtatgcgcaggggtagagatgcatttcgtgcaaatcggcatgattgtagatgttggtcataatgcggcgggaacgggggttgtttttaaggtcgtaaatcacccgatccacctggtcgaaatccccttcggcatatttgtgctttatgccgagctgatagccgtaggcctttcctatcgacccgctttcatcggcccaggaatcccaaatatgactgttgaggtcgtgaacgttgttggactttttctgccatatccaaaggatttcgtcgatggcggcggtgtagtttatcttgcggagcgtcatgagggggaattccttttgcaggtcatagcggttgaccaggcaaaatttcttgacggtgtgggcgggggcgccgttgtcccatttgggacgaacctcaaagtcggtgtcccacacgccgttttccagtatatcccggcagttttttacgaaaatttcatcagcataagacatattatcactccttattaagctcgtcgagggtcagtccgaaggcgggaaggaattcctttataaaaacgtcggcctcgggaagacccaaatctttaatgtgtctgagggtggatttttcggcttctctgaattcgggatttcccattttccgctcgtcggtgcattttatgagagccgaaattttgtcggccgccttgcaaagctgccaaagctcggcgtcatcatctctttttgagaaaaacggttcatattcctctcgcaaatcctcgggaagcatgttgagaagcctgagacttgcctcgttttcaagctgtttgtaggccgttttaatgtcggaattataatatttcacgggggtgggaagatcgcccgttataatttcgctgctgtcgtgaagcagcccgatgactgcggcgcggtcggcgtcggcgtttccgccgaaacgcttgtttcttatggtggcaagacagtgggcgatgagggccacctcaagacaatgctcgcttaaggtctcctctcgggaatttctcataagcgcccagcggttgatgtatttcatgcgaaagagcatggcgaaaaaattactttgtttcatgaatattctcacaatcctttgggtcattatatcatggtttgcaaaaatccgcaaggcgacatttaaaaaagaaattgtataaaaacacccctgcgggaaaatctccgcaggggtgaaactcgtttaaacgaaattatttgatgggaagaacggtaatctttccgactgcatactgcagaacggccagagcgtcggtaacgctgacgccttcggtaccgtcaacatcggcggccttggcaaaattgtcggcgaggactattttgccgaccgagtgctgaagaaccataagagcgtcggtaacggtaacttctccgtcgccgtcaacatcgccgtagctgcgggccttgggccgagagctgtcccggcagcaccgggtggtgctgt

SEQ ID NO: 2674 - DNA, 18408 bp, Unknown
  16S sequences of unknown bacteria
cgcgagagccgcctctcgcgacgctcaagactgggccgccgccccatctttctttgcgacgagcgccttcattggatgcaccagaccgataaccgcacacgcgagggcgatcaccagaagcaccgggaaaaccgcgttcaggcccatcgccggcattgccgccatggacgccgcgaagacgtaggggccgatgaagggcccaaggttcatcatcgaggtcatgacgcccgacacaaacggaacacgcgtcttgggggcaaggttgccggtggcatcttgcgccgccgtgaaaaacgccgacccgccaaagccgagcaggaacacgccgattgcgtacacgatggtgttgccggcaaagaacacgggcagaatgccaagcgccgtgatcagcgcgcccacaccaaacagccgtgccttgaacacgcgcaccaggtacgggaagagcagaccgcacacgatggtgccgatgccacagcagttaatgacgagcgccgcctcgccggggcctgccagctgacgggcgtcgaggacgctcgaggtgacgatctgcacggtgaccacacaggtccagcaggcaagtgcgaacagggcataaccccagatggcgcgcgggaccttctccttgggccccttcgccgcagcggtgggaatccccctgtccgccttgtcgagcacgtgccatttggcctcgggcatccagatggccgcgataacgagtggcacgaggccgatcagatacgcgagaaacgagtagttccagccgagctcggtcagataccccgcaagcgtggtgtagatcaggttgaacacgaattggatggtgatgccgaagccgagaagccgctcgcggcgctcaccgtcgaaaaaagcgattatggtggcgttgcccaccgggaacatgatgccaagcccaacgcccacgatgatgcgcgagacgatgacgtacgtgtaatcggtgatgccgggcatcagaaacgggaaggctccacccagcgacatgatcaagacgccgagcagccccgcgggcttgaagcccaccttgtggagcgcactgccggagatgatgccgacggggacggaaacgaccccggtgatgctgttggcgaacatgatggtggtgatgtccgtgcctgcaaaatgttgcgagaacgctgcgatggacggcgtcagaatggcaaattccgacatgcagcagaacagggcgaggatgcccacgacatttgccgtgctgagctcgtctcctgacatgtacttccttcggtacatgattccccctccttgtcttcgggcaaaacactggcggcaacccctttgcatcgggactgccgccagatgtctcgccctcggttattcgggcgctacaggcttacagctcgatatcggttggagcccacaggacctgtttgggtttcttggcgagctctgcgttcagctcctcgagggtgccaaacttcatgcaggcgcccaggcagttgtgcacgcagaccggctcacggttgcggccgagacgctccttgcacaggtcgcacaggtcggtcggaaccgggatgtggttgaagttgaaggagtggccctgatcgtccgcgtcgtctttctgccaggggccgtcgtcgaagacgcggataccccacttgccaacgccaaagccgtgctcttccttgcaggccacttcgcaggagtggcaaccagtgcagtactgatagtcgatgagtagtccgtactgaggcatggtctctactccccttcctttacgacgatcgagtcggtgtactcgtcgttcaaaccgaattccttgtagaacgcgttgatgtccacgtcgaggttctcgttgatgggctcgacgttgcagcagttgctcttgtacggagcgcccagaccgaggttgttgttgtgatgctcgggaaccaggtcgttgcagttggactggaacacgccgaacagcgagggctcggagccgtcctgctcggggaaccaccagccatgctctgcctcgagatgacccgggcgcaccttctgggaaacaagcgccttgtactttgcctggccgtactggttccagatgcgcacccactggccgtcggagatgtgcttggccgcggcgtctgccgggttgatctccagacgcgggttctggtcgatctcgcgcaggatggcgacctcgcggtgctcggagtggaacgaggtgaagcggcgggcacccgtggagaggatgaaggggtacttctccatgatctcctcatgcgtcaggtcgcgctcgtgccacttggcaagatgctcgggctcgatgaacggcgacgccggaatctccttcttgagctgctcggtgcgctcgtcggtcggacgcggcgactggtcgggctcgtagtagtagggcagcggatccatgccgttcgtgttgtacatggtcgaccacagctcgatacggcccgtcggggtcaggaaaccggggttgccgtcgggacggagcttgccggtctcgtatttcttgtagtagaccttgcgcttgaacttgacgacctctttgacctcgtcgaacttgtgacggccctcgaggcggttcttgttgaggtagtcatggtaatccgggtacttgttgtacgcgaactgggccttggggtcgtcgggatgacgctcggccatgcgcttggcgagcatgcagtagatctcgaggtcagccttggcctcgccgacggtgatggccttgttgccgacgccggtggtgatggatgccgcgccgtagtgggtgcggttgacgccatcatgctcgacgacggtgctgatgggcaggaagacgtcgcagcagcactggatggtcggggtaatcatcacgtcggtgccaaacgcgaatccgtcgggtgcaccgtaggagcgaaccagcgcatcatgccacctgctgggctctgcggagttcgtcggggcgagcaggttggtgttcgcgatccagccgaagcggaccggataggggtcgtcggtctccatggtgtcgaggatgcagtctgcctggcagccggtgatctggttgcagtacagcgggaactcgtccatgccgatgcactctgcgcgttcctcgtcggtcatctggtaccagccctcggtgatgaacgagcgggtatcggtgtcgttgccagcctggccggcagcggcctcggccgtgaggtcctcgggcatggagaggtcggcgatgatgttgccgccggggacgtcgaggttgccgcacatggcaatcatggccaggacgcagtggccggcctgcatgccgttggtgttctggtcaaacgccaggccccaggcgatggaggcgggctttgccttggcgtactcgcgggcgaaggtgtagatgtcctcgaccgggacctcgcagatctctgcggccttctccggcgtcatggcgctgacgcgttccttgaactcgtcgaagccgtaggtccacttctcgacgaagtcggcatcgtagaggccctcgttgatgatgatgttgcagcaggccatggcaagggcggcgtccgtgccgttgcgcacgcgcagctgcagctcggagcggctgttcagccagttgacgcgcgggtcgacggagaacaggcgcgcaccgcgcttcatcaggtcgatgatgctgtggccgaagaagccgtcggggttggactcgagcggagccttgccccagatgaccatcagctcgggaacctggtactgcggatcatcgtagccgccctcgaggccgccggcttagtcgagctcggggtacagggcgcccagcaccatctgggaggccatcatgcgcggctggtagcacgcgtagccggactgcgtgtaggccaggttgggcgtgcggaagatggagagctggaagtcctgggagagcatgccgtcgcggcccgtgccaacgtggatcgccatcgtcttgcggccgtacttgccggtgatctcgtcccacttgtccatgatgaggtcgagggcctcgtcccagctgcagcgctcccaggcgtcggcgtcgccgatcttgtcgtgcgggcgcttcatgggatagacctcgcggtgcgggttgtagacgtagtccttcatcgcgaggcacctcgggcacaggcggccctgggtgatcgggtcgttctcgtcgccctcgatgtggtcgagtttgccgttcttgtcgacatagaccttgatgccgcatcctaccgggtggcagcccgggggagaccagaccgaagaacgcacgactgtgaagtcgccttcctggtacttccagggtttaccgaggtcgttttcaaactccatagcggtactccaaacttgtagacgtaacttccccatcgggcgggccggatctgcatcaagtccgcccgagtagaaccaattgagcgtggagcgtttaggcttgctccacttcggcgcgctttctcgcgcgagccttgaggatgatcagaagcgcgatagaaccgagtgccaagacgatgccagctgcggcgaggatgccggtggcagcgccccacccagaggcgacgatgacgccgacgacgccgaacagtatgccgccaacgcactggccgagcgacatgagcgtcgcggagacggaggcgagctcgggcttgggtgcgatctctgcgaccatcgtgaagaagatggcggggacgatgccgttggacaggccgaagacgatcgcccagagcgtgaagctgcccgcggtgacggtgtaggcggtggtgaacgagacgcccaagacgatggaggcgacgacgaggatgatcaggcgcggaccggtcttggtgacggcgttcatgacaaagccgatgacgatgccgccgatgatgacggcgatgttgacgatgttgaacgtgccgttggcagcgccctggtccatgcccatggtctggaccatgtaggtggtctcgaaattcatgacgcaggcggtgcccagggagaacgcggcgaaggcgatcatggcaacccacacggacaggctcttgaagccctcggagaccttagccggctcggagctgtcgccttccgcctcgagatagttgtgctcgggctggtgaacggcgagaacccacacgacggtgatgacggccagcagcacgacgacgaaccagaacacgttatggtacgtggagggatcgccgacgttgaagaagaagccggaggtgcccatgatgaacagcgagccgagcgggacccacacggagaagatgccgttgggaacgccgcgcttgctgggcgggaaccactcggagaacaacacggggataaccgtgccgatgcacgaatagccgacgccctcgatgaggcgcccgacgacgagcagctcgtaggtttgcgcgaaggcgctgatcacagcaccgaccagtgcgcaaatcaggaccatcagcgtcgccttcttggtaccgaacttgacgatgatgctcgctgcgaagaatgccaggacaaacccgacatagccgttcagagacatcaggaagctcatctggcccgtatccatcccgagagccgggaggacgagcgttgccgttgccggcagcttgttgttgttgaccgagatgagaatcgatgccaggatcgcgacaatcgcgacgacccatgcgcgcgccgaggagttaatctcggctttcttttcttctgcgctcatacccttccttctttccattgtgacaagccccaaaacttgtctgctcgcgtggaacgctgcacggctccgcatcgatatcgccgtgcagcattcccctctctgcgcgccgcgcgtctcactcgcacggcattttggcggcatatggtttcgccactaatgactttacgagcgacctggcagaacagcagcgacgcttctgatgcacgtagggagcgctgtctcgttgctgagacacatcgggtcgatatgtcacgcatcttgctatttggaagaaaataaagaagggcataaataatgcccgcctgcgtttctgcaggcgggcgatgccctgaagaggaggaggcgcttaatacccgagctcgcccaggaggacctcgaggcgggcgatgaccacgctcgtgtccgcgagcgggtttttcatgccaccggcaggagcttcttcgaacatcgtcaggcgctcggtcatgttctcgatatggtccgaataacgctcgaccatctcgctgacccactccatacacaacacggggttgccgactttcagcctgaccctgccgttttgcgcatcggcgacgatttgcgccctcgtaatctctgcaactgccatagcctgctcatctcccattgccgacgtgttatcagatacgctctaacggcaatcataggatgtgaacacacggctttccgtgccgttgagacagtacggccgagctgtcttacgcttgcgcggggtcctctgaagcgccgggcaggtcgtattcaaggacgtagtcgttcatctggataccctcgcccacctgggcatcgaccttcttgaccttcttgaagcccatatggtcgtagcggtcgaggctcgcgatgttctcgcgtgcacagttgaggcggatcttgtcgagcccgtgcgcgcgggcacgctgcttgacgaactgcagttcctgcctgccgtaccccttgccgcggttgcccttcgtcaggtagagcttgctcaggtacagatggtcgtctttgggggcaacggcgacaaagcccacatgcgcgccgtcggcatcggcaaagtagtactcgtagtcctcgtcggcgatctcgcgcgtgatggtctcggtacccagcaggtactggaccaggtaatcgactttgttctggggaaggatctgagagaagtactcctcgaagatgtctccggcaaaatttgccagctcggctatgtgctcaggttcatcgactttcacgaacgtcagttcgctcattcggctcacccatccttttctgctcagctgtcaacacgtcgagtcgacgtatttctcttaccaagaagatagagcaaagcacgaccgataggatatccgccacaggaaaagcaaaacaaaacccgagcaggggcgtgacgccgggaacaagatgcgggacgatcatcgggcccaagaagtacatgggcagcacgaagatgagctgcctggtgagcgacagaatcgtcgacttgacgggctggcccgtcgcctggaaatagttggagccgattatctgcacgccgatgatgggaatgaagaaggtctggatctgcagggcgacgatggagaagtccatcaggtgctgctcgacgccgaacaggctcacgagctgcacggggaacaggtggataatcgcgaagaagaacacgaggatcaccgtcgagacgataatcgcgtcgtacaaggcgcgcttgacgcgatcgaacttgcgcgcgccgatgttgaagccgagaatcggctgcgcggcgatagagacgccgatagccgggaacacggcgaacatgacgatcttcacgacgacgccgatgctggccaatgcgccgtccgttccgagcacgtccatggaacccaagtacgcgagcgtggagttggcgatgacctgcgtgatggccgcggcagcctgcagggcaaacggcgccatgcccatggtgacgatgcgcccacagagcttccagtcgggcgcgaggtttttggcacggagcttgaacggcgccttcttgtcgaagatgaagtaccagagcacccacaccgacgagacgacctggccaagcaccgtggcgctggcagaacctgccacgccccaaccgaagacgagcacgaacaggtagttgagcacgatgcacgccaccgtgcccacacccgctgtcgcgagcgccagatacggggcgccggcggtcctgatgaaattgttgatgccgaacgagatgttgttgaacacgaagccgaacgcgatgatctgcatgaacagacgcgcatacggaagcgtcgtgtccgtcgcgcccacgacacgcaagatgggggcgaggcagaacagcgcaatgagggcgatgggcaccgcctcgagcaggacgatcgtcatcgcgttgccgagcgtcttttccgccaggtccttcttgccctcgccgagcatgatggcggcaagcgcgttgccgccggcgccggcgatgacgctgatggcgatcaagacggtcatgacgggcgcggcgacggtagtcgccgccaggccgacctcgcccatggcctgaccgagaaagatcgtgtcgatgatgttgtagagggcgttgaagacgacggcggcgaccgcggggacgccaaattcaaacatgagcttgccgatgggcgccgtgcccatgcgcattaccttggggctgggagcaccttgtgcaacctgccccttagacgcttcgtcttgcttcgcctcttctgacacgtattctcctctacagacagcaagagctggaagtcatgacctccagcccttgcattggatggtacctgatactgttgttctacgcagcagctttcttcgcaacctcgcaaagctgggcaaagccctcggggtccttgattgccatatcggacaggaccttgcggtcgagctcgatgccggcggtcttcagaccatgcatgaacacagaataagacagaccgttgatgcggcaagcagcgttgatgcgggtaatccacagacggcgaatctcgcgcttcttgttgcggcgatcgcggtatgcgtactgcccagagtgctggacctgctctttagcagccttgtactgacgggatttcgcgccgtagtaacccttggctgccttgagtacggtgcgatggtgcttcctggcgttaacgccgcgcttgacacgtgccatttatctatcaactcctactagtaaactaacgaatgacggcgcgtgattagccacggcccaggttcttcttgacgaccttgaggtcagcaggcgccagctcggtctcgtgacggaagttgcgcttgcgcttctgggacttcttggtcatgatgtggctcttgtacgccttggcgcgcatgatcttgccggaaccggtgacgcggaagcgctttgcggtgcccttgtgggtcttcatcttaggcattgtctttttctcctttatcagtgtccgtactctctgattttttctttgcatccttggggagcggcgcaacgagcatgtgcatgttgcgaccctccatcttgggctgcgactcgaccacagcaaggtccttgaggtcgtctgcaagacgctcgagaatgctcagaccttgctcggggtgggccatctcacgtccgcggaacatgatggtgatcttgaccttgttgcccttgttgaggaagcgaaggacatgccccttcttggtctcgtagtcgccgacgtcgattttggggcggaacttcatttccttgacctcgatcttggtctgcttcttgcgagccttctttgccttgactgcctggtcgtacttgaacttgccgtagtccatgatgcggcataccggcggctcggcattcggggcgatctccaccaggtcgagattctggtcctcggcgatgcgctgggcgtcagcattgccgtaaatgccaagctggctgccgtcgacaccgatgagacgcaccttgggcgcgcgaatctcgccgttaatccgtgactcttgagcggctatggcgctcacctccaaataaaaaagcctgtcgagctgcatagctgacaggcgcacaaagacagaccgccgcgaaggcggtatgtgtaagtggaaccagacaactaagcagatgctcgtcgaaaggtggaaggctcacgaaacgccttcacttggaaacatacgcgcgatagtttacacgcactcacacggacgcgcaaggggtttttaccacagctcgacgagcgccgtgcgcatgacgctgttgtcgcccagggtctttcccaccgcatggtcgtaggtctcggtgagcttgtagctggtcggagccgcgtccatacccgtgctgcccttgaactgagcctgctccttggcggacttgtcactcgccacgatggcgcttgggtccttggagacatcgagcgtcagggcgtcgaccttgtcttggggaagaccgagcgcggtcagaagtgacgatgcgatgacgttgctgtcggcgagctcttcgaaggtcgagcccgacacgctgagcgcatccaagtcgaacgccgcgtacacgtagacgatgtgcccgtctttgtcgaggccgagcgcgatgctcgcgatgacgacgccattcgtgtctttgagggtgccgttgacgagctgtgtgagcgcgggaatctccgggtcggtggcggcagacgggtcgccggaaagtgagagctgcccgttgcaggccgcgaccgcctcgtcggtggtcttaccgaacacgctcgccagatcaggcaccgcgtcggcgtcgacggggtggaacgttgccgtgtgggtgcccgccgtgcccgtgttgagcgcctcggtgtcggactgcgtgacgttggacgagatgctgttgcgccacatgaacagcccgatcgtgcccgcgagcacgagcaagacgatgacccccaagatcaagaagttgcgcagacggcggcgatgatgctcgtcgttctcggcgcgcatctcctcgtcgacttcttcttgttcgggctcctccatctcgacgtcgtcgcttacctcgagcgcctcgggcagctcgtcgaccgcgtcctgctcggcgaggtcggcatccaccaggtctgccacgtcatcgtcggcgaggtcgtcggggtggatgtcgtcgggattgaggtcgtctgcctcgggctcggtgcgcagcgcataggcgctgctgccgttgagctcgatatcgcgcagcagctcatcgacctgcgcgtctatgtcatgcgccgcctcgggctgcgtgccgtctgtcacgtcggaaggctcggatggggcctgttcgtctttttcgtcgaaagccatgtgcttcccctagatgaagtgaatccagctgttgagtatgtagagtatcgcagccacgaataccacgattgccgcggcgacgagcaccccctggccgactcccatggaatctccagagccaaggccgtggaagtcctcctcttcctgcgcggtcatgggcgcgcgcccctgcggggcccgctggaacccagcgtgacgcgaggggccgggggcatcggaccgcctttgcgcctccgcctgctccggcgcttcgtctttccgcgttggttgaggctcgggagcggttgcaggctcgggctcgcgcgcgggcgaagacgcgggcgcgccgtcctgacgttgcgccgcgatcagctcctgcgctgcggccatctcgtcggaatcgtcgtcgatatgagtgagtttgcccacgtgctcccccttcgaaatttagtgattgtgagtataacgccccgcacgggccagtttcctagcagcatatattcatttgcattacaatactcgaatcaccttgccgtcctcgcccgattgcccatgacgatggggcaatcgggcaggcggcgctatctgttccccgaccattggaggtaggaaaggaacatgacgaccttcgtcagcacgttcaaccttttcctcttcttcgtcttcagcctctgctatatgtaccagctcgtctacgcgctggtcgtgctcgtgaaggaccaccgccgcaaggtgcccgagcccaccgcgggcaagctcaaccgctatgccgtgctcatctcgggccgaaacgaggagaaggtcatcggcgagctcgtgaagagcatcaagaaccaggactacccctccgagctcatcgacgtcttcgtcatcgccgacaactgcaccgacaacaccgcagaagtcgcgcgcgaggcgggcgcggaggtcttcgtccgcaacgacaagctcgtcgtgggcaaaagccacgccctcgacttcgcgctcaacaagatccgcatcctctacggcgacgaggacggccgcaccaactacgacggctacttcgtcttcgacgccgacaacgtcttggacccgggattcgtcgccgccatgaaccgcggcttcaaccgcggctaccaggtgctcacgagctaccgcaactccaagaactacgattccaactgggtctctgccggcagcgcgctgtggttcttgcgcgaggcgaagttcctgagcaacgcgcgctccatccttggcacgtcgtgcgccatcagcggcacgggctttctgatcgacgcggacatcctcgagtccaacggcggctggatccaccacctcatgaccgaggacatcgagttttccaccgactgcatcaccaacggcatccgcatcgggtactgcggcgatgcctacatctacgacgagcagcccaccacgttcaaggattcgtggagccagcgcatgcgctgggcaaagggcttttaccaggtgctcctcaagtacggcaagaacctcttcaagggcatcttccacggcgaccacggcaagttcgcgcgctacgacatgttcatgaccatcgccccggcaatgctcctcaccatcacgggcttcttcgtcaacttcatcttctgcctgaccggcatcatccagctggcaagcatcgccgcctcggtcgagaccgtcgccgcgggcaccacggcagggcttgccggcggcacgcccgccgacacgaacttcttcacgaacagcatcgcgctgctcaccggctcgctgttccaaggcgacgccctgagcacgttcaacacgagccaggtcgccgtcatgctgagctacgccgaggcgcgtgcgaccatcatcacgtccgtcgtctcgctggcctcctgcttcatcagcttcggcgtggtcatgctgttcttcggcatcctcaccacggtcaccgagtggaagcacatccacgccaagacctcggacaagatcaagtacatcttcacgttcccgatcttcatgatgacctacatcccgatcgcgctgatcgccgtgttcaagaaggtcaagtggacgccgatcaagcacgacgtcgtccgctccgtctccgacgtcatcagcaagggcaactaggcgccgtaggcacagacgctccgcgcaagccatcgcatcacgacgagggggcagcatccgcacgggtgctgccccctcgtttccttctcttgtcagtaggctgcccgcttacgggcggcccgcccgttcgagctcgagcaacgcgcgcccgagctcgagatagtgctcgaccgtgagcgtctcgccgcgcacggtctctgccgtcgaagggagcaaagaccgtgtcaccggtcggctcgatgccgcagcgcgcgagcagctcgtccacgagccccttgtcgaaggagctgcgcatcgagttgcggatgttcttgcgccgctgcgcgaaggcggcgtctgccacccgacttgccgcggcgatgagctctcgatcggcgcacgtcatagcgcgctcgagcctgatgacggcgctctcgacgcgcggcgcgggcatgaaacagcgcgatgagacctggaagcggtcgaccacgcgtgcatgcatgcgcagcttgacggtgtatgccgcgtagtccttgctgccgagctcggcggcaatgcggtcggccacctcgctttgcaccatgaccaccgccgtgtccagaaactcgaatcgctcgaaccagtccaggatgacagtcgcggcaatctggtacggcaggttggacacgagcatgtggggcagctcgaagccccgcgcccggcatgccgcctcgatgtccttgcgtcccaccttgagcgcgtcgccgctgatgagctcgaagcgctcgccgttgagcgccgtcgtctcggcgaggacggcaggcaggtcacggtccatctccaccgcaatcacgtgcgcgtacttgaggagcgcggccgacagcgtgccgatgcccgggccaatctccagaaccgtcggcagctccttcgcatcggcattcttcaggccagacagctcgatgatacgggcgatgacgttgtcgtcgacgaggaagttctgcccgagcttgtacttgggatcgtgtccgaagcgctgcaggacatcgcgcgtcgcgcgcgggtttgccagctccgaatagctcatgcgggctcctttcccagatgtgccatgacgtcctcgacgatgccgcatgcccggctcaggtcgtaggtctccccgatgagcgggtagacgttcgtgccgatgcgcaggttcgcgcagttgagtgccgaggtgcagatcgcctcgagggggtaggtcccaaacgggtctcccccatcgccgatctcgaccaggtaggcaggacgctttgcgggaacgttctcgtgcaagacgtacttgcgcgcccagaacacctggcagcggtcgagcgccgccttgaggtgcgcgctcggtcccgcaaagtacacgggcgcgacgagcacgagcgcatctgccgtctccagatgacgcgagagcacgccccacgggtcgttcacgatacggcaggtgcccgcgtgcaggcagtacccgcagttatagcatgccgcgacgggatatttggagagatggtacagtagcggcttgaccccgcgcgcggcaaactcctccatgagcgcctgcgcgaactgcgtgctcttgccctcttcgtgcggagagccgacgagcaggaggatatcgggcgatgtctcggtcatatccgcctcctatgcgccgagctgccaggcggtgggcgcccgatcgagcagcgccaccgcgttcgcgtccaccttgttgcagaactgcgcctcgtcaaggccgccttgcagacgcgcgaagtcgatcggacccgcaggacgaggctccgcgccgttttccacgtcgatggctcgcggccgcatgagctccagggcacgctcctcgcccgcatagccaaagcagtcgagcagcgtccggagcgtgaacagcgtgtggtctggcgcgcacagcgtgccgcgcagcggctcgggcgccatatagggcgcgtccgtctcggtcaacagccggtcgagcgggacgtgtaccgcggcagcgcgggtgtagtacgccttgcggaaggtgagcggcccgccgaacgcgatgtagcagccgagttcgacgaacggcgcgaggacttccgcatcgaggttgaagcagtgcacgatgcagcccgccgcgggaactccttcgcgccgcagaatctcgagcgcatcgtcgtgagcctcgcgcaggtgcagcgagaccggcagctgcgtttcgtgcgccaggcacagctgcgtggcgaaaacctcgcgctgcacgtcgcgcgggctgaagtcgtaatggtagtccaggccgatttcgcccaggcacccggtcagcgggttcttgagcagctccacgagctcgtctttggcgccgtcccagtatcgtgcgttgtgcgggtgcaccccgcaggcaaagcgcacgcggggcagctcgacctgcccttccccccactcgtcgaggattcgcctcgcatcggcacgccacccggcaagcgcctcgtaggcctgcgccgcgctcaagacgccgtcgtcctccgagggcggctcggccgtgtcgaccaggcagcacacgaagttgaacccgtagtgggcagcgcgcgccaaggcgagctcggggtggtcgagcatgttcaggtggcagtgcgaatccgcgacggcgatgccgcacggcagctggggcgcctgcttctccttgcccttggagttgcgaaacgctgtgtcgaagtaatcgtattgcttgaatccggaaaccggcatactcacctcatagccaaaacggggcaccccatctggtgccccgtccacgattgccgtcgcctactcctttggcagacgcgggaacagggcatcgcccttggtcaccgcgtttccggcgggaaggccgccccaggcgctcgcctgctcggcgttttcgatcgtcgccgggtcttcgagccccagacgagcgaagagctcagccgaggtggcgggcatgaacggcgcgaggaacagcgccgagatacggcacgcctcgagcgcgttgtacaagacgaacgcgagctcgccgcgcgtctcctcgcttttcgcgaggttccacggagcggactcctccacatacaggttggcgcggtgcacgagctccatgaccgcggcggtcgccccgccgaagtcgatgtcgttgatgcgctcgcggtaagtggcgtagagcttgtccgcaatctccttgagagggttttccgccgaggcaaattccgccggcaccgcagggaccttgccgtcgaagtacttgatggtcatgttgcttacacggctgaagaggttgccgtagctatttgccaaatcggcgttgtacacctgcgtgatgcggtcgtgcccgatgttgccgtcagcgccaaaggtgacgtcgctcatgaagtagtagcgatacgcgtccacgccgtagcggtcgatgagctcgcgcgggtacagggcgttgcccttggacttggacatcttcgagccatccgccgccatgagaaagccatgcgcgaacacgtgctcggggatgggaagtcccgccgccatgagcatcgccggccagatcacgcagtggaagcgaatgatgtccttgccgacaaagtggaagtttgccggccagaacctgtcgtacttgctcaggtcgtcggagccgtagccgagcgccgtgatgtagttgatgagggcatccacccacacgtaggtgacgtgcttggagtcgaacggcagcgggacgccccagtcgaaggtcgtgcggctcaccgacaggtcgtgcatgccgctttcgatgaacgagcggatctcgttttcgcgaatcttcgggcgaatgaacttggggtgctcgtcatagtaggcaaggagcttgtctccgaactcagagagcttgaaaaaccagttctcttcctcgatgaagtcgacgtcacggccgcaagtggggcacttgccgtcttcggtcaggtcgctttttgcccactgcgtctcgcacggggtgcagtagtagccctggtaggtgctcttgtagaggtagcccttgtcatagaggtcctgcatgaactgctggacgccgcgcgtgtggcgctcttgcgtcgtgcggatgaagtcgttgttggagatgttgagctctttccagaggtccgtgaactgcgggacctggctgtcgcaccactcctggggcgtcatgccgtgctcctgtgcagactgggcaaccttctggccgtgctcgtccatgcccgtcaagaaccagacgtcgtggttgtccatgcgctgccagcgcgcgacggtgtcggcggcgatggtcgtgtacgccgtgccgatgtggggcacgccgttcacatagtagatgggggtcgtcacgtagaacggttctttggacatgcggattcctttgatcagacgaatgatgtcttgcgtgcggcgcacgcgggcttcgattatagaacttaccatgtgaaatccaacaggcgacgatttatactaagctgtatatattctttctatggaaggatgcttcatgcgcgaccattcaaaacacgttcagctcacgcgcgagcaggccatcgagaagctcgtcgaggtcagcgaatttgccccgcgcaccgagctcgtagacctgcacagcgcctgcggacgcgtcacggcggccgactgcagctcccgctacgacatccccagcgcgctgtgctcccagatggacggcatcgccgtgcacttcgacgactttgccgacggcatgccggacgtctcggcgtggaccttcggaagcgattacgcctgggcaaacaccgggaccgcaatgccggcagggttcgataccgccatcgccatcgagcaggtcgaattcgacgatgccagcacgctcgtcgccctcaaggccaccccctcgcagcggggcgccagctgcaaccagcccggctcgaccttcgccaaaggcgagctgctgctccccgcccgcacgcgtctcacgccgacgaagatctccgccctcgccatgtgcggctataccgaagtcgaggtcgtcgccaagccgaaggtcgccttcatccccacgggcgacgagctcgtcgagatggggcaggaacttcccgccggcaaggcctacgagtccaacggcatcctgctcgagcaaaagctcaggctctggggagccgagccggtcatctacccgtgtctgccggacgactgggaccagatcaaggcggctatactcgacgcatcgaagaaggcggacatcgtcgccatcaacgcgggctcgtccaagggcgcgaaggacttcacgatggagatcctggaagagatcggcacggtcttctgccacgagaccaaccacggccccggacatcacacgagcgcctcgcaggtaaacggcacccccgtcctcggcatctcgggtccgcccgcaggctgcgagatcacctcggactggtacctcaagccgcttgtcgactacttcttgtacgggcgcatcgtcgagttcaccacggccacggcgacgctcgcgcagccgctcggcggag

SEQ ID NO: 2675 - DNA, 1601 bp, Unknown
  16S sequences of unknown bacteria
cggttcgcccgccgcatccagcataaagccgcgaaagcccggatctggcgagctgagcagcacctccacgatcacattgtgcatcctgcgcagatcatggccgcgccacagctcacggttgtgtgccgcggagaacacatagctgtccagcgtgcccgtaaagagctgtccctccaccgcatccgcatccgcgttatgcaccgtattggtccctgccagcaggccgcggatctcacaggggatctcccatttgcgcatcagcgcgcgcaaagccagcgcgccgctgccggcccagcccacatcgacggctgccgccaggggcgcaccatccaggatcctgcggtaatacttgcgcgccgcctcatcctgctgcgcataatgacgcagcacctcatccatatgcccgcgcagatacgcttccgcctgctgtgccagctgccgatccagcaaagcatccggcatgacgcccagcgaacgcgcgcaagccgccgtcatgtcctccagctccatggacgcaaagacatcgcatagcggcagcgtgccgtcggccttgtgatacaggaagcggcggaaataatcatgcttccaccgtcctgccatgagcttggccgccgcaagccgcgaccaatacacatacgaacagcgcgcacgctcctgcggatagagcatgccatacacctgatgcaggatatccccatcacgcgataagaacaacacgcgctcgacgccatgcgcatgcacatagcggtggatgtgctggcaatagcccagcgccagcagagagccatacacgaagcccagctcataggcttcgggcagctgccggatgccgtcatgcaaggcggcgttgacgatgccccggtaaaacgcgccgcacaccggcgacatctgccgcgcgcggaaaggcgcaccgcagcggttgacattgggcagctgcaccgccgcaaggccggcgcgcagcgcatgatcatgatcagcgatgggatcgtcgccgaccatcaccagcgagcatccgcgcccataacgcgcacgcagccaggggtagatatcccctttcgccttggacagcccccgctctgcggagacatggcattcctgcagcgccgcaaagccgttcatcttgagcagcgtcatgatctgcgcgctggaaagatacatgtccgagacggcgatcatgcgcgtatcgctgcgcgagagatgccagacgagcgcctgcatatacgctctgccggcgcacacctgctgttccagcgcccattccgctgccatgccttcctctgcgtcgacgccgcaggcatcctgcagctctgcccagatctgcgccagcatcacttcgccatgccgccttctgagccggtgttccgcctcgatgcgcagatgccgcaagtccggcacattcagctgatccgcaagcaggtagaacagcgccgcaggttcgtccacgctgcgcaccagcagcgtgtcaaacacatcgaaacagaccacatcgaaccgggacagccatcgggccaggcggccgggcgagggcagcgcatgctgcgcggactcgctgccggcacaagctgtttccttcggatgcagacggcggcgcagcgcatgca

SEQ ID NO: 2676 - DNA, 1966 bp, Unknown
  16S sequences of unknown bacteria
gtctgagccagatcctctctcatccccgcgccagccgcgctttcttccgccagggacaaggctggctgctcagcgcgcagggcgtgtttccccctcacgatgaggaggaacgcatatgaacaggtatatggccgcgccggggatcatgctgctggtgctgctccatctgcagctgatcttccatccgctccaacagccgtttttcttatttgccctcctgctcttcctcagcgcgctctggctgatgatctgccgccgcatcgggatgaagctgaccttgacgctgctgctcatcctgctggcagcggcgatcatcatgttcccgatcacccttgacgccctgcgcgtattttacaacatgctgctggagacataccgccagcactccacgctgtatttcatgagcctggacacccgcagcgtacagggaagcgagcagctgctgctggccggcacgatgctcgccttcttcctcatcggcacgctgctcttccactggttcatcgcgctcaagcgtcattcccgcctcgccttcctgctgctgatctcattcctgctgccctgcatgctccacagcgtgccgcagccgccgaccgcgctgatcctgctgctcgtcttggcggccctgttcatggacagcgcgcagggactgacgatgatcatgcagcgcaggctgcgcatgctcttcatgctgtttgcctgcatcgttcccatcgcggtgtgcgtcctcctcatcccgcccgcacagatcagcggcagcggccaaggcgtgcgcgaccagctgctcacttccctcaccaatctcatcgagcggatcactggcagcggaagcaacgatgagatcgacctcacccaggcgcaggaccgtctgtacatcggcagcagcagaggaagagtgctcgctactctcgaagatacctattatctcaaagacatgagcgccggcgtctacgaggacaacacctggaaggccatcgcagaagaagactatgtcgatgagctgggcgaacgatatgattactcccgcatcgacacgctgatgagctggatgaacatcatgggatcatccagtgaaggaatgagcgtcaccttgccctccctcaccattcaggacatgcgcggcgatgacgcccatcagctgatcccctatcatgtggaggatatccgcggcgtcgatgacatgaccttcgtccaggaccgcttcatccagcctgcgcagggcgacactgcgacctttgatctcatccccgctcccgcacagtacttcgatccgcagacctatcgtgaggcaacggccgggcttgacagcgtcctgcccagctacgaccgcttcgtgcagcagcactatacccagataccaaaagagaccgcggccttcttttcttctcttcccggactgcctgatcgcgcctcgatcagatcagagacgcttcaggatgtcatcacgctcatccgcacatacctgcatgaccatgcggaatacacgctgagccccggcgcactgccaaacggcgaagacttcgtggaatacttcctgggcgaaagccatgaaggctactgcgtccactatgccacggccgctgccctgatgctgcggtattatggataccccgcgcgctatgtggaaggattccgcgtcggcgaggaagcgttcagcggcggcattgccaccatccgcgattacgacgagcatgcctgggtggagatctatgatccttacctcggatggatcccgcttgagttcaccgaatcctcgtttgatcacagccaatatgagacaggaggctcctcgccaggcgaagcagatacaccagatgatccatctgccgatcccgcagcgccgacaccggtcactggcgatcagcccagctcacctgacccggcgcagcaagaacagcttcaggtgccggcagcgggcatgctgagcatggcggccctggcgctgctcatcctgcagccgctactc

SEQ ID NO: 2677 - DNA, 3956 bp, Unknown
  16S sequences of unknown bacteria
ccctcgtaatgtcccttgtaaatatcgccttgatcataaagctttttgaaaattttctgtattaccttttcgtggtccttatcggtcgtgcggataaacttatcgtaatcggtgttaaggctgttccacacttcttttatctgcgcggcaatcttatccacatactcctgcgggcttatgccctctgccttggcgtattcttcaatcttctgcccgtgctcgtcagagccggtctgtaaaaacacgtcaaagcccatcatttttttatagcgcgctatcatatccgccagcactatatcgtaagcgttgccgatatgcggctttcgcgaggcgtaggctattgccgttgtaatgtaaaacttcttcttttctgacatttttcttcctcctgtattacggtttacccgttagataaagtattacggatatcgccgtgccgataaggcaataaagcaagaccgctccgctgccgataacagagcctgagccgccgaacgaggcataggcgaacaacaccacgcccgctacacagctaagcgcgtaaaataccgccagtaaaaggcttgattttttaattttaacggcactgctgactatcgacgccaatgctgcggggttgcccttgtatgctgcgggagcggagcaatgctctgtaaatgtgaccgcgtttttatacatatggcagcccgcagtgctcatgaccttgaccgaatcatcgtaaagccccatatagtcacatatcatttcctcagtcaaattcgggtcggagctgtcaatcagcatggtgatgcccatggcggatatttttctgaactcccgtgcaagctcgggttttacggaatactgcaccgcaagcagggcgcaggccttatcgtcggttgcgacatagacggggaaataacccctccgcaaaagctttcggtcggtttcaacgctcggaacggctattccgtgcgcctccataagggtgcggtttcccacaaacaaaagcttgttgtttacccagcccgaaatgcccattttgtcctcatatttaaccgtgtcggaatcgggcattacaaagtcacctgcagttcccgcaatctttttgaatatcggtgctaacgggcttgaaagactgtcggtaagggaggcggcgcgcatgattgtgtcgtcaatgctgttatcggataacagctgcatattgtggagcgttaccgtgcccgacggaaacagatcctctgaacttatgactatggcatttgccttttcaatgtactccgcacccatttttcccgctatggcagcgcccctgcgcgcaagcctttttgaagcggagtaaagcggcaggtcaacaatcagaaaaagcacgggagctgccgttatgcactgtatggcggcggcactgtaaaagccgtaaagcatgttatcaaagtaggcggcgcaggcaaagccgagtattaccgataaaagcagcgacactactgtcattatcggcagtcttccgccgaaataaacgcggaacgaggtatatttcatataattgtcaatatgcgccgttttgcggggggcagctgccaaaacatcgccatcaatcgaattttttgccatggcaaaggtgactgcggggtcgtttataagcttcaccgcccgcttcggcttgttgccggctatttgcttaaagcccgtgagcgtgtgcgatgagcggaaaaacaccgatattgcgcgtaccgaaagtataaacgcgccgagcagcagcatattaagcgtaatctcgtttttcagagtaccgataaccgagtagataagcaccgaaagggaggaggtgaccgcaaaaatatccggcgttgagaaacggctgaaggctctcggaatacttccgaacatatcaaggtttataagcattattaccgcgaataaggcagtcagcaccgtcatgctgacctttgtgttggcaagcagtattgccgacataaacggcagctccgcaaaggcggtaataagggtgagaataaccgttgcgaagcagcgcagaaagcggctgcgctttacaagcgacagcttccgcagaaaatgctttgcttcgctttcatcctcaaactcctcacgaggcttaaagtcctcaaattcgttttgctcaaggcgggtctcggggtctgtgccgtcatcgtcactgtcgggtaggcgcgaaagctcacccgtcaggtcgatagacctcgtttgagagcttacgctgattctggaggatgagtcactgtcggatacaggtgtgaattttatggttgccgagctttgaatatcgggcatttcggtttttccctcgccgcctgctgcgtcaatatccgatataatgcgcggcacattggtctgtatatcccgcgcggcgggcattttttcttcaaatatctcgcgtttggggggctcgggcactttttcgggcgcggcgggcttattgtgccctaaatcgtcaaattcaatatcgtatttctgcgagagcctgtcaagcgttttatggctttcactgcttaaaatatccgcaacgctttcaagcctgtaggcgggggtgtccttcattgcggagtcatgcccctcgtcgtcgattataaagggtctgcacttttcaagcagtgatttttcctttttttcgggttccggtctgctttcggcattttgaccgtttgaggccgtaaggtcgaaaaaatcaaaatcaaaaagtgaatcggagctgccgccatgcaccgcttcgggtgcggcgggcgtttgaatcggagcagcctccgttttcggcgcttcggggactttcggtgcttcgggtgttttttgcggggctttttcgggagtatcctgctgttgggatgagagcatacgctttttcagcgcttcaagcgcgccggtaggctcgttatccgcttcgggagcagcgttttgcgcaagcacctcctccggtgttaaagcgctcggattatggtaagaattaaacgaattattttcaccgaggctttcatcaatatcgtcaataagcgaaaacagttcgtcgttatgcttccccttataccttctcaattaaaatcacttccttggctgtttgtcctctttgcggctgcgtactacctcgtacataagtatacctgccgcaactgaggcattaagcgaatttattttgccgagcatgggcaggcttaaaattgtgtcgcactttttggcggtaagcgcgccgattcccttgccctcgttgcctattaccagggcacagggaatatcgaaatcggtttttgtgtagtcatccccgtccatatcggcaccgaaaacccacacgccgcgttctttcagcgcgtcaattgtgtttgcaatattcgtgacccttgctaccggcacatattcaagcgcaccgcaggcagcctttgccaccgttgcattaagcgaagcgctgcgccgttcggggattatcaccccgtgaacgccggttgcctcggcggttctgatgattgcgcctaggttgtgcgggtcttcaatctcatcgcagattattaaaaagggcttttcgccgcgtgtttccgccagcgcgaacatatcgtccaccgttgcgtactcctgcgacgcaaacatgaccgccacgccctgatggtttgcgccgccgcagtaataatccagcttttgtgggcttatttcctttatgagtatgccttttgcgcggcattttgctattattgccgtaacagagccgccgcccgttccgtgggctacgaacagcctgtctatctctctgcccgagcgcagcgcttcgagcacagggtttctgccgcatattatgttgttattgctgttttccatttgacttttccaatctgtatatattcttactaattatatcacatctcacggaataatcaaataggaattttataaagataacaatcttaaatgtacagtcgtcaatgataggttacacttttctcaaaaaaatatgatgaaaacta

SEQ ID NO: 2678 - DNA, 7055 bp, Unknown
  16S sequences of unknown bacteria
gatctcccgcagggcgagacacagcgtccggctcccgagaagtacgcggacgcgggcgagtaatatttacggaaaacaacagaaaaaaggggcgccggtgcgcccctttttcgcgggtatttataaatttgttcggcgtgtgatttaccgacgttcgggcggctcctcgggcgaaagcccgacagacgtatcggcggctgacggcacgacggaatcacccgtgtgtttcgttcgcagtgcagacgacgcggaccgtctttatcccgtaatgcttcaagattcggatatgcccggcggagagcctttctcccgataccgcgcaggagactgcgggcgggcatgacacgcacggggaagcgagcacacgacctgcggcatccgccgacgggatcgtctcggacggcgcgagcgcggcatctctcacgctcatcacgcgctccgcctccggcagagtgaacgacggcggaatttgcggcgggcgcttttcgtatgaaataaggagggattttaccttttcaagctcttcttcggtattctcgggcgtgagcatcatcacaagatgctcgggggaggcgtattcgcagaaaacgccgttttcctcaagataggcgagaagagagagtccgtccgtcccgcgcggcggcgtatacagcgtgatgcgcagcggatcgctgacgcagacaacccattccgccgccgacagactgcgcttcagctcgtccgtcctttcgatgaagcggcgcaggcgttcggagtaagcgttgtctatgtatgcgtttgcagcgtcaagcgatctcagtatcaggtaagacgggcttgtcgagccgaacattcccattgcgtaccgcgcgttttccgcgaggctttcaggcgcgatctccgaaatgtgcagatatgcgccgccggtgagtacgggaagggtcttgtgcgcactgtcgcagcacatgtctgcgccgagatcgagcgaatggagcgattcgggcaggaatctgagatatgcgccgtgcgcgttatcgacgagaagcatcacgccgtatttatgcgcactttcggacagcgcgcgtatgtcggcaagcgtcccgaggtagtcggggcttgttataaacactgcggcggcgcgctctcccgtttcgcagagcaagcgttcgagctgtccgcatccgacacggcagcgcgtgagcgaatacacctcatcctcggggctgagccatatcgggtcgaagtcaagaagcgcggcggcgcggacaaacgccttgtgtacgtttcttgcggcgatgaccgcgggtctgaccgatgccgtgcggtgcgttttcctccattcgagcagagcaaggaagagcatggcgcatatgcactgcgacgagccttcggtcgaataaagcgtgtccgccgagccgaacagcgccgatgcgttttgttcgcttcggcggattatcccgtcggcggcgtacagctcgtccgcacccgtgatctcggttatgtcgaatttctcaggtcccgtaaagattgcgcccttgtgtccgggcatatgcattcttacgggatcgcgcgctgcgtaggcttcgataaaatcgcatatcggagtttccatcggcaaagttcctttccggcagtgaatcggtcgtataaattacggcgcggctccgtttgcacggcgccgcgccgcagcacagtcacatttcctcggcgaccttcagcatgatcgcacattccatacgctttctgaaaagctcgcagccgggttcgtatatcccgcgcaccgagcctgtcgcgtgatacgcattcgcggcgcatccgccggagcagtaaagcttcgcccagcacgatgcacattccgggcgcgagtacacgttgcacgagcgaaattcctcctgcacactgtccgccgtcacgccgtcgtacacgtttccgagcagatacgaggaatcaccgacaaactgatggcagggatagagatcgccccacggcgtgaccgccatgtattccgtgccggagccgcagccggaaatgcgcttgtagatgcagggaccgcccgtcagatcgatcatgtaatggtagaaggtgaacggtctgccctcgcgctttctctcaatcatgcggtcgcagaggagctcgtactgtgctttgaccgtttcgatatcctctgcggtaagcgcatacggctcatccggcgcgcacaccacgggctccatgctcagctcggtgaatccgagagaaagcatggcgtcgatatccttcatgaaatcgggattcgcatgggtaaacgtgccgcggatatagtaatttttgccgccgcgcgcttcgacaagacgctggaacttcggaacgacggtgtcccagcttccgcgtcccgcgtaatcgacgcgcagacggtcgtggatctcgcggcgtccgtcaaggctgagcaccacgttcgacatctcgcggtttgcaaagtcgatcacatcgtcgtcaatgagcattccgttcgtcgtgagcgtgaagcggaaattcttttttttctccttttcgatgctgcgcgcatacatgacgagctgcttcacaacatcccaattcatgagcggctcgccgccgaagaagtccacctcgagattccgccgtgttcccgaattttcaatgagaaaatcgagcgcgcgccgaccgacatcaaagctcatcagcgcgcggtcgccgtggaatttgccctgacttgcgaagcagtaggagcagttcagattgcaggtatgggcgacgtgaaggcagagcgcttttacgacattcccgcttttcgccttgaacacgtccgccatcggctcgaacgtgtcctcggtgaacagctttccctcatccttaagagtgcggatatccgaaagacattcggcgatatcaccgtcgctgacaccgtcgtattttccggagagcgcggagatgatctcatcctctccgaatccgcggtccgtcatggatattatctcataggcggcatcgtccacggcgtgaacggagccggaacaggtgtcaagaactatgttgtacccgttcagtttgtactgatgtatcatcttataacctttctttcatcacaaaccgtccgcggcggcgcagagcccgtccgcagaagcgaaaatgcaaaaaatgccgccgttgacggcggcattttcagtttgccgaaattactcgcccgcttcttcggatgagttttcgcactgctggtttgcgattccgcagctcgtcttgcaggcggactggcaggaagtctggcactcgccgcatccgccgtttttcgcgctgtcgcagagattacgggttttaagggtctttatcatcttcatattatcaagcctccgaccgtaccgtcgaacggtactttttattctgatttattctatcacaaagtgcgcgatatgtcaatatttttttgcgtttgactgcgttcgtgctttgatcgcgctcgaaaatgcgcgttttcggttcgggggacccttttttcagtgtttcggttcatgaaaaacggcgtattttccgcaccgccgcgcaagcggcacccgaatgccgatacggttatttcggggatatcggcgctttcttcgtgagcagctcatgcatgatgaccatcagtatcaggatcagaagcaggtacaccggaaggagcgcgacattgacgtgattggcgatcagcccgaacagcgggggcatggcgcaggtgccgacataggcgctcgccatctgcactccgattatcgcctgtgatctgtccgcaccgaagtgcgcaggggtcgaatggatcacgcacgggtagatcggcgcgcatccgagcccgatgaggataagccccgcaagcgacgcaatatcgggaccggggatcagcattgccgcgatcccgacggcgattatcgcctgtcccatgcggatcatctgcgtatcgttaagctttacggttataaatccgcagatcgcacgcccgacggttatcccgatgaagaaaagtccggcaaagcttgccgccgtgtctgcggagattcccttgtacaccgtgagataactgctcgcccaaagccctgcggtctgctcgagtgcgcagtagcagaagaagcagagcatgacctccccggcaccgggaattacggcgatctgcctcagtgtaagcgcttttcccgatttttcgttttcggcggaaccttcgccgtttctttttttccacagcgggaggctgaaaataaggatcgcggtcagaaccacctggattataccgatatatcggtatcctgcgctccagcccctgccggaggtcagcgcgtaccccatcaggtacggtcccgcggcggcacccacgccccacatacagtgaagccagctcatgtgcctgctcttataatgaagcgcaacgtagttgttcagagatgcgtccacgcttcccgcgccgagcccgtacggaattgcccaaatgcagagaaacggaaacgagcgtgtcacggaaaaaccgaagagcgccgccgcagtcatcgcaacgctggcggcggtgaccgcacccgttccgaatcggcgggtcagcctgtcgctctgcagactcgaaacgatcgttccgagcgcgatgatcatggaaatgatgccggcgtacgaaagcggtacgccgaattcggcgttcattgtcggccaagcggagccgagcagggaatccggcagaccgagactgataaaggcgaggtatatgatcgtcagaagcaaattaaccatttacgaaaacctcccgcacgtcagtatgatcggagaaaaatgtttgcgcagaaattatactgtacacgggagcgaatgtcaacggtttttgcaaaaaaatgtccggctatgcccgatgcagacgggatcgcaccgactgcggcgctcaaaccgtccgcgcttttgcggtgaagtccgcggcggttgtttttatcacgcagacggaggctgccgcgtttttgccgatctcgaaatccctcccggtttgagttttcataagaacggagagaccgtgtatctcctccgccgtgtccgtcacgatttcggcatatcctctgccgatcacggatgtgaaaagcgaaccgtatgtgcacgggatgttcccgccggaaaccgcctcgaaaccgcattcaagctcaacgcaaacgcgcccgtcggcgcggatgaggtcgatcttgtgaccttcggtgaaaatacaagcgctccatccgtatattcacagacttaatggggcggagccacatacgaaaagtcctcgttcgacagcccgagatgaaggatcttcgcgctttcagctatctttattatttcgtccgtttctttgatttcgcggtcttttcgtctcatatcagacctccgttttgggttaacgctgcacctgcacttgaatgcgcgcgccgcctataatactttttcaatgaaataccgctgtgcgatatgaaatgattctgcggatcatgaaattttccgctgacgtgaaaagtgaaatgaaatttgccattgagggcaaatttcattgaaaaaagcgccctgaaacaggacgctttttttcggtggaaagcgaaacaaccaaaacaaacttccccctacggggataacttcaacatatcgttgaagcatatccgtttttggctgccgggttttccgggctgtctatgggctataaaaaagatatttttgccgtttttgcgtatgaattcgaactctcacattgttatctttctttattaggaatatatcggggcggttcatcccgtccgccaggtgtgcagccatcatcggattccgtcatattctttttagcttcattttctttcgactgcgctttagcatcagaaatcaaatcatctatacttttatattgtttcaatacaattccaagttcagaggctaaagtttcaatataatcaatatggccacgattagcactgtaggtaacaacatacccgtctttatctgctatgattgtttctgtttctcctgtttttgtattgcggtataccagtctctcacccttgcgcaaataagtttgtataccgttttcaaaatctgctttgtattcgacaagtgcattttggtagtgtttattaaacaactcacttgctttttcaatgtcaccacttctgccataaatcattgcttcttcaagaagaattatgtgattcgcaaattgatcgaaagatggataatttgctcgatacaataaaatagctatatcatattttttcatttctttcaattcctacagaaaatgtcgtaaaattgtttcaatgcattcaatataggagttgaaaatatgataacttacacccaagaagaaaagcaagcggtcattgaccgtgttatatccggcgaaccgtctgcgcgtatcctcgccgacaccggcatgcccaagagcaccttttacagttggttacgcatttatcgagaggagcaaaacgctgccaacaggagaacagtggacatccgcaattttcatttgcttgaaaacaaagttgcacgtttggagagtatcgttgaaattctcaaatctgcaacctgcacgccgaaatcaccattgaggcaacggctatatgctgctgaacaactttacggcaaatataacgtgcacgtgatctgcgatgcgtttgacattccccgaggaacgttttacaaccacgttctccgcaataagaaagacaacacgtggtatgcgaaacgccgtgaagaactacggcttcgcatacaggagatctacgacgaaagcaatcagatttttggtgctgccaaaattgcggcagttatgaaaagtgaaggattcaaagtcagtaacgaaatggtacgcacgcttatgcgtgatatggggttagtcagcattcgtcagtcggcgaagaaattatacgaggacgaaggccgcaaatacaaaaaccaccttaaccaagagtttgacacgtgcaaatcgaacgaagtgtgggttagtgatgttacctattttaagtacggcgaaaacgcttattatatttgcgtgattatcgacctgttctcccgtatggtcgtgggatataagatcagcaagaccaacagcacacagcttgtaaaatcaa

SEQ ID NO: 2679 - DNA, 13050 bp, Unknown
  16S sequences of unknown bacteria
attctgtactgtcatcataataaacagatatattatccagcagctgttcgacagttaaatcatagcctaaactatcttccagatacaaactgtatccataacgcatctcgactgaaggagttgtaatgttaatatagtcaaacgggataccggtatcagccattttcttcaatatgggctgtgctgcttttacaaaatcttcttcattttgaaatgagttcaaaataatcaaatctgcccggacaaaatctgctgcccgcagatcttccaacgtcatttcttccggcaaatcactgtgatgtaattgaacagaaagcttcatgctgctcacacttttctcatctttcagcgctttggcgcaaatctgattggcctctgcacgcagagtttcctccaaaatttcccgatgggggccccagttgttccatacttccggaattgccgccattcccaaactgcccatgatgagaataaaacagacaaatccgctcagaaaatcatatcgaagtttttcgccttttgatacgaaatagcgaaacaaaatttctatacccaaaacaatcaaaataatgggcgccagtctggccatcatcaaaaagctaatcgactggttaaaacttccaataatcagcagtacaccaacagcaatcagcgcacaagccatagtgaccgtgccaaccctgcgtccttggtgtcgctgctgaacgggcggtattgcatattgcggaggctgcggatatcttggcggcatagacgagtacgcctttgtttcctttggaatagatgctgtttccgaagatttctctctgttttcttcggtctggatgtctgtttccggccccaaattattcatgatgcccctcctgatactctacaaagtcttccgcttctttcggtgtttttccccggttcagtaaatatacgccaaggccaatgactgcgcaggcaacgatgagacttggaatgcggttaagaataaagtaaatccaatccggcaaatcaaatctccagaacaaaggcgcaattaccgtttcatacaaagaataaaggccgaggagaatgcagcctaatcctaaaaatttcggcgttttattggaaaatttctctcccattttcggcacccaaccgccatgtttcatatcttcccaaaacttatagtccatctgcagacgttggtccgcgtggtatctcgcgctattgaacgtgtcaaaaaaagcataaaaccaaatgattggcaaaaatacgcagagaacttccaaattgagcatgactgcaacggcaattaccgcccaaaaagcactcatgatgacaagtccttttttcatcatccccagatacatttgccctgctcctgggacaaaggcaaaacaaaacactaaaaatttatttctttccatgcgaattctccttttcataggttttggaaaatgctttatccaacggctccagaaaactttgtgtccattctccaaagccagatgtaaattgctgcaggctggtgcgaattccttctaaaccggaaggtttttgttcctccaaatctgtctgtattgtttgttccgggcgctgatttttctcaatttgcttactggggaacgtaaaaattccactccaccagaaaaccaatgcgagacaagcggctgcagaaaccgtggtaagacggcgcaaaaataatctccgctctttctcccgaatttttttcattacttctccatacagaggtataggcggtgcctgtaaaatatcatcacacaaaagatcggtgtagcgggcggtgcatgcatcacaaaaagaaagatgctcagaaatctccagccgctgcaactcattcaaatcttcttcccatgtcagcgcctgcaaagccttgtcggtcaaatgtccgttttgatcaaataaatccaacattatgagcttctctcctttccaactgtttctttgagcatttcccgaagaagaaatttcccccgataaatctgtgtctgaaccgttttaaccggtcgacccagtatctctgcaatttcctctgtcgatttttcttccaaaaagtacatggacaccgctttttgataaggttctttcaagctttcaatagcctgtaaaatggcagctgacgtttctttttgaatataagcgtcgtctggtccggcccgcatatcaatcatctgctcgccaaccgaatcataatccagctggacacgccgggcatatgcactttttaggtaatcctttgctttgttgctggcaattcgaatcagccagggtttgtaattttctccttgatacgtatcaatgtgacggtaagcggcaagaaaagtttcctgcgtgaggttttgagactcgtgataatcatggaccagctgatagcaaacggtaaagaccagtttttcatactgtatcaccagatccttaaatttttcatcagtcatttcctctgcatcaccgcctttatcgctgccttcaaaaatacaaacgagagccattatcactcaacttcaaaaaaagaggaaaacacaaaatttatttaccggaatccagatcagaaaggcaaaataatttgtcaggatttccaaaaatatatggtttttcccgcaaaaacgattgatctcttgactttttgaaacagtcaggtataataaaaacgcaatcaaacgttgcgggaaaataaaaaacggggtgctgcgtgtacgcggctgagagcggataaagcgatatccgaaacccataacctgatctggataatgccagcgtaggaatgtacatgcgcgttgtatggttttatccatgcagcgtttttttgtaaatttttttaggagtgacctatatgcaaaagacaagcaaaacccgcatcctggttgaatgcgccttgatgatcgcccttgcagttgtcctggacattctgccccttcccaagtggccaaacggcggttccgtttcggtttccatggtcccgattgtatttctctcctaccgtcatggtacaaaatggggacttttgaccggtttcacctactgcatcgtacagatgattacaggattttacgcgcctcccgctggtacggtactggcttttgctttatgtatcctgctggactatgtaatcgccttcacgattttaggagcggcggatctttttgcaaaacctttctcgaataggctggttggatacacggttggtgcactggccgttacatttatccgttttgtatgcagctttttgtccggtatcctgatctgggattctttcgcaccggaaggtcagcccgtatggctgtactctttaacttataacggcggatacatgatccccaatatgatcgtaactgcggttatcatcgcgctgctttgcttggccattgatcccaaaacgctgcaccggccgaagaaatccgctgtgaatgcgtaattcacttttttgccaaaaaggcttctttccaaaagaaagaagcctttttattatttctgatacgttttattgtaaaacttctcccggtttacagatacacggctgtgggttccctcgccaatcagcccccgctcgtcttctgcaatgactttaaaatcatatttgcgtccctcaataccgacgagctctgccgtagccttcaccttcatccccattggcgttgccgatacatggctgacggaaatcatcgttccaactgaagtattctcttctcccagctcatctgcaatgcaggctgccgccgcattttccataagcgcgatcatcataggcgttgcgaaaacttccatatcgccgctgcctacggccaaagccgtattttcttcgtctacaactgtttctactgtgtattttttcatattcatttgtttttctcccatctgtttgactatatcgctccgatgaatgtcgccattcccagccgggggattgccaagctgcctcaaaaagcaatatacctttttcaggcattaaaatgcttttcgttgaatgacacaaagggattatatcacagcagtctgtgtttgcaaagacttatgaaataattttatgaatagtcagttcttttcctaattcacaaaaaatcgagtctcccctggaaaaagatccaatcagatattgctgtgctaaaggatcttcaatttgcttgcggattgcactttttaaaaggcgggctccttctgtcggatcaaattccttttgttttaataaatagctgattgcctgcgaatcgattgtcgcatcgactccaatttctttcaaacgtctctcgagctgtccgatcattctggaacctatttgttctaattgggggcgtgtcaaatactgaaaaaataatatttcatcaattcgatttaaaaattccggacgaaaatattctttcagttctttttggacttcccgcttcatattctgttcctggacactgccagtcccgaaacccatatttttctgttgagcaattttctgagcacccatattggaggtcattataatgacacaatttttaaaattgacccgccgaccgctagagtccgtcaagtgaccttcatccaaaacctgtaaaagcagatgaaaaatatccggatgtgccttttccacctcatcaaacaatacgacggaataagggtttctccgcaccttctccgttaactgccctccttcttcatagcctacataacccggcggcgttccaatgagtcgtgacacggtatgcttttccatgtattccgacatatcaatgcggatcatagcatcctcccgtgcgaaaagcgcttctgataatgcccggcaaagttctgtttttccaacaccggaggggcctaaaaacaaaaaagagccgatgggacgattgggatcattgataccggattgacttcttcgaatcgcttttgctacggcactgatagcttcatcctggccaactacccgtttgtgcaaatgttcctccaattccaacaaccgcttgttctgatctttcatcaactgtgtaactggaattcctgtcattctggcagttatctgtgctacatcctgcgctgccaccacagcaacctgatgtttttgatctgcggattgctctggcctatgatctgagggccaatcctctgtactgaaagattgcttctcctccgaggctaatatcatcgcataatgatgcaccggacgaggcagcgctttctttgcatttaaacgaacgcaggatgccgcctcatccatcaaatcaatggctttatccggcaaaaaacgttccggaagataccgtgcagacaatgatactgcagattccagtgcatcatctgtaatctgtacattgtggtaactttcatacctcaggcgaagtccctttaaaatttccagtgttttttcctcacttggctctgacacttcgacactttgaaaacgccgtgctaatgcactgtctttttcgatatgctttcgatattcttccagagtagtcgccccgataatctgcagttcgccgcgtgccagctgcggtttcaaaatattagccgcatcaatagcgccttccgccgcgccagctcccataatggtgtggatctcgtcaataaatataataatgtttcctacattgacaacctcctgtaaacaagtgcgaacacgttcttcaaattctccgcgaaatttcgtccctgcaatcatattggtcaaatccagggacaaaattctagtattctgcatttcttccggcacatcatcggttaaaagcagctgcgccaaaccttctaccacggcggtctttccaacaccggcttctccgatcagacacggattattttttgtgcgccgggaaagaatttgcagcgtacgggcaatttcttcttcccggccaataacgggatctaatttcccctctttggcccattgagtcaaatctctgctgtatttttccaaattaggacactttgacggtgccggcttttgcttggcgctttgtttttttccttttaaataaagactttccaccaattcgtttccgatcagatcaatggtgtcgcgataaatgccatcacaatcagctcccaatgcattcaaaaagcgaactgcgtaactctcacgttctttcagaagagataataaaatatgctctgttccagcaatattttgccccagcatgcgggcttctgtcaaagaattttccaaaattcttcggcaccgcggcgtaaagttttccgttgacatctgagttttaatgcctcttcctacggtttcaatcagtttttgccggatttttccccattcgacaccacgtccgtgtagaatatttccggcaatcccgctttctgcctccaataggccgagcaacaaatgctcgctgcccacataagtgtggcccaaaatacaggcctgtgcaatagcggcatttaccgcagcattggcttttccggtaaaaccagaaaatttaaacatgtaactcatcctcccgccccatcatatgatatagcaacaccaatatatgatttgcctgatgggatacttctttcagacaatcttactattggtttccacccgccgctttatgcgatccggataggaacacttatcatctggatttcataaaatagggtgacaatattttatagggaggctttatcatgccctgctgtgaaaacaaaaacaaaacctggatcatcattctggctttaatcctgttgtatgttctgtactgcgattttgatctgtgcaatatctttggcggaagtccttacaataacaattgcaactgcggccgcaatgtaccgccgtactgctgcgactgatttttgtcagaaacaaaaaagcccgcgaaaccgcgggcttttttctatcttaagaaaactgggcttctttgatcatcctttcgcaaaggagctggtactcacgatacaaacaatctcccaaacggcataagcgttcgttttcttcttctccgcataaaagcgcaaacgcttttccgatattttcaaacctttctctaccgtttttgctgcaaagaagataataggacaaggttttcgggtcattgatcttctcataaagaagcggctcaaattgttgtacctgtgcagaaaactcctgcgatgcagtctctgccaaaacagatggcaattctgcgtttaaaaccgcatctgctgcaaaagcaaacaaaatttttcgttgaaggcaaataaaaggctgaagacttgcttcgcaaaacgtcaacaccggtccattttcttcaaaaaacacaccagcaattcgtttgcccaggctataagccttatcaatattcccgtttttcttttgagcaacaaattcctgcgccgctttttctcctgcatcctccaaagaaggtgcaattccggagggcggaacaattttcatatcgctgtcatctccaacagatgccaacaataaggatgattcctttttagcttgcaggcaatataggatactcaggcctaaaacgggaagaaaagcagtccaaagcattctcctcacctctttcgctatttttcttgctccagtgcctgttgcaaagcgaatgacaactgatccggacaggaggtctttccggtaccgcaacgaacgccccgcagactgcgaatcacttcttttgcattacgtcctttgactaactgcgaaatgccccggccatttccactgcagccacccatgaactctactttccggatgatttcaccatccagctcaattgtgatcagattcgagcaaacacctttcggcttataaatatactccattgactaccctcacatctattcttttactctcgccaaaccatgctcgactgcatcttttgcaacagcgtccgcaacagcgttcgcaaccttttcgttgaacggatcgggaagaatataatccggcgacagttcctcttcttctacgatgccagcaattgcatatgcagccgctctcttcatcgattcgctgatatcccgagcacgaacccgcagtactcctttgaaaatccccgggaaagccatgacattattaatctggttgggaaaatcagaccgccctgtaccgattatgtatgcaccgccctttttcgcctcatccggcataatctccgggactggattggccattggaaacacaatagaatgttccgccatagaggcaatcatctcgctgctaacgatgtttggcgcagaaaccccgataaatacgtctgcacctttgagcatatcagacagtgagccctgcttgttttcccggttcgtcaattccgccatttccttctgtgcaggattggtccactctgctccacggtaaatcgcgccttgcttatcgcacaaaacaatgtcgccaaaattcatttgcaacaacaggcgggtaatggcaattcctgccgcacctgcgccattgaccacgatatgtgctgtccccatctcgcgtttggtcaatttcatcgcatttaacagcgccgcagccacaataattgctgtcccgtgctgatcgtcatggaatacgggaatgtcacagcattctttcagccgcttctcgatctcaaagcagcgcggcgccgcaatatcttccaggttgatgccgccaaagcttttggaaatcaaagaaaccgtacgtacaatttcgtccacatctttcgaatcaatgcagatcgggaacgcatctacttcgccgaattctttgaacaaagcacattttccttccataacaggcatagctgcagaagggccaatgtctcccaatcccaaaacggcagtaccatctgtaacgaccgcgacgatatttgctcgccgggtcaactcaaaggatttgttctcatccttctgaatttccagacaaggccgtgccacaccgggggtataggccaaggacaaatcttctctattgcggatgggagcccgagaaataatctcaatttttccctgccattcttcatgtttttgcaaggatttttccataatatccatattgctgtccccttattgtttcatttgaatggaaaatcaggcaactgcccaatatagatttattatacaccctttctcaggtcacgtgcaagatattttatttcattttgaaagatttccgtcttttttacagaaaaagatgcgctttcctgcaaaaatgcaaaaaagcgctctcttctaaccttcttgtatctgtttttcaatcaaatcttttagtacagcaggatttccctggcctttggattggcgcatacattgcccaatcaaaaagccgatcacattggtttttccgcccttataatccgcaattgattttgggttcgcatccaaaatggattttacgatagcagacagtgctcctgtatccgaaatctgtgccaaccctttttcttctaccacctgctccggggttttatccgagaaaatgatttgttccagcacggttttgcccgcggtgaccgaaatcgtacctttttcgatcagtgcaatcatacccgtcaatttctcgggtgtaagggaagtatctgccaacacaagatttttttcgtttagaattctggatacatcccctaacagccagttggagatatttttcgttttacaattttctttctccacacagctttcaaagaaagcagccttatccgggttttccgtcagcaaattcgcatcaaaatggggcaatccgtagctttccatatagcgtttcagttttttgtttggcaactccggcagttcttctttcagccgttgtattttctcttcgtcgattacaatcgtcagaagatccggctccgggaaataacggtaatcgtgagaatcctctttgctgcgcaaaaggaaattctgccctttagcatcgtcccaacgacgggtttcctgatggatttcgccaccagtctccagcacttcgatctggcgtttggcctcatattcaattgctcgaacggcgccgctgaaagtgttgacatttttcatttcgcagcgggttcccattggttctcccggacggcagactgatacgttaatatcgcagcgaatggacccctcctgcattttacagtcggaaatatcaatatactgcaaaatagacttaatggtttccagatatgcttttgcttcggcggaactatgcatatccggctcggagacgatctcgatcagcggtacaccacagcggttaaaatccaccagacttccggcaaagctttcgtcatgcagcagtttgcctgcgtcttcttcaatatggatacgagtaacaccaatacgtttggtgtttcctttctcatctaccattacatccagatagccattttcgcacagtggaatatcgaactgagaaatctgataagccttgggcaggtccggataaaagtagtttttccggtcctgtttgctgaccgggttgattttacagttcagtgcatggcccatcttgactgcatattccacaaccttttcgttcagggtgggcagtgttcccggcataccggtacaaatcgggcagcagttcgagttgacttccgcaccaaaagcgtttttacagctgcaatagattttagtagccgtatttagctccgcatggacttccagtccaattgtcatttcataattcattccggccacctccttaagctttcacagacggcgcgacgccgaatccaccgcaaatattttcaaaacagcccgccgcatcaaacaacatctgttcggagaatttgggacctatcatctgcatcccgacaggcagcccattggataccgttgcacagggaacagaaatggccggcaaacctgcgatgttgaccgtaaccgtacagatatccgccgcgtacattttcagcggatcgtcggtacgctcgcccatccggaaagcagtggagggcgaggtaggtgtcaagataatgtcgcactgagaaaacgcttcggcatattcctgcgcaattttttgctgcatttgtttggctcttttataatacgcatcataaaatccggaactgagcacaaaagtaccaagcataatacgacgcttcacctcatcgccgaatccttcgctgcgggttttttcatacatgtcgattagattggtaaaatcttttgcacgataaccatacttcacgccgtcaaaccgtgccagattagaggaagcctccgccgaagaaatgatatagtaggcggacagagcataatcggtgctgggcaaactgatcgaaaccgtttgcgcgccttcttttaccagcctgtcaacactttccaagactgtcgctttgatctccggttccactccgtcgccgaaatattctttcggaattccaatccgcaatccttttaccgaccgattgattttctgcgcaaacgctccgtattcccgcgctacactggtcgcatccatcggatcccggccgcaaatcacttcgtacaggttggccacgtcctcgaccgaacggcccagcggaccaatctgatccagagaagaagcaaacgccaccaaaccatagcgggataccgatccataggtgggcttgagacctaccacaccgcagtaagaggcaggcagacggatcgagccgccggtgtcggaacccaaagacagaaccgcctcccccgcgctgacgcaggctgcgctgccgccggaggaaccgcccggcacatacgccggatcccacgggtttttggtctttttaaaataagaagtttcacaggaagaacccatggcaaactcgtccatattacactttccaatgatgaccgcgtctgcctgtttcaggcggctgacgacagtagcatcataaggcggtacaaaattataaagcattttagaagagcaggtcgtcagaacatccttggtgcaaatgttatcctttacaccgatcggaatacctgcaagagacgaaagggcttcgcccgccgcaattttccgatccacttcttctgcctttttcagcgcctgttcttcacacacggtgacaaaagaaccgattttatcctctgttttctcaatttgctccaacacggaacgagtaatttccaccgcactgcattcttttttccgcagcttctccgaaagggatgcagcggtcatttcaaataactccattttctacatcctttctattctactactttcggaaccacaacacagccagcctgagtttgaggagcattctgtaaaagttgatcccgcttcaaagaaggacgaatttcgtcctgacgcagctgcatgggattagacggatctaccgaagtataatctccatccatcgggggcagcttttcgcacatggccacaatattttccatctctttttgaaacttttccaccttctctttttcaatggaaaggcgggacaactttgcgatatgctgtatatcaatttgcatgggatgaaacctcctttgcctgattattctgtcaagggcatctgccctataagcgctattctccgtttatgattgctgatgcggcgggctacttccttccagcagcgccaacaacgccgcttcatccaaaactgggacgcccaaattctgcctgcctcttcgcctgccacaacatagcttgtctttttggatacagaggatgaaactttccccccttggctttcaatccgcgcacctgcctcagcccgggtcagatgtggtaacgttcctgtcaaaacgaaactcaatccggacaaccggtcgccgaccgattgatcttttgaacgggtattcactcctgctttttgtaaccggtcaattaaatgcctggtggcatccagcgagaaatattccacaaccgcttcggccataattccaccaaatccatcaatggaagagatttcctcttccgacgacaaaaacagctgttcaatgtctgcaaaatgcgcagacagaagcttggccgccttctgtccaattccccggattcccaatgcaaacaacaaacgggacaaatcgttctgtttggatttttcaatggccgccagcaaattgctgccgcttttttgggccaaacgatcaagggaagaaacttcttccaaagtaatatcatacaaatctgcaggcgatttgacaagccccgctgctactaaattttctacaatggaaggacccagtccctcaatatccattgcatcacgggaagcaaaatggattagattgcgcaaa

SEQ ID NO: 2680 - DNA, 17679 bp, Unknown
  16S sequences of unknown bacteria
atttataagctccatgtctttccacctcctttctatgttttaattatagcatactattagtagtatgtcaagaaaaatatagaaaaaatgaaaaataaaaaaggtcgatttctcgaccttaagaattctctatataagagttaataaattttttaatttcggttgtgggggttgttccgttttctttacatttggctttaaaagcctcaagtatttcaggctttaggtcaagtggaaaacggacataggttttgcggttatatgccgcctgacgcgcgtatttgctttcactcatatattgcaactccttttaagataagtgtataattgagggatagtttcaatcaatacaagtattgacagcgaaaccgttgttattttggtaataatcggccagtgaagcgacacgccaaaaataaatgaaataatgagagcccaaaatatattatcgtttttcattgtcaaatcctccaatctgggttataatatataaaaggtgtggggctttcgccccacgggttggacttaagattttatagctactatcaatgcggcgatggcactcacggctttgattatcagctcaataatttctttaggttccagcccttttttgttactgctcattttcttacctcctttctatgatattattataacacatgtatacgtacgtgtcaagagaaaaacagaataaatttgtgaatttcagagctttttaagctctttttttattggagtgatagcgatgttaatatcatgcgcaagatgtggaaaaatacataagcctggcgaatgtgcaatagaaacagagaagaaaaaatatcgaaagaaaaagattaacgaagctgatgagtttagacgaacggcacaatggcagagaaaaaggaaagagatattggacagggacaagcacctttgcagagtgtgtttagcaatgacgcatcctataggggaaagacctatcaataccgataacatacaggtacatcatatagagccgataatgaaggcgtggaaaaagagactggataatgataatctgatatgcttatgtccatatcatcattacatggcagaacatggagatatagcggtagaggaactacggatactggctacagagccccccctcctattttttggagaaaaaagggaaagcccctagaccatactactcgacttttatttacaatgttttttagaaatggaaattatgtaaacttacgaaaggaggctaaataatggcgagaccggctaaacctgtagaactggctacaggggcaaggacaaaagaagaaatagaaaacagaaaaaaatatgaagaacagctcaagggcagtcaggatataacggtgccggatgaactttcagataaacagaaaaatatttttttaaatattataaatatgcttaatgacgcagatgtgttgagttgccttgatacctacattctgacaaggacagcggtaacaatagatgcgcttgatgtaatagacgaaatgataagagatgacagctctttgtttttaaatgcaacactcatgtccagcaaggcgaagtatacacaggatttcttccgctgctgtaacgaacttggattaagccctcaggcaagggcgaaaatggctatatcgtttgccaaaaaagacgaagaagacgaattgatgaaaataatggcagggcgtgataacgatgattaaatcacatccggcttataagtatgcagaggggtgcttaaacggtgaaataaatgcccctgtatacgttaagaaacagtgcgcacagtttgtgaaaatagctaatggtgatgacgataagtattgcattgatgaaaataaggttgacgttatagggaagtttctcaaagtactggttgtacctaaaggcttaagagccggaaacagtgtacatgatgtattaagcggattccaatggctttttataatagccatattatgcacagtacacaggacagataaaaccaaaagaagatacgaaagagcgattcttgaaatcgcacgaaagaacggaaagacttttttaatagccgttctttttattttgctatttttgactgaaccgaagttttcaaaattctattctgttgcgcctgacggttcattgtcaagagaggttaaggcggcaatcgaagaaataatacagtcatctcctgcaacaaacggaagttatcacggcaaacataagttcaaaatactaagagactatatacactgtaatctgaccgaaaacagatatatcccattgaactactcaaacgggcatttggacggaaaactgccgtctgtgtttcttgtcgatgaggcaggcggattgcccaatgcttacgcaatagaggctatggcatcaggacagctgactattttaaataaactgggatgtatcatttccacaaaatatcccacatcacataatccgtttgaagatgaagtcagctattgcaaaaaagttcttgacaaaatagtagatgacgaaaaggtgttttcgctcctttatgaaccggacgataaaacaaactgggcaactaatgacgatatattagagcaagccaaccctttagcgttggatatgccgtctgtaatggaagatataaaggataaacgcaaagcagctgttgaggttgaaagtaagcgcgaaaactttgtaacaaagcattgcaacattgtttatcaggggttaggaactgaaacatatatacccgtatcagctgtccgggaatgcagaattgaaaaaatcgactggaccggaagagaagtatttctcggggttgaccttgccatgacaaccgacaactgcgctgtggcaatggcagcatttgaagacggaaaagtctatgcagatgttaaagcttttataccgtcagacagggtagatgaaaaaacaaggtttgaaaaggttgactatagagcggcaatacaaagaggcgagtgtattgcttgcggcgatagggttgtcgactatctgactattgaacaatatgttgcggatctggaagcaagtcttggagtaaaagtactcggaataggatttgacagatacaacgccataagttctgcccaaaaatgggagtcgggagtcattgataaagaaggcgatataaaaagctttaataccgttgaaattaaacagcattcgagtattcttcacccaccgacaaagtggcttgaagagttggtacttgaaaagaactttgcatacgaaaaaaatgacttactggaaatcaattttgaaaatgcaagatgtgtgtatgacaccaatttaaaccgatatgtaaataaaaagcgatctaacggcaaggttgatatggttgtgtcccttattaatgctctgtatctgcttcaacagggcttagatggattaacgagttgggttgctatgtaggaggtgagactaatgggattatttgattttttaaaaacggaaacaagaagcggagaaatgacggaaaaatcacttgacttgacgcttagaaacgggtttagcgaagtagccataacaaagaaagaggctcttaatattccggctgtagcggcttcggttgactttatagccggcacgcttgcttcaatccccataaagctgtataggaaaaatttacaaaacggaaataaagaagaggttacggatgactataggctcggattgttaaactcggaaacaggggatttactggatgcatatcagatgaaaaaatctatggtaagcgattatctcttagacggtagaggatatgcgtatatcaaatggctgagtaataacacaatagcgagtctgcattatattgacgatagacaagtatcggtactaaagaatgaggaccctatttttaagaaagcggattttattgtaaccggcagggtgcttgaggaaagctctatgctccgtatctgtaaagatactacggatggagtaaccggagttggagtaatcgataaacattctacactgctgaaaagcatgtataattcgttaaagtacgaaagtaagtcgcttgctacaggtacaaagaaaggttttttgaaatcatcttcacgattacaagaaccgcaggttaaagaacttaaagaggcttataggcaactatttagggatgatacaagcgacacgatgattttaaacggtggtatatcgtttgaaggtgtatctgcgactgctgccgaattacagcagaatgaaaacaaagtaaccaatacatcggatgtttattctattttcggaattaacgatgacctattcacagtatcgtcaagttcaaaagactcatatataaacagcattaaaacagcggtattccctgtaattgcggctttggaggcagcttttaacagatttctgttattagacaacgaaaaaaactctatgttttttgcctttgatacaaaagcaataatgaaaggcgatatacttaaccgttataaagcctatgaaatagccacaaaagaaggttttatgaccgttgatgaagtccgaaaagaagaaaactatgcgcctataggtcttgataagattaaactatctctcggaacggttttctatgaccccgaaaccgctgagatatttaatataaatacaaattcaattatcagtacagaaggaggtgtaaaaaatgagggtggagatacgaagtaacagcgctgtgatagagggatatgttaatgtggttgaaagagaatcaagaatgttgagggactcccacggagcgtttatagaaatcgtaaaagccggaacttttgcaaaggcaataaaaaataacgataacgtagaacttagatttaaccacaatcgtcatttaggagatgtaaaaagcggcagccttgagttaagagaggatgacatcggtctttttgcgagggctctggtagaagataaagaggttatcgaaaaggcaaggaataaagaattgagaggatggtctttcggtttttcctgccgaaacgccgaatgggaggaagctaaaacatcggatgactcagtaatgagaaaacgaaaactcacggacatagaactgagagaagtgtctatattggacaagactcccgcgtatatcgctacatcaatcgagatgagggacgataaagaggatcttgtggagttccgtagcgcaccaaacgaagaaatagaagtaattgaagaaaaaagagaaaagaaggacgatccttcttctttttttgcggaaatagataaaaagtatatggaaataaaaggaggaaataacgaatgaaaaaatacattgaaaaaagaaataatcttgtaatggaaatgggacagcttatcgacaatgcaaaaaacgagacgagagcatttaacgaagaagaacagagacgttatgatgaaatagtaaatgaaatagaaggcattgataaaatgcttaaaatcgataaagagtcgagagcactggaacttacaaatcttgaaggaccacagggtaaaacaaaagaagaggaagaactcagagcgtttgaaaactacattaggggaagagttgaggaaagagcagctaatcttgatgtaacaaacaacggagctattattcctacaactatagcaaacaaaataattgaaacagtaaagaatatcgcgcctgtatatgcactttcgacaaaatacaatattaagggtgatctcgtattccctgtatatgatgagacatcaggttcaataacttgcgcatacgccaacgagttcactgcacttacgtcaacaagcggcaagtttacatctattacacttaaaggctatctcgccggagcacttacaaaggtttcgctttcccttataaacgcaacgggttttgacctcgtgtcatacgttattgcaaaaatggctgagagcatagccgaatttatggagaaagaacttattatcggcacagaaagcaagtgtacaggcgttacatctgctacggtgggcattacgacagcagcggctacggttattactgccgatgaattaatcgacctccagggttctgttatcaaagcttaccaggcggatgcaagatggttaatgaatgaaaaaacaagaattgcaattgcaaagttaaaagaccagaacggcgtatatcttttacagagggatattactaacggtttcggttatacacttctcggaaagcccgtagaaatttcagacaatatgcccgacataggcggcgataagattccggtagtatacggggatttcagtggtctttacacaaaacttaacggttcaattgacatacaggttatgcgcgaaaaattccttgatgaacacgctctaggtgtaatcggctggatagaacttgactctaagattgttgagccacagaaattaagggcgctcaagtgtaaaaatgcctgataaatgtttaattgaggtgattacttatgaaatataaggtgttatctagcttctgcggcgctgtttgcgccgctaaaggcgaaaccatagaattaaaagacagagctgttatcaaagatttaactgccgccggctatattgtgaaagtcggggcgagcaaggatgaaaaatcagagacaaacgatgacgaaaatgtcggggtgagcgacgatgaagatgtcggaaataaagactgacgatttaaaaaaatatctgagagtggacggtaacgaagatgatgtatttataaccactgttattgacgctgccaaacagtatgtaaggacctatacggcgcaagaagataagttcttagacgaatacagtgatatagttatggctgtatttgcactttgcgccgatatgtacgatgttcgacaggttacagctgctaacgacaaggttaatccgttggtcaaacagatacttgattcttattcacgaaattggatagggtgatttaatgaacagaagagacggtaatttaacaacactgcttaataagagagttgaattgtggagggatgttacctcaaccgaattaggggctctggggcagttctctatggtgcagtcaaaggttatggatttgtatgcagccattgagcctcgaacaggttctctattatcgggaagaacagccgagacagcactttcaaagacaacccataaaatcacaattcgctacagaaacgatataaaaccgtcggattggtttgtttatgggggagaaagatacaatattctctatatattagacccgtatgcaaaccacgaaagacttgaggtgtactgcgaggcggtgagcatagagtgataggttttgactacagagaaatggatgagcttatagagaccttcggaaagcttgaaagagagttcccgaaggagacagataaatttctcaaaaaagcgggtaaaaaacaggcttcgtggattaaaaaaggatatagactaaagactaaaaaacttacaggaaaccttatcaaaggagtaaaaacaggaaagccctatatttataagagcgatgaacaccagttgagggtatacagcaaagcgccacacgcacatttaattgagtttggacacaatatgagggataagtacggaaaacctgtaaaaaaaggaaagtcttttgttgaaggcagacgaattgttgaaacagaaagaaaggcttttgagagtgaattttacaaaatggcggatgaatggatagacgatttcttgggggtataaaaatgagaagtgaaattgatataatcaacggtctttccgctatgctccgggaaaactttccgactatcgaacaaaaaccggcagataaagcagaaggctttgaaaggtcgtgttttgcagtacagattttaagcagtgaagactctcaggtcggggaaatggaagaaattaatgcaaatgtagatctgtattatttttgcaaagacatcaattacggatatgccgaattgttgatgatgaaaaagaatctatcaaaactgcttaaacaccctataaaagtttcggacggcttttattatacctgtgataacatttcgcacactataagtcttcttgataaggcattggcagttaattttgatgttcagcttgttcaagattacgaaaaagatactgatattgattatactatgcaaaaactgattataaacaaagaggaggcatgataaaatgggacttcccgaaataaatattaactttacccaaaaagcggtatcggctatagaccgttccgcaagagggattgtggtggttgtagtccgagacgatacaggcaaagcgcctatatgcgcatcgtaccgctatgaaacagacattgaaacaagcgcatatacatctgataacctaacagctatcaagagagcgtttttaattgctccgacaaaagtatatgttataaaagtaaaagcagctgcggagttctccgaggtaacagccgagcttgaaaaacttaaatacaattatgtgtgctgtgctacgtcaacggttacggaccagcaggctcttgctacatacatcaaagctaagaatgcaaacagcctttctaagaagtatgtggctgttgtacataacgcaacgaccacagacagtaagtatgtcattaactgtcttaatccgagtgtacacgagaaaggcaatcccacagccgttcctatggcaatgtacttgcccagattaacaagcatatttgcagccctgcctttaaaccgttcaagtacttactatgagcttgacgaactcgaaagcgtaacagaccctacatacgagtcggaagaaaatattaatacattcatcgataaaggcggtcttatgctttttaacgatgatggcgttgtaagaattgcaagaggcgtcaacagtcttaagaccatatcctccacagaaagcgaagaaatgaagaagataattatagtagacgccatgaaccttattattgaggacatagccgcagaatttaagaaaaactatgtcggaaaatataaaaattcatacgacaatcaggcgttgtttatatcatcgataaacagctatttcagaggacttgcaaaagaagaggtcctcaaccctgatttcaacaacgaggcgtttgttgatgttccggcacagagagaagcgtgggaaagcataggaacggatacaagcggatggacagactttaaagtaaagaaaatgacattccgttcaaatctgtattttgcggccaatattaaaattcttgacgctatcgaggacttcgcgtttaacattactatggcataaggggggattgtaaatggctaattttgataaaaacaaaattattcgaggaaactacggaagattatggatgaacggtgaaaggctatcaaatgtaaaatcattcgaagcaaaagcaacattgaactatgaggacatagagcttaacgaagaacttggaacatcaagaagatatatgggatataccatagagggaacaatggtgctgcataaatttgactcacaagtaatcaaactgtataaagagggcattgtaaacggtgtactcccggatgtaaaaatggttgccgcattagtagatccaacgtccgacggctcggaacgagttgagatatacggcgttacatttgacgaagtaatgcttaacaagtttgagaataagactgtacttgaagaagaagttccctttaaagcagacggctttaaattcattgacacgatttaaggaggggcaatatggcaaaatcaaaaaagcttacactggaagatttgattacacgcaagacacagagcgaaaacgataagctgagaataaaagaaatttatgtgcagaatcttgacgggaacattgttcttcaaaagggttctattgcaaaagtgatagaccttatggataacatagaaaacgcagattccataaaagaaggctatgagtttcaaaaacagcttatatatatgcattgccctgtgatgcatgataaacagttgcaggatatatatgagtgcgcagaaccttatgatattgtcgataagttattcggagacaatgtaggcgacgtttcaaaagccgcggaggaagtacttgacttctatggactggctgatgaggtagataaaataaaaaacttataaagagcgacattgatgttgcgatgatcgctcactatattaatagaggatacagtctggataaactgcttgagttaagcggttttgaaaggctgttttttattgccgctatggatacggaggaggtgagataaatggcgaataaggtaacaaacgtactgataaagttaaaagataagttttcaggtcctttgaaaaaaaccacagaaaccacaaaaaaagcaaagcgtgagatagccgcagccaataagaccattaacaaattcgcaagcaacgcaaacaaaaaattcaaatcaatagcggctacggtggctaaaacattgggtggaatgagtgttgccgcactgacagccggaacggtaaccggtttttcagaggcttttaacttggaaacctacagggcgcagttagagactgcaacaggcgatacgcaaaaggcagccgatataatgaaatacgccattaatctcgccaataaaactccttttgaaggtggagaactggtagaagccgcttctaaatttgaggctatgggtatgtcagccgaatactggctgacaaaagccggagacatggcaggagcaacaggcaaggatataattcaggcaacagaagctataattgacgcacagtcgggcgaatgggaacgaatgaaggagttcggcataaaaggcgttaaggatatggatgatcttgtcggtataatggataaacgctttgccggcggtatggaaaagctgtccaaaaccacaaaaggtatgtggtctacagttacgggcgttacgaagaacgcacttgccaatattgtcggggtaatgaatgacggaactataaaagccggctctccgcttgatgtgttaaggggatatattcaaaagcttgccgataaattagtcgaacttcaaaacaatggtactatacaaaagctgtccgatatggtggcaaacggtcttgctaaggctatggacgcactgggaagggctgttgattttgtatcacaaaatgcaaattggcttgttcctgtcttaacgggacttataaccgtgtttacatcgtttaatatcatacacagcgttgtaacaaagataactgctttaaaaagtaccttcgatattttgtccacaggagcgaaagcggcaggcggtgcgatcaagctgctgtgctccggttcgggtatcggtatgatagccattgccataggtgcggctatagcggcaggagtatatctatataaaaattgggacacgattaaacagagagcaagcgattttgtagcagcggtaaaagctgattttgaattaataagggataacatagtaaatgcttttacagctgtaaaagatagaatagcaggcgtgtttaattggataaaagagaaattatccggcattaagtcgagtataagcaatttgcctattgtaggaaaactgttcggaggcggtacttcaacagacggtcatgcaacaggttcggcatatttcagcggtggtcttacacgtgtaaacgagggcggtagaggtgaattaataaaccttcccaacggttcacagattataccgcataataaatcagaaaaaatactgtctgccgcaaacggtactaatatcaatctgaacctgacaatacaaggcaatgttataggaaacgaagcttatgcagactatcttggaggatttatctctaaacgtataatagcagctatcaataatatttaaggaggagcaaaatggatattatattttcagcaaacaataatgaagaagtaatgatttttccggttgttcctcccgattttgaaataacagacgagcaaaacaatgaggattttgacggtatatcggggaaaatgaaacttataggcgaaaaaggtttaaaaaaacttactatatcatcttttttcccggtaaacaaagaatatacgtttgtcaaaacaggaagcgaacgagacgggcgcaagtatattgaattcttcgataaatggagaaatcaaaaagtaccgtttagagtagttataacctcgaaagacggcagatgtatattgaatatggcgtgtgtggttaattctataacctatcattatgacaaggtcggagatattcagtatacgcttgacattgaagagtataggtttgggggttgatgtgctatggatttgaagctgtttatagtaaaggacagcttggtagatatatcaaaaataagcggagagtatcaacggtccgataatgccgacggcttaggtgaagagttcagctttaatattgccattaataagaaagataagtactggccgacattcaatattgaaatgggcgacaagattttgtttgttaaggatagcaaaagcacattcacaggaatgataacagaggattcatgtacagatgatacggttcattcgataaaggcttatgactatgggtttctgatgaacaagagtcaagtgtatgtacagttccgaaaacttgcggcggatgcttgtattgaaaaactgtgcggagactactcaatccctatagggagtatatgttcaatgcctacgccgattgacaaggtatacaacggcgatacggtttccgattgttttaaagacattatcagtcaagcagaagcagacagcggagagaagtaccgaatggaaataagaggaggcttgctgtttgtggagccggaaagctctttagtgattaaagcaacttataaaggggctgataatattgcaccgtttgatattacaaaggaaatagcgaacttaaccgtaacccgtagcattgccgatatgagaaactctgtaaaaatcatatcgtcaagcgaacaaagcgcacacgtcataggagaggcttcggcatcggattcagtggctaaattcggactattgcagcatgtggaaacattaagcggcgatgatgtttcaaaagctaaaaacgaagctaaaaacagacttgcaagtcttaataaagtcggtgaaagcataacgctgaaactgatgggcgatgatgctgtaagaagcggaagaatacttgagtttaacgagccgcaaataaaaggacaatatatggtttccaactgtacgcactactacagtaataacagccacactatggatgtaacgctggaggtgatatagtgaatgattgggaatataaaatggcgagcgaatttaaaaaacgaaacaatcaaaacctgttaagtccatgtataggcgttgtaattagtacatcgccttttttagtatccatacaagacggtatgtatctgctggataaggataacgcttttgtatgtagacatattctcgaaagaaaaagcaagatgtcatttacagcgaacaatagccagaacgcaagcggaaatataagtataagttgtgaaggcgccggaagttttagttttacatcaaacggcactatgacagtaaataatcaagacgttgaattatttgaggtttggaaagcaggggacagtgttcttgttattccggacggtaaaaacgaaaaattttttattgtagatgtattggagggggtataaatgtttcctacagatataacattccctgaaacaataaatattaaaaatcaaaatgataatttagatgtaaaagtaggaagaagctttgtgttcgattatgtaaagggtcagcatgtaattgttgacggtaagccgaaagaaacgacagaggcacaagctatacaacagtggcttgaactgttggtaagaactgttataggcaagtatacggtttatcaggatacgaaattcgggacaacgtgggaaaaatacataagttacagacagctgcctaacggatatatacaaagcgaattggaaagagaaatacaggaaagttgtaatgaatactgtccagccattgaacgagtacaggactttacggcggaaagactaagggacggtcttatagtcagttttacagcagaattgaaaaataaacaagtgttggaggtgagagtgaatgtttaacaaaagtacagatgaaatacataatgagatgttgtctgatattgatagcagctatcaaaagtctgtaggttttcccacgtttgatataacaagggcatttgccatagcgctaacccccgtttacaaattaatagagacagtggctaaaaaacttgatgttcgtaatttatcgggcaatgaactgactctttacacgaaacagcgtaaaaacgtagtacgaaaagctgcgacaaaagcatacggcacacttacagtttacggaaacggaacagttaaaaaaggcgatgtatttgagaccgaagcaggaacacagtttcaggcaacaaaaaccgttgcaatagctgcatcgggcatagtccccatagaagcggtaaaaacggggttaggaggtaacgtaggtgctcattcaatcgttaaaataccaaagactttacagggtatcaactcttgtaccaacacagaacaaacgatgggaggctatgaggaggaaacagacgattctcttctcgaacgctaccttgaagccgttcgtcagcctcccacatctggaaacaagtatcattacaaagcatgggcgaaagaggtttccggtgttggagacgcaagagtatttccgctatggaaaggtgaaaacacagtaaaagttgttattataaacgaccttaagcaaccggcagacagcgaacttgtcagcaaggtgcaaacatatatagacccaaacataagcggaacaggcgaaggagaagcccctataggggcatactgcacagttgaatcggctataggtaagacgatagccgtgtctgtaaaagttaagctactggcaggatatgagctgacagaggttaaaaagaatattgaaacaggtattgaagcttatttatcggaaatagctttcaagcagaactatgtatcgtatggcaaaatagccaacgctgttaatgatgcggtcggtgtagaagattacagttcattaacggtaaattcgggaacagccaacataccggtatcagataccgaggttgctgtaaaaggagtggtgtccgttgccgaacaataaagaaaaactgcttaatatgctgcacaaagtatacagaaaagataactggataggacaattgtttcaagcggcagggcttgaacttgataatgtaagcacagctattgacgagattaataaccagtactttatcaacacagctacagactggggacttaagctatatgaatgggagcttggcataacaaaaccgtcaaaaaagctggaagcaagaagatctacagtcgaagcaaaatggaaaacgggcggcaaagtagatatagcattgctacaagccgttgccgacagttggaagaatggggaaatagatgtaactttccccgacggaaaaatacacataacttttgtaggagattacggagtgcctactgatctagaagatttatatgcggcgctggatgaggtaaagcctgcacatcttgcaatagtttatacattcagatacttgcttatcaaagatattcacgaagtaatgaccctcaaagaagtcgaaagcacaacattacgcaaatttgcaggaggtgaagctatatatggctagttatacaaacaatttaaaactttataaagccgacccggtagcggacggaaatgatacgtttaacatagatactatgatgaatgacaactggaataaaatagacgctgctcagtcctttagagggacaacagcaggaacagcgacagctcttactgtttcgggactttctgaaaccgatgggcaaaaagcggagttaaagctacacacagacataagcgatggagcaacactaaacggaaagcctatactgtcatcgacaggagaacccatcacagaagcgaaagcaggctcgacattattagttgtttataatgcggctaaagccagttggtatcaaatcggtggcggtggaggcggtaataaaatcatctccgtcgaaggcagtccgacgaaaaaggcatacttcgaggtcggaacggacggcatattgagagtaaaggaggcgtaaggcatggcaacaggagatatattggcgcaggtggcagaccagaggacagttgaagaaattaaaaacagcattggcgaaggttctggtaaaacactgaataacaaactggacagtatacttgcgcttacttcaaaaattggaatagacgcaaacggcatatatgtcatgacagaatgaggtgtaataaatggctaaaatttatctgggaaaagaagaaacggttgagctaataaaagaaataataggaacgatgtccgatggtccaacggatgttataaacaataccctcatggcaaaggctaaatatcttttacaggttttggaaagcggcattgacgataataattttggaacaccgataaaaatagtatccgattataaaagaggcactaaggttactggaaaagggtatctatttgtttgtggttacaatgggtattttagttcaatctatgtagacggaaaaccgatatcgcaatttgcctcttccacaattgaaagagattataatacggtcgctgaaaaaatccccttcaaaaattcggttgaagttaggacggacctggatccgagtggagacgctgctcctatagtagcggtatgttattaaattgggaagtgagtttatgcaaaaatatttagcggaagagcagagcttgaaagctgttaaagatgttcttggaaataaaaatgataaaaacaatacaaatctttgtggatgtatcaatacatttttagattcattgataaatcaaacgataaagattaatgctccaaaacctatattgataaaaaacttcggggcaagtgcaaaagagcctgttactattacaggcaaaggaaaaattgtttttttctctacgaatacaggcggaaatacagatcagtttatggctgtcgtagcttcagttgatggaataaccctgaataataaactttggatggataggacagggcgttgtgaagtagagtttaaaaaatctataacaattacaaatgtagcggaattaccgtacagcgcaggaagtgcggcggtggttgcttatgtttattagaaggaggtgagcgttatgaaaatcgaagagagagttaaaaaatacattgacgatgaaggtaaaaggcatgagtatacagaggttgtacaaataaatgaagatggcacggaaataataagggctactgtagatagggtgcttagtgaagagccaaaacctgaaccgcaaccatctcagcttgaccgaatagaagaaagacttgaaacatctttcgtggaggcacaacagacagccatagaccaatacacaacagagttgttagagggaggcatattatgagaacacttgtcgaaagccttaaaaggctttatttaaaaggaagtgttgccaaatccaaaatagaggacttggctttaagcgaaaagattacagcggaagaaaagaactacataatatcagaacagaacatttaataaataaggaggaatacacatgaaaaaattaatcgaaatgaaaactgttgaaaaagacggacaccacatgtttacctacgaaaacggcattaagacacctattcccgatgacggcgttgtgttttgctatctggcacccgaaacggaaaaaggtcgta

SEQ ID NO: 2681 - DNA, 1645 bp, Unknown
  16S sequences of unknown bacteria
aaggatatcggcgctgacgggcagatcctgcacctcgatggtcccttcatccgcttctccgtcagtgaggatgatgcactcatatccctcgatctccatggcgctgagcgaatagacgccttgagcaagatcatataaggatacgctgaacccgttctctttgttcagccgcaggcgtatgctctcctccccgccgcgcagcacagccatgatctctccgctgacaaaggggaagagcgtgccgcatccatcgcagcgaaaggcgcggatgcgcaccgatggctcctgcgtgcgctgctcgatcatcgccgcccgctgatggcccgatgtcatctccagcgtcccatctgtcaacacatcattcacatagatccggcacgaaccgctgcgcgggcggatctcatagcgcccaggtgatagacgcagggtcatctcaaaatcattggctgcgctgaactcctcccaccggctgccgtttggccccgcaatttcatagcgataacgggaggaagcattcgggacgctctggccctgtgcgccctcttccatgacatgcagcgtcagttccccataatcctcagacagttcgatcagcacctgcgcccacggcctctccagcgtgagtgcgaacacggccgtatctccctgctgttcctcctcgtcgacgtaaacgcgcacccgggcatccgccggcatggcgctgccatcctcacggacgacgcccagcgtaaaggaaccgaagcagagcgcggaaaactccatgcaggaattgccttcggcatcgaagacaagcgcttgctctgcactgtcgccctcttcctgctgcaagcgggcagtcagcgttccttcaaagggaaagccatccgttttatggaccctcagccgaagtccggctgtcatggatgcggcagcactctgcactagcgcgatcggtgcatgcttcttccagttgatcttcatacgaaacctccttgttcccggcacattcgcctatcatacattccagtatatgaacgaggtcgtcgtttgatttctttttttgtccgcgaatttcgcgcacaaaaaaaccggcccttttcataagaccggtcagcgtcatattcagttcttgcccaacaggcggaacatatttttcttgtagacctccacgcccggctggttgaaggggttcaccccaagcagcagcacgctcatcgccaccgcgcggaagaagaaatagcacatatagccgaagctctccgcgctcatgtcctccatcgtcaatatcagattcggaacatggccggtattcacatgggcttccagcgttccctgcgcggccatcttgttgacccagtcgatggatcttccgctcaggtagttcatctgatccgcgttcttctcatcatgcgggaagaccagatcccgtgccggccgctctaccagcagcagcgtctcgaacaggaccttcttgccctcctgaacgaactggcccagagaatgcaggtcggtagagaaattggcggaatccggcaggatgccctttccttccttgccctcgctctctccgaacagctgcttccaccattccgaaaccatggccatctgcggttcatagttgacgagcatctccacatcatagccctgatcctgcaggatgcggcgg

SEQ ID NO: 2682 - DNA, 12330 bp, Unknown
  16S sequences of unknown bacteria
tggaccagatcgagcctttccatcccggccgcatggcctcccggatcctgggcatgggcgatgtgctgaccctgatcgaaaaggcggaagccgccttcgaccagaaaaaagctgaggagctggagcagaagctccgctccaacaaattcaccctggccgattattacgaccagctggtgcagctcaagggcatgggctccgtgcaagatctgctgggcatgatgcctagcatggggaatctgaaaaacgtccaggtggacgagggcgctctgggtcggacggaagcgatcatccaatccatgaccccctacgagcgagagaatcccaactgcctcaatcacagccgcaagcgccgcatcgccgccggttccggcgtcaaggtcgaggaggtcaacaaaatgctcaaatccttcgagatgatgcagacgctgatgcgccagatgaacggcagcggcaagcgcaaaaagaagaaccgcggcttcggcagcatgccgaacctgcccggcatgggcggcatgggcctgcccaaattttaatccgtttacgccatggctcgaccggccatgcacgataaagaagacaagaagttttttggaggtatttaccaatggtcaagatcagactgagaagaatgggcgcgaagaaggctccctactaccgtatcgttgtcgcagattcccgcagcccccgtgacggccgctgcatcgaagagatcggcacgtacgatcccctgacgaaccccgccaccatcaaggtcgacgcggaaaaagctcaggcttggatcaagaacggcgcccagcccaccgatacggtcagagctctgctgaaaaaagccggcgccctgtaattggcgagggattcgcaatgaaggaactcttgctttacgtggcaaagaatctggtcgatcacccggacgcggtgacggtgacggaagtccccggtgatgtgacagtcttagagctgcgcgtcgccccggaggacatgggaaaggtgatcggccgccagggccgcatcgccaaggagattcgcacgattgtcaagtccgttgctcagcgtgccgggcagaaggtctctgtggagattgtcgactgatttttctccgccgccccacgtcaggagaacagattcgtgttgaaacgataccgcatcgcggccaggcgtttaatccgcctggccgcgatgcttttgcgccaggcaaagcggcattcgtgcttgtttttttctctatttcacgctacaatggatgcacagacagcagggaggtattgcaatggaacaatttctggaagcggggcagatcgtcgccacccacggtgtccggggggagctgaaggtcctgccctgggcagatggcccggagtttttgctggaatttgaccatatctatcttgacggtgcctgctacgatatcgagcaaagccgcgtccacaagacctgtacgctcttgaagctggccgggatcgacagccccgaggaggccgcgccgctgatgcgccgcgtcgtccgagtcgatcggacagaagtcgaattggaggagggcgtgcattttatcgccgatctcattggtctgcgggtcctgaacgacggcgaggaaatcggtattttgaaagaagtgctgagcctgccaggcaacgacgtctacgttgtccaggggcagcaggagcatatgatcccggtcgtccgggaatttgtggaggagccggactttgccgcagggacggtgacggtccacctcatcgaggggatgtgagccatgcggatcgacattatgacgctctttcccgataccgtcggcgatatgatgaacgagtccatcctgggccgggcgcaggagcgggatattatccgcattgaggcgcaccagatccgggattatacagcaaaccggcagaaccaagtcgatgactacccctacggtggcgggcacggcgcgattttgcaggccgaccccctctaccgctgctgggaggccatctgcgatgaggtcgccgcgccggtgcatacgattttcctctccccctgcggcgcgacattctgccaggaaaaggcccggcagctgctgcgggattatgagaatatcatcctggtctgcggccattacgagggcatcgaccagcggtttattgacgaatgcgtggatgaggagatctccatcggcgatttcgtcctgacgggcggcgagctgcccgcaatggtcgtagccgactgtatctgccggatggtccccggcgttctgtccgacgcggcctgctttgaggacgaaagccactggaacgggctgctggaatacccccagtactcccgcccggcccaatggcacggccttaaagtcccggagatcctgcgctccggcaatcacggcgcggtggaccgctggcggcgcaagcagtccattttgcggacgatgcaccggcgtccagatctcttcgcccggctgaccctcccccacaagacccgggcagagaaaaagtttatcgcagaattggaggcggaggacgatgcattcaaacatcgaaacgctaaaaaactggatcgcagagagcaataacatcgtctttttcggcggcgcaggcgtcagcacggaatccggtattccggattttcgcagtgtggatgggctgtatcaccagaaattcgactatccgccggagacgatcatctcccatagcttttatttgaagaatccagcctactttttccggttctaccgggaaaagatgctgcccctaggttttgcgccaaatatcacccaccggcggctggcacagctggagcaggaaggcaagctgctggccgtcgtcacgcagaatatcgacgggctgcatcaaaaggccgggagcaggcgcgtttacgagctccacggcagcgtcctgcggaattattgtacccgctgtcataaattcttctcggcagagtttgtcaaaaacgcgccgggcgtgccccgctgcccctgcggcgggatcgtcaagccggacgttgtgctctatgaggagagcctggacgaggactgcatcacaaaggccgtgcaggccatccaggcggcagaccttttgatcgtcggcggcacctctttgacggtctacccagccgccgggctgatccggtattacaccggccagcgcctggtgctcatcaaccgtgacgaaacgccctatgatgactacgccaacctcgtcctgcacgaaagtctgggcgacgtcttttctcaggtataaaaaatcggtcatgcgcttcaaaacgcatgaccgattttttagttcacgatctggaagcccgcttctgtcagcttagcgcggatctgcgcgatctgttcaaagtcccgcgtctccatgctaacacgcaggaagcagctggaaattgccatgttggggtccgatctttcgtggcggacgccgacgacattggctccgcaggccgcgataatctcgctgacgcccaccagctggcccggcttatcctccagagcaatgagcaggttggcattacgaccagaggtgaccaggccgcgggtgatgacccgggagaggatattgacgtcgatattgccgccggagacaaggcacacggccttcttccccgcaatcggcagcttgccgaacatcgcagccgcaacactcaccgcaccggcgccctcggcaatcaacttctgcttttcaatcatggccaggattgccgcggcaatctcatcctcggataccgtgacgatgccgtctacatactgctcgaccatggagaatgtcgtatcccccgggtgcttgacggcaatgccgtcggcaaaggtcttgaccgtacccaaagtgatttgatggccctcccggtggctctcaaacatgctgggggcattttccgcctgtacaccgtagattttgacagacggctgcagttgcttgacggcaaaggccacgccggagataagcccaccgccgcccaccgggacgatgatcgcatccacatccggcagttgatctaaaatttccaggccgatggtgccctgtccagcgatgacctcgtcatcgtcaaaggggtggatgagggtcgcaccggtctccttttgcaggcgcagcgcctgctcataggcatcgtcatacgcgcccttggtcagaacaacctccgcacccagacgctttgtcgcctccaccttgctgatgggagcgctgtccggcatgcagacgacgctgcggaccccctgatgggtcgccgccaaggcaacgccctgggcgtggttcccggcgctgcaggcgatgatgccggcggccttctgctgctccgtcagctggctgatcttataatacgcaccccgcagcttgaagctgccagtgacctggaggttttccgtctttaagtaaagcgctgcgtcgtggctcagcagcggcgcctgaatgaggtctgttttccgcgccacctctttgagaataaaggcggcatgatagattttatcaagtgttaccattttttaatccgattccttacctgcgagatagtgaataaactgctgcgccgtgcggccggagacgccgccgtggcgaatttcccaacgatcggccagccgcagcagctctgcctcgtccatcggccgaggcagctgccgcgccgccagcgcctggacaatctcatggtactgctgacgattggggatgctgaaattgatcgtcacaccgaagcgggcggacagggagagcttctcctccatggtgtccgaatgatggatatcgccccgtgtctccatatcatcccggtccttccaggtctcctgcaccaggtggcggcggttggaggtggcatagattaggatgttgtccgggcgggtctccacgccgccttcgatgacggccttgaggaatttgtactccatctccgactcctcaaaggagaggtcgtcgatgtagatgataaagcggtagtgccgctgcttgattgccgcgatcacggcggacaggtcgtggaactggtgcttatagatctcgatcatccgcagaccgtcgtcataatactcgttgagcagcgccttgacacacgaggatttccccgtcccggcatcaccatagagcagaacgttattggcgggctggccgcgcaggaacgcttcggtattgcgcaccagctcctgcttttgcagctcatagcccacaaggtctgagagcattgtcttatccgtattgttgatgggcaaaaatgtcacaccgccatcggctccgctgcggatgcggaaggcccggttcagcccgaacatccccacgccgtagtcccggtagcaggtcgtgacgatgcggaagaacgcctcggtgctctccgactgggccagggcgcggctcgttttccgcaccagggcgctgacgctgcggtaatagctcttttccggcttggcaatggcacggtaatgggtcagcacctggaagcaatccagccccagcgccgcctcaaaggaggcaaaatcccagcagaaaagccgccggaacaccgcaagatccgccatggcaaaatggaggatggacccatccgacacaccgactcgctccgcggtcagggagaaggaattctccgtcgtcagcagcaaaaaggtcagataatcctgccagagattctcatcaaagccatactgggtcgccagatccagcagacgcttgacctggtggtgaacccgctgggccagcgcagcgcgggacattgccccctgcttccagtcgcggtagacagacgccagctgagagaggatgctctcctcacccagctcgctgaataataccagttttgcagtcagctcatccatggcatcacagctccgccaggattttttgcgtcatttccgtacaggacagcggggctgtaccgctgcctgcgatatccgccgtacgccagcccgcctgcaggacccggtcgaccgccgcctcgatggcatcggcctcggcggcgcagttcaggctgtagcgcagcagcatggccgcggagaggatcgtggcgatggggttcgccttattctgcccggcaatgtccggcgcagagccgtggatcggctcgtacataccccgggtgccgtcgcccagggatgccgacggcagtagaccgatggaaccggtgatctgcgacgcctcgtcggagaggatatcgccgaacatattcgacgtcacaacgacatcaaactgggccggattgcggaccagctgcatcgcagcgttatccaccagcatatccgtgcaggtgacatcgggatagtccgccgcgatgcgatggaccgtctcccgccagagccgggaggattccaggacattggccttgtcgatactgatgacctgcttgcggcgcttgcgggccgcctcaaacgcgacgcgggcgatccgctcgatctccatcacgctgtagcattcggtatcataggcctccgggccgtacttgccatcgcggcggccccgctcgccgaagtagatgccgccggtcaactcccggaccatcatcaggtcaaagccgttcgcgacgatatcgggccgcagcgggcaatcgcctgccagggcagggtagagctttgccgggcgcaaattcgtataaaggcccagggccgcccgcaggccgagcagcgccttttccgggcgcagggctgcggggttcttgtcccactttgggccgccgacggcgcccagtaggacgctgtccgacgccaggcagccgtcgaccgtctcctggggcaggggctgcccgcaggcgtcgatggcgcagccaccggcaagatagcgggggaacgcaaattcatggccgaatttctggccgatggcctctaaaacgcgcacggcgctgtccacgatctcgggaccgatgccgtcgccgcggatgagtgcgatcgtatatttcataccgattccccctgttctgcctggcgggccttgagatacttcagcaagccgccgcagcgaatgatctcttcaataaacggcgggaagccgttggcctggaagacctggccggtggtctcatcggtgatcacgccggtggcaaactccacactgacggtatcgcccgcctggatcgcctcggcggcagccgagcactctaggatggggaagccgatgttgatggcattgcggtagaagatccgcgcaaagctggcggcgatgacacacgccgcgccgcttgcctggatggcgatgggcgcatgctcccgggaggagccgcagccgaaattccagccgccaaccataatatcgccgggcttgacgctggtggcatacgccgcgtcaatatcctccatgcagtgcttcgccagctcctccggcgaaggcgcgttcaaataacgggccgggatgataacgtcggtatcgacattatcgccgtaacgaaaaaccgtaccttttaccatgctcagactcctttcccgagttccgccggatctgccaggcagcctgcgacagcggacgccgccgcgacggcggggctggccaaaacgacctcactgctggtgtggcccatgcggccgacaaaattgcggttcgtcgtggaaacagctcgctctccggcgcacataacgcccatatgcccgcccaggcaggggccgcaggtcggcgtcgaaacagcgcaacccgcggtaataaacgtatcaaccaggccctcatgcatcgcctggagataaatggcctgagttgccgggatgacgatgcagcgcacgccagtggccacatggcggccctccaaaatcgcggcagccgcccgcaggtcctcgatccggccattggtacacgaaccgatgacagcctgctggataggcatccccttgacctcgctgatgcggcgggtattggacggcagatgcggcagactaaccgtcggctccagggtactgaggtcgatcgtcacggttctggcatattctgcatccgggtccgcgtcgaaggtctgccaggggcggtccgtgcgtcccttcatatacgcccgcgtcttctcgtctaccgggaagatgccgtttttcgcgcccgcttcaatggccatattggcgatggtgaagcggtcgtccatcgacaggctggcgacgccggggccggtaaattccagcgactgatacagcgcgccatcgacgccgatcatgccgatcaggtgcaatatcacatccttgccgctggcatagccccgcagcgcgccggtcagctcgacccggatggcctcgggaaccttgaaccagttttcgcccatagccatcccggctgccatatccgtggagccgacgccggtggaaaatgcgcccagcgcgccgtaggtacaggtgtgggagtccgcgccgatgaccagctcaccgggggcaaccaatcctttttctggcagcagggcgtgttcgatgccgacctccccgacgtcaaagaaatttttgatggaaaaacgcttggcaaactcccgggcctcgtggcacagctgcgcggatttgatatccttgcagggggtggagtggtccagcacgatagcgatcttctcccggtcaaacacacgggtgaagcccgcccgatcaaaggcggtgatggccaccggcgttgtaatatcattgcccagtaccaggtccagcttcgcctcgatgaggtcgcctgccttgacctggggtaagcccgcatgggccgccaggatcttttgggtcattgtcatagccatgggtcaagcctcctgtttctgcgcctgtgcagcatgctgcatcttgttcgtcgcgtcaatatacgccagaacactggcctcaatgacgtccgtcgacaggccgtggccgttgaacgtgcggccgcctgcctgcagcttgacggtaacgccgcccagcgtatccttgccctgggagacggagttgatggagaagatctcaaaggaatgctccaccggcttcacgatcttatcgatggcattgaaggccgcgtccaccgggccgtcgcccaggcagacctcttcaaagcgctcctcgtcccgcttgaggctgatggtcgccgtggctgtcgtaaagttgctggtatggacggcgaaccaatcgagcttgtagccgttttcgatcgtctcggcccggtcgctgtggctgaccagcgcttcaatatccgcatcggagacgacctttttcttgtcgcacaggaccttgaattcgccgaagcagcgcagcagctcctcttccgagagggtgtagcccatttccttcagatggctctcaaacgcgtggcggccagagtgtttgcccagcaccagattattcgtccggatgccgacagattccggcgtgaggatctcatacgtctgcttattggccagcacgccatgctggtggatgccgctctcatgcaggaaggcattcttgccgacgatgggcttattcagcggcgcccgctggccgatgatatcatagaccgtcttgctggcacggtaaatttgcgtcgtgtccaaacgggtcgcagcgtcgaagatatcgcgccgggtacgcatggccatgacgacctcttccagcgccgtgttcccggcccgctcacccaggccgttgatggtgcattcaatctgcgtcgcgccgccctggacgcctgccagggagttggccgtggccatacccaggtcgttgtggcagtggacggacagctcgatgcctacagcctccggaacctcctcgagaatatacgcaatcagtgcctgcatctccgcaggtgtcgtgtagccgacggtatccggcaggttgacgaccgatgcgccagccgcgatggctgcccggacgatctttgcgaggaattcccggtcgctgcgggtcgcatcctcggcggagaattcaatattcggggtatacttacgggcataagccgtcatttcgctgactctggccaagacctcgtccggcgtcatccgcagcttgtactccatatgcagcgggctcgtggccaggaacagatggatgcgcgggtccgccgcgtccttgacggcgttccaggcggtgtcaatgtccttgactgtcgcccgggccagggaggcaatggagcaatccttgacctgccgggagatggcctgcaccgactcgaaatcgccgggggaggcaatggcaaagcccgcctcgatgacatccaccttcagccgctccaggcactgagcgacctgcagcttttcccgcaaattcatgctgcagcccggcgattgctcgccgtcgcgcagcgtcgtatcgaaaattttgatctgtctcataatactacctcaatctcttccgtacgccgtgcccgccgggcgcggcgtgtcatgcctgcaaaattgctcccttgtccgccgaggaaaccagctttgcataccggaccaggtagccggtcttgatcttcggctccgggcactgccaagcggcgcggcggcactccagctcctccgccgggacctgcagtgtaatggtgcagtggggaatatcaatggaaatacggtcgccctcgcggaccagcgcgatggggccgcccgcggcagcctccgggctgatatggccgatggatgcgccccgggtcgcgcctgagaagcggccgtcggtcagcagggcgacggattcgcccaggcccatgccgcagatggcagacgtcgggttgagcatctcccgcattccagggccgcccctcggcccctcgtagcggatgacgacgacgtcaccgggcttgattctcttctggtaaatggccgcgatggcgtcctcctccgagtcaaagacccgggcggggccctcgtggaccatcatctcctgcgccaccgccgactgctttacgacgcagccatccggggccaggttgcccttgagaacagcgatgccgccgctcttggaataggggttgtcgcaggggcggatgatctccgggtcgcggttgattgccgatgcgagattctcgcccatcgtcttgccggtacaggtctggacgctgagatccagcagcttgagcttcgtcagctccttcatgacggcgtagacgccgcctgcccggtccaggtcctccataaaggtctcgcccgccggggccagatggcagaggttcggcgtcttggccgaaatggcattggcctcatccaagctgatggtgatgccggcctcatgggcaatggccggcagatgcagcattgtgtttgtcgagcagcccagcgccatatcgaccgtctcggcgttgtggaacgcggcgggcgtcataatatcgctggggcggatatttttacgaatcagctccatgacctgcatcccggcgtgcttggcaagccgcagccgggcggacagcgcgccggggatcgtcccgttgccgggcagggccatgccgatggcctcggtcaggcagttcatagagttcgctgtgtacatgcccgagcaggagccacaggaggggcaggcattttcttcatagtcccgcaccccggcctcgtccagcgtcccggcgtggtacgcgccgacggcttcaaacatatggctcagacaggtccggcggccgtctgccaggtggcccgccaacatggggccgccggaacagaagatcgtcggaatattcaggcgcgccgcggccatcagcaggccgggcacgtttttatcacagttggggatcatgaccagcccgtcaaactggtgcgccatgaccatagcctccgtcgaatcggcgatcaggtcgcgggtcaccagggagtatttcatccccacatggcccatggcgatcccgtcgcagacggcgatggccggaaattcgatgggcgtccccccggcggcgcggacacccgccttgaccgcctccgcgatcttatccagattcatatggccggggacaatctcattataagagctgaccacgcccaccaggggacgctggatctcttcctccgtcagcccaagtgcaaacagcaggctgcggttcggcgcccgttcgacgccattcttgatctgattcgaacgcatgggaaaccctccatctcgggaccgcgcggcagcgcaggccccccgaaaaaagcatcatcataagaaacccccggtcttttcaagctgcgccggggaaaaagtgcaattttctccccgcccggcgatacacgccgggcggggaaggggtgcagcattagttggaagcgttgtccagattggagtcgttcttccacagcatctgctcacgcaagcgcttgccgacaacctccatcggatgcttggccagcatatcccgcttggagttgaagaagcagcggccattcttgttttcggcgatccatttgctggcgaaggtgccatcctggatatcctgcagcacagcgcgcatgttcgccttgacctcctcgtggggcaggacccgcgggccggagacgtattcgccgtattccgccgtatcggaaatggagtagcgcattctggaaagtccgccctcgttg

SEQ ID NO: 2683 - DNA, 6803 bp, Unknown
  16S sequences of unknown bacteria
gtcaaacgctacgtcgacaacaggccccaggacctgtgcgatttttcccttttccattggtacctccaattattcctgcgcagcagcgccgctgacgacttcgttcagctccgtcgtaatggccgcctgtcgaacgcggttgtagaggagcgtcaaactccggataatctcctccgcattcgtcgttgcattgtccatggcggtcatacgggcgttttgctcggaggcatatgcctcaatcatcgcaccgaaaatcaggccctttgcatagttgggcacgacctgcttcaagactgcctggggagagggcatgtaagtatgcatatactcgcccgccgcttcctcgtgattgaacatgtgcttcgtcaggggcaggatacggagcatctccgcatccatgctgattgcgttgcgcattttagtataaatgacgtatacctcatcaagctcgccgtttttgtacagttccagcacatgctccatcagatcgcgggctctccagatagtaggatccaccgccgcataagaaaattccccgtccacgacgccgaatcccttatgcttctcaaaatagtgcctgccgctgacaccgatggaaaagatggtattgtcgccgccttttgccatctccgtttcggccagcttaatgatattgtggttgtaagcgcccgccaggcccttgtcggacgtaatgacgatataaccgcgcttcttcccgtcgtccttggctgcctcggccacttcctcgcagaagtagatattctcctccagctccggggaatgggccaggatatccgagatggtgtcctgcagcttcagaaagtacggcaccgtcgcatccagtctggctctcgccttcttcagcttggcagaagacatgagatacattgccttggtaatcttcatggtcttctgtacgctttctttccgcgtacggatatctttcatgctttccatgaaatcacctactcttgtattctttcaccgccgccaggatcttctccttcaactcgtcggataccttcttctccgtgtcgatctccgtaacgatattgggataggtgctctcgatgtactccacaacgccgtttttaaacgcttccatatccttgccgtccacacccaccatcaggcggttggatgcagcgcacagcaaaatcacctgcttgtgcagaggcatcggattatagagaggctgcttgagcagatccaccagggaacggccgtattccagcacgttcttggtcgcctcatccaaatcggaggagaactgggagaatgcttccatctcgcggtactgtgacatatccacacgcagcgaaccggaaacggttttcattgccttggtctgggccttgccgcccacgcgggacacggacaggcccacgttgacagcgggccgaatgccggagtggaacagatccgtttccaggaaaatctgaccgtcggtgatggaaatcacgttggtcggaatataagcggaaacgtcgccggcctgcgtctcaatgatgggcagcgccgtcatagaaccgccgccaaacgcttcatcgcggcggcaggcgcgctccagcaaacgagagtgcagataaaacacgtctccggggtatgcttcacgtccgggcggacgatggagcagcagggaaatggcacggtaagcctgagcctgcttggacaaatcgtcataaacgatcaaaacgtccttaccctcatccatgaaatgttcgccgatggcagcgcccgtataaggggcgatgtactgcagcggcgcggagtcggacgcagtagcggaaacgataatcgaatagtccatggcgccgtatttggtcagggtgttcacaatctttgcgatagtggacgccttctggccgattgcgacatagatgcagatcacatcctggcctttctggttcaggatcgtatccaccgccagggctgtcttaccagtctgacggtcgccgatgatcaactcacgctgaccgcggccgatggggaacatggagtcaatggccaaaataccggtcatcaaagggacattgacttcctttctcgtaattacgccgggcgctttgtgttctacagggcggtaatcatcggtttcgatggggcccttgccgtcgatgggctggcccagggcattgaccacgcggccaaccatcttatcgcccacggcgacgccagcctcgcggccggtgcacttgacagtggaaccttccaccagaccgttctgcgttccgaaaaggacgcagcccaccgtcttctgctcaaggttcagcaccatgccttccgtgccattttcaaattcgagaagttcgccgtacttggcatgctgcaaaccgtaaatggttgcaataccgtcgccgacggacaaaatccggcccacctcttcggttttggcctcgttgtcgtaattctcgatctcacttttcaatacagaaatgattttctgcgaatcgacattgctcatgttttctcacctcactgcaaaatgacgctgcattttgaggatggcggtacgaatgctcttgtcgagcacgctgtcgcccacagcgaggataaacccgcccaccagggagggatcctcctgcagcgtcagttccacgccgtccttgccatactggcggcagatcagcttcttgagcttctccacctgcgcgtcatcgggttttgtcacatacgtaaaggttgcgcgggccacatttttggcgtccagcgccagctgatcgtatgtttggaacatatcctccgccaggacgatatctccgttgtcgctcatcaccttgacaaaattccacactgcctcgggaaacagcttttcaatcacgctgtgcttgttcggccggctgacgaaaggatttgcaagcgcctcgtaaaccatctcgttggtcaaaagggcgcgcatatcgtccaccttctccggagcaatgttcatatccatcaggacttttgcgtagttatccgcaacacctgtcatttcgcatcccccgcttccgccaagaacgcgtcgagcatggccttattggccttggcgtcgaccgtggtgccgagcagcttagatgcagccgccagagccacagaggccagttcggactgcgcatccttgaggattttctcgcggtcggcttcagcggcagcgttggcctgccggacgatctgggatgcgtcggcgttggccttgtcaatgatctggttatactgtacctgcgcgcggtccttcgcatcggacacgatctggaaagattcctgcttcgcatccttcagggaggattcatactgctgcttgagcgcctgcgcagccgcatttttctgatccgcgtcgctgagcgtgccctcaatggccgccttgcgcttttcgatcatgccgagtaccggcttgaacaaaaagatacgcagcaggataaacaggatcagcagattgacaacagtccagaagatatttggatctacatgtaacatcctgttgcctccaatcaaaagttaaatgatgtaattctccttttattgaggcaatcagcccatcatgatgatgatcatcaggccgatgaccaagccgtaaatagcggtagcttctgccagggcgcagcccagaatcagagcggaagtgatcttgccggaagcttcgggctggcgggcaatgccctccacggctttggacgtggccaaaccaataccaatacctgcgccagcgccggtcagagcggcgatacctgcaccaatagcgatcataataatgtacctcctaaaattttgttccttgaattgagtttttgtatgtgtgtgtttattctatcgcttcctgaatgtacaaagacgtcaggaatacaaagacataggcctgcaggaatgcgtcgaagatatcgaaatacatacttgcagccagcgggaacaccgccggaatcaccattttgatcaattccatgatgataaacgcgcccagaatattaccaaacagtcgcatgcacaaagacaaaggcttgatcacaagctccagcacattcagcggcgttacgattgctacaggctgggtaaaactcttgagccagccgccaacacctctgtggcgaatactggcatactgtaccagtataatactcataatggccagtcccagcgtcacattcaggttcttcgtaggcggcgccacaccaaacagtcccaccatgttggcaacaccgagataaatcagcactgtcagcaaatacgggatatagcgcttgccatgctcgcccagaatgccgtaaagcatgttgtagagcatgccgataaatccttcaatcacgacctgacgtttttttgtcggcacaagctccatgtgtctggtaaaccaaatggataaaagcaccagcaccacaatgatcccccacgaaacgtacacactgtgcgggatcgtaattccaccgatgttgatcgcattcgtaaagtaatcaagatggtgtccgattttttctgagatattccccacgttatctcacctccctctttccagattgcttggcgtctccatccctccgcggagcggactgaaacggcctcctacagcacatcatgaacgcccttccaaatcgcacagatccggtatgtgtcatatgcacgcaaaggctgcgattccgtgtgtgttgtgcaacgattttccgcagtattttgcgtttttgggatatttttgcgaaacatccgcatgctgtatatacgttccattttagcgaactacagtcaaaagtcaagatattcctctccccccaaatccatattttggtgaaatctttacaaatttcgctaaaacattgttaatgtattaacaatgtttttcttctgctttcttccgcacccagcgggttaattttctccgcgcagggccatactatgtttattctattttttcttccggaggtgttcccatacaaatgcggcagaccatccatttatccgccccgccttctgtgctgtcctgggccaatatcggcggaaaatacgaaaaagacggcccgctggccccttatttcgatcagttggatccggattcctttttcggtgaaacgacttacgaaaaagcggaatctgccatgcagcgctatgttctaagcaaggcgctggaaaaggcgcatctgaacagcgaacaactcgattgtattttcggcggcgacctgctcaatcagtgcatcgcagccggctttgccatgcgggattttcccgttcctttctacggcctgtacggtgcttgctccaccatgggcgaaagcctttccctggcggcgctgcttttgagtgcgggctatctgacccgcgccgccgcagtgacctcctcccatttctgcagcgcagaacggcagtaccgcatgcccatgccttatggcagccagcgctgtcccaccgcgcagtggaccgccaccgccgccggctgcaccatcctctccgccacgggaaacgggccttatatcacccatgtgacacggggccgcgtgatcgacaaagggatcaccgatgccaataatatgggcgccgccatggcaccggctgcgctggacactctgcaggcctttttccgcgacacaggctgcgcccccggcgatttcgaccgcatcatcactggcgatctgggaaaactgggcagcgccattcttgtggatctggcccaacgggaaggattggatctgtctgccaaccacagcgactgcggcttactactttatgacctggagcggcaggatatgcactgcggcggctccggctgcggctgcagcgcctcggtattcaacggatatctgctgcgtcagctgcaggcagggcaatggcgccgcatcctctttgcccccaccggtgcgctgctctcccccacctccagtttccaaggtgaaagcattcccggcatatgccatgccgtagtggtttctgcagaaaaggagtgaatgttttggaatatataaacgcatttctctgcggcggcgtcctctgtgccattggccagatcctaatcgacaaaacgcagctgacccccgcgcgcatcctggtgggctatgtggtaaccggcgtgattctgggcgcgctgggatggtatgaccccatcgtacaatggggcggcgccggcgccactgtccccctgaccggatttggctacagcttggcccgcggcgtccgtgaggccgtgcttgcccgcggctggatcggcgtgctcaccggcggcctgagcgccacagccgccggcattgccgccgcagtgctcttctcattcctggctgcgctgctcttcaaaccgggcgacaaacgttgagtcagcaaaggaggggcattcccctccttttttcattttttgcttgactcacgctgaagtttgtttataataaccttagatagatacccctcctgggtggggtatctaaattctattgatttgattttcagaaaaatcgggtgaactgttatgaagcaaaaatttgacgtaaccggaatgacctgcagcgcctgcgtagcccatgtggaaaaggccgtgaaaaaactgcccggcgtgcaggacgtagccgtaagcttgatgaccaatagcatgcaggtggagtacgacgattccgccctgaacagcggcgccatttccgccgcggtttccgccgccggatacggtgcacagccgacgctgcagcgttcagctgccgccgcggtgcgcgaaacgccgcaggtcaggaatcaggctgaactgaaccagatgaagcaccgcctcctctggtccatcgcgttcctcctccccctgttctacatctccatggggcacatgctgggcctgcccctgccgtctttcctggcggggcatgacaatctgc

SEQ ID NO: 2684 - DNA, 22639 bp, Unknown
  16S sequences of unknown bacteria
aggaattatgggttcttgaactcacttcctgttgctcttagtttgacaattcaccaggagacggaaaccggccggcaacagttgattttttgcggcgattggtgtatactcttagagcgaaatgtaaagaccgcatgctttggggcatacggatgggcgggtcctgtgcgacggtgcgccgtgaaccatgtcaggcggggaaccgagcagcattaagcggtagcttccgggcgccgcaggtaacctgtccgtccgtatgacccgagagcatgcggttttatttgatcgaagggaggcggctttatgtatcaggtgctgtaccgcaaatggcggccccaggcgttcgccgacgtgtatgggcagaaccacatcacggcggccctcaaaaacgaactgcagaccggccgtctggcccacgcgtatctgttcaccgggtcccgcgggacgggcaagaccacctgcgccaagattatggccaaggcggtcaactgcctccatcccgtggatggcgacccctgcaacgagtgcgacatctgcaagggcatcgacagcggcgccatcatggatgtggtggaaatcgacgccgcgtccaacaacggggtggacaacatccgggatctgcgcgaggaggtcaacttcacccctgcggtggccaaataccgggtgtatatcatcgacgaggtacacatgctgtccactggggccttcaacgccctgctcaagacgctggaggagcctccgccccatgtcgtgtttatcctggccaccaccgaggtgcataagctgccggccaccattctgtcccgctgccagcggttcgatttccatcgcattcagccggccgacatcgcggcacgcatccagtatgtggcgggtcaggagcagttcaccgtcaccgatgaggcggccaccctgctggcccgcctggccgacggggcgctgcgggatgcgctgtccctgctggatcaatgcgtttcccgttcccgggaaattactgccgacgtggtggccgagaccaccgggctggcgggccgggagtatttgttcgagctgtcggcggccgtgcgggccggagacagcggcgcggccctggcccttatcgaccggctgtacaacgcgtccaaggacatggagcggctgtgcgccgagtggacggagtatttccgcaacctgatgattctcaaaagcgtcaaagacgccgctgacctcattgtcgccccgcccgccgagctgcatcggatggcggcggaggcggagcagttcgaactgcccgccatcctgcactgcatgaacgtgctgcagcaggcgctggagcggctgcggggcggggtgtcccgccgggtggagatggagatggcggtgctccgcctatgctcccccgatttggacgccagcgcggacagcctgctgcgtcgggtcaagatgctggaggatacgatcaaatcgggtatgacgctggcgccgcaggcgccggcggctccgtctcgtccggcggcccgggcggaaggcggcgagcccgaggccccgccgctccccagtaacgaagggccggcggccggcgatagcctgggtactgatcaggaggtgcccttcgagagatggaacgacgtactggacacgctgtccggcacctgcccgccgctgtacggcgtgctggtggattccaccgctctgctgcggggggattacgtgctaatctgcaccgataacgatatgttcaaggcgctggtcacccgggacgggaacaagaacgtcctgctgggggccatccggtcggtgaccggccggaaccaccgcatcggcgtcaagcggagcagcggcgcgccggcggcgggatcctccgccgggcaggcgccgccgccggaggatccgctggcggcttttctgcaaaacagccgggcccagggcctggacgtggaatttaaggattaaagaaaaggcaggttatgacaatgaaagcgagacttcccaagggcgtgggcggcggccccggcaacatgcaaagcatgattaagcaggcccagcagatgcaggaggaaatgggcaagctgcaggaagagctggacgtaagggagtacaccgtcaccgccggaggcggcgcggtgaccgccgtggtggacggcaagcacatcgtcaagaagctggagatcaaaccggaggtcgtggatcccgaggatgtggacatgctcgcggatttggtgatggccgcggtcaacgaggccatccgccaggcggtggatacctccgaggcggaaatgtcgaaaatcaccggcggtatcaacatgccgggattgttttaaaccgggcggccagaaggaaggggggagccgatgtcctacagcgtggcgccgctggagcggctgatcgaacagcttgagcgtctgccgggcatcgggcacaagtcggcccagcggctggcttttttcctgctgaaccagccggagaagaacgcggcggattttgtctccgccatcaccgaggcgcgggaaaagatccacgaatgcgcggtctgccggaacctgacggatcaggatttatgccccatctgccgggcgggcaaccgagatgcctctgtcatctgcgtggtggaggatccccgggatgtcatggcctttgagcgcacgcgggaatacgcgggcctgtatcacgtgctgcacggcaccatctcccctatggacggcgtgggcccggatcaaatccgggtcaaggaactactggtccgggtggcagacgaagaggtgcaggaggtgatcatggccaccaatcccacggtggagggagaagcgacggccatgtatatctccaagctgctcaagcccttccaggtcaaggtgacccggctggcctacggcattccggtgggcggcgatctggagtacgccgacgaggtcaccctgcgccggtcgctggagggacgcaacgagctgtaggctgcggggggatttccgccgtgtggaaacggcctttgagcaggcaagagctcgcgcgagatgggaaacccatccgtcaagcgatgtaaggaggtgaacggccttgccaaacgtcagcaccaaaacgataaccacgaacaaaaaagcctttcacgactatttcgtggaggaatccatggaggcgggcattgagctggccggaacggaggtcaaggctctgcgggccggcaccgtcaacctcaaggacgcctggtgctccattgtggagggcgagatttttgttaacggcatgcatatcagcccctacgaaaagggaaatatctttaaccgggatcccatgcgggtccgccggttgctgctgcacaagaaggaaatcctccgtctgtacggcgtgatgaagcagcagggctataccctcatccccttgtccctgtattttaaaggctctcgggtaaaggtgcagataggcctttgccggggcaaaaagctgtacgacaagagggaggacgccgcccggcgggatatgaaacgggaggccgatcgcgccctcaaagaacgaaacgcctgagtggaaatagtgaagcagtaaaaaggcgccggacgaacagtccggcgcctttgttatgcctttttcttggcgcgcagcacgaggatgaccagcgcagcggtggcgcctgctgccaggcagatcaccgcaataagaacggttttggaggcggacggctcctccccggggacggaggaatccggcggagcggcggtaatcgtcgtgccggttgtcggcgcggtcaccgcttccgtggcggagggcggttccgacgcggcggtcgaagtggggacggtgaaggtggtggaggcttgtgtggtcggggccgtcgtggcgggtggtgtgcccatcgacgttgtgggaacagaggcggcgcctttttgcttttccgaaagaggcaggccgtcccaggggatcaccggcgccagattctcgaaaaagtcgtttttcttgacatcggggcccaccgacgaataatataggccgaaccagcggttgtcattcttgcccgcctcgtccacgtggtaccggcctcgtttggcttgggagatatgacaggcgaacccggcgcgcgccatgtccagcccggttttgccgccgaaacgggataggggcacgttccagttcatcagcaaatcgtccttgtcgtatttatgcaggtacagctttttgatttgccaggtgccgtacttcccggcgctgtccggatactgctggggatcgccgctcagggtgatggctttgacaagggtgttgctgttcatccggtgagccccgtggccgtattcgccgttgagatcctgggtcagcaccacatcgggcttgacccggcggatcagggccacctgccaggccatgatatcgtttttattatacagttgatacgcctgcttgagggtggagcagtatttgtccccgaaatctgacaggatgggatagttggtaatccccaccgtccacaagccgtcgagcagctcgtgcgtgcggccgtagccgtgacggatgagataagacacctgcacctttttcccaaactggccggcatacaccggcatggcgccgccgaaccagagaagctcgtcgtccgcgtgggtggaggcgagaagcatatccgctttttccagcggcgggttccactgctgcacccaggaaggggtctcccccgccccgaggacatacagctcgccgagcacggcctggccgctgaaggtcaggcgataggtgccgctgcccgcgtccagctttttgaactcgtggaggaacgaatctgccccgccctccgccaacaactcagtgccgccgtccgtcacccgggacagcacccaggggacgggcttgctgttccacagaagataaacgccgccgatcggctgtttactatgtaactggatataggcctcttttccgcccttccaggaggtgccggcggatccatccgtcagaaaccgcacgatggatccattctgggaggccgagaaggaacaggagttggaaatatcgccaggctgcagctccgaggcgtccgccgctgggagcgagccgatggaggtgatacaaataacggctgtggccgccgccgcccatattttcagtttcattgacgctcaccgtcctctgtgtggtgttgggaaatttattcagatcggctaatgcccatcgcaatcgatcgattcacgggagcgaacccctttactaccactatattttatcaaatcggttaggcaaagtaaaccacgtttaacaatcttaataggatcgtaaggagttttgccgatgaattttccgtttcttctatattttttaggcgaggcggcgctaggcaaaaaaacgtggtatgtttgaggtgcctaccacatatatttcctcatacggacaagccggcagccggctcgcgccgattcgcgaaaaagcgtcagaaagcgcgtaaaaggccaaaaaaaagcgttttttatctagctttttgcggagaactctgttatactgaggggtagtcgatgctgcacaaaagattgatattttcttcacaatatttgtcgaggtgcagatctgaatagaacctatgattggcaaggaggaaacggcaacatgcaaaaaaagatcagcaaactcccgtttaaagggacggctgagcaggcggcccaactgaaggaagttatcgacgccaacaagcaggatcccagtcgcctgatgttcgtcatgcaggaagcccaggggatttatgggtatctccccatggaggtgcagcagatgatcgcggacgggatgaatgtcccgctcgaaaaggtgtacggggtggcgaccttctacgcccagttcgccctgtcccccaagggtgtctacaatgtatccgtctgcctgggcacggcctgctatgtcaagggcgcgggcgatttgttcaataagcttagcgaaaagctgggtatcggcgcggacgaatgcaccgaggacggccagttctccctgaccgcctgccgctgcatcggcgcctgcggcctggcccccgtcctgacggtgaacgaggatgtgtacggccgtctgaccgtggacgacattgacggtatactggccaagtataccgcttgagttatgcgggaattgtcgttaaacgtcttggacatcgcgcagaactccatcgccgccggcgcgtccgtcatcaccatgacggtggaagaggacgccggggcggaccggctgacgctgtcggtggaggataacggctgcggcatgacgtccgagcagctggagcgggtgcgggatccgttttacaccacccgcaccacccgcccggtgggcatggggatccccctgttccgcatggcggcggaggccaccggcggctcgctttccatcacgtctaagccgggggccggcaccaccgtgacggcggtgttcgggctgtcccatatcgaccggctgccgctgggcgacatggacgggacggtgtccaccctggtgcggatgaatccgggactggatttttgttatattcaccgggtggacggacgggagttcgtgttcgacacccgggaaatccgcgatatcctgggggacgtgcccctggacgatccggacgtggccttgtggctgaacgagtacctccgggagcaggacggggccgtcggcggcaccgcttgacaatctgaaccgtttgacatccagcgcgagggaagcttttcgcgccgaatttacgtctgccgggccgcccgcccggcaagaaatggaggatcatatgaaaaccctggcagaattgcaggccatccgggataaagcccgcgaaaaaatggcggtgcgggacaaccagcaggacgccacgcgtgtcatcgtgggcatggccacctgcggcatcgctgccggcgcccgcccggttttgaacgcgtttgtggacgaggtggccaaacggcacctccagaacataacggtcacccagaccggctgcatcggcatgtgccagctcgagcccatcgtggaggttctggcgcccggcaaagaaaaggtcacctactgcaaggtcaccccggaaaaggtggcgcgcatcgtcgcggatcacctggtcaacgggaaccccgtcgccgagtacaccgtcggcgcgcagatgaaataaagaggaggaagaaaagccatgtatcgttcccatgtactggtttgcggcggcacaggatgcacctcctccggcagtcagcagatcatcgagacgctcgaaaaggagattgccgtccagggcctgaccgatgaagtcaaggtcgtgcgtaccggctgcttcggcctgtgcgctcttggcccgattatgatcgtgtatcccgagggttgcttctattcccgcgtcaacgtggaggatattccggaaatcgtcagcgagcatctgctcaagggccgtatcgtcacccgcctgctctacgatgagacagtggagaaggacgaggtcaagtctctgaacgagaccgatttctataagaaacaagtgcgggtggcgctgcgcaactgcggcgttatcaaccccgaatccattgacgaatacattgccttcgacggctaccaggcgctggccaagtgcctgaccgagtacaccccggatcaggtcattcaggtgattaccgattccggcctgcggggccgcggcggcggcgggttccccaccggccgcaagtgggcgctctgcgcccccaacaaggcgccccagaagtacgtggtttgcaacgccgacgagggcgatcccggcgcgttcatggaccgttcggtgctggagggcgatccccactgcatcgtcgaggccatggccatcgccggctatgccatcggggcgacgaagggcttcgtttatgtccgcgcggagtaccccattgcagtgcgccgcctgcagattgccatcgatcaggcccgggaggccggcctgctgggcaaggatattttcggttccggttttgattttgacatggaaatccggctgggtgccggcgccttcgtctgcggcgaggaaaccgcgctgatgacctccatcgagggcaaccgcggagagcctcgtccccgtcccccctatccggccgtcaagggcctgttcggctgcccgacggtggagaacaacgtggaaaccttcgccaacgtgccgcagatcatcctgcggggcgcggactggttcgcttccatgggcacggagaaatccaagggcaccaaggtgttcgccctgggcggtaaaatcaagcataccggcctggtggaaatccccatgggcaccactctcagggaaatcgtggaggaaatcggcggcggcgtgccgaacggcaagaagttcaaggcggctcagaccggcggcccctccggcggctgcatcccggcgtccctcatcgataccgagatcgactacgacaacctcattgccatgggctgtatgatgggctccggcggtcttatcgtcatggacgaggacaactgcatggtggacatcgcgaagttcttcctggagtttacggtggacgagtcctgcggcaagtgcaccccctgccgcgtgggcaccaagcgcctgctggaaatgctggataagatcaccaagggcaacggcaccctggaggatctggacgagatggaggcgctctgtcactacatcaagcagaactccctgtgcggcctgggccagacggcgcccaacccggtgctgtccaccctgaagttcttccgcgacgagtatgtggcgcacgtggtggacaaaaagtgcccggcgggggtctgcaaatccctgctgcattatgaaattgtggcggacaagtgcaagggctgcaccgcctgcgcccgcgtctgcccggtcggcgccatctccggcaccgtgaaaaacccgcacgtcatcgacgtgaacgcgtgcatcaagtgcggtgcctgtatcgagaagtgccggttcggcgcggtcgtgaaggtttgaggaaggagtgtttgctgcaatggatatggtgaatgtaaaagtgaacgggattgccgtcagcgtaccgaaaggctccaccattctggaagccgcccggtatgccggcgtggaaatccccaccctctgctttttgaaggatatcaatgaaatcggcgcctgccgcatctgcgtggtggaggccaccggcgcccgcggactggtgaccgcctgcgtctaccccgtttcggaggggatggaaatccagaccaacaccgaaaaggtacagaaggcgcggaaaaccaccctggagctgattctttccacccatgagaagaagtgcctatcttgcgtgcgttccggcgattgcgagctgcagaaaatgtgccgcgactacggcgtggaggacgcagacaagtacgcgggcttccggccccagtacgagctggacacctccgccgcccacctgctgcgggacaacaacaagtgcattctctgccgccgctgcgtcgcggcctgcaagcagcagttcgtttcggtcatcggggccaacgatcgcggcatcgacacccacatcgcctgtgcgtttgagaagcctctcaacgacgtgccctgcgtgtcctgcggccagtgcatcgtggtttgccccaccggcgcgctgaccgaaaaggacgacaccgacaaggtgtgggcggccttggccgatcccaccaagcacgtggtggtgcagaccgccccgtccatccgggccaccttgggcgaggctttcggtatgcccatcggcaccaacgtggaaggcaaaatggtggcggctctccgccgcctgggctttgacaaggtgttcgacaccaacttcggcgccgacatgaccattgtcgaagaggccaacgagctggtcgagcgggtgaaaaacggcggtacgctgcccatgatcacctcctgttcccccggctgggtcaagttcgccgagtattattatccggatctgctcccgcatctgtcctcctgcaaatccccgcagcagatgttcggcggcatcctgaaaacctattacgccgagaaaaacggcatcgatcccaaagacatcgtgtccgtttccatcatgccctgcaccgccaagaagttcgaaatcggccgggacgatcaggacgcggccggtctcgcggacgtggacatcgccctgaccacccgggaactggcccggatgatcgatcgggcgggcatcaagttcccctatctgcccgatgaggaattcgacagccccatgggcgaggataccggcgcggcggtcattttcggcgccaccggcggcgtcatggaggcggcgctccgcaccgccaacgactggctcaccggcaaggataacggggccgtggagttcaaggaggtgcgcggcaccgccggcctgaaggaggccacctacaacatcggtggcctggaggtcaaggtggcggtggtcagcggcatcgcgggcgccaattatgtcatgagctgtatccaggacggcaccgccccctggacctttgtggaggtcatgtgctgccccggcggctgcgtcaacggcggcggccagcccattcagcccgcctcggtgcgcaatgtgttcgacctcaaggccatgcgcgccaaagcgctgtatgaccaggacgccggcatgacgctgcgcaaatcccatgacaaccccatggtcaaggcgatttacgaggaattcttcggtagctacggcagccacaaggcccacgaagtgctgcacaccagttacgtcgggcggaaaaagttcaaataagcgtaaaaacgccccgctgcttcacggcagcggggcgttttttaaggttcctccggatataaatagtcaccgacctctgcggttgccaaacgccgaacgcaaggcgcgcagaccgcgaatttaccgatatgaatgagagcatccgcgcgatgacacagcaaacagtggtcgacggatggactcagccggatttccccctgcttgacgacgatatccaaccgatctcccgcctgaatatttaaaaaatggcgaatatccgccggcaggatgacccggcccatctcatctacaaccatgcgcaattcacttcttcctagttctcagtaacctcattatagtattataagactatattgtaaagactttattaaactattttcccgtctttcagggcagtataatacttttatgaaaggcggtatacacatgacggtacaggagcgcattcgtaaactcatggaggttaaagggtggtcagaataccgactagccaaagaggcgcatctgccccagtcaacgatttctcatatgttcaagagaaataatgcgccgaccattccaaccaccgaggcgatatgccatgtttttggcctgactctttctcagttttttgccgacgagggtgaagcggtggttctaaccgaggaacaaaaagaatggatgcttctctggggatccctcagcgaggagcagcggagcatcataaaagcaaccatgaaaaatttcagtgaggaatagaccggcgctgtttgcgatgggctgtcgcggacgggccggtttttatatgggtatagatatagtggataaaagagggaaaccggctatatatagaactctgcaccgtaaagttgaaaagccgcaggaaatcgtgaaaaaagcttgacccttcgcggcttttgtgatacaatagcacttacctcaaaaggggtttatttttttgtgcccatttttaggcgcagtctccccttgtcgagggaggttcacaaatttccgaaaatcgggaggtgccgttatgagagtcaaaattaccctggcctgcacggagtgcaaacagcgcaactacaacaccatgaagaacaagaagaacgatccggaccggctggaaatgagcaagtactgccgcttctgccgcaaacacaccacgcatcgggaaaccaaataagaaatgcggctgacaaagctcgtttcaaacgggagggtttgcaatggctgacgaaaaagacctgtccaaggacacggaggaagttacacaagagtcggaaaccgtgaccccggaaaagggcgccaagaccgccaagtcggacaaggacgccaaggccgataccgccaagaaaaagggccccggcctgggcaagcggatcgccaagtacttccgggatgtgaaaggcgagttcaaaaaaatcatctggccgacgctgcccacggtggtgcgcaacacgggcgtgaccctggcgatgtgcgccgttttgggcctggtcatctgcgtcatcgactttggactgggcgctctggtcaatctcttggtgaacgccggctaatccctatgcggctgttggataaaatgcgtatggaggattggcgatgagcgatctggcgagatggtatgtggtgcatacctattccggctatgagaataaggtagccaccaacctggaaaaaatcgtggagaaccggaagctgcacgactggattcatgaaatccgcgtccccaccgaaaccgttgtcgaaatcaaagacaacaaaaagcgcgaagtcgagcggaaaattttccccggctacgtgctggtcaagatggtgatgacggacgattcctggtatgtcgtgcgcaacacccggggctgcaccggctttgtcgggcctaacggcaagcccatccccctcacggaggaggaagtggcggcgctgggcgtcgagaagcgggagatcgagatcacctatgccgtgggcgataccgtgcgtatcatcgacggcccgctggagaatttctccggcattgtggacgaaatcgatctcgagaaaaacaaagtccgcgtgaccatttccatgttcgggcgggaaacccccgtggaattggaattggatcaagcggaacccatggactgatgacggctgggaaccccctggctgtcggttaggcgtttttcctgtgcgccggacggttttgtccggctgtgggaggggcggcccggcgtgcctgcggcgcaccgcggctattgctccgccgtttaccacaaattttggaggtgcaagaaaaaatggctcagaaagtaaccggttatatcaaattgcagattccggccggaaaggcaaccccggcgccccctgttgggccggccctcggccagcacggcgtcaacattatggcgttcaccaaggaattcaacgaacgcacgaaaaacgacgtaggtcttgtgatccccgtcgtcatcacggtgtatgccgaccgttcgtttacctttattaccaagaccccccctgcggcggttctgatcaagaaagcctgcggtctcgataaggcctccggcgtgccgaacaagaacaaggtggccaagatcaccaaggaacaggtgcgcaagatcgccgagaccaaaatgcccgacctgaatgccgccaacgtggaaagtgccatgagcatgatcgccggcaccgcccgcagcatgggcattgaggttgtggactaactgcgtttccgctgaacggatggaaactccatatccgttccgggtgggaggaacaacttaggcattccgatttgaccactcataccggccgccgctttttgagagggcggtattttccggtatcaacagggaggaaaaaccaatgaaacacggtaagaagtatgtcgacagcgccaagctgatcgaccgcaataacctctacgatgttgccgaggcccttgacctgaccgtcaagaccggcaaagccaaattcgatgaaaccgtcgaagtacacgtcaagctgggcgtggacagccgtcacgccgaccagcaagtccgtggcgcggtcgtgctgccgcacggtaccggcaaatcggtgcgggtgctggtgttcgccaaggcggacaaagcgcaggccgccaccgatgccggcgctgagtttgtcggcgccgaagagctggtcgccaagatccagggcggctggatggatttcgacgtggtcatcgccagcccggatatgatgggcgtggtgggccgcctcggtaaggtgcttggcccccgcggtctgatgcccaaccccaaggccggtaccgttacccccgatgtggccaaggccgttaccgacgccaaggccggtaagatcgagtaccgtctggataaaaccaacattatccactgtcccatcggcaaggtgtccttcggcgtggagaagctgcaggagaacttcgagaccctgctgagcgccatcgtccgcgccaagccggcggcggccaagggccagtatatccgctcctgcgtggtggcctccaccatgggccctggcgtgaaaatcaacccggtgaaggttggctaatccctctttttgccgaaaatgcaaaaaagcacttgcaaagcgggacgctttgtgctagtataattcatgctgttcttccacagacagcaggtgcgggcgaccgcctaacggatggaatcatccgcctgccgaggcagagagctttaaccatcagacggctgcggccgtgttgaacgtgttatcgcgcccttcccgtggatgaagcgggaagggctttttatttgccttcaaagaacggcggcaagccccgcaagggcatcggaaaatggaggtgaatggaatttggcaagcgagaagattctgcaacagaaacaggcatacgtcgaacagctggcggagaagctgaacagctcggtggccggtgtggtggtaagctacaaaggcatttccgtggcggacgacaccatgctgcgccgcaagatgcgggaagccggcgtggaatattccgtcgtgaagaacaccatgctgcgccgcgccgcggaaaaggtcggcctcaacgagctggacagcgtgctggaaggctccaccgccctggcggtcagcgccggcgatcatgtggccgctgcgaaaatcttgtgcgagtatgctgaaaagaacaagagcttcgaaatcaaggccggttttgttgagggcaaagtcatcaacaaggcggaggttgaggagctggcgaaaatgcctcccaaagaggtgttggttgccaaggtgctgggcggcttgaacgcgcccattaccggttttgtcggcgttcttcatgccaacctgcgcggtctggtgtgcgccctgaacgctatcgccgagaagcagagcgcctaaacaaggggtctgcgacccaatcatcaagaaaaaataaagtaaatggaggatttacacatgtctgataaagttttgaaattgatcgaagacgtcaaagccctgaccgttctggagctgtccgaactggtgaaagccctggaagaggaattcggcgtgtccgccgccgcccccgtggccgtggccgctgccgctgccgctcccgctgctgccgctgcggaagagaagaccgagttcgacgtgatcctggcggaagccggcgctgagaagatcaaggtcatcaaggttgtccgcgagatcaccggcctgggcctgaaggaagccaaggatctggttgacggcgctccgaagcccatcaaggaaggcgtgtccaaggacgatgccgattccatcaaagcgaagctggaagaagtcggcgcgaaagtcgaagtcaaataaggtttgcgcaaatagaaaagggtggtatcgggaaatcgataccaccctttttgtatatgccggccgcgccggtgtcatacgacggcgttttccaggatagaaaacgtccggctttcgcagtcgatttgtgccagggccccgtaagggatgacgcacttcggctcgcagtgcccaaagctgagattggtcagtaccggcaagtcttcccggccatattctttcagtacggttcggatttccacggcgtattcctctctgtaggcctcctcatagggcttgccccagaccatgccgtgaattcgatcaaggaggcccatcgcccccaaggagcgaagcatataacgcacggccttcggcaccggcttttcctcgctggtctccaagaacaggatggcgccgttgaaatcctccggatctggaaacagcggtgttccccgcagccagtcgaaaacctccagacagccgcccagcagccgtcctgtgaccgttccgcttccttgtagcagccggtagccgccgttgggctgaaaccgccgggctgttttctggttctcgatatcccagcgaaggaattccgcagtccactctccagccggttccacctggccgaggggttccggggaaaacaaggcctttttcacccacttttccgtataagcgggcagtcggaggttttcagcgaaatccgagagaaccgccgggccgtagaagctggaaagaccggccttccagcacatcaaatggttgacggtggtgtcggaataccccataaaaattttgggatggcggcggatgacagcgaagtcgatatacggcagcagccggatggtctcctccccgccgatgcagcagaaaatcgcctggatacacggatcggtgaaggcctgcatcagatcggctgcccgctcctgcgggtgctcgtaggcataggcggttccggcgagggtgtgcggcatttccactacacggaggccgaaccgtgtttccagccgggccttcccctgctggtaacgccacaggatattttcgtcccccgccccgccccaagacaggctgaccgtggcgacaatgtcccccggtcgaagccgcggaggtttgataagagatggcaaggcgcctcaccgccctttctttatggacgcgcagtcttttgataaatcagcagggtaatcccggccgtcagggtgacaacgcccaccaacaggaacaccagcggccagatccgttcaaaggccgaacggctctccgcttctgcgacagacggatccgcggccgcgctgggggaggtgccgactgtgggatctgtggcccgtgtgcctgtcggcggtgtttcctgcgtcgtggtggtcggcttttttgtctgccgtgtggggggctttgcggcgcttgatgtggtggccggctttgtcgctttcgtggtgggcttttccgtctttttggcagtcgtcctcttggtggtggcgccggagggcggcgctgtgacagagaaaacgccctctaccggcagggatatggaggcggttttgctgaacgtgaaaacaccataataataatcgatgcgcaaggtatccgtgggggattcaaaaccaacccgcagtgcgagggtgacggtatccccctcccggctggcctcgatttcgctgtcttccggagcctcccggccgttttcccccgccgcgctatagaaatggaagcgattgaaggacggttcggtagcatccttatggagctcgtaggtaaacgtgatagcgacctcttggcggatggtgatcggcttcgttttggcctccccgtcggaattcacgccgtcatccagctcccaaatctgctcttcatcggagtacacggcggcgcccaccggcgttaaggacagcaggaggtcgccggtatccatctcgtatacgtggatggtttcgcccgcctcgtaaattttgttccgtggataatcggtttgcacagagggttcacagccggccagaagcaggcagcaaagggccgccattataaagagaataccggttcgtttcataatcttcccccttgccgtgtgggctctcgcacgtcctgaccaccacagtataggcgcgggcggggtcgattacaaggattcctacaaaactgttaccgggaaagacaacattgtaaaacatacgtggtggaatttcacagtaggaaccggtctagtccaggatatccaacagcagttcgggcgtcaggagggctggctggccggtctcctcccggatgaccgattccgccagttcccgcttgttttcctgcagcagcaggattttttcctccagggtatccttggcgatcaggcggtacacctgcaccggattgacttggccgatgcgataggcgcgatcggtggcctggttctgggcggctacgttccaccaggggtcgtaatggataacgatgtccgcgcctgtcaggttcagccccgtccctcccgctttcagggagataaggaagacctgggtgccgtcccggttgaagctgtccaccatggcggcgcgcttttccttggaggtggagccctgcagcaggaaatacgacagcccctccctgtccagagcgtcggccaggatggccagcatggaggtgaactgagagaacagcagcaccttgtggccggtttccgccgcctcccgcagcagttccatgcaggtgtccagcttgcagcttccgccagtatagtcgtcgtagcagagggcgggatggcagcataactgccgcaggcgggtcagcatggccaggatggtcatccggctggcctgaaagccgccctcctccatctgccgggccaaatcccgcttgatctgcgcggcgttggccagatagagctgccgctgctcgggctccatggtggtggccagaacgctttccgtcttgggtggcagctccttgagaacgtcccgcttgagccgccgcaggatgaaggggccggtcattttggacagcctatccagcgcctggcgggagccgtttttcacaatggggctttccagccgctcgcgaaaccggctgtagggatagagaaagccgggcatgagaaaatcgaatatgctccacagctcgctcaggcggttttcgatgggggtgccggtcagggcgaaccgctgccggctgcgtatcgccttaaccgccttggcgttctgggtgttgtggtttttgatgacctgcgcctcgtcgagaatgtgataacggaattctttggcgccgtaccgttcaatatcccgcttgagcaaatcgtaggaggtgacgaccacgtcgtatccggccgtccggcgcagggaggccgcccgctgttccgcatccccgagaatgggcagaacggtcagctgaggggcgaagcggcggatttcgctttcccagttgagcaccagggaagcggggcataccaccaaagagggcagatcgttgccctcctcccgggcgttcagcagcagggcgatgacctgcagggtcttgcccagtcccatgtcgtcggccaatatcccgccgaatcccgcggtttccatggttttcagccagcggtagccggttttctgatagttccgcagaacgggggacagcgcggccggcacggggtaatcgctgtccgccaccgctttcatgtttttgataaggctcttaaagccggagtcccgctggtaatggatggtctcctgctcccggagcaccttgtccagatacatggcccggtatttgggcacccggatccgcccggtgcgcagctccgcgtcggtcagggcgagcccatcggccatttccgccagccccgccagcgcgttgtcgtccagctggatgaaggagccggtgcgcagccggtggtatttcttgttctgccggtagctgtccagcacccggctgagctcgtcgatatccaggccgctcacgtcaaaatccagcagcagatcgctgtccaggctcacgccgaccgagaccttgggaggcggcacgaggccgatttttttaaatccatcggtggcgtacaccaccgcaatccgctcgatatcctccacgcccccggccacaaagcggtaaatctgctcctcgtccccgtgaaagagcagacgcccgtcctccggccggaaggaggtgaaatatttttgcaggatcagccgagccttcagctcgcccagccgatcccgaaaaggggccgtcggcccttccgcatacggattgaacacatcgtcgccgtaccggcattccagccgggcggtgatggtttccgcgtccggcgcgtccagataaacggcgcattccagcgcacggggctggtagggctccagaccgtcggtgtcaccctccagacggatataggggcggatgaccggcagcaccgatgcgcagaaggcgggcaaatcgtccccagcgataaacaggccgttctgcgcggtctggatggtggaaatccactcggtcatgtggctggcgtaatcctccgcgcagcggtagagccgggtgccgtgcaggacgtagaagtgggccgcgccctggatgctgcccgcgtcctcggtgcgcagcagcagcccgccgccctcctccggcgcgtgcacctggatggtcagcggcgggttttcatccatcagccggatggagcgcacccggccgttttcccggaaatccacacaggatccagcgtacagctcgaaaaagcggtcaaacccgcccggcgacaaaggcagctccttgcccaggcgggtgttcccatagaccttgaggatctcctgctgggcctgcaaatcttcgaactcccgcagcagaaaccgcagcagggggcgggattcctccgtgaagctggagggatggtgcacgaaccggagcagcttgccgtattccgccgtggcgccggaggccatatccgagcagaagcgggcgatgtccttgaggacgtagggccgccgggttcccagggaaaagctcagccgcggccgccggtacagcagctcgagcaccggggtcagcgctaccttgtccgcgtcatcggaggtctgcgccaccagctcagcggcctcccgggccagataggtctccaccatccggcgggccgcgtcgtccgagcgggctggccccttgccggccggggcggcggaataggtccgcccgcccatatcctcgtaatatttatgcaccagcagggccacaatgtgccggcaggccccgctgtccgggcgaaaacccgggcagtcgcaggtcatatacgccatggttccctcggcggataatcccacctccacgtggcagcgcctgccggcgttttcctccacattggcgctcagatactcgtcaaacagcgggtttgccaaccgggcaatgtccaataccttcccgctgctgttcagggatgtccccttcaagtaggcctgccggccgtccgccagctcgccgatttttttcagtgaaaacagaggcataaccctcaccgcctccccgcgatgccgtatcttttcagtataccccaaaacccggtcgccgtaaagggcgaaaacgcaaacaaagaaaagcctgcggcgtctgccgcaggcttttgcgctatttcaggtggttccagccgccgtcccggatgatcttggcgtagtccttcagtccgatgttgcggtctatgttcccggcgatgccagcaacggcgcctttgctggtatactgccatatcgtatacggtaccggataggtgacagtggtgttatactgcgccagccagatgtcgtatttctccttcagccgcgcgggttccatgttgctggtggcccagctggcccccgtatacaccatgggataatatcccgccgccttgatggcgtcgcagaacgcgatggcgatatcggtgcacagtgtcttcttacctaccagcgcctgggtgcgcgcctccttgtcgggcgggttttccatgtcgatgaccaccggataagtgacggcgtatcccttgattcggtcgaggacatattgggcttcttccttggcttccgccacgttgattgcctgggaaaagaaatacacgccgcgatccacgccggcggcgatagagcccttcatgttggcttcatatttggcgtcggtgaacatggtgccggccgttccccagccccgggcgcccaggcggataaaggcaaaatccacgccgtccgccttcacctggttccagttgatgtccccctgatacgtggacacgtcgatgccgaccttcgacgatagggccccgtccttgtcaaagtaatacttggctttgccgatgtcctgatagccggtcaactttttaccgttcagataataatatgtctggccgcccgccgtatgccagccggtgctggggggcggcgacgtggtgggcggggccgtggacgctgtggtgccggcggagccggtcaccgtcgtgacggttcccttggtggtggttgtggtggtgccggcggtggtggagggcggcagcgtgacgtccggcagggtggaaaccggcgtttccggctcttcctctttttcctcctccttaggccgctgcgggtcatccggcggcgcgacggctttggtggtgcgggtggtccgcgtcgtgcttttcttggagcctgtggtctcacccacggtggtggaatccgacgtaccggtctcggggccggtggtgtcggtcgctgtggtggaatcgccgctgtccggcgcggtcgccacaccggagctttccgcgctttccggcgggcccagatgccactcgtccgtggggcgcgccgcggcgccgcagccggtcatgccggccagcaggcagaccgccagccctaaggacaagctcttgcggaacgtatatctcatgcaggccaaatccttccctgtgtcaaaattgaatggatattcattataccacaaggcggcgcggagcgccgccctccttagttcggaacggccttgtccgttccggggtggtcccatgttctcccagccgtcggaaatcttggatttccgcttacggcgtgaggttattacaccacaaagcgctgcgccttgcgcatcgcctaccttagtccgaaacggctttgaccgtttcggagtggttcaatgttctctcaggcgtccaaaggcttgcgctgcaaggctttggagaacgccgtgaggttattataccatatcgaaagctgtcgccgcaagtcgccatttgacggaaccgggaggaaaaccctgtggtgaattgtcaaactaagagcaacaggaagtgagttcaagaacccataattcct

SEQ ID NO: 2685 - DNA, 17186 bp, Unknown
  16S sequences of unknown bacteria
cgcgcggcgcaggggcgtttgcagggagagcagcacgcccagggccgccagcagcaggatggccgcgaccagcgcgcccgaaacgtagagcgcgcccaccgccagccgtgccgccaggcaggatagcgcgaaggccgcgggcgtgcacagcgcgaacagccacagcgcctcgtgggcaaaaaggcggcggatctgtctgcgggtcgcgcccagcgcgcgcagcatgcccacctgctgcagccgcgcgttcagccgggcagaaaaggcgctggcaatgcccgcccaggcgcacgccgccagcgccaggcccatggcgcaaaccatgcccagcagataggggctttcgccgccccagaggaaggcctgcaccgccgcggtgtcgtatccctgccgggcgagcgcggcatagagcgtttgcagggcttgcggcgtctggccgcgcagggcgtccaggcgttcccgcaaaacggccgggaacgaagcgggccgcggcagcgtgagcacgcggtgcgtctggggcgcggaaccggcggggaagggttcggcggcgaacagcagcgccgcgggataggcgttttcacccgcgccggattggaggaaggcgctctgctcctcgagcacgcccaccagcgtatacgccgcttcgcgcgtctccccgccgaagggcgtgagctgcaaagatatgctcgcgcccacctgtgcgttgagccccagttgcttgagcgccgaggcctctagggcgatttcgcccggccgcgcgggcaggcggccctgcgcgcaggtcggttggagcagcgcctgggcggtttcgtccatctgcccgatgacaacgctactcggcatagcggcgctggcgagcgtgccaattgcgtatacgctgcccacctgctccgcgaggccgttttcccgcaggaaggcggggtctatggcctgcgcgcggtagaggatcgcgtcctgcatgcccacctgcgcccggtagcgcgcttcgctgccgcgcagcaggctgtacaggctcaggcccatggtggaaacgaaaaagatcgaaaggaacacgcccgcggccaaagcgcgataggcccggcggtttttgtagaggccgcttagcgccacgcgcgcaaagctcgggcgcgcggcgggaatgggcttggcaggcgcgcgcatggaaatccccctttggcaaacggtttttttctctagccttactataccacacctggcttgcgaagcagtgacagcaagcttacgattttgcaagaaagcgccgcgcgggattttttgccaaggttgcctttgccgcaaaatggggtgggggaagccgccgcgcgcgtcgataaattgtaccacaaaaagcggatttggagccctttcagccccaaatccgtttttgtcgccggcgctttttcccagatctttgaagaccaaacccgcctttaccaatgccccgcgagcgcgatgatgggaactacgcccgccaaatggaacagcgatgtgttccacttttgatccttataccaagcctcaaacgtagatgtggccccttcggacagcatgcgcagccatgcgccttcatccaccagcagttcatgcaaaagctctgtttctccctgacgcatcaggccataaatcagatatatgccgatatacacgttgcacgtccagcgcttttcgcggatcagggcgagaatgttggccttcgtccgcgcgtccagcccaatatcgaaggccagcggcaggatgttgcccggctcgctcacatggctggatgtttcgctatcgcggaacaaggcgcgctcgggatcgtaaaacgcgcggatataggcttgcgccacgcgctcacgcttgcccaagggggccagccccagcgccgcgcggatgcgatccacgtcttccagcatgcctacataatagccgttgagcacgttgtggcagcccgggccgacggggatggtcagggggaaatcatagtcatcccgcatgttggcgggccaatccacgaggttccatttttcgcgcacgttttccagcaagccgtccgggcgctcatactgcgcgaagtattccgcgatgcccatcaccaccggcagcatttcgctcaagaagcccaaatcgcgcgtataaagataatgccggtatacgttgcctgcaaattgcagcgaataatccgcgatttcctgcgcaaaggagcagatggattccgacatcatgcctttgcagatggttacggtttctgccgcgtcccgcaggaatttgcgcgccagcgcggaatcgccggtgagcagcatgtgcgcgtagctggcaaaggcctcgtcgcctaggtattggcctttttcccgatccagcgaatccatatacttgtcctgtacgccgtacttgagcgtgtccgcgcacaggcggaacaccttgcgcagccgctcgtcctgcaaatcgggctttagcgtttcctcatagggatagtggcgcacgatggcgcacagggagtccgcgtccagtacgcagcctttgggcaattccagctcgatatagcggaagggcttataatcgtattggtttaagcgatcgtccggccggccggagagcacccatctttcgtcatacaggcaattgctgcgcgtgtcgtagcgcacgcgcccattctccagcagttccatgccggtgcgcacggcgatttcgctgccgcgcacgccctgcgcgcgcgcctcgaaataccccacatacgcgcgcccaaaatcgatccacaggccattttcgcccagccactttacgcaaaccggctttttccgataaatcgtcagttggcggatgggctgcgcaaacagcgcgtaatccagatgttcccgcgcatgggcggtttcccagccgctgtcgtcgaaatccacggcttcaaagcccacttccggcgcgccggaatcgtatttttcgcggtactgggttttgtaacccaccaaacccagcgacgaataccccgtgtgccgggcgacgcgccagctttcgtccgtggcgagcacggtacggccatctaccaccaattccgcgatcaggccatggcgcgcgtccccgctgacccacacgcggttgatttgcccctgataatacgtgtgtaccgccacgatattttcgcccgggcgcaggaaccgggtgacgtcgatggtgttataatagtaatgcgcgggattgcctggcgcggggccctggtccacaaacgccccgttgatataaagcttataataatcgtccgccgaaatgtagagcgtggccacatcgcaccgttttagcgcaacgcgctggcgaaacaggatgtggctgttggccagcgcttcatccggctcatactctagcggttccagttccttgtgaaagacattcaccggttccagcggcgcgaacgtgcggtcggtgatccatttcgcctgccatatgcgttccatgcgtcgtgcctcctttttttgcgcctattcactcaagacgaaggggcggttctgcgcgtcgaagccaatttccatgctggaaaggcgccaggtttttccctggtccgcgctgccctggtaaaacagatatgccttgccgtcatcgtcgcggaaggcataggggtggcccgattcgcaactgttccaggaaccgggcgcgccgttgcggtaaaagggctgcgcggatagtttgcggaagaacacgccatcttccgaaacggcgcagccgatctgctgcgggaaacagttgtagccgccgccatagaagagaaagacccgatcgccatttacgatggtcgcgggcgcttcaatgcactcgccttcccaggccatttccggcgcgaggatggactgcggcatggcttgcgtccacgtgccgcgggaaaaatccgcgtgcgcgtccgcccaggcgcagcccagcttttgcacgcgcatcgcgtgatcgcgcgtggcaaaatagagatacagcttgccgtgaaataggcacacgtccgcgtcgatggcgcggcctgcgcaccaatcgtccgtgggatggaagacgggattggtggcgtccttcacaaagtgcagcccgtcgctggaaaccgcgtggcaaagcgcgtcgcttcggccattgccataggtctggtaaaacaggtgtaccttgccttccagcacgatggccgcgggcgcggccacgccgttcttttcgcaatcttgttccatgggcagctccgccacgcacgaccagtgctcccggtctgtcgaggtggcaatgccaatgccgatgcgcaggggtttttcctgcaggcgaatggaataatacaggaaatactgcccctgaaaatgcacaaccgcaggatctttggcgaaatttccccgcttttcgttggtaaacagcatatttttccctccgtttttgcaaagcggcacagcgcttgccgcactgtgccgctttcgcaaggttgttaaatgcgcggccacgctggcagggaacacgcgcctttgttcaaatgcgcgcctgcgtgcgagatttcatgcgcatccgcaccgattgccttaagcattctgctgggcatacagctcgttggcttcttcggtgagcaccgtaccaccggcattataccactgttcgaccatggtgtcaaaatagtccagcggctgttcgcccgtaatgatggcgatgtagccctcgttgaggatcttattgcattcggtggcgtacatggcattggacggcagcgtgccgtaaatcgcgctgatatagccctggttgaagtccttcataaattcctcataccaggcgaagtcatacgcatacgccatatactggaagtcgtagttgtattcttcggtgaacatgaaccacgcggcggcgcccatgccattgactgcggtggtattgttctccaccagcatgttgataacctgctggccgttccactccacgatctcataggtttcgcccgggatgccgcgcgaagccctggtgcagttgtccagatccatcatcatatcgtcgatgatctccagcaggcgcgcaaagcgttcggtatccgcggtgagcacggaggagaaatgcgtgcgcagggaaacggggctagcctgcgtggtgccccaatcgccatccgggccaatcggcggatggccgggcgcataggggatgtcgacgcccgcgtccttgatggcctcggccatgcggcccaccatcgtgccgcccagcgcggtggaatccacccagtgatagaacgaccccataccggagacgccgatgcggccgttcaagaacgcgtgcgaaatggcccaatagccgccctggttttcgccggtgatgaactccggatcgagcacgccgtcggtataccacttgttgagcagggcaagggcgtccttggcctgcggcatcacgtcgccaaacaccacgccgccttcgccgtcttcaatccaggtgttgcgctggaagccgaacgcgccgtaaatggcgtcaaacgccgtctcgctgagggcataggtgtcgtccacgccgttgccatccgggtcttccttggcgatgcggtagaaaacttcctccacttcttccagggtttccggaatctcggtgatgcccaggttttccagccagtccgtgcgccagatgaacggatcggcaaccgtgttgtacaggcggaaccccgggatggagtacatgttttcgccgtcgtacttcgcgtacgcccagctcttgggctcggtttcatcgatgtaagcggacagccgcggcgcgtgctcgcggaagaattcttcgctccagccgccgatgatgccctgttgataataggcgttcgcgtcgatgctctgcatgacatccgggatttcgccggcggaaatcatcaggttgatctgttccgccgcggaggattgctccacattgatcggttcaaaattcacgccatacttttcgttccagtactgcaccattacgggatcttcatccagcgggccgaagttgtacatgaccatcgtgtaggtgtaaggttccgcggcttcttccgcaccagccgccagtggcatggccgcgagcagcatggcaagcgccaagagcaatagggttgcctttttcatgaatcgttcctcccactttatttatgttcaacgggccccgcccgttgccaccaagttgtttcgcgtctatcccttgatcgcgcccaccagcgttcccttcacgaaatacttttgcaggaagggatacaggcacatgatgggcagcatgcacacaaagatcgtggccgccttgatgttgtccggcgacgccgcctgggaatcgttggtcaaattggggttgatatccatcaactgctgcgtgccctccagcagaatgcgccggagcaccacttgcaggggatacagttccgcctggttgatgtaaatcgtggcgtcgaaccaggaattccaatgtcccaccatgatccatagcgtgatcgtggcgataactgcgagggaaaccggtagatagattgaaaagaggatgcggatgttgttcgcgccgtcgatgcgcgcgctttcctccaaatccttgggcacgccctggaagaaattgcgcatcacaatgaggttataggaattgatcaggcccggcagcaccagcgcccagcgtgtgttgcgcaggccgagttgtacattccacaaatacgagggaatcaacccgccgctgaagaacatggggatgacgatcaagaggatgaaaaacttccgcatgggcagatacgcctttgatgtggcatacgcgccaaagatcgtggccaacaggcccagcgccgtacccagcaccgtgcggatcaccgtttcccggtagcccgaccacacatattcgtttttcagaacatacgtataattggaccaggtgaagcgcaccggcacaaagtgcagttcgttcacattgaggtagccgtcgttgaacgactgcaccagcaaattccaaaagggatagagaatcgaaaacgccaacagcgccataatgaacacgttaaacccatcaaacaggcgctcgccccatggcttgcgaatcttgttcctgtgctgcgacatgttcttttcctccttaccaaaggctcgcgtccccgagttttctcgcgaacaggtttgttgcaaaaacgaataggaagccaatgccgtttttgaataaccccaccgcagcggcataagaatattgcaggcccgtgaggccgcggcgatacacataggtgtccaaaatgtccgccacagacatcaccgcgtcgttgtataagttgaaaatctggtcgaacccgccgttgaggatgctgcccatgttcaaaatgaacaaaactacgatggttggcgcaatcgacggcaatgtgatgtaccatatgcgctgcaagcggttcgcgccgtccagcagggcgctttcgtacaattccggactgatgccggaaatcgccgccaaataaatgatggatccccagccgatgctctgccaaatgcccgtcgcgataatcgtgggcacaaacgtgctgggttgccccaggaaataaatgggctgcaaccccatcttggtgagcaaaatgttgatcggcccggaagacggcgacaggaattggagaaaaatgcccgccaacaccacccacgaaaggaagtgcggaagatacgatatcgtttgaatcacgcgcttatatttttctgagcgcagctcgttgagcaacagcgccagcaagatgggcgctggaaaaccaaaaagaatgcgcagcgcgctgatgaccactgtgttgcgcaaaacttcaaagaagctcggcgtttggaacaggacttcaaactgcttgagccccacccacgggctgccccagatcccgtccagcaggcggtattctttgaaagcgatcacaatgcccgccatgggaatataggagaaaatcacataatatgccaccacggggagcatcaatagcatcaaatcgccattgagcaaaaggtttttgccgaatgagcgcgcgctcccctgcgccgctgctcctctcttcatcgcaattcctcctcgcctggttctcgtgttgtgaaattatattgcaaatttagcttatttataccactttggcaagggaaaatatccaccatacccggaactatggttacaaaaccgctgattataaatcgaactttacatggagttcgctattcttcgaaaattctgctgctttctagatgcacaaaaaaaccggccccgaacaagcggaggccggttttttgcgtatttggtgtttttacgcgttttcttcgatgggactgggcaagccgtatgtttcgttgagcaacgtaccattgagcgcggcatagcctttccaggccttgcgcggcacggggcggatgggggagtggacgtccatcgccgcgccggccatcctggcgtgcgcgcgcagcatgtccccgtctttttccacccggacttcttcgggcgcgacgccctccaggctcacgcacagcgcggcataggcgtctttgagcgcgcgcagcggaatctcccgttcctcgccatggtaaaacaccacgtccacataccagcggggctcgtcgcccacaaagcggcggtgcggattggcgtgggcttcctgctgccgcaaatccatctgcgtgttccacagggaaagatgtacgggcgcgccatcgaattgcgcccccagcagcgcgatgttcaggcggatgccgccgtcttccagcacagcccgctcaggcgtgaccacgggctgggccgccacagcgccgcccagttcgatgcgcacccgcaggtcataggcgcggatggtttcgttgtggatcatatccagactgggatgcgtatcgccgccgtcggattgcaaggaggccacgagcagcgcgttgccgccttgttgcaccgtgacgaacatgccggaggagaaatcatagaaatcgtgcaggatcgtggcgttgataaagcgcggctgctttccgccccagaaccccagcaaattgcggcgctggttccacgtgctggaaatctcccaggaagaaagcgcgtactcctgtgcaatgtgcgcgatggcgatggtatcgcgcggggcgcggatgctctggcccgtggtgaagcccaggttcacatcgtgcggctcgcacacggcaaacgcctggcggtatttttccgggcattgcatctggatatagggccattgcaggctatacgcaaagcggtcgtcggcgatcaaggcttcgccattgtccagcgcgttgcgcaggaaggagagcgtgccatcggccgtgagataggtatagctgcgggcgttggggcccgtccactggcgcgtgggcgcgtggaagtgctccgccacggttttccaggccacatccagcatatcgccgctcatgcggtggacatcctcgttgtgaatctgcgcgtggatgcggctcaagtccataatcgcctccaccgtgtatgtggggctattgtattcggcgaacgtgccgttcttcatggtgtattcccaggccttggtaaagcggctgacgccgtagtccagcatttcctgccagccgagcaactggccgccgcacagcgtgacatagctgcccatgatggaaatgttggtgtagcccggatgcatgttccgccggaagatggacaggcaagcgcagcgcagcgccttgcgcaattccaccagcacctgcgcgctgaggcgctccgcgtggaacaagagcgcctgcagaatttccttgccgcaaaaatccgcccagttccaatccgggggcgccatcttttccagcggttcttccatgtaccacgaccagatgccgaacgtggcgttggccggatcctgatcctgcaagcccagcacatgcagcagcacttcttccgcgcggcgcagatccgcctcttcccccgtgagtaacagcgcgttcgcgtaggtgaacgcctcgcgcgtggaatgcacatggcaatggtgcaactgcgtgtgatacttggcgttgtccaaatacatcgtggggcatttccactcttcgctatagaccgcgttgctcgcttgcagcgttttcataaaatagggccggttcttttctgatacggtcaacatggtttcgttcctccgctcttggcctcagtgggcgtttttcaggcgcgtggggcgcaaattcaccgtgcatacctgggcaaagccccgttcatccggcgcgctaaagaggatcttatcccccgcccggttgaaggagggatgcaagtgatccatgcccgtggcgcagtcgcccggcgcaaaggccaggatctcgctttctcccgtggccgcgtgaatcagcaccacggcccagcgcaccttgccatcctcgcagggaaccagcatatccgtgcacagccattgccggtcgcgcgaaatgcccgggtgcagaatgcggttttccgagccaaacaccacatcaaagtgccgcccatcccggtcgccgagcatgattttgcccggtatgtgcataaaggccatgctttccccatcggcggaccaggtttcgtgcgtgatccactcgttcgggtgctccacatagtacggccgcttcatgcggtgccgcacatcgaacatccacgtgcgctgcagcgcgtcgcctccggtctcgtgtacatagaacagcaggttgctatccgtgggacagatttgcgtgtggcccaagcgctggtcggtttcaaacacgatctgcgcttcttcctggccgggatcgaggatcaccagcgcataaatcttgttttccaactgcaccgcgccggccacgcggccgtcattcgcgatggtaagatgcccctgcaacgctgaccgcgccgggaagcggcccaacgcagtcatcgcgccgctttccacatcgatgcggaaaatggttccatcgtccttggcgatcacgccgtagttttcctgccagtgcatggcgaaagagccataatgcgcgtccgccaggcgcacaatttcgcccgtggcgcaatctgcccggtgcagctgcggcccgtgctgcgccgtctcgggcgcttcggtgcgctcaaagaaaaaatagcggtcgtccgcggagaaattctccgtggtaaaatacaattttgcgttccgggcggaatccgcggtatattggcaaacctcgtatcctgtcctcgcgtcgcgatacaccttcataatagcctccaaaatttgctttttatacggaaaggccgccggagaagcctctctccagcggcccttcctgcatgggaattaagccttaaacgtttatggatgccagggattacaggcccaattccgcggcctgctcgttgaacgcctctttgaccatctcatagtccatgccttcccactcggcgcggatttcttcctgcgcctgttcggcggtgaagtccggatcggccaaagcctgggcccacttttcatcggcgatcgtattcatatccgtcatgtattccacgacgatgtccacgcccaggttcgcagtgggcgtatcgcggcggaacttgatgtccttggtcgccatcacggcctcggcatcgatgatcttcgcttctttcacgtcatcatcaacggcggcttcggcagcctgcaggtacagctccgcgtccatgccgtagggggacacgatcgcgtactcgttagtgtagcccagcttggcaaggcgctcgtcttccgtcagcagggagacgtacaggccgtcgcggttttcaaagtccacgccttcctcgccccactgcagcatctgccagccatcggtgatcatccaatcgatgtacatggcaacagcttccggattttcacaggtggtgggcacgcaggagaggaactggcactcgcgctcctggtaatagcccgaacccgtccacgagggtaccggtgccaccgtagcttccgggaaattggccttcagagtcgcccaagccttattctgcaggttggcgtgctcgcaggccaggaagcccgtctcgcccgtggcaaagcgggtgtagtgcatatccgcgtcataggtgaggtactccggatcgcaccagccgttgtccatgatggtctccattagttgcatcaccttgagcttgttctcggtgaggtggacgttttcaaacacaccatcctcgcccttgtaccagccgctatgcgcgtcatacgcggcgttgagaacctgcggataagtgcctgccatagaccaaccgtaggtgtcgtcctcgccgttgccatccggatcatcctccgtgaaggcgcgcaccacttcgaggaattcttcctcggtcgtggggatcgacaggcccaggttctccagccagtccgtgcgcacatagagcatatggttgacgacgctgctctcaaagcgctgctgcgcgaaagcgtattcgccgcccatggtcatgccccactgttgggtttccggcggggtgagcgcgcggtagttgggcgcgtactcatcgatgatatcggacagctcgatcagcatgccctggttggcccactcctcgacgtattccggctggaactccatgataagatccggcgcttcgccagaggcaagccacaggttgtagttctggtaggtggagttgcgcgcgcaagccacgaattccactttcacgggcgcgttctcgttgatccagcgggtggcccagttgtcctcatacgttccctggtccgtaggcacggcgctgcggtccagaatcgtcacggtgatggtgggacggtcgtcctcttccgccgctgcggggaaggcgaccatcgacaaggtcatcaccatggccaggagcaaaaccagataccttttcatacgataaacctcctttatattcccagcgcaaaagcgcgccaaggctatcctttgatggcgccgatcataacgcccttcacaaaatacttctgcaggaagggatacacgcacatgatgggcaccgtggcaatcacgatggccgcgctcttcaccgattccgaagccatgggttgcgccacatcggcggaatccagcgtggcctgctggttgagcgcggtggtggaagaaatcacgtcgttgagcacttgctggagcaccttcagatccgatttggaaacgtagaggatcatgttcatgtagctgttccagtagcccaccgcgtagaacaaagtgatcgtggcgatggagggcaccgaaagcggcagcacgatgctcactaggatgcgcaggtcgttcgcgccgtcgatcacggcgctctcctccaggctatcgggcagcgcggagaagaaggtcttcatcaccagcatgttccaggtggaaatcgcgcccggcagccagatggcccaataggtgttcatcagttgcaggtttttgatgaggatgaagttggggatcatgcccgcgttgatgatcatcgtgaacgtgatcatggccaggaaagccgtcctgccgaacaggcgctttttggacagggcatacgccgtacaaatcgtgcagaacatgctgatggccgttcccaccaaggtgaggatcacggtgttcttcagcgccatgaaaatgggcgtggtcttcatcacctgcacgtaggtgtgggtggtgaattcaacggggtagaacgtcacttcgtccgaaacgacggcccgttcgctggaaaacgacgtggaaatgatgttgagcagagggaacaacatcgtgagcataatcagcgttacgatgatatagttgaagaaataaaataccttttcgctccggttctggatgatcacgccagaactgcccgcgttggctgacctagctttcatgcgacttctctcctttccctcaagctcttaccaaatgccctcgccattgatccacttggcgatggcgttggtgctcaaaagcaggatcgcggataccaccgactggaacaagcccatggccgtggtgagcgaatactgcgttttctgcacgccttgccggtacacgtaagtggagaacacgtccgccacgtcgcgcaccacgttgttggacaagagcaatacgggctccatgcccacgtccatcatgctgcccatgcgcaaaatcaactggatcacgatggtgggcgcaatgcaaggcagcgtaatgctgatgatctggcggaatttgcccgcgccatcgatgatcgccgcctcgtacaactgcggatcaatgcccgtgatggccgccagataaatgatggtaccccagccaatctccttccagatgccggaaatcacgaacatcgtgcgccaccagcgctcatccgccaggaagtaaattccctcttccatgccggtgatgaatttgatgaacacattgacgatgccgtgcgagggggacaggatgttttgaatcatgcccgccagcacaacccaggagaaaaagtgcgggatgtaaacgatggactgcaccaggcgcttgtatttgaggttgcgaatctcgttgagcaacagcgccagcaggatgggcgccgggaagccgaaaatcacgctgtaaatgttgagcagcagcgtgttgcggaacacccggaagaacatcgccgagctgaacaggcgctcaaaatattgcaggcccacccattcgctgccccagatgcccaggttcatcttatagttcttgaaggcgatctgcacgccatagagcggcgcatatttgaaaatgacgaagaacaaaattgccggcaccagcaacagatacagatacctgtcgcggtagagcatttttgcgatcttggcctttttcgccgtctttggcggtgacattttacttgcgaccaaccgaatccctccatatcttccatagaatcccgctggcgggatatgaaattccaccatcaaaattgttaatgtcattatacaaaaaagcctcttgtaatgcaagtggaattctttgctttgtacattgcatttcttgctgtgccgagaatggcttcattttgcttgggcctaaatattttaagcacattgcgccggtttgttggtgggtttaccggcgcaaatgccggataaaaccgcgcggtttggcctttacacgccggtttttttgcggtataatggaattcacaggacatccgcggcaagcgagccggcgagcgcaaggagggagctctgtgcccaacaatttccgcgaagatacgccgaatttggcaaaaaacgaattcgaagtgtattacaattgctctccctctgtggtgatggatcggttccatgggcacagtttttatgagttgcgcatcatcatccatggccacatcctgcactacaacgaaagcagcatctctgaactgtgctcgggcgatatctccatcatcccgccggggttgttccaccgcataatgcccgcgcaggatacgggaaccatccccgattacacgcgcatcctgctctatctatcgatcaattttgtgcgctcgctggatacggaaaccctccaggtttccgaaatgctgaaccattttggctattctggaccgcaacacctgcgcttgccggacgaggaattcgccgcgttttgccaattgctgaaggacgttgtcaccgcggacaacgacgatgaacccctggggcattttgccaaccgcgccagggtgatgctggcgctttcccaaatcgcccgcgccatttcgcaaaacgctttccttccgccttccggagaaaatacggccctgattccccgcgtaatcgcctacatcaatgcccatctatccagcgatctttcgctggacatgctctccgaacgtttctatatcagcaaattctatctttcgcaccaattcaagcagtacacacagctttccctgcaccagtacattctctcgcgccgcatgatgcacgcgcaaattttgctgcgctccgggcacgcgcccacgcacgtggccgcggcctgcggctatcgcgaatattccagcttttataaagccttcctgcgcgaaacaggcgttgctcccaaagactttgtgtaatgcgccaaaacgcgcatgccgccgcggacttgagccgcggcggcaatgtagcaattccatttttggcttttttagaagaacaccggttgcccagtcttgctgctttgataaatggcttccagaatctgcgtgaccacataggcctgttcgggcttgacgatgaggggctttgtatcgtccttcacgtggtcgatccacatgcgcgcctcgatttcgtgcggcttgcccgcgcccacgccctcgaagaaggccgcgccgctgttcatcgccagatccgggacagtggtatacaggcgggagaacttttcgccgttgatgcgcagcgcgtcgccctcgccgatcatgtccgcgcccgccttatcgccgcacaggatggtcttggcctcgtccaccagcagcgtgttgagcgcccaactggcttccagcgaaatgatcgcgccgttcttcatgcgcacaaagccaaaggcgctgtcttccaccgtgaactttttgggatcccagctgccccaggcattggcggcgttttccgtatccgccagcttgcggaacgtctgccccacgaccatggccggttcatagttgtccatttcccacagcgtgaggtcgagcgcgtgcgtgccgatgtcgatcagcgggccgccgccctggttttcctcatccaggaacacgccccaggtgggcacggcgcggcggcgcaccgcctgcgcgcgcgcgtaatacacttcgcccagttcgcccgcttcgcacagctttttgaggtaccagctgttggcgcgatagcggttctgatagccgatggtcagtttcttgcccgtgcgcttggccgcgtcgagcatttttttggcctcggcagagttgatcgccatgggcttttcacacatcacgtgcttgccggattccagcgcgtccacggtgatgaacgaatgctgcttgttgggcgtgagcacgtgtactacgtcgagatccagttccagcagcttgcggtaatccacaaagaccttcgcgcccggcgcgccatattcggcggcggccttcaccgcgcgctcttccacaatgtcgcaaaacgcgcaaagctccacatccggtagctggctcagcgcgggcagatgcttgctgttggcgattccgccacagccaatgatgccaatccgaaccttatccattttcatcctcctacagtaaatcgcgttgtctcagcttgtcaaaaaagtctttttgacaagctggtggacgggggagcaagctatccacaattcgcaatggtcaccctgctgcgcctagcggcttgcagtgttcccttgctcattgggcttacttcgcgctgcttcgcccacagggcgcgcgcttcgtgcgccccc

SEQ ID NO: 2686 - DNA, 8053 bp, Unknown
  16S sequences of unknown bacteria
gggcagtacatcggctgccgggaaacgaaaaaagcctgcaaagccggccagcagctgctgctttccctgggtgttctctcactggcggttatggcactgatgtaccttttggcagattttttgctgcatgtggtgttcggaactgttaccccggaagtatccggctacgcgcagacgtacctgatgattgtaaacctgtcgattcccttcattgcgctgtacaatggcggcgcggctctgttccgggttatgggcaattccaggatttccatgctggtggcgcttttgatgaatgcggtgaacgtgggcggcaacgcgcttctggtgttcggatttggaatgggtgtggccggcgtggcgattcccaccgtgttatcccgcgtggtggcggcggcggtgattctggcgctgctgtgcggcaaaaggcatgagattcatctgcagcggggaatgtcctggcggccggactggggaatggtccgtaatattatgtccgtgggtgtacccaacggcgtggaaaacagcctgttccagctgggaaagatcgtgatgctcagcttgatttccacctgcggtacggcttccattgctgccaacgccatcggcaacaatgtcgcccagtatcagatcctgggcggtatgtcggtgggcattgctatggtgacggtggtcagtcagtgcgtgggagcgggagattatgaaaaagtgcgtgcttacacccgcaagctggtgaaactgagctatctgttcatcctgctcatggtgggccttacattggcccttcttccgctgatcctgcatctatacaacgtttcgcctgaggctgacagttatgcgatccgctgtatcctgctgcacgggttttctgcctgcgtgttctggcccctggcctttacgctgcccaatacgctgcgggcggccggcgacgccaaatttaccatgattgtcagtgtgacggtgatgtggatcgtacgcattggctgtgggtatttgctgggcggctatttcggctggggcgtgtttggggtgtggacggctatgattctggactggtgcttccgcattccggctttcctgctgcgctaccgtgggcacaaatgggagcatatgtcgttggtggggtgacagtcggtttgtcgaaatcccctggaaaataaaaaaggaacggcgcctgacagcgtcgttccttttttatttgttccgcaaagccaaataggctccgctggcagtagccagtattttttccggtgcgctggcagtgaacgcttcagcggaaatgtagttgatggtctggccgggtttgtccaaccgggaacggaccagcactggcccatctacggggacaggccgcagataagagatgttcatggtaaccgtgggcgtcataccgccggcatacaaagcggagagatggcccatggcagtgtcgaaaatcacaccgaccaggccgccgtgaagggtgccgccgggatttgcatattctttgcgcagcgcgaaagagcaggtatagatgcgcccttcgggatcacagctttcaaaatgaggacacagccagctgttgatggtgccggcttgttcttcctgcacctgctgttccaaagcgcgcagggcggcctccatggcctgccgggtgagggagtgttcggacatggtaaaaacctccattcagtagattcaataagataatattttacacgatatttccttttttgtacagaggtttgctgtcagggatacaaattggatacatcaatacagtattatattacaaaaacaaactgttttcagataggtgctgctgtgttttacaggcggttaaaaaagaatgacaaagggagcgctattttgtaacccttttgctgttgaccgcagcgaataactgtgttatgtattataatacagttattccgcgcatgggcaggacaatactgtgtcaaacagacggattaaggagagcgagggacaaagacctatgaacgagaaaagcaaaaagcatgagtttgaggctgctccggcagcggaagcggcgaacacggatacacagcagcctggatctgctctggatgcggcggtacctgccgtggatatgcgcgaggatcagacgcctccgaaaaaagcgccgaaaaagaaaaagcatttggtgcgcaatattattctgatcgtgatcttggcggcggtgcttgccctgatcgtatggggctgcatgaaatttttcggcggttccggcgatagcggagaagtgatgaacgcctatgtggacattgggtctattaccagcacggtttcgggagatgctctttcgcgggctaaagacagcgccagtatgacgctgaccaccagcggaactgtgcaggagatctttgtcagcgagggcgatcatgtggaagccggccagcagctctataaaatccagagcgacacggcggaagatgcggtgacccaagcgaaaaagagcgtggacagcaccagcaaagaattgaaaaagctgcaggaaaatgctgctaatctgacggtgcgcgcccctttttccggaaagatccagctgccggaggataccaaggagatcaaagtgggcgacgatatggccagcggcaccaccattgctacgctggtggacgattctaaaatgaagctgacgcagtattacagctatgcttatgccaaggacatcaaggcgggtcagagcgtcaccgtttcgattccctcgtccatgacgacggtaaagggaactgtatccggcgtacatatggtggagcggatcagcgcagaaggttccaagctctttgaggtggatctggtgatgaataatcccggcaccttggctgccggtgtggaagccagtgccaccattactgtgggcagcggcacggtgtacccttatgaagccgggaaactggaatacaatcagtctcagaccattgtgacgaaagtgggcggcccggtggagaaagtgaatctgcgcaactatgataaggtaagtgcgggcgaagtgctcctggtgatggggggcgacgacaatgataccgcaatttttgacatggagagccagcttaaaacggcgcagaaaaatcttgaggaagcgcagaaagcactggatctgctcaatggcgtttccccgatttccggcacggtgatgtcagtttccatggaagtggggcaggaagtggccaccggtaccacggtgatggtggtatcggacacgacggtgatccagctggacgccaacgtggatgaacgcaatatctcttatattaaagaaggcatgagcgtggatgtgacccagaatgagaaccagtttatgggtacggtcacttctgtgagcctgacgagtaaggcggaaaacggcgtggctacgttccctgtggtcatcagcgtggacaacagtgatggtacggtgctggcaggcagttatgcgcagtacagcctggtggccagccagagcaacgactgcatggtgctgcccatccaggcagtgaagtctgtggaaacggcggagggcagtaagtatgtggtatttgtgcataccgacacgcgcccggagaatgccatcgatgtggaagttctgcccgacggcgtgccggaaacaggctactgggctgttccggtgaccaccggcatcaacgacgcgcagaacgtggagatcaaagacggcgtggaggtcggcatggaagtgttccagcaggtgatggtcaccaacggtttttaaggagaagcactatgctgatacgccttgaaaatatttataaaatttatggtgaaggcctggagagcgaagtgcgggcgctcgatggcgtatccctcaccatcgaccggggcgagtttgtagccattgccggcgcatccggttctggcaagtccacgatgatgaatgtactgggctgcctggatatccccacgtacggtgaatactggctggacggacagaatgtacgggagttgacggataaacagctttcccatatccgcaacaagcagatcggatttatttttcagggctataacctgatcccggagctgacagcgctggaaaatgtggagctgccgctcatttatcagggaattgggcccggcaagcgtcaggaactggcgcagcgcgccctggagcgcgtggggctgggcagccgcggcggacaccggccctcggaaatgtctggcggccagcagcagcgtgtggccattgcccgggctatttccaccagtccgcctatcattatggccgacgaacccacgggagcgctggattccaaaacagggcaggaggtgctggcgtttcttcagcagctcaaccgtgagggaagcacagtaatcctgattacccatgacaacggcattgctgctacagcccgccgtattgtgcgggtgtcggacggcaaaattgtggaggatcatgcacaggaggtggattggctgtgaatctggcacaggcttttaagatggcggtcaaatccatctggtcgaaaaaaatgcgttcgctgctgacgatgctgggtatcatcattggcattgcggcggtgatgatcattgtgtcggttatcaccggtgcgaacaagaaaagcatggaatactacgaatctatgggcaccaacaaaatcagcgtttcagcgcagctctacagcggtggggacgcttttgaggaagtgtataactactgcaaaagcattgatatggtggtgggcgtgacgcccacgggttacgtgggcggcactgtgaaatacggagccaaaaacagccagagcatggagtatccgccgcagatctatctgggcagcgatcagtactccatgtgcaacaatttccagattgacaaggggcgggatctgagttatcttgatgtcaaaaaatacagtgcggtctgtgtgctgggagctgctgcagcgaaaaacttttttgacgctgccgaccccatcggtaaggatctgaccattgccggggcgaatttcacggtggtgggtgtatacgctcaaaaagattttatgaaccagggatattctctggataatgtaatcgtgattccctacacctctcagcgctacctttcggagtattccgatttgagcgacatcacggtgaaggtgaaagattctgcttccgtcaaccaggtgattgcgctgctcaacggcaattttgacaactggaaccagacgggaagaggaaacttctggtgctacagcgaccagagctggcaggaccagagcaatcagcaggcgctgatgatgtcgctggtgctgggcgccatcgccggcatctctctgctggtaggcggtatcggcattatgaatattatgctggttactgtaacggagcgaacgcgggaaattggcatccgccgggctatcggcgcagagcgcaagtcgattgtgattcagttcctgatcgaagctggcgtcatctgcggtatcggcggcatcattggaatcgccattggctttttcggtacggcaattgccagtaagcttattgtacagtccgtgctgctgccatcgcccgtcatcacgatttttgcgtttctgttttcggtggcgctgggcgtgctttttgggatgtttccggcgattaaagcttccaagctgcagccggtggtggcgctgcgtgcggagtgaggcggagtgttgtgtccgatgctccctgcgtttgagcagattctgtatttggcggggcggagatcccgcggaagaaggagtgtaacatagatgaaaaagaaacggatcctatccggtgtgctggcggcggtgctggcgctgtgcctggtgctgccggcggcgccgcaggcgcaggcggcctcctttaccgacatttccgacagcaccgtggcggacaatgccgaagtgctgcgtatgctgggtgtactggatggcactggcggcggcgcctttcagccttatggcactttgacccgcgcccagtttgcaaagatggctgtggtgatgctgggcaaaaaaggcgcggtaggtcagtatcagacctataccattttcccggatgtgcgcgctgatcactgggcggcgggctatattaatctggcggtccgcggcgagggagaagagggtaaggacaagctgcttaccggttacccggatggaaagttccacccagatgaggaaatcacttttggccaaacggtgacgatcctgatgcgtatgctgggttatcaggacagcgatgtgggagccgtttggccccagggctatttgaatgctgcggccaacatcggcctgacggatggcgtgaccatgaatgccaacgcaaaagtgaaccgcgcccaagcggcgcagctgttttgtaatctgctgcgcgcggatctgaaggggggcggggaatacgccaccaaattgggcactctagtgcaggataccatcctgctggatgtggctgccacggcagaggacggatcagccaacgccatcaagacgacggataagacctataaagtagctgatcggccggcggatgcttccatggcaggccgcaagggtacgctgctgctcaacgccagcggccgtgtgctgacctttattcccgacaaggataccagccgcaagatcatcactgtgtccgataaaagccaggacagcttgacggacagcagcggcaaacagtataaaatccattctgcggtgaaggcgtactacaacggggaggaaaagaccttcggcgacgtgcagcccaatatccgcgttggggcatctgtcacactgttctttgatgctgcgggcgatctcgattatctttttgtcagcggagctgtggcagatgaggctgtcattgtgggtgcgcagggaagcacggcagggtttgaacggctgaccgactccagcagttatgcaatttataagaatggcatgccctcctcggcctccgagctgcggcagtacgatgtggccacctatgatgcagccaccaataccatccgcgtcagcgacacaaagattacggcatattatacctatgcagaaccaaatactacctcgccggtgaaggtgaagttcctggggcaggagctgccggcgctgcgcagtgcagccgacagcctgtccggtttcaagctgggcgagcaggtgacattcctgcttacggaggacaatcaggtggctggtgctgtgtcgccccagaaagcccggggcaacgcggtaggtatcgccaccagcgtcagcacgaacgaagctgtggttgaactgttttgtgggctgaccgtcaagggcgatcccaaattgagtaataatacggtgggcaattacatcgggcagctggtgaaagtgtcctcctatcaaaaaggcgaccaaatctctctgagccgtgtgaccagcggtggtgtacgcggtacactggatgtggcgagccgtaaagtgggtgacacggagctggcggagaacgtgcggatctacgataaggttggctccgggtctttggtcgaagtgaagctggccgatgtcccggtgaagaaaaacagcggcgcaaatgtgctgtatgcggagaagaattataccggaaaaatcagcttgctgattctggacaatgccacgggcgatgcttatgtttatggacgttataaatttacgcctgcttctgatgagaatgtcaatgcacggatcaaggttgagtacggtgatgaagaaggaaagaccgcatactcaccagaggccgaatgcggcggaggatataaaaacaatgattttggcggtttggccttttatacgaatcgaagcggcgaagcccgcttggccggcgcagccaaggtgagtaagctgagcaaagtgccaaactctgcgtggaatggggagaattcagttacattccaaggcaacacctatctggtggcggacgatgtagcgtgttatatcgctgcggcggacaagtgggttacggttagccaagcccgcgcgttttctgacactgcggacctctactacgacagcatcggtgagaaaatccggattgtcgtggtgagcaactgattcgacaaatgcagaatacggcccctgctggcgtacagcccggcaggggctatattttcgacctgcagtgcacagcgcgcgccgcgggaaaaaacaggcgg

SEQ ID NO: 2687 - DNA, 6725 bp, Unknown
  16S sequences of unknown bacteria
aaatacaagagccgggcacggcagtgcccggaacgccgatatttgcgaataacgcgcagcggggcgggccgcctctggagtcgccgtgccgccagctttctttggtactttctttcgcttcgaaagaaagtactgcccccctcggggcggcagccccaccaaccgcgccgtagtcggcgcgtcaggccgctccgggacaggggtatgcgcctgcgggcgcaccaaagggctttcctcggggcaaacaatcggcgcggttcgcactgccgtgcgctccgcttgttgtttgcctgaacgaccggtcgctaaccgccttcggcggttgtatccactggatgacggtgaacttttcaaatttaatttgaaaagttcagtctgccaaaggcagaccgggttgcccaagggcaacccgccttgcgccttccctgcggtgcctgccggggttttagggcggcgagaaggagcgggcatccagtggatgcaactgccgaaggcagttagcgactgacagccgtcaaccgaaacgaggatttggcacggcagtgccaaagacgacgattgaggttgcggaacagagcccctaagccttatgccgcagcattcttcccgcgaaccagcgaagcgttgttcgcgggcgcatgcggtcgatcagggttttttcgacagtctgatcgtcgcttctgaagaaattcaggagcggcggtttttatatggcatgaagttcgggcaaatgacagcgaagggcatggcagtgcgggccgcgctgatcgtttgccccgcgggaagtcccctgcccgtgacggtgtatgccaattttgccgtaaaagcaagggataagggatgcggtttccatggttatctcgccagctttggtgcgtccgcaggcgcatacccattgccccgatagggctcgacgcgccgagtccggcgcgggtggtggggctaccgccccgaggggggagtactttctttcgaagcgaaagaaagtaccaaagaaagccagcggcacggcgactccagaggcggcccgccccgctgcgcgttattcgcaaatatcggcgttccgggcactgccgtgcccggctcttgtatttgctcaggcctgccagtcgctaactgcctacggcagttgtgcccactgggcacgcgctccctctcggcccaagcttcggcctgcgggagcccttcgggctgtcctcggcctcggttcgcttccctcacccgccgggaaaaagccctttattgcccatttttgaaagagggagttcgcaatgtcgcgcgcagcattgttggatagttattacctactatcgtgcgcgctcgtgctcactcttttcctctttcaaaaagggcaaggctttttccctccgctgcctatcgccgctctgctcccccgcagttggcgctgggcagactcaaccaatgcgagttgggatgttacggcgtaggttggatggcttcgctgtatccataaacagacctgtttcccaactcacagctggtggtaggcttactcaaccggcgcagcatgtatttttttgcaacagcaaaggccagcatggatttgaaaccaagctggcctttttagcgagccatgaggcccgtcgccgaatggcggcctttcctattcaactaacaacgaatccacatcagatccgcgagccgcgaggcccgtcgccgagcggcggtaaaaccccggccaacttgctttccctcgagtacccccgcgccctatggggcgcggtgtggggcgcggtgtggggtgcagggcggcgagaggaagcgtgcatcctgtggatgcaaccgccgcaggcggttagcgaccggcagccgtcaaccgaaacgaggatttggcacggcagtgccaaagacgacgattgaggttgcggatcactgcccctgccctagttgcggaggctgtggaggggggcggggatgcggccgccgcgctcgatgaattcgtcgttcgcggcaggattcacgggcatgacgggggcatagccgaagaggccgccgaagttgactacatcgccggccttcttgccgggcgcgggaatgacccgaaccgccgtggttttgttgttgaccatgccgatggccgcttcgtcggcaatgatgcccgcaatggcgttggcgctggtgtcgccggggatggcgatcatgtccagacccacggaacagacgcaagtcatggcctccagcttttcgatggtcagacacttggcctcggccgcttcgatcatgccgatgtcctcgctgacgggaataaacgcgccgctcaggccgcccacgtggctggacgccattacgccgcccttcttgaccatgtcgttcagcatggccagcgcggccgtggttccgggcgcgcccaccatctgcaggcccatttcctgcaggatgtaagccacgctgtccccccgggcgggagtgggggccagagacaggtcgacgatgccatagggcacctgcagccgcttggcggcttcctgcgccaccagctcgcctacgcgggtgatcttgaaggccgtgcgcttgatggtctccgccagcacgtcgaagggctggccgtgaatttcctgcagggcccgctgcaccacgccgggcccgctgacgcctacgttgaccacgcactccggctcgcccatgccgtggaacgctcccgccatgaagggattgtcctccaccgcgttggcgaataccacgatcttggcgcagccgaagccgtcgctatccgccgtcagttcggcggttttcttgatcacatggcccatccggcgtaccgcgtccatgttgatgccgctgcgggtggagcctacgttcacgctgccgcagagacgctgggtatcccggaaagcctcgggcatggagtccagcaggatctcctccgcccgggtggaacccttgtgcatcaacgcgccatagccgccgatcaggttgacccccaccgctgcggcggcctcgtccagtgccttggcaatcagcacggggttggtatcggagatcatgctcaccggcgtgacgctgatgcgcttattcacaatgggaatgcccagttccatctccagtgcttcgcccacaggcaccagatttttcgccagccgggtcactttttcgtaaacggcctccgccgtctcccggtcggtgttctttttgcagctcagcagactgatgcccatggtgatggtgcggatatcaaaatgctgctcgtggatcatctgcatggtctgcaggatttcgttgacttcgatcatgctgccacctcagatccgatgcatggcgtcgaaaatgtccgcccgctgaatattgaccgcttcgcccagttcgtcgcccacctgattgagacgagcggaaatatccgcaaaggacacggacgcattcgttacgtccacgatcatcaacatggtaaaatagccgtccagaatggtctgggaaatttccagcacgttcacgttcaattcgtatagagcggtgctcaccttggcgataatgcccggcttgtccacgccggtaacggaaaccagagctttcttcattttcctgcggctccttccaaaaatcgggatagggatacgataccgcacccgagccccgctgtcaatgtgctgcttgcttttttgctgattttgtgtatgatgggaacagtcattccaatgaacggaggaacccttccatgcagaaacgggcgctggcggtgcatgatctttcctgtgtagggcgctgctcgctgacagtggcgctgcccattctttcggcggcgggcgtgaacacggcggtgatccccacggcgctgctttccacacatacgggcgaatttaccggctatacccatctgaatctgagcgaccagctttcgcccatcacggcccatcttgccacgcttgggctgcattttgacgctttttacagcggctatctggcctccggggcgcaggtggagcagattctttccatgctcgaccagctctgtgactccgagacccatatttttgtggaccccgcttttgccgaccacggcagacgctactctctgatcgacgagtccatgcccgcccagatgcgacgtctgtgcgcccgggccaacaccatcgtgcccaacctgaccgaagcggcctttttgctggatcgtccttatcccggcgaacactatgaccggacgctgatcggcgattactgccggggactgctggatttgagcgctgagaacgtcatcattaccgatgtgagcttttcgccggaggaaaccggcatcgccattttgagccgcagcagtcagcaaaacgagccagaatttctgttccgttccaagttcgacggcgtgtttcacggaacgggcgacgtattcgcctccttcgcgctggcggggcttttgcaggacatgccgctgaagcccgccgccgagcgggcgctggacctgacccatgagtccatcgaatggacgcttcgggaaggccagccgctgcgctatggcgtgcagtttgaacgggtactgaaaaaactgtaaatcaaaacccgccggggtcaaatcagaccgcagcgggttttgcttttattcggccagcgccagttttcgcttggatttcataaagatgctcacccaattcagcgccatgccgacgccggaaaacacgttggcgatcaccagccgcagcgtgtcgttcatgagatttcccctttatttccttggtttgatgatacaggaacccacgaacgggagccatatttctttcttacgatcttctcgctttttccaaggaaacgggcgaagtttccccattttccccgaagctttcccggagaaactgtcgcccctctttttcccaccggctgacctgcgtctgagacacgccgaaccgcccggcgatctcctgctgactcagtccgccaaagaaacgcatccacagcacctgcccatagggccgtcccagactgcgcagcgcgtcccgccaaagaatctggttttcgaaggtttctgcatcgtccggggcggcggccaacaggcgttcatcccgggtaacggagctcattcgttcccgggcgctgagcatggcggccagcttttccggcggctggcccatccgctgcgccagttcctccacggttggttcccgtccgttctcctgctgccattcttcccgccgccgttccgccgccgtcaacaggcgcagttcctcccgggggatgttcatcggggcgtttcttcggcacagttcccgcagtgcgcccagtgcaaagggaatggcataggtggaaaatcgaacgccgcgtttttcatcaaagcgggcggcggcccacaggagcgccgcctccgcttcgccgatcagttcttccatgggcacgccccggccttgaaaccgtttggcgcacgctaccgccagcccgaaatgggcgcggttgccctcagccgatctcgtccagcattcgctcacggtgcaatcccacctcaccggtgatgtatttgcgcatggtgacggtcgtgcctttgccgacggcgctttccacctccaccgcgtccataaaggtctgcatgacgcagaagcccatgccgctgcgctcgttgccgtcgccggtggaataaaagggctgcatggccgcgggcacatcctcgataccgcagccgtcgtcatggacacgaacggtcagaagccgtcggtcgccgtactccgcgcacaggctgaccatgccctcctgatcccggtaaccgtggacgatggcgttcgttaccgcttcgctgacggcggtcttgatatccgccatttccggcagggtgggattcaactgcaccgcaaaagccgcgatcgccacccgggcaaaggattcgttctgcggacaggaagaaaaatgaagctccattcggttttgcattactgccgccctcccctttgatgatgttccaccgtgatgacccgctgcaggcccgtcagccgaaacagcttttcaatgggcggctgcatatttttaacgctcagcgtgccgccccgctgctgcaggatgcgcagccgtcccagcagcacgccgatcccggaggaatccataaaagtcaggtcgcccagatccaggcacaggtgccgcacgcccgggtcctccaaaatttcatccagctggcggcgaatttggggggcggtgcagtgatccagctccccggccagcaccacggtgacgctgccgtacatttccttgacattttgcatgaaaatgaacctccatggtttttgtcctgtgtaggtttcgtgtagggttcacccttatcctttgctgaaaaatgggagcttatgcattctttcccgtctttcgtgcgcccttttttacagaaatacgccggggtcttccgtttttctttttcttttccaacgttctgcgctttttccctccgcgaaaccgatcgaatctcccggaatactttgcttttcatccgggcattctttcttccgtcacccgaatttttttgacgaaaggatgttatgatgaaagactccaagtcctccaaatccaaaaagaagtccgttgacccggcccgtctctgcgacctcgccaacatggccaacgagcccgccagcacggatgttctgggcagctacactggcatggccgaagacttcgagccccccgtccaggacgccgacgacttaaggggctgagccccttttttcggactgcgcgccttcagcgcgcaggggcgtagagggatatgcaagttggccggggttttaccgccgtggcacgacagg

SEQ ID NO: 2688 - DNA, 7991 bp, Unknown
  16S sequences of unknown bacteria
caagtttccaagtatctggttgatactctttacttacacttttatggtacaaaaaaatgacgacaggccctcgatttccggatgtctgtcgtcaatctaatattttttcgtgtcatattttctaatttaaattttgttcaggtcaaaaaatcactttttctcctccggatttcctgcttccaagacctcattccgccttctcagcccgcatttggctctaatctacccggcggccgcggggaaattgacgacgaaacctcggggcagagcgtttcggcgtcaatttcttctgcttttccggaaagggaacaaattagaggcctttccggaatacttgtgagaggggtctgagagagaggtctgtgagatgagtcatagtaactattccattcccagtgcctttgaagcccagtcacgattgattcggaactcgctgcggctccgaagatccggcagcttgtcccgcaacccctctgccatatcctcgtacatgcctttcggaatcgggacggtgcccagggcgcctttggaattcacaacgacaaatagggattctccgtcttcttccaagtagtagaggttggcatcccttaggtccgggttcttgtctgcaaccgcatcactgataatccgcttaaccagttcgacaattcggtcgtccttgccggcatcgaagattcttattttttccatcaattctcgctgagaacccacgatgcggtacaggtacgagtccaaatcctccttcagtacctttgtgatctcgctttccgcactcccaaaatcgcctcgaaactgttcttccaccatttggatatcttcttcctgcaccacgtaatagatcatgatttgatcctccatctgatggtaaagcatcggataatcgatgttgtatgactttccgcagtggggacagatgtattgaaacagcgctccgcttaggagctgttctttcttctccggattcaacacggtgttcacactcttccacatttcaaactcaccggtagttccgcaaaccggacattggatttcttctttttcgcacatggacatagggcgccatcctttctttctttgactctgattacgaacgtaatttgtattgtgtcttgagtgcattcatctttgcatcattataccccactatgccatccttttgcagccttcccagtacaatccccggatctcggtgaatgctttttgaaaaatctctaattgactgcggagagaaaatctggtgagcaataaattcatcgtactgctgtgacggaattaatcgatctcttgcatattcatcggccagcttttcgttttcgcccatttccatgtcaaaagaaacaccataatcacccctcagtatatgtccgatttcatgaaatagcgtaaaccaaaatgtatctgcatacaatctcctgtcattcaccatcaatacgatgctatttccgacttttttggtcgctccgtttattctagagcccgaaatattcggcagtattacaaagatcacacctgcgttgaaaaatgctgccttaatcttgtcatagaaatccgtatgactttctgtgagagtcagtgcataatcaacagcttcttcaaaatcttttttgttgaatttaggtgcatcggcatggagtgcctcattcgttgcaatctgcatcataatattcgctttgattgtattcgcctcactcaagttctccgcactgcttctgaatcgagccgccatatccggtctcttaagaacagtcagcgttgcgatatccaagaatttccgtatacgttcaatttgttcatcaatctttcttggaagattcggcagcataaaattgtttcgaaagtacttataatcaattttttcgaaaacaacccgctcctgttccagttcctgatcggacttgaattccacaatcaatgcatcgtaagcttgttgtagattcaaccaatacgcagcaccggttcccatcagacgcgacaatttcatcgccatatcgattgacagactctgctcgcctctgaccaaaaggctcaaattctttggtgtcgtaccgagtcttttcgcaaagtcttcctgtgttagtccgctttcttcaataatttctttaacatagtagcccggatggaaggccactttttctttatattcaatatagttactcaactttcaatgcagcctccgttacaatcagattacctttcgggtaatctgattgtaacaccatactgaaaaagagtcaatgccactgggttttcacaaaaagcaacgaagaggtcgccgcactctgtccgtgcggaaacctctttcgattgcaaattgtttttatgaaattgtttttgtgagattaattctgcatctcgctcttcatggcgcggaaaccgatgaccacggcccacaaatatgcgcaggtttttggaatcatcagggcgcccattaccgggattgtttcggcgaagagaactaccgggaggtagcagccgaagctcagcacgatggtaaaccacatccagcggaaggcgcggtcgttctgcgttttggcgctgcggaaatagagcacgatgatcagcaggcccagcagggcgaacgggatgttccgataaattccccaggccagcggcggattggcgacggtccaccggttctgcggcatcatgcacagggcgattcgaatgccggccagcaggtataccgtgacggttagatttttgtggccggtgatgttgtagcgttcgcgccatacgtagtagatcagcacgtagaaaatcgtcatggtgacggaagtcacccatttgccgattcccagtggaactgcgtagtccccgaaaccggtggtgcacagggcgatgatgcgtggcaccagatggaaggaatcgccggcactcaggattacagccatccatccgaaaagtgtatactggcgggacttgcccccgcttttgcggatcattttaattccaatggtgataacggatacgagataggccacgtcaaaaattggctccataattgcttgcattgtctgcacactccttttttatttttttgctgcacgtacggcagccccatctagttgaacattgttcattttatcttctaaaggaatcccccacgcacgtgggagattggatggtcggtacgggcagcgtttgggtcgcagccggtgcgagcgccgccttggtcgcggccggtgtgaacgccgcgctctatgagccttcggccgctaatatatcgtgcgccgcagcacttccagcaccggtgccggattgtaatcctcacggagcagtgccgccagcatcagcgaaaacagaacgttgccgaaaacctccggcgtgaacgcctcattgaacgcatccttccggacccgcgaatcgtgcttcagaactcggaccagaccggcttgaatgtgcttctgcgtttcattcatgcgccggatattctctttcttcccctgctccgcaagccccagagaatgcagcgccacaaaaccgggatattcccggctcccggcttccatccgccggtacatccaagtgacacaggcttccgtatcctcgtacactgccggattattcggattatggaagatttcagtccagatgctttccaccgtagccgccagcaacttggtcttggacccaaaataattataaatggatcccacggacacgccgcaagcccctgccacggaccggatgctgatggcctgactgccttctttttttaccagctcccggctcacgctcagaatttcttctcgggatgttactttctgattcatgcactcacctcaacttgaacatcgttcattatagtcgcggatgaatcccctgtcaagtttttcggggctcgtgcatcacttttcggccttcgtgtttcgggctggattccggaatctgatgtttttgcttcgattttcagcctccatgcatcaaccggaaattcgtggttgatgcatgcggtgcgcttttcgggactcatgcatcacatcttccgtcccgtcttcatcgagttgatgtttccggcccggtttacaaggctcgtgcatcagattccgaaaaagtttaccctgatttccggagcacgctccttcatgcttcgggttggaatccggtatctgatgtttttgcttcgtttttcagcctccatgcatcaaccggaaattcgtggttgatgcatgcggtgcgtttttcgggactcatgcatcacttttaaaaaaaaagagctgttcggcggacggggtccctcccggtgcccccgccgccggagcagctcttcacaacttttttcctatacctgcgcgcccagcgcccgggcctccgccagcttggcattcccggaaatctcgccgcccccggtcaccccaccgcaatacacggtacccttcagggttgttttaggaaaacaatccagccagccggtcagtccggtctccgccttttcgaaaacatcctccccttcgtccgccgccgtggccaggaagtacacgtcccggaaccggtaatccattggatacattggattcatgcggtcgatgagggttttcatctggccggacatctcgaaatagtagattggcgtagcccagaccaccacgtctgcgggaagcacggcgtccataatcggggccacatcgtctttgatgatacattttccggtctgatggcaggacaggcagcctctgcagaagcggatgtccttgtccttcaaggtgatgaacgccacttcgttgccggcggcctccgccccttcggcgaaggattttgccagcagctccgaattgctgttcggccggatgctggtggaaattacggttattttttttgccatacgtcgctcctttcgattacccgtcttttgcttaccaagcgtttgctatcgagtttcttatgagacagtatacccccgcgaaaaggaaatgtatatattctattctgccggtttccggtccaccgcgaaaatgcaccacagggtgaacagcaaagaaagcaaaatggccacgtggtaggatgtgacgttggcaatcacgctgcccaggattttttcgcagacggtcacgattgccggtgtggtgaactgggcgatgtacagtgccacggaaagggccggaatgacggtggtcgccgcatttcttccggcttttgccgatgccgtcgagataaaatacggcacgccgattccgttggcggctccaatcaggaaggaccccagcagcgttcccggcatcgtgctccggaactgaagcagcagatatcccaccaaaaacatcagtggcgccacgactttggtgcttctgcccaatccttttttcagcttcggataggccagtccgcccaagaagccgaatacatcccctaaagccatgattacgggaattgccgtttccgacacggttcccaggcgggaagattccatggcaaagttggccggataattaaagaaaatcaccatctggaaaaacatcccaacaataaaaggataataattgcgaaagacccctgcggattttttctgttgtccggcttcaatgattctttcgttcggcatccacagcgctaccggtacgatgctgatcacgcccagcaggtacaccaaaaagctcatccgccagttgatcatcgctagcgcaccggcaatcaaggtggcaaccacgccgcccagcatgttcatggccgaagaataacccatcagcacatcctgcttgtcccgagtgaaatagtacgtaatcaatccggtagacatgggcatgatgatacccacgcccacgcccaccagcgctctgcacaccagtaccaaatagatattgctgaacaggccggcaccgcagccgaatacgatgtacattcccagaccgattagcgtcagggttttcgctttacaaatccggcacaacttctcgaaaaacaaattcgtcacggcaatgaacaccgccggcatgctgataatcagctgcaccatcattttcgattcgccgctgaaatactcctgtatcacgcccagcgccggtgccacagcggcgccggccattaccgtcagcaacgacagcgtcagtatcgccaccattaatttccatcttctatgttccttcagaaacattttgacctccttacaaaaaaaaagaaaaagcgcaagtccgtgtttggacttacgcttttcgctactcaactccgttattatatcactgtgaattttgaaaagtcaaagattttttccacaccggctcctgcacgcaccggctcctgcatcgctgcaggccggcgcctattccaaaatccgccggatctcgccgtactcccggtccgggttcttgcgttccgcaatggaaaccagcacctccgaagcggctcggtacagctccccttccggtccgccccccagcaccgaaaggtgcttccgcaccgtttccgcatcgcctcgttccaccggccccgtcagcgcctgcaccgggccgtcttccaacaggtgctttatattgctgaggatcagtggcgtcagtgcctcccgagcacccgcctccgtgaaaccacagtcctgcaagaggttcaagctggtgttcaccaaagcgcacaccaggttgctggagatagcacaggccgcatgatactttaccttggcctcgccggaaatctcctgcaccctcgggcccagggatttcagtgtttttacccagaaatccagggggcccgtgccctcgatacagaagaaggccgaccccagctctttgtaggacgcccacttgtcgctcaccgggaacaggggatggatggaataccccgtcgcccccagagcctcaattctcgggaacgcctcctctgcggacaaagccccgctgcagtgacagatttttttgccccggaggtccaacccgcggagggtctcgtagacctcccgaatcatattatccggcacggtgatgaagatcgcatcgctggcttccgctaccgcctctgcgctgtcgaagcacgcgctttcggtgaaatccgcggccgcctgcgccgcctcccgatgccgattgtagtagccggtcaccgtgagtcccccctcgcgaaaaaatttccccagggagacacccacctttccggctccgataaaaccaattttcgtctgcattttgcccgtccttccttatcccagatatttctccaggagcaccatgcttacgttggacaagccctgcagctccgtgttcacgatgcccacttccgcgtatcccagcttccggtacatcgcccgagccaccgaattccattccaacgtatccattcggcaggctttgcagcccgtcttccgggcatactcctcataaaaacaaacgaacgccttgccgtatccttttttcgaggcggccggggagaccaccagggtgtggagaacgcacacccggtccggcggcaattcgtgcacccaccggccttgggcataggcctccgcctgatcttgattgatgatgcctgcgcccacaacccggcctttatcttccagaacgaacagctcccctcgttccaaagccccctctgcggtggcccgcgtcggatagattccgcgaatccagccgatagtcaacttcccgttctcctcttccgtatgaatatcgttataaatctcttccaccgcggaaacgtccgccgcacttgcttttcggaatatcataattcgctcctatcactaaagataagagcattatatcacagataaagggcggaaatcccgtgaatcaggtcggccgccgggccgtactttctgaatttcaggcccgggagtttgcgtacggaaaccgaatttattggctttcccggccggcgtacgcaaaccccgctggcgttcgggccgccttttcccaaatttcaggcccggcgtttgcgtacggaaaccgagttcattggctttgcgggccggcgtacgcaaaccgcgccggcgtccgggccgccttttcccaaatttcaggcctggcgtttgcgtacggaaaccgatttcattggctttgcgggcaggcgta

SEQ ID NO: 2689 - DNA, 22844 bp, Unknown
  16S sequences of unknown bacteria
cggtcggcacagaaggatcggtcggcacagaaggatcggtcggcacagaaggatcagtcggcacagaaggatcggtcggctcggtcggcacagaaggatcggtcggcacagaaggctcggtcggctcggtcggagctgccggaagaacaggaacaaagtcaaacgttacgtttgtcttatctttgtcatcgcttacgagtttggtctcggaaccgaatgtaatgtcgtttgctgtaagagccctgtcggatttaatctggaatttgattgcaccggtaagtttgttgccaaaagaaccgttcgggttacctaccatgtactgaacattgcccttggagtttgcgagaacaacgtgaacaattctttcagcggtaagataaacgagagatgcgttgttataacccttggaggcgctgagcgcaatatctccgaaatattcatcttcatctgcgaattcaacgaacgaaacaccatcgccgagttttacctgaagagtaaagccgctgatgggggtcgttgcactgatgtctacggaaacatcgtaaacaccgttaacgggatcagaaacgttaatcgtgaaagttgcatccttttcatcagccgaactcataacgacaaacgtcatacccataacgactgcaactaccatgaaaattgccaaaaactttttcatgtttgagtaccttcctttaagatagattttgccttttaggcatttttgtctcctgcgtactacattaacagcgacagccgccacgcagaagacgcgctgtcatttttaaataatcggtcttcggatttccgtagagttgcgctccgttccctgcaaaagcaacagaaaatgcctttaacctcatattacgcttacattatatatcaaaattcgttgattgtcaagcattttttatgacatttttatgtgttcacgggtttttcaaagatttgtttggtaaaaaacggtattatggtcgatttttggaaaagttcgatttttttacacatttggaacgttgcgcggcacattaagtcggcaattcggttatcttttttgctacaaaatagaatatctgcattgcgtccgctatatcgacctctttgtttttatccacgtttgcggcaaaaagtttttcattcggcaataatttttttctcgcaacatgataaaaaacgagcattgcgtcggatatatccgtagatccgtcgccgttgacgtctcccggtatgcattgcggcggctcggaaaccgtgaaatccgatgccgtgttccttgtcgctatcggaacatcatccgtgccgacgagttctttcacttctatatctattttgatctgtgtcggatatgcatcgagagccacggtgacgggaatcgtgaaaagaactccgtcttccgtcacattcttaccgctgacgaatccgagcgttacaactccttgtttgcagtctgtttcaataatcttaaattttgaaccgatattgccgacggatatatcattttcattcacggaaaaaatctcgggatcataacgtacaaaaaggatcccgtttgatattccggggttgtttttgaccgaaagtgtaagagttctttccgttcccgcatagccttccgcgtcggaaagccgcaattcgcattcagccgcatttgccgaaacagcaaaagacatcatgagacagacgcaaaggcaaacggcaaaaaacttctcggcgcatttttgcattttcattttaattcgtcctctaacagtgattcaaacgttatctttttcagcgatgatataaggtctttgttcaatattccaattgcgcggcgtatcacgcaaccgcctttcgccccctcgattcctggacgtgaacagcaccccgattcggggtcgagacaggcgtttatgtacagatcgccgtttatagccttaaatacatcgtagattgaaacatcggaactcgggagcgttacaatgtatcctccctgattgcccttgacagaggaaacaagccccgcagaactgagttttctcattatcttttgcgtgaacagcggcgttacgcccgttttttcggaaacctccgcaacggtcattttggaatttgttttgaataattcatagactatgcgaatggcataatcctgttcttttgtgagtttcataccgacaccattccatacttatttggtatggttttattataccacaacaaaactttgttgtcaatatgttttctttctttcggtttcccgattcgacgatttttttgcggcagttgatatacaatatatgaaaaggaggctttgatttatgacaacaggtttcaaaaacggaacgttgtccgtttttttgaaaggggagatagaccatcatcgcgccgcctccatacgcgaagagatagacggcgcggtgcgtgcgtatctgcccgaaaaactcgttcttgatttcggcggtgttacattttgcgacagcagcggaattgctgttgtgacaggcagacgaaaactgatgaaatccgtcggcggagaggttgaattgacaaatctgacacgcccggtcgaagcggttttccgtatggcaaatcttgaaaaactcgtaacgataaggagagatgattgaaatgatgataaattccgcggaactgacatttataagccgttccgtaaacgaacgctttgcccgcatgagcgttgccgcttttgccacgcaacttgacccgacggttgaagaacttgcagaaataaagaccgccgtttcggaagcggtcacgaattgtattgttcacgcttacggttccgatctcggaacgataaagatgaaaatgcaactgtttgacagcaatgttttgcgaataaccgtccgcgatttcgggcggggcatagacgatgtggaaaaagccatggaaccgtgtttttcgacgggggcggacgaccgtgccggaatgggctttacgataatggaaagtttttcggacaggcttcgggtttcctcaaaacccggaaagggtacaaaagttgtgatggaacgaaagatagtcaagcgtggctgatatgcagacagacgaaaaaacttttacatactcgaacccccgttcggaggaagaacttcttctgaaaaatatgggattggttcacagcattgccgcgcgctttccgtattcgggcgttgaatacgaggaccttgttcagataggaagcctcgggctactgaaagcaataagaaattttgacgaatcaaaaggttttgcgttttccacttatgccgtgcccgttataacgggcgagataaaacgttttttgcgcgatgacggcgcaataaaggtcagtcgcgcagtccgctcgaattttgtgcggataagagcctgcaccgaaaaactgcgcaatcttttgggcagagaccccacggtttcggaactcgtcgaaaagacggggttgactcttgaagaagttgtggaggctcttgattccgccgcgcgccccgcatcgcttgacgagacgctttccgatgacggtgaccacacgctggctgataccgtagcgggcggcgatttttccgcagacctcgaaaagatagcattgcggcagggaataggcaaactttgtgcggaggacagaaaacttattacacttcgctatttctgttcaaaaacgcagcagcaaactgcggagatgctcgggatgagtcaggtgcaggtctcccgcagagaaaaaaaaatactcgaaaaactcaaagaatacgtctgaaagtattcctgcattttccgagaaaaaaccgacgccgcggagagcgcggcgtctgcgatcgtccctgtgcgttcaagcgacagtccgcttgtgcgttttgcgggaggatcgggtttgctgttttaagactgaccgaagcgtcagtgtcggcattatatcatactattttttacttgtcaatactttttgtcacatctcgtctcacaaatttcgtttttaggtattgacaatggcgtttatttatggtaaaatacttctgctgacttgaaaaagcggaatgtacggagaggtgtccgagcggtttaaggagccggtcttgaaaaccggtgactcgcaagagccaagagttcgaatctcttcctctccgccaaaatacggagaagtacccaagtggtgaaggggctcccctgctaagggagtaggtcgtgaaagcggcgcgagcgttcaaatcgcttcttctccgccaaaaaagaaagagcccccgtttatgcgcggggcgtttcttttttttcgctgaaaaagcataaaacgcggaaaatatttatcgaaagggaatgtattatgaaaaccgtaaaaaagctgttgtcacttattattgttctcgctctttgcctcggcgttttctgcgcctgcgcgaataagggcgaaacgcctgcgaccgccgctccgacgcagacgacctccgcgccgaccgaagcggaagaaaaggtcacctttgttttcgctgttacggacaaggacggaaaaacagtggaacacgaaataaccacgtccgaaaaattccttgcggacgcgcttatagagcagggaatactgaaagccgatgaaaaagagtccgggatatatacttcgatagacggtatggtcgcgtattgggacgatggcaacgcgtggtggaagatcgttaaggacggcgaaatgacaaacgatggtatgaacgaacttcccatcgcgaacggcgatcgctatgaggcgatttacacgataggttattaaagcaaatttattaaaaagaaaagatgcggtttcgaatgagactgcatctttttcttacgcatgttttcttattttaccagtacgaatttaacaagacctatcatctctctgacccatgctgagcattgaagcgcaaacggagtgtgcgaggaaacggcggtcggattaagcccgaaacgctttgcgtaaagtgcgccgcgcatttggtgatatgattccgttacgataacaatgtttttgtcaagccctcgttcctcaattatctttgccgaatattcaaggtttgtatctgtatttaccgcctcgttttcgcatattattctttcggagtcaataccttttttgacaagttcgttttttatacattcggcttccgttatgttttcgccctcggctttgcctcccgttgcgatgcagacggtctgcgggtgggctacaagatagtcgtaagcggcgtttattctcgatgcgagagactgcgacgggtggtcgccccgtacctgcgagccgagaaccacaaccgtgccctcctttccgatcggcgtgttgaactgtgccgaaacaagaaatccgaacatcgtcagcgccgttgtcagcccaatgaagaaaaatatccaaacggttctcatcacggcttttgcggctttcggaaaaattttatatgcaataattttcagttcgggaacaaaaaacagataaagccccacgaacagcagcacgctgttcgctattccgaagatcccgtatatcaatgtcggaacaagcccgagatatgcccacgccgctcccgctatacggaaaaatcgtctgcggcaaaggcacatttcgttcagcttcggcattttttgcttttttacatcgtcgtatattaccgcaaaaagcaggaatatcacggcaatgagtatcggaagaacaaccgatataaacatttttgtctccttaggcgagtatactaaactatattctatgtccgaattataacatatttttctgcgctgtgtcaatcgggttaatacattcttaatcgcgctttcacatttttataagttcccgaatataatgtataacggaaggggtatgcttaatgaaaataacgaaagaaagtgcgataagcgcgggacttttgctcgtgtctatgataaatcaggtactgacgatgttcggtcattcgccgctgccgcttgaaaacgacgcggttaaaaatgttgtttcaacggtttttttgataggaacaagtatttacgcttggttttccgacaacccgatatcaaaaacagactgcgcctgcgcttctttgaaaaaagcgttgcgcaaaggtcatgtcagcgaagaaaaagtcaaagaacttatcgcttggatagagtccgacgaacttgcctcggatgaggaggcgctgaaaaatgaagaaaccgacgggtagggaacttgcggctttttgcttggaaaaaacaaaagaacactccgtttatatgtggggcgaatacggcagacccgtgtcggaacgcattatttcggcaaaggcgaagaaatatccgttgagatataccgaaaaaagacaggaaaaactccgttcgcttataggaaaaggatatgtcgggtgcgactgcggcggactttacaagtattttctttggtcagacggagggcgttcaccactgcgctatcgaaaagcgaccgaccgtaacgcggcgggaatgtattccgctgcgacgggacggggaaaagcgtcagccttgccagaaatcgagggacttattctgtatatgcccaatcattgcggcgtatatgtcggaaacgggtatgctgtcgaatgcactctcggcgctttcggcgacggaatagtcaaaacttccgttaaaggcagaggttggacgcattggctcaaaatgcccgaaattgattacgaagaggggaacacacctttgatactgccgaaaaaaaccgttgacacggtagcctttcgctccgtgccgtctgttacgggcggaaaacgccatttctatattcccgaagatacgcttgtttccgttattcgggaaaacgttgcttccgcagacggttttgagtgggacgaagttgaatgtgacggcgttaaaggatattgtgcaaaccgttatttgcgccgtgtggaatttgcgaaaaccaaaacgacttccgatgctcttgcactccgctcggaaccgtcgtccgttgcgggagaacgcttcttttatattccgagaggcaaagaggtcaccgttcttgaagagaacgtcgcttcatcggacggctattcgtgggataaggttgtttacaacgagaccgtgggatatgcggcaaacgaatttctcgattgaaaaattttgaaaattcggggttcgcagcggggtaaaaggctttataatggacgcaggaggtgaaaaaatgaaaaagaactatctgatatttcccatgaaagttatgggtataacccagacttacgacggaaaaacttcgcactatatcagttcgcacggaacgcctgcggattatccgatagacatcgcgggtaaggacaccggcagagagcctttctattgcccatgcgatgaaatggaagtcgtcaaaatcgcaggcgacgtaacgggtgcaaatcacgcgaacggcgcgtggctcgtttcgacatccgaggtcgattttgcggacggaacgcgtgacatctgcacgataaaatttgtgcacatgaacaattccgatttcggcagaaacggcatttacgtcggacgtaaatacaagcgcggcgaacttatcgggcacgaaggcacttctcacgcaagcggcaaccatgttcatatgtccgcaggcaagggcggtctgaaaggctcgggctggacaaaaaattccaaaggttcttgggttataaccacaacgcacggaaccgcgaagcccgaaactcttttctttgtcgatcccgagttcacaacggtcaaaaataccagaggtctgattttcaaaagcgttcctgccgacagcggcgagaaaatcgaagtttccacaggcaagacgaagacgaagaaatcgaccgatgctttggctctgcgctccgctccgtcaacaaaaaacggcgcgaggtatctttatattccccgcagttccgaagttacggtaatttccgaaaacgcggcaaccggcgacgggtattcgtgggattgtattctgtataagaatataataggttacagcgcgaataaatacttgaaataaacactaaaatcaaacaaaaaagagcgtttgcatacaaacgctcttttttatcttattttatgtttaacttacaatgtttgtcaacaccgcaagtccgagcattatagcggtgtagaaaatgaatgacggagtaaaaaatgtcgctttgaccgaacccttttccgctttcggttcatttttaatcttctttgcaaaagatataatttcatatattgcacagcaaagtcctatcagcgaaatcgccgcggtcaatatcaggtctgttcttgccaacgccttttcttcaagtaccccgttcaacagcgaataccctacggaaagcagattgttgcatgcgtgcagtattataggaacgactatcgaccccgtggagtaggcgaaccatccgagtataagacccatggcaaatgcgacggggatctgattgaaatttgcgtgcatgagtgcgaacagcgctgcggaaaagaaaatcgcgcccttgcccatatactgtttcattgttccgagaatcgcacctcggaagaccgcttcttcaagcacgggcggcaaaaccgccattgcgattatccaaagtacggcttcaaagatattatcggttgtaaaagacgcgctttttatcggttttacgatttttattgcattgagcagtcttgcatatacgatggaagtaaatattgccgcaaacataaatgcgaatgtcgccgatgccgtttttatgacaggaacttttttgactggcgtggtcagaaacgatgcaatgctgttttttgcaatcagaagatacggcacttcaaacagaagagggtaaattatctgcgggattatgaaacttcgcagatttgcggatattactccctgcggaataaatcccgtcgcaaaagaaactataatttgcgcgggaatcgaaagaaacagaagcaacgtcagttttgttgccgtgatttttatgttattcatttgtgttttctccgttttgtgttctgatattataatagcacattttttagcccattgcaacaaaacgcttgactttttacgaaaaagatatataatggtaaatataaaatgtattttggagagttttatgagagcgaaaaactatctttatattctgtttccgctgaccgttgtcggcattatttttcgcgttgtcgaattgctgtacggcgttgaagccgaaacgggctactatgtaaggggaagcagcctttacatattcttcaatatatttattcttgcaggcgtcatagtgttgctttcgcagatgatatggcgcgtcaaatcaaaagtcgtgccgaaaaagagcgttatccgcatttgccccgatccgttttcgttttcgggaataatgttcctgctctctgccgcaggcatcgccgcttcgtcttttatcagaatttatacgaccgattcggttataaaaagttttgcgaacggggtcggaggagttacgctgaaaaacgtgttcgcagattttgatgtttggatacttcttgcgggcatactttctgcagttgttcttgttgtttttgcagttgatccgagaaaatgcgtaaacagaacctttttcaatgtgctgacacttgcacccgttctgtattacgcattcagaacacttgatctgttttcggaaaaatcttcgattttgtcccgcgcatacgacagttttacgatacttgcgctcggttttatgacgcttttctttatgagttttgcaaaaatggttgtcggaatgccgtcaagaagaactctttgcggcttcggttcggttgcgttcttcctcggacttatccgcattgccgaaacggttctttatttcatcggctcaaacaagttcggcgttgacgttgaacccgcgaccgcaatttccgatataatcgtcagtctttgtgtttgcgtatttcttctgcgtctgcacgcacttcccgaaacaagagaaaagccgatcgcgaacaattccgataatgcatcaaagtaaatagaatcaatacaaaaaacgagttgcccgcggcaacccgttttttgtatatataaggttttatctgaccgaatcggatttttttgcaacgtaatagaatattttcattgcgtcttcaatgtctatttctccgtcatcgttagtgtcgcaacggcggcactgttcatctgtcatcaattctttttttgcaacgtgatagaagactaacatggcgtcaattatttctaccgttccgtcgttgtttgcatctccgcaaaggtacgcttccgctcccgtatctacggttgcaatatctccgataatcaatgatgttccgaagaacatattcaatatttgggtaggcgaaagacttatttcttttccgttaagaatgagttttacgttatcggaaaaacggtagccgtctttaaccgctttctccgtcattttaagagagaggtaataagtgtatattgagttttctttgaataccgtgggtgattcgggcagtaatggattgctcgatatgtcttccccgtcggatctcatccaactttcctcgtctattgtaaatatatccgcaaactcttcggcgggtcttgccgtaaattccgcttcatctcctgctttatatgaaagtctcgcgccgtcaatttttattgtgtctatcatttttacggcaggcgcggtaaaacggataactttaactttttcttctttattgaagtcatttattccgtcttgcgacagatcccacggagaaaatgttgcctcttcgggattcagggtggttccgacgcgtataaattcgtagcggtttgtagtgtaatcgtctacttccaaggctccgccctctcctatgagtgttgctgttcctccgtaatagtgaagcacagcacggcattcgccgcttgcgaaattgtcaaagtaaacggcttttccgtaagatatattctcgctcttgcaaacggccgtcagttcgccgcccataatataaatatctccgccctcggtctcaatcgctcccgaattttgggcacgctgtcccgatgtgacggtcatctttccgtcgtacatacgaagcgctccgaatgcgctcatttttatgggtgctctgttttcgtttccgataaccgtcagttcgccgcccttcatattaaggtcggaagcaaaaatcccgagtgaaccatctatggggtaaacattgattttaccgctttcaaccgtgacttccgcaaaagcggttcccgtaattattccgaagccgctgcctgttccgccccagccgttttccgctattccgcccgcatatatgtcaagcgtgccgtcgcccgtaacggtcatagaggacgcttcctcaagcgctatgccgtaatatacgcctttgtcttcggaacttatcttgtttgtacctttaagaataagcgttatgtctctgtttgctctgataccgaacgttctcggcatggtttcgtggacgtatttgccgagatttgcgtcatattcctgacttgtcagcagaaaactgccgattccgccgttcagactgacattttcaagttcgagaacatattcgtttccgttctgcgtcagcattgccgtgccgccgccgacattcacggtttttccgagattttgcgttaaatctatctctgctccgtcgttgccgagttttacataaggcgcggaatttttcttctcaaatttgtaataagcaatcgcgacaaggtcgttttttatgtatacggaagagcattttttaccgttcaccgttaccgacaggtcggaatagccgctgaaatatgcacttccgtaggggagacgcatctccaattccgcttcaaacggatattcgtcaaattgcaaatcacaagtcgaaatgaagaacggcgtcgtataaaccgttaccgagtatcccttctctttcgtaaagtcaaggtatctgccgcccgaaatattgcagtccgaatagtctatttcgatatcgaaagacgttgccgcctttgcgggacgtttgtattcaaatccctcgctcatgtcagaccacgggctgacattgcctgttttatcgtccgttcccagttcgacctcgatggctctggctttgtagtaatatgtaccctcgcccgaagagttgaaagtcgtcgtaatatccgcaaggtacgaatccgagtagaattcatctataaaatcgtcttccgtcgttccgttataataaatacggaattcataatttaccgaatagtaccaacttgtcgcttttattgggttgtggtatttgtcccccgcgccgatacggatcatcccggcatattcggtttcccaccatgtgacgggttttgtcagcacttcgttgtcttccgccatgaaaacagtcggcataagcgctattgttgcgcagacggtcaagagcattgccaaaaccttttgcaaaaaatgttttctgaacatttcctattctcctttttataagtttttacacttttaatatatcatgaaagacaagaaacggcaaattattttccgaattggcaattgccatataggaaaatgctatcttttttcacaaacatagattataattaacttgaaaatatcttaacgatatcttttataaggatgtgaaatgaatgaagttcagcgaaaaattgaatgagtatatggaaaacctcgattgttccgcaaaggagatttgcgacgcgtcggggctgtcgcaagcaactttgagccgttaccgcagcggggagagaacccccgatataggaacggactcttttgaaaaactttgtgtcgccattgctgcaattgcacaatacaggcttgcgactgatataacggaagaaagtgtttcctccgcatttctcggttgtgaagatatatgcacggttgactttgagcgtatgcgtcttaatttcaatgcacttatcgagactctgaaaataagcgttccgacgctctgcgcctgtaccaattatgacgcttccacgcttttcagaataaaaaacggttcgcgccgtccgtcagatccagaatcgtttgtttccgacatcgcgggatttataggacgggaatattcgtccgccgaaaacctttcgtcgcttgcttctttgctttcctgctccgttgcggatttatcggacatctccgcaagatgcgaaaaaatccgtgaatggcttatagcgggtgaggggtcgcctgtcggtgaaatatcccgttttctttcggcgttggatgagtttgatttgaatgaatacataaaggtcatacatttcgatgagctgaaagtacctaccgttccgttcagtcttcccacaacaaaggtttaccgcggactgcgcagaatgaaagatgcggatctcgattttttgaaagcaacggtcatttctccgtccatgcaagacgtgacgatgttcagcgatatgccgatgggagaaatggcaaaggatgaagactttgcaaaaaaatggatgttcggcatggcgatgctcctaaaaaaggggcttcatctgaatatgatacatgacgttgaccgtccgttttcggaaatgatgctcggacttgaaagttatattccgatgtatatgacggggcagatatcgccttattatcttaaaagcgtaagaagttcgggatttttgcatttactgaaaacgtcaggggcggcggctctgttcggaactgccgttgcgggacaccatgcaaaaggggaatatcgcttgacaaagaacagggaagaggtctctttttataatgaaatgtcccgtgacctgctgaaaaaggcgttgccgctcatggatatttaccgcgaaagttcatcgtcttcttttcgcgcatttttgaatacggatgctgaaaaaccgggaaaaagaagaaatatcctgtcttctcttcctctgtataccgccgacagagaatttttggaaaagtttctgtcttcccgcaatgcggaaaaagacgaagcggaaaatattttgacagccgccgcggaacagcgcgccagagttgaaaaaattcttgaaagcggagagatttcagatgagatatgcgaactttcggaagcggcgttcatgcaaaatccgatgactctttccgcgttcgattcttttacggaaaaagaacttgtttatacttatgaagagtataccgaacatcttgcaagaactcgggaatttgcaaaaactcaccccaactattccgtcgtttcttccgacggctttgctttccgcaatcttcgcataagcataaacgagggaaattgggcgatggtctcaaaggaaaagtcgcccgctatacattttgttatccgtcatccgcgtttgagaacagccatagaaaacttcgttccgcctattgtcgaaaagtgaaaataagacatttgaatgcaaaaacacgcgaggtcttgcgccccgcgtgttttgattttttaagtcagtctttaattatgaatttgctgattttttgtcttaccgcatcaacttcgttcgcgtccgaagagtttatgcgcagttcgagcggcttgctcagatccagactgaaaattcccataatggattttgcatcgataacgtatctgtccgcggcaatatcaatgtcgcagtttgcagttgttactgcgcttacaaagtccttgacgtcgttgactgacgcaagcagaattttttcggttgtcatttctcattctccctcattctcatagttatttcctgcggtgtcggcataacgcgcaacgcgcctttgcgctccgttactatacccgccgccgtgtttgcataagtcagcatttgataaagttcgtcttcggaaaaatcacgaagtccgtgttcgagtacttttgtaagtaccgcaccgcaaaaagtgtctcccgcgcccgttgtttctattgtttttgcctttgcaatgggcgcgtatgcgtaagcgttttccgaataggcacggctgccgtcttttccgagcgatacgagcagcagtttaatattcggatattcgtttttgagtatctgcgccgctttttcgaggtcgttttcgccggtgaaccacgcgatttcgttgtccgaaattttgagtatgtcgcattgtgaaatgccgtaagcgattttctcttttgccgtttcgaggtctttccacagcggtggacgcagattcgggtcaaaagatattattgcgttacagcgttttgccgtcgccaccgctttttttgtcgccgcctcgcacacgatgtgcgtcatcgaaagcgaaccgaaatgaaatatcgtgcagtcttctatcggtttttcgtttacgtccgcttccgaaagcatcatgtccgccccgggatttctgtaaaacgaaaactctctgtctcctccgtcgagcgttttgacgaacgccagcgttgtattgacttcttcatccgttaaaagcccctcggtgtttattccgacctcttcgaccgccgctttcagttgtctgccgaaaatgtcattgcccactttgccgataaacgccgtctttttgccctgtctgctcatcatcgaaagcacgttgcacggcgcacctccggggttcgcttccataagagggtttccctgtgaacttgtaccgttttccgtgaaatctatgagcagttcgccgagcgcacagatgtcaaatcttttcatgattattcctccgtttcgcagggaatgaatatttccgcattgccgattattttatcggaaagtccatatacggtgttcgttatgacgtattcgcctccgttgacaaaaacttctatcatattttcatcaacgaatatttcaagttcggcagctgccggaagttcgggcgtctcaaaacgtgtttcgagttctgcattctttccgataacggcgcttctgtccgccgtcagtcggcggtctttcatctccaactcatatccgccgacagagagtctttctccgtcattaagcgtcgctttgagcatatatgcgcctttgggctcagaggcctttttcgtaaaaagatttctgacgtcggggtgcggggtgaagcagatatgtccgtttttgatttcgcagacacgcggagtgcagaacattccgatagttccgttctttgcgggtttcggcatacggagccacgcaataacggttcttcttccgtcacggtcaaccgtgctttgcggggcgtaaaggtctttgcctatgtcaagcaacgcaaagtttccgtccgtattcatcgagcaagtcttttcgtcaaacgtcacttttccgcagaacgcctgattgccgagttccgttcccatgggtgaaaatatcagaacatattcgtctccgactttgaacaggtcgggacattcccacatccaaccgaggccgtctgttgaagcgtaattgacaaactcccaatcaagcagatctttgcttctgtaaaaaagcagtctgccttttccgtgcgccgtactgccgagaaccgcatagtaatttccgtcgtttcctttccaaattttggggtctcgtgtgtggttcctgtccccgatattcgggtcggacaggggaggtatcgccgtttttttgccattgaagttgtcaaacgtgtaaccgtcttccgatgagatgtgaagctgcgccgccgtgaacttgtcgtcaatgcagcagtttgtgttttcggggtcgggagtgtcatatctcacgcccgtataaagtatgtgcattttgccgtccttttcaacggcgcttcccgaaaaacatccgtcacagtcgtctgtctttgtcggaaacagcgcaatgtcgagatgtttccaatcggtcagattgcggctgactgcgtgtccccaatgcattctgccccagcgcggcgcatacgggaaatgctgatagaacaagtggtattcgcctttgtaatatatgaatccgttcgggtcgtttatccaacctctcggaggtctcagatgtatttcccgcattttaacgcctccctatcaaacaagacagatttcggattctttgtcaaagaaatgtatcttcgagggcatgaagacaaattctatcttatctccgattccgctgatttcatattttgaaactcttgctattgtctgcgctccgccgaaagtgaagtacagattgttttcagttcccattatttcggtgttttccacaaccgcactctgttttgaagaaccgaacacatcgaggttctgtgcgtcgagtttgatgtcttcgcctctgattccgagaatgagaccgtcctttttaccgccgagcttttcgatgatgttttcgggcagttctattctgttgccgtccgcaaaaacaacagtgttgccgtcaatcgtaacgtcaaagaagttcatctgcggcgagccgataaagcccgcaacaaatttattgacggggtggtcgtaaagttccatcggcttgcccacctgctgaacaaaaccgtctttcatgataactattctgtccgccatggtcatcgcttccacctggtcgtgcgtgacatatatggtcgtgcttcctatttgacggtgaagtttgcttatctcgtttctcatgctgacgcggagttttgcgtcaaggttcgaaaggggttcgtccataaggaatactttggagtcttttactattgctctgccgagcgcaactctctgtctctgacctcccgaaaggttcttcggctttctgtttctgtattcttcgagcccaagaatgtctatcgcccattcggtctttttctttatctcgtctttcggcactttcatgttcttcaaaccgtaagaaatattcttttcaacggtcatgtgcggataaagcgcgtagttctggaataccatggatattcctctgtcgcggggaagaacatcgttcattttctttccgtctatgaacagttcgccgcttgttatgtcttcaaatcccgctatcatgcgcagcgtcgtcgattttccgcagccggacggacctacgaacgcgataaattctttttcgtttatttcaaggttgaaatccgtgaccgaatttttttctgcgccggggtattttttgcaaagtcctttaagttgaatgtaactcattttttttaaccctccttggaacctgttgaaacgacgccttcaacgatatgtttcgagaagaacgcatagattattattacgggaattgttatcagggtgatcgccgcaagcgtctgacccatggtcgtgttttcgtttgcggttatggcgttaagtcctatctgcgccgtgagcagatcgcttgaagtgaacgtcagggacggccagagatagtcgttccaaacattcaggaacgtgaaaacgctgactgttgccacaacggttttggacatcggaagtaccattgtgaagaagtatttgacgggaccgcatctgtcaagctgtgccgcttcgtatatatcgtccggcaggctgacaaacacctgtctgaaaaggaagatgttgaacggattgactatcatcggaagaacataaccgattatcgtgttcagaagtcccattttcgctatcgtcaggaaatttatcgtgattatcgtttccgtcggaattatcatcagcatcatgattatcagcagccatttgtccgaaaacgggaactttatctttgcaagcgcgtatcccgcaagaccgttgacgattattccgagaaagatgagaaccgccgcataaagaagcgtgttgcccatgtatttgaggaagtccgtgtttgtgattaccgaaacatagttatcgaaaaatccgttgcccggtgtcggcggcaggaatgcctgaaacgagttcatgtccgccgttatcgcgttgtcgggcttgaaagagttcgctatcatccaaacaaccgggaacagaaacaacagcgaaagcagtatcataacaacgacaaggactattccgaaaaccttagtttttctttttcttctcatgttttgcctccctgtcttttgtcaacgcattttgtataagcgtgataatgataacgaatataacaaagattaccgccattgccgacgcaagacctatttcccagtttaccgtgcccgtctcatatatgtcgtagacgagtgtgtaagttgagttggagggtcctccgcccgtcattatcatcggctgaactatcattctgaacgcgcctatcgtaaccgttacgaaaacgaagatgcacagcggtttaagttcgggaagtgttatatccttgaattttttccacccgcttgcgtgatccatttccgccgcttcgtaaagcgcgggatttatcgcctgcaaaccgccgaggaagattatcatctgataacccatgccttgccatgcgctcattatcgctatcgagggcagcgcctgatttgcgctgtgaatgaacggctgcgggttgaagcccatgtttgtgagcagcgtgttgagtatgccctcgggactgtaaatctgcatccacagagtggaaacaaccgcaagcgacataacaacgggaatgaaaaatgcgactttgaaatactttttgcagtatgttactttgtttatcagaagcgcaagtccgagtgcgcccagacattgcaggggaacgatgatgacaacgaattttaccgtgttcagaaacgaagtcacaaagagttcgtcgccgaagagttttgcaaagttttcaagacccacaaagtgagttgtgttcgggctcaatgcaaaatagtcggtaaagccgtaaataaacgtcagcaccataggcagaaacaggaaaagcgtcaacagtacaagcgcgggaccgaaaaacgccattcccatgattgaatccgatcgccgtttaagcgaaacggggcggcttttactactcattttctggtatacctttcaagcttatcgcttatcctttcctctgcttttgaaagctgatcttttgcgtccattccgcttatagcaacattttcaagcgtctgctggaacgaagaacttagctgcggatatgccggggtcttcggtctcgggcgaccgtaatccctgagttgctcatagagcgctttgtagttttcgtcctcggtaaacgttgagatctgctcataagccgcataggtggacggcattgattttatgttttcgtaaagggtaatgctgctttcgacgccgctcatccatttaacgagttctgtcgccgcttccacattgtcgcattcggaagaaaccgcataagcccaggaacctgtcggcgtatagcgttcgccgttccagttgtctccgactatatacggcgcaacgccgagttcgatgtcgggataacttgtatatatcgtgttaacttcccatgcaccgtcaaacttgaatgcggcgcgtccgctttcgaacaggttcgaaatgggaacggaagacatatatcccttttcgttgagcgttttgaaatagttgagagtttcggcgttcgtgtccgaatcaaaaatatcttttgttgtcagcccgtcttcgcttacaaagtcaccgccgttcgaccaaataaacggcgcgtaataatatatcgtcgtttcgcccacggggaacgtcatatcaagcgcatatccgtttttctccgccattatgggcttgagtttttcgaggatgtcgagaaactcggagaaagtccacggattgtcggaagagggaacttcgatgcccgcttcgcgcaggatctgtttgttgcaataaagtcccacgcttgattccatcgcgccgagcgcataaagtttgttacctattgtgccctgcgtcagaatggagttaagataaacgcttcgttcctcgtccgtcagcggcgccaacggttgaattatgccgtttgccgcataagccgcaatgttgggaccgtctaccgtcagaacatcgggcagatttcccgaaaggacggaagcatttactttgtctgaatatcctccgccgctgtcatttctcggaatgaactcgacgtccgcgaaatacttgccgttgaaatgctcgttgaaactctgtaccgatttcagataagcctgtccttcgggtgtttcttcgatgatgtgaacccaaatgctcagatacgtttcgccctcgtcatagccgtcaatatctcccggtttcacgtttttaccgcaaccgaaaagagccgtcagacaaaataccgagacaagcaaaaggctcagatactttttcattgcaaccacctcttctgctgttttttagtacggaaaaagcgttttgaattttttctccgtatccgttatcaatttgcgtaaccggtaaagtaaccggttactttacaactgtataatacaatatttccgtgcaaatgtcaagggggggtcgtgcggatttatagaaactcacaataaatgtccgccgcctttgtggaagatttacaaaaccggttaagttaccggttacatattgcattttgtgggattttgtattataatggtaagaaaggaagtgacacgatgaaaacagaaaagaaagttacgtttgcggacatcgccgcatttacgggcttttcaaagaccacggtgtcgagatatttcaacgaccccgattctcttacggaagagaatcaggcaaagattgccgacgcacttgaaaaattgaattacaaagaaaacaaactcgcaaaagttttggcgaacggaaaaaccgaaatagtcggcgttattattcccaatctttatatgcattattattccgacattctcggcagacttataggcacttacgagaagttcggttacaaattcatcgtcttttcgggcaacgacgaccccgaagccgaaaaaaactatataaccgagttgctttcctataatatagaggggcttatcgttttgagccataccataccgtccgagcagctttgcaaacttgatattccgcttgtgacgattgagagggaggaccgacacgttttcagtgtcaataccgacaattatatgggcggagttcaggcggcaagtctgcttgtaaagagcggctgtgatatcgtaatacactttaattcagaaataacggaggacgttcccgcctacggcagaataaaaggttttaaggaattttgcgaaagcaacgggatagatcatcgcgtagttctcaaggatgcaggtaatacatttgaagagaacagtgccgttatacagtcttttttcgatgaccttgaaaagcaatatccctacaaaaaaatcggcgtgtttatgtcaaacgacacccacgcgaatatacttttgaatataattttccgtaaatacggcaaactgccgtcccgtttctgcattatcggttttgacgactctcctgtttcccgtgaagcgataattccgttaagtacgatagggcagcaggtcgatgttatggcatcctccgccatggaacttctgcttatgcagataaacgaacgccgcaagagtgctcccgaaagacttgttcccgaacataggataataacgccggttctcgtcaagcgtgaaaccgcgtatcccgacagggcaaataataaataaacgaagagggaatgtaaaaaaggctgaaaaataaaaaaagagcaataatctaaaagaaaaacaaaacgactcgaaacaacgatttttgttttttaataaaacaaaggtttaatacgcattttttgctgcggacgaatctcacctctcgatgaataaatatactcctttccattctgaacctttttttctatccccaaaggagctgtaaaaacgtgcgttttttacatcccctttctgctataaaagaaatttataaaatgagaaatcatctgctaaaaaaagtggcacaaaaagtggcacaaattagtgcgaaacaggggtacatttgctgctctgtgatgcacacagagaaaagaaaaaatcccataaccacaagtttttcttgcagttatgggatttttgctttggtgactcgtacgggaatcgaacccgtgttaccgccgtgaaagggcggtgtcttagccgcttgaccatcgggccgcggttgctcctccggctggaggagcg

SEQ ID NO: 2690 - DNA, 6182 bp, Unknown
  16S sequences of unknown bacteria
tcgcgaactgcatcacgctggaaaggatggtcatggcgccgacggccagatcgccgccgtaacgcagcaatgaggagttgaagcagagcacgagtacgctttcggtcgcctgcatggcaaaaggcgcgacgcccagtgcgatgcaaggggcgaggaccttcatgtctatgcgcaggttttccttcttcaggcgcaggatgctcttgcctttgctcaggaaccagacggcccacagggcgctgagcgcctgagagatgatggtggcccaggcagccccggccacgcccatgttgaagacgaagatgaagatcgggtcgaggatgatgttggtgactgcgccgatgcataccgtcatcatgctgatcgtggagaagccttgcgcggagatgaaggaattcatgcccagcgtcagctgcacgaagatggtgccgatcgcgtagatggtgatgtattccttagcatagccgatggtgttctcgctggcgccgaacagatagagcagggggtcttggaagatcagcacgacggcggtcaggatgatcgaaacgatgatcagtgaggaaaagcagtttcccatgatcttttctgcgcctttgttgtctttgcggcccatgcagatgctggcgcgcggcgcgccgcccatgcccagcagataggcaaatgccgagatgatcatgatgagcgggaagcagacgcctacgccggtcagcgcggcagacccgatctctgggatatggccgatatacatgcggtcgaccatgttatacagtgcgttgaccacctgtgaggtgatggaaggcagagccaggatcagcagcagatggccgatcggctctttgcctaaatcaacttcttttgacattttcagtttcatatgcatcctccgttctgaagtggctgatgatgcgctgcatggtgtcttccatctgcgcgatgtcggattccggtatgtcagccagcagttcccggttcatttcggctccggcttgtttcagccgcgcggtcagcgttctgcctgatccgctcagctgcagctgcacgaccctgcggtcgtgtgcgctgcgtgtgcattcgagcagcccgcgctttcgcaggttgtccacgctgcggctgatgagccctttggaaacgcccagcagcacgcaaagctgtgtcgctgtcgtgactgaagggttattggcaagcatgagcaggatggagatctcgctgggcgagaggtcttcgtctgcgaagcgtctgttgagcgctagggcgtagtatctgcgcacctgggagaaatagttcaaaagtgtctccacattcggtaccatgtgatccctccttgattgtttacaagtaaaccatatacagtatagtgctttgccttgcagaaaacaagatgaaaaacagtttttcgtccataaacagccggcgcttctgtggaagggcaagggaaaatatggtacaatgaaaagacgataaaaacacgcataaaacaatacatgacaagaagggagtgagcgtatgaagatcatcgtggcttgtgattcttataagggatgcatgacgtcggcgcaggtggcggataacatcacggcagccatacaccgggtggatccggcgatcgaagtggtctcttactcgatggcagatggaggggaaggaaccgctgccgcgttctgcgacgcgtgcggcggagagatggtggaagcagcgaccaccaacgcctatggccggcggatcagtgcgcagtatgcgctgatcgaagaggggaagacggcggtcatcgaggcggcaggctgcatcggactggccatgcatcctcgggagaaacgcaatccgctcatggcgagcagcttcggcgtggggacgctgatgctggatgcgcaggcgcgcggctgccggcggatcatcgtcggcctgggcggcacggcgaccaatgacggcggaatgggcctgctgcagagcctgggcgcacgtttctatgatgagcatcatcaatatctgtcgccgcaggcggtcaatctggaaaaggtgcgctatatcgatttcaaccggctcaacctgctggaggacatcgagctgacggtcgcctgcgacgtgaagaatcatctgctgggcaaggcgggcgcgacctatacgttcggcaaacagaaggggctttaccctgcgcagctggaacgggtggatcagggcatgcgcaatttccgggatcaggtgaagcgttaccggcatatcgatctggatgcgtttgaaggcggcggcgccgccggcgggatcggcgccgtgctcatcggcctgctgggcgccaggatggtgccgggcatcgagctgctgctgtcttacagcacgctggaaaaggagatcgcagactgtgacctggtgatcaccggggaagggcagagcgatgcgcagacgctcatgggcaaggtgccggccggcatcgcggccagagcggccgcagccaactgcccgatcatctgcgtaagcggtgcgctgggcatcggatatgagaagctgtatgagctgggcttcatcggcgtctacagcatcgcggaccgcgccatgagctttctgcaggcgctggagcaggcgccggcaaagctgcaggcattcatttattcgctcatccgcaccatcgtttccctgcagcgtgattttcggtcatccggatttacacaatgagcgaacaggactataatggggacagaaaagggagggcttgtcatgtcatttgaaacaacggtagacgggattcagatccagtcaaatgaagagctgagcgaaaaggagtgccgcgcgtatatccgctacatccagtcgaaaaaccataatcgcagcattgagcgcatcaatctcgattttgacggcgatgatgtgaatctgggctattatctggaaccgcagggatttgagaagatccgccgcatcaccggatatctggtgggcaccgtggaccgcttcaacgatgcgaagcgcgcggaagagcgtgaccgcgtcaagcacatgtgagaagagccgggagaccggttttttctttcgctgaaggacgatgcagggcaaaccgaggaatgacgcattttgaaataaaagatgaaaaagatttgaaaatgattgcgaaacagtttcataatcgatataatagagtggaactgtgaaagagatgaattgggaagcaggttgttaaacatgaatacatgggaagaagtatactcgctagcccggcagaaatgcgggatctgccgctgctgtccgtcatgcaacggaagggcgtgccggggcgagacgccgggacccggaggaaaaggaacgggttccgcgttcgtgcgcaatgtggatatgctggagaaggtcatgatcgtgatggatacgatcaccggcaatgaagaggtggacacctcttctgatttcttcggcactcctgtatctttgccggtatatgcggcgccgatcagcggcatccggcagaattacggcgcagacatgagcgaaatggattatacggaggcggtcgtttccggctgtgaagccatgaagacgatcgcgtttaccggcgatggaaagatcgacagcatgttcagggaaccgatggaagtgctcggccggcatggcggacatggcgtgccgacgatcaagccgtgggcgatgggacacatggattggcgcgtcgatctggtgaacgagagcagctgccctgcgatggcgtcagacatcgatgccagcgggctgagcaatctgcgcaacagcgccgtcccggtgggcttcaaggatgtcagcgagctgaaggcgctgtgcgaacgctcatccaagccggtgatcctgaaggggatcatgagcgtgaagggcgcgcgcaaggccatgcaggccggcgcggcaggcatcatcgtctcaaaccatggcggcagggtgcttgacggcgcgcagtccggcatcgaggtgctggaggatatcgtcgccgcggtcggcaagacgatgaaggtgttcgtggacggtggtttccgcagcggaaacgacgtgttcaaggcgctggcgctcggcgcagacggcgtattgatcggcaggccgatctcgcacgcggccatcggcggcggaagcgagggcgtgcagatctatctgaagaagatccagctggagctgcgcgaagcgatggcgctggccggatgcaagacgatcaaagagattacacgggacatggcagtctgtgatttttaggaggaagacaatgaatacactggagaacaacgcatttttctggcagaagctggatacgctctacttatcatccaaacttgtggtggaccgcccgaagggaacatgccattacaagtacagcaacctggtatacccggtggactacggatacctcaacgatacgaccggttcggatcaggcgccgatcgatgtgttccgcggtacgcagaagtccaatctgatccaggcggtggtcgtcagcgcagatatcctgaagaaggactgtgaggtaaagctgctggtcggctgcacgcaggaagaggagtatgccatcctggaattcctcaatcagaccgaattccagaaagccatcctggtgcgccgcagcaaggatgtgccggattgggccgtcaacgactgatacgcatgatctcggaagcgattccgggattttttttgcatgttccgctctggatgggaatatagtgaggcagggaggtacaggatgagaaagcttttgctggccgtgtgcctgacgctgctgtgcagctgcagcagcctgggttcggcagaccgcggcgacctggatatggaacgcgccctggcgcatatggcagaggagatgcgcgaggcagatgtcggcgtgctgatgaatgcggaatgcgaagacacccatgtgcttcagcggctttatggcctgcagctgcaaaaaggagaatatgcgctcattcgcggcattcgcgcggatgtgtcccaggaagcggcgatttttaagtgtaatgcggaaaacaggagtataataaaagagaaagtggaagcgcgcgccgccgcgctcagcgccagcgacatacctgtgcagatcggggaaaagggggattatctgtacattgcgatcggcgcggatgcggtatggatgcgcaactatctgaaaggtttgtagaatatgagagtgataaaagaaatctaccggcagtttgactcctttgatggccgtctgtttcgctatgccctcgccttcagcctgctgctggcgatcgcgccgatcctgatcgccctgatcctggtctttcaaaacagcatcatcttgaacgagggggcggcagatgcgctcgttgccgtgctgatccagtatctgcctcgcgacatcatcgtgccctttgtcgagtggttttccagcgaaggagagccgatcggattctgggccaccatttccacgctggccatctccttctaccttgccagccgcagcatctattcgtttttgttgatctcggcccaggtggagaaggtcaaggtgcctgtggtctatatccgtctgcgcgccatcctgctgaccgtgtactttgcgctgtatctgtgtgcgttttattttctggtcgtcgtctttgagcggctgtggctcatcgtggtcgcctttttggccgtcctgctgttcatgtgtatgtaccatgcgctttcgttttaccaccggccgatgatgtatggcatcgccggatcgctgttcagcgtatgttccttcgtcatcctgggcgctgtattgaccaagatgctggagacattcacttcttattccacagtatatggaccgatggcatcattcatgactttgttgttgtcaatctacatcatcgcctgtattatatatttgggattctgtgttcacatcgtactggaagagacagcggatgtcagcgaatgtgaactgaagagaggaatattgctcaggctgtcagtgggcgtcctttccagaataggacgaaagagagggtcatatgagagtaacgataaagaaaatggggatcaacggtgaaggcatcggctacatcgaccgtcttccggtattcgtgccgggcgctttgctcaacgaggaagcagagatcaaggtgatcgagcgcacacagcgctatgcccgtgccaaagtggaaaagatcatcaagcgcagcgacaagcgggtcagaccggcctgcggcatccagcatcgctgcggcgcctgcccgtatatggtatgtgcc

SEQ ID NO: 2691 - DNA, 12296 bp, Unknown
  16S sequences of unknown bacteria
gtgtaaaatggtaaaacagaaaaaagtatctcccttttgatttcatggatcatcggatctgcgtatgctgtttatttgctctcttattttggtgtcgcaatcggcggcagtgctgacacggcagaagccgtcggtgccagcattgctgctctggtcacatcgcatatcatttgtgtctgtctggcagttattttcaacatcctcagttgggctaccaacatccgctgggccgctttgtgcggagggattttatattccgttgccctggttttgttccttccctattttttgtttgtcgtagcagaaattgtcctttcctttagtggatttacaaaaatgaaaaagaacccgacccctgcttcatcacaaaatactttcgcgcaataaaaaacaaaacccgggttaaacccgggttttgttttttcatgaatcaccaataacggttttgattatttttcatctcacggcggaagttacgccgctgtgcgccgtattttttctgatttttcacaaaacgaatcagatcaccaccaaaaaacaggaaaaagtttatcaaagaggcgataatcgccgctttagtggaccaatctccgaaaatcaactgaaccgcaaacaaaatccaatccacataagccaaatatttcatcttgattgggaaaaagaaaaacaacaatatctcatgatccggaaacaggaacgcaaacgccaaaaacagtgatagattcaaataagtactggtaccgtaacctgtaaaaaaagcagcgataacagccccaattaacccaaccagataatacaggttaaagcggaaagtcccccagacattctccaatgtactgccaagaaaataataaaaatacaaaaagaaaaacaatgaaataatcgacgtggtgggcggtacaaaaataaaagtgataaatcgccagaactgtccacgcacagccgcttgtgtaaacagcgctaagtatccgctcagactcatgccctgtacagaaaaaagcacatcaccaatgaaaaccgccgcaatggtaataacaatatacaacatcaggttcggaataccccaccgaccgaatttacgatctaacttatccagccaactcattcgtttccctcgcaatctttttcagctttgtccagcaaataccttttaaaatctgcgccctcattttcggcataatctttgaaaatatacagtctgcaaagcgctttatgctcatacacggcgcttttcctgcattttctcctctaaacctttccgctgccgcaaatgaaaattttgcattcagcataaggctatcacagaaaaccatccgaaacgagccattttttcatcgataaaaattttttcccgcaaccctaaactttcttcaacgtcggaaatttttgatttctgggtacgggcgtgaaattattatatcatagtcgtggcaaaaagaacatttctattctgtaaattttggaaagatttctgaatttcaataaaaaaagattgaattacagataatatttattgacaaacgataaatatattgctatactataacaaacaaccaaaggagaaatcggtatgaaattaaacattacagggaaaagcagtctgagttcttttttggaaaaactctgctgggtctttcttttggccgggcttactataacagtcgctcttccatggattttagactactacggccggatcttctggcacgggcggctgggcacagactatgtccgaatcttatttgtgctatacccttctgcccttatggctttgacggttatctggcagctgcgaaaaattttagtaaatgtcaatcaaggcaaccccttttcactggaaaacgcccgacgggtaaaaatcatttccttttgttgcatgatggttgggctactgtttttggccggtattgtgccctcgctgctggcgcccatgctggggctggcctttctgtttttatccgctttatcactggtgctgtcggaactggtcaaacaagctgccatctataaagaagaaaacgatctaaccatttagggaggtgccactgtgccgattattgtaaatttggatgttgtcatggcgcagcgaaaaatctccgccacgcaattggccgaagaagtggggatcactttggccaatttgtccattttaaaaaacaacaaagcaaaagccatccgcttttccacgctggaggcactatgccgtgtcctgcattgccagcctgcagatttactggagtatgcagaagaaaaagattgtcaggagggaaaacaatgaaccaacgtcctatggaaaacaaaccgctttcctcttccaaaccgccagcctatattccaccggtcaaacggcccggtcaaataccgccgctgcagcaacctcctgtccagcctctgcagaagcaaatcctggcggaaaacgaaagccccttacaaaaatcgggtccgcaaaatatgtcagaccctcgaatcggttccaatgtatccacaccccaaacagatccaccggtctcccaaccggcgtctgtctccggccccggaactgttccagcagcgaagcaaaccgtgcccgctgctgccgagggtggttccaaaacttcttccgcgccaaaggattcacaggcgattccgcctggatattaccggccaattccccgcaagcaaagggcggactatcaatatctcgccaaacgcagcctctcttccaagggctcagccgctgttctgttctcctttttgttctgctcagttttcagtgaactagtactttggggaaatcttggcctttccgttttgattttaaccttgtcttatcatgcattcagtttttggtacttttacgattgtaaacgccgtttttcttccgcgtcgttgagcatgaccctacccatctcagtgctagccatcggtctttgcctggcggttagtccatccacctattttattaccgttccctttttcatctgcctgctagctgctcaaacggcacttttggcaggtatgccataccggtcgtttttctcctgggaaacctttgtttctctatgggcacatttggtcgacggtcctttatcctttttagactttccttttctggttatgagaggacgcggaaaagaagaaaaaaagtcaaaaagcttttggaaaatttttctcggaatcgtatgtgcgcttccggtggtagcgctgctgctgtggctgtttgccagcgccgacgcggttttccgcaccggactgcaaaatcttgcccagtggtttagaattgactggacacaccttttttcggatctattactcggctttttgggcggcatttttctgtctgcaacactgctgtactgccggggcgctcttccgaaaaagcccaaccctgttggctgcaaacgctttttggatccgctgtttgtggtccctttcctgggattgatcgacctttcagtgttggcgttcacctttgtccagtttgcctatctattcggcggtgaaaaaggtagtctacccggcggatatacctatgctgaatatgcccgccaaggattttttgagttggctgccgctctgttctttattttcctgatttccctttttgctatgtctttttgcaaaacagagcgtcgttgcctttccaatgcggtccgtttggaactgctgctgctaaacattggaggaggcgttgttctttgttctgccgtaaaacggatgctattatatgtagatgtttacggcctaagcgtcaaacgagggttaactctatggtttatggtaaccgcaggcatttgttttctcttcttggcagtgcgatgcctgtggcgccgctttccattggccaaatgcgtgggaatcgccatcaccgctatgatctgtctactctctttattccccatggatggctttatagcgcaatataatgtcaacgcctacctgtcaggacacaccgaaacagaagtagactattattacctaaaaaacctttctgtttctgccattccagctatggtggaattgtatctgcatgagccttctgacgatctggcatgggccattgaccggcagattcaaaaaaatgaacgccggcatcctatttggggatggacagcagaccaaattgggattcaaaaaagcatccgtcttttccgtcaggcaaagggcgaaatctcccgtgatgccggtagttggtcttaacggtacagtcggctccgctgtaaaaatctttttccgccacgatttctgccaacaccgttttttcaaaaagcatcgagagataaattgtaatcggtaagaaataggagggatacatacagaaatgggaacaataattcttcataacatagtttctcttataatgatctttgctttcatttttgtcctaaaaagtgttcgcaaaagtaatttcagcaaaaacaagcaacttatcataaaagtcattggtgccattttgatagtgtgtgtggtagtgtatgtgctttttattgatgcaatagcagttgggattataggactggtcccgaactgacaaattacactgcggacgtagcaaaaatcaaataaaccactatttatctagcttgccatctgtgaatatacctcctttcattccttcgacgaaaggaggttattgatatcctgaatcagtccaaaaggtaaaaggagcaaaatgatcaccacttgctgtgcgaaattcgcattttttgccgcaataacaatttccgatttgcaggactttccaaaaccggacgaaaaagaatcagatcagaattctcttggctgatcgggattgctgctgcgctttttctgactttcactcttctgtccatgtcacttgcctagtcccaagtaaccagtacacccacacgaaaaaagggcctgccaaaagcaggccctttttaggcagtgcattacagtgccagatttttcgcttttttgggggagttgagtcaatttttttgtcgcgcccgcaaaccctatgagcgggaagtttcatcccgccaaaaaagttctatcgccgccgccaattcctccggtgcgtcaagattggcttcatgtcccgcatttttcaaccactccatccttgcctgcggcaagagttccgacagagctacactgcttttctggttagcacgatccttttttccacacagtactaacacggggcagctgactcttctgcactgttcttccagctgtaaattctgcatggaattggtcaggcagatcatctgtttcttctctaatcccatcccgtcgaaagctgccttcggcaacaggtgaaagatcccattttggatttttaacagtcttttcggcatttgatactgcggcgcaatgagtaccatggatcttaccttttgcggatgacaaattccgtaatgcagcgctagtacagcacccaaagaaagcccacataaatgaaatggttcgtttaccttctcacaatatcgggaaaaactgccgaacaagttttgataagtacattcttctccgccaaaaaagcggaacaaatccggacaggacacgtttttttcctctggcaagcaggaaaggatcttgtcccaactgctgggatcttgtcccaggccgtgaagaaaaattctatgcgacatatcgatctctcttcccatcttttattcaaatgcattacaaaagccgctttcgactatcggaaatttgaaataacatggccgattctccgacattaaaaaacccctcgccaaaagcagaggggtttgacaaagcaaaaattattttacaatttcaccgtaaacctcgccagcgcatccagcggcgttggattcatcggtatcaatatgcatagcgagcgcaaacttcgggctgacgcgaacgacaacatcatcaaaaatcaaagaacgaccgttggtgtcaattttgaccttgacaatctctttatcggcaacacccagattctgagcgtcctcaggagtggcatgaatatgacgttttgccgcgataacgccttcgctcaactccacttcaccgcaggggcctaccagtttacacggtgcgctgcccgcaatgtcaccggattctctcactggagcggaaacgcctaaagttctggcatcggtcaaagacacttcaatctgggtagcaggacgaaccgggcccaaaatggttacgccgggaatggtctttttggggccgacaacatctacacgctccgtgcaggcaaactgaccgggctgggacaaatcttttttgggggtcaaagccgcacctttgccgaacagggtctccagatcctgctgtgttacatggacatgacgggcggaagtctccaccaatacctgattgctcatttttatttctcctctcagaaggcgcaatcacgccaactcaaaattttctatttttattatacataagaagattttttcctgcaagagcaaaagaataaatctcacagaaaatctcccggcccccccctctttcccgatgagaaaacgattcgcaagccatttattttcctatgcatgttcactaaaaagacatattttcctctatacactgtgttataatgacaaagaaacacagaatcatcacattaggagcacaatcatgttcatttgggtgcaaaaccattggcattggtttgcaggttatctggctgctgccagcacagcgggttttctgcttatgggcagtgataaagcccgtgccaagaaaggaagctggcggattcccgaaaaaactttttttggtgtagcgctgctgggcggtacacccggttgcttggccggcatgtatctgttccaccacaaaacccggcattggtattttcgctggggaataccgctgatccttctttttcagatatgcattgcggtctggattatccgttgtatgggccgcctttgttaatgggatccgttatggttttgaatatatcatcctgaaaggagtttcaaaatgaaagaacgcaaacaaatgggccgtgtaaaacagacgttaatttgcctggctgcaactctagtagtcggactgatctatttttattttgagctgcccgcactgaatttccactcaccggctttttatactttcatcttcatcctgtgcgcagtatactgtgtcactgccgtctttaccgctcgcattggccttgcagctgaggaacggcagccgttacaggttaccggattccgtgaattttttgctatgatgaagcgacactgcatgattcctttttttctgtgccttgcgctgattgttttatacttgggcgggtcgttgttttcgagtgtgattcttcgcgcgggctcttacacgaaactgctcacagtagaggacggcgattttatttctgacgtggaagaaatctcttttgaccagattcccatgttggataaagactccgcttccaaacttggcgaccggaaactgggcgagctctctgatatggtcagccaatttgaagtgtccgaccaatataatcagattaactacaatggtcggccggtacgagtaaccatgctggagtacggcgatctgattaaatggtttactaaccgcagcaacggcattcctgcctatctggtcattgatatggtaactcaaaatgtagatgtagtccgtctgccggaaggagaaggcatcaaatactctaattcagaacattttggccgctatctgatgcgtcatctgcgttttaattatcctacttttatgttcgatactcccatgtttgaaatcaatgatcagggcgaaccttattggatttgccccaaattggaaaaaaccatcggcctgttcggcggtacggatatcaatggcgctgtcctagttaacgctgtcaccggcgaaagtcaatattacgaagaagttccaacctgggttgaccggctgtattctgccgagttgatcatgcagcagtatgattatcacggtcaatatcaaaacggtttcctcaactctattttcggtcaaaaaggcgtcaccgttaccaccagcggctataattatattgctatgaatgatgacgtatatgtttataccggtattacttcagtgggaggagatcagtccaacgtcggttttatcctcaccaatcagcgcaccaaagaaacgaaatattatccttgcgctggtgccactgaatattccgctatgagttctgcggaaggtgtggtgcagcatttaaattacaaagcaacctttccactgctgcttaatatccattcagagccaacctactttattgctttgaaagacaacgcgggcttggtcaaaatgtatgctatggtcaatgttcagcaatatcaaatcgtagccaccggttcatctgtttcagaatgttcggctaattattccaaactgttagcacaaaacaatattgtcggagaatcgcaggttctgccggatgatgaaatcactgggcgtatctccgatattcgcagtgccgtcatcaatggcaacactgtattttatatccagttggaaaacagtcagacctattatgccgtttctgcatcagccaacgaagtggcggtcattctgaatgtaggcgatcgggttactatccactataccccggacgaaaacgaaattctcactgcaaattctattgaacgataatttcccttttcaaacaaaaaggagcgatgcttcgcatcgctccttttatttgtttcttttcttatttctttttcttgcccaagattcccagcactacaactgctacaatcaaaacaccagatccgattaacagccacatcacaggacccgcaatactatcgtcccctgcataaactattacaagacttgctgcaaatccaaaaacagccgtaaccaatgcggctaatttttttaaaaacatagtctttccccttttttctataaaatctgatttctgtctaccattataagaaaccatcctacaagtgtcaagggagcaaatctgaaaaagctttggttgaatgcaaaaaaaatggatatcctaaccattataaaaatatttttaatcattttatgccgaaaggggctacacctgtgatttctgtttttactctcgggggtgccggaaaacaaaaaaatctcgcctctcttcgagatattcttcggaaaaattgtacccttactttgattggagaacagcaaattgatattcaaaaggaaaatccggattttgccttggtagaaattgagaatctttcccgcatcacagcacccaatacgatcattctttgtaaggagcctttttacgcaccggtaaatgctgtcctcccagcggatgccgttggccttctttcttccgacaacctgcctgccgccgagtttattcgccgctgcggcgtccgcgccatgacactgggtatgtccagtaaagacacgttaacgctgtccagcattacaccagacagtgccgttctatgcttacagcgtgcgatcagcgatcttttcggcaacacactggaccccgtggaaatccccctttccctttcccaccgttatgatgctttttctattctctgcgctgccgccatttttctgctcagcggtaaaattgacattttgaaacagattcttttttaaaaaattggcaggtatcttttcattggcatcgacgataataatagcacaaacgcaacaaaaatttttgaaatagaaaaaccaaaggagtgttcacactatgaccagcaacaacaaaattgttgttcccgaggcaaaagccgctatggaaaaattcaagatggaagctgccaacgaggttggcgtgaatctgaaacaaggctacaacggcgacctgacttcccgagaggccggttctgtcggtggccaaatggttaaaaagatgatcgaagcgtacgaaaactccatcaaataagttttcccgctcaaaaaaggagtatgccaaggcatactcctttttctttttcaaaactataagtttatgtgtaaatcacacagaataaaacgattatttgttgttctgaaataaatttccaccactgcagtcaatccctacaatcaacgggaaatcttcaaattccaagcgtttgactgattcacatcctaaatcctcaaaagcgataacgtcacattttttaatgcattttgcagccagagccccagcgccgcccaaagcacagaaataaactgcctggttgcggacaatcgcctcacaaaccgctttgctccgctgtccttttccaatcatgcactttaatcccatgtccaacaaacgcggtgcatatggatccatccgtcccgccgtagttggtccacaggctccaattgcaagatgaggcggcgttccggtagggccagcataataaattgctgcacccttgatatcaaaaggaaggggctttccttcatccaataatccaaaataacgtttatgggccgcgtcacgggaagtatacacagtacctgacagcaaaaccctgtctcccgcatgcagcttcggagcccattcgcctaactgattgacattcaatttaattgcttccattgtgaacacctttcctgtcttgcaaattatccttgatacttatcgaaaattctgatccagatgaaatggggcaaacgtatgcttttcttcacaagattcttttgatacgccctgctccggatttatccctaacttttccagcctgcgatctaaaaactccaaggtatcccgcagttcaccgcgcatctgctccacattctgcttaaactgcagaaaatctgcgttcattttttccagccgttcctctttctcccgggttaccgctcgcgcctcttcctttgcccgctccacaatacgatccgcctgttgcttggcatcaatgaccaacgagccaactttcattgcgatttcgtcgtatttttgggctttaaaagaatggctttctgcctgaaactgcagcttgcgtacccgttcattcattcgtttgatttcttcatctttatccgccaacaacttttgctgccgatctatctcttgattcagacgttcaatcagttcagtcatttcccgtgactttttctgttgggcttcttctcgctgcagcgctgcagctttttcttcctctgaagggagttggccttttaattccgaaacctgcgcttccaatgcggcaatcttttcgtccaattccgctttcaatttttgactgtcggcattcatctggtcgatatagcttaaaacagctgttttttggaatccgccgaaagccgacgttttgaaaatcactggattactcataccatacctccatctgaattgcccagtacctgaacatttctcgccgtcccaacaaaagcaataccgcccaacatgccctcatccaatttttctctaccgctgcaagcggtaaatacatagcaaatttcccattacagcatcggcagtaatgcccggcatctgccgcttcgttctccaaaacactgaaaaacttttctttttgtctgcggcatatgtttattataacatggtccggacaaaaataaaagaaaaagcgagaaaaaagccgatgttttattgctccggtggatatcttttcaaaaaaagaggttacttttccttctttttctctttttcgctcaaaggaaacgctttttctaccaacacgtcacacatacgcttcgtcatataggaaatccaggaaagctgtaaaagcagctgcgccatgctttccggagaatcatccgggattcttttcaaaagatcctccaacatatcggaaagaatctggccattggtcttccggctatttaaataaccagcgtaaagatctttccagatttgttcggaatgctgtttttcttccgcctgtatgcccaaactttgcatgacacctttgatctgctggatggataacgtctgcttcagcctgtaaatcaaaagcatctgtaaaatatgttctttggaatacttcttgcctttaattggtttaatcaacccatctttactgtaattattaatcatcgtcttcgtcaaaaggccttccggctcctgcgttttatccgcgaatagagtcgtgatctgatccatgtaaagatctaaatccggcagatcagctacttctacttccttttgttgaaggggcttttgcagaatttgtattaattcctccattagaaactcctctctgttcggcaggcaaaaaccttgcctaacaaccctataaaaagtttttcatacatttattttcggctgtgtcattatttttccgttcggccaatccacatttctcactttttcagatggtcaaaaccggattgtcgtctgcatcatacaggaattatgcttttattatatctgatagaaaataaaaaaacaatccgctattgcaaac

SEQ ID NO: 2692 - DNA, 3216 bp, Unknown
  16S sequences of unknown bacteria
tcttcgtggaacttcccctgatagcccagcgccttggcgcggtttcgcatatccaccgcagagggaaacagcgtatccgccgatccgcaggagatatacagcctcggcagcggctttttctgtttggcagcctgctccagcaggaagtgcaggtcgtttttgctgcccttcatcgtgccatgcggcccaaagatgaattccttggtttccaagaccacctcggtatcgctctttttgccgcgcaggttttgcccttcatgggcaatctgctctttatcatcctgcataagggctacgatatccagcgctccagagaagctggccgcaaagccaaacttttcaggatacgtaagggcgatcttcattgcgccatagccgcccatcgaaagcccggccacataggtattttcccgcttgggcgaaacgcgcagataggtttcgatgatgtggggcagctcctccgccacatattttaagtacggccagccgatggcctggtctgtgtagaaattgttatgcatttccggcatcacgaccaccatcttcttttccgattcgtacagatagcgttcaatgctggtatagctggtccaggtatgcgccgcgccctttaggccgtgcaataggtacaaaacgggaatttcttcggtatccgccccgcctgccagcgcgccgtagatgttggcgtcaggcacgagcagatgcacggtctgatgaaaatccagcacttgagaatgaaaattgaatgtaatgtgcgccatgcttttacgccctccttagctctttgcggaccggcagccaatcgatcagctttttgccttcgctgtcccaaaaatcccactcgtgggccatgccctcctgctcaaactcggtaaagtccacctttttgtctttgaggaatttgcagaaatccttatgtacgccgtacaagctgtcatccgtaccgcaggaaacatacattttcggaagctgtttgccgctttttaccgcgctgtctaccacatggtaaagatcaaactccgtgccttccaggtccttgggattctccgtgccaaagacggccttcatctccatcggggtaatggcgtccgcctcttgccctacggacatatgcgccacatccagcccgccagagaacgacgccaccgccgcatagcgatccgggtttttcattgcgatctgcagcgcgccatagccgcccatcgaaaggccagcgataaagcgatcctcccgttttccggaagcgcggaataccgtctcgataaagtttggcagctccacggtcatatacgtgaaatacgcccagccattgaccatatcggtataccagaaattctgcatgcccggacaaacgcagatcatgtttagatcgctgtggtgcagataagcttccatgttgcttcgccgaagccacgccgtgtggttgtcggtatgtccatgcagcaaatacaggacaggcaggttttccgtaaacggctttcctagctgagccagctttaggtcctttggctccggcaggaaaacggtgacggtttggtcagagttcaatgcttcagaacgaaacgtcagttccatcaacgccataaagaattcctccttattccttataagagcggacaaagcatccgctttcatgacaatgaaaacaatacatgagaaaaaatgaatccaacacaatgcttacctatttattatatcttgccatccggggaaagtctaacgaaaatggcggctcttccttgtttattttttcaccaaatctccgggcgcacatttgcgcgcttttcccgcgattctccctttgtttcccctgcccaatagtgtataataagctgaatctcatagatagtattgaagaaaggcggtatgacacatggcatttgtgacaaccaaagaaatgttcaaaaaagcatacgaaggcggctacgccgtaggcgcgttcaacgtcaacaatatggagatcattcagggcatcaccgaagcggccattgaaaaccgcgcgccgttggtgttgcaggtttccaagggtgcccgtgcttatgccaagcacgtgtatctgatgaaattgatcgaggcggccatccaagacgccgagcagtctgccgggtttgatctgccggtgtgcgtgcatctggaccatggcgacagctttgaactatgcaaaagctgcatcgacggcggctttacctccgtgatgatcgacggctcttccaaatcctttgaagacaacatcgcactgaccaagcaggttgtggaatacgcacacgatcacggcgtggtagtagagggcgagttgggcacgctggccggcgtggaagacgaggtctgcgtttccgcagaggaatcctcctacacccgtccggaagaggtggaggaattcgtatcccgtaccggggtggattccctggccattgccatcggcaccagccacggcgcttataaattcaccgctgcacagtgcacgcgcaacgaagaaggcatcctgatgccgccgccgctgcgctttgatattttggacgaggtatccaagcgcctgcccggattccccatcgtgctgcatggcgcttcctctgtgccgcaggaatttgtcaagatcatcaaccagtacggcggcaaaatgccggatgctgtgggtattccggaggaccagctgcgcatcgctgcccagaaagcggtttgcaagatcaacatcgactccgatctgcgcctggccatgacggccagcctgcgccagtattttgtggagcatccggatcattttgacccgcgccagtacctctcgccggcccgcaccgccatcaaggaaatggtttcccataagatggtgcatgtgctgggctgcaacggcaaagcctgagcaaagtacgatagagaaaaagaggaagcgaatcgcttcctcttttttcatggtctcacttttccagcttttttctgagatagagcattgcgtcccttggcgttcctttcaaaaactcggatttaggcaatacgatacaaagcgttttgctgtacaaaatcaataggtgtttcgactcgtataccgccgtgtacatctcgtagggatattgttctatggtcagcgaattgccgtttttgtcgtatccagccatggtcacttctgtttcccccaaaaaacagaacttctccgccgcatttgttttccgcttctctaaatctgtctcttatacacatctccgagcccacgagactaaggcg

SEQ ID NO: 2693 - DNA, 29906 bp, Unknown
  16S sequences of unknown bacteria
cccgcggcccggcgcgccgcgcccgctgctgcccctgcggcgcgccggagcgcgcccgagggcgacgcggcgatctggaaggaggtgctcaaggccgtgaagtccacgcggatgcagctgttcacggcgctgaagatgggcagcttcctcgggatggagggggacgaggcggtcgtctccttcgaggcgcagaacgacatcttccacggcatctgcatcaaggaggagcaccacgcgctcatcgacgaggccttttccaaggtctgcggccggccggtccgcgcgcggtttgtgctcgccgcacagccccagacggagccgaagagccccgtggacgagggcgcgctctttgcggcctttggccgggaaaacgtggacatcgtggactaggggcgcaggattttttccctttacgaaaccgcgggaaacaggtataatacctgggtacgaaatgcagtttaggaggtacttacaatcatggcaagaggcggattcccgggaatgcccggcggaaacatgcagcagatgctcaagcaggcccagaagatgcaggaaaagctcgccaaggtccaggaggagctggaggcgcgggagtacgaggcctccgccggcggcggcatggtcacggtcaaggccaacggcaagaaggagatcctcgccctgacgatccagcccgaggcggtcgaccccgaggacgtcgagatgctgcaggacatggtcatggcggcggtcaacgaggtgctccgccaggtggaggagacttcctcccaggagatggggaagctcacgggcggcctgaacctgcccttctgacgcggcgatgagcaacatcgactccttctcccgcctctgcgcccagctggcaaagctgccgggcatcgggcgcaagagcgcgcagcgcatggcgtactacctcctctcccagccgcccgaacaggtggaggccttggcggacgccatcctgaccgcgcgcaggaccgtgcacgagtgccgcgtctgcggcaactacacggaccaggacgtctgctccatctgcgcggacgagcggcgcgacggctccacgatctgcgtagtccgcgacccgcgggacgtggccgccatcgagcgcatgcgcgactacaacggcaaataccacgtcctgcacggcacgatctcgcccatggagggcatcggtccggacgacatccgcatccgggagctgctcggccgcctctccggcgtgcgcgaggtgatcctggccacgaatcccgacatcgagggcgaggccacggccgcctacatcgcgcggctgctcaagcccttttcggacatcaaggtcacgcggatcgcgcacggcgtgcccatcggcagcgacctggaatacacggacgaggtgacgctctcccgcgcgctgcgcggccgcaccgaactctgagccggtcccaaaaagcatcccccaaccccggcagggagtttccccgtcgcgggctgggggcttttttcatctcagccgtccgcaaaggcggccttcgccgcctcctgcagcgtggagacgccgacgcagtcccggggcaggtacccgccgtcccggggctgcaagatgcggcggaacccggcctcgcgcggcggctgcgtcgagctctgagccggttccaaaaagcaaatcccccagacccggcagggagtttccccgtcgcggctgggggattgtttcatctcagccgtccgcaaaggccgcctccgccgcctcctgcagcgtggagacgccgatgcagtcccggggcaagtacccgccgtcccggggctgcaagatgcggcggaacccggcctcgcgcgcggcgacgcgcttttgcagcagcccgccgaccggcagcaccgcgccgtcgagcgcgatctcgtcggtgacggcgacgtcctggcggagcgggcgctcctgcagagcggacatctaagtcggcctccaaaagcagatcccccaaccccgacagggactttccccgtcgcgggctgggggattttttcatctcagccgtccgcaaaggccgcctccgccgcctcctgcagcgtggagacgccgatgcagtcccggggcaggtacccgccgtcccggggctgcaaaattcggcggaaccccgcctcgcgcggcggccgcaccgagctctgagccggtcccaaaaaacaacccccagacccgacagggagtttcccgtcgcgggctgggggattttttcatctcagccgtccgcaaaggcggccttcgccgcctcctgcagcgtggagacgccgacgcagtcccggggcaggtacccgccgtcccggggctgcagaatccggcggaaccccgcctcgcgcggcggctgcaccgagctctgagccggtcccccaaaaacaatcccccagacccggcagggagtttcccgtcgcgggctggggggttgttttcatctcagccgtccgcaaaggccgcctccgccgcctcctgcagcgtcgagacgccgatgcagtcccggggcaggtacccgccgtcccggggctgcaaaatccggcggaaccccgcctcgcgcgcggcgacgcgcttttgcagcagcccgccgaccggcagcaccgcgccgtcgagcgcgatctcgccggtgacggcgacgtcctggcggagcgggcgctcctgcagggcggacaggagcacgagcgccgcggccaggcccatggacgggccgtcgacgttgccgccgccctcgatgttgaaggcggcgtcccgctcgcccagggaaaggcccaggcgctcgacggccagcaccgcgttgcgcacggcgtcgcgggccatgtccccggcggccaggttcagcgtaaagcgcccggtcccgggccgcagcacagccgtgaggcggcgcaccgcgcccgtgcggccctgcacgcccagcagcgccgtgcggccgaccgcgggcggctcctccacggcggagacgcgcccgcgcaccgaggcgagggtcaccgcgccctcccgctgggaggcggccagcgcgcggacgcactcgcggccgtccagggagtgctcggcgatgtagcgcagggcgggcgcggtggcgcgcaggttcaggcgctccgcggccccgcgggcgacgcggtagaggtcctgctcgtccaggttcgcaaaaaagatctccacgcaccgggagcgcagcgcgggcgagatctcctccgggctgcgggtcgtggcgccgatgagcacgaagtccgcgggcgcgccctgggcaaagagctggcggatgtaccggggcacggcggggttgtccgcgtcgtaataggaggagtcgaagcggacgcgcttgtcctccaggaccttcaggagcatgttttgcaggcggacgtccatctccccgatctcgtcgatgaacagcacgccgccgtgcgcctgggtgaccaggccgagcttgggctcgggcaggccgcggccggcgagctctcgccccgcgccctggtagatggggtcgtgcacggacccgatcaggggattgacgccgccctggggatcgtagcgcagggtcgcgccgtccacctcgacaaagggcgccgagcgcaggaagggcgcctccggctgctcgcgcgcgcagtcgagcgccaggcgcgcggccgtggtcttgccgcagcccggcccgccgtagagcagcacgtgctggggatagggcgagcacagcgcgctgcgcagccgggaaaaggcctcctcctgcccgacgagctggtccgcgcgcacgggccgggcgcgcgcaaaggccgaggcggacagcgcgatgccctccttgacgacaaggtccgtaagcttcctgcgcgttgcggcggtttcggccccgcccatctcgtccaggagcgaaaggcgcaggctgtcgtagtactcgcgctcggcgcgggccatgcgcttttccaccagtttctccaggtcctgcttggccttcctgcgggcggtagcctcggcataattttcctccaagaacgagagcgggacgtccgtgcggtcgatgtgcagcagctttttgatttctgccagcatctgatcgatctgctcgggcgtcccgctcatgtcggtgatcttcggttgtcttcctgtgcaaagggtgcacacgccttggtagagcgcgtacagccttgcgcgctgctcggcattcatggggaacctccttaccctcctctttttccggaccgcgctttgcaaaagggggcgaacccgccccctttccgcagcgcttcggtttagtccttggcgacgatgttgagcttgatctttgcggagatctccgggtagagcttgatgaccgcctcggtctcgcccacgttcttcaccgcgtcgacggtgattttgcgcttgtcgatgtccatgccgtacttggccttgagcgcgtcggcgacctcctggttggtgaccttgccgtagaggcggccgttctccccggcgcgcacggcgatctccacgaccatgtcgcccatcttcttggccagctcctgcgcctcctgccgctcgacctccttgcggtggctctgggcggacttggcgttctcgatggcgttgaggttggatgcgctggcctccacggccagcttgcgcgggaacaggtagttgcgggcgaagccgtcgctcgcctcgatgatctggtcctttttcccggttcccttgatgtccttgagcaggatcactttcatgaaggatctcctcctaatcttgcgaattttcaggtttgcgccccgtctatttcttgtccttgcggacgatctgcagccccaggcagacgcgcgagccgtccggaagctggatctccgcttgggcggggccgagcttgcggacagggggcatccggatggtgtccaggtgcagcccccgctgtttttcgagtgccttcgcaatcgtcttctcgtcgattctttcgcggattcggccgtccttgtcggcgggaacggcgatttccagcgccttcttctccagcctgccccggagtttcttgatgtcgtccggatgggcgacgaggttcaacgtaagccgcgtccgttcgccggtctccagccggatttccgcttgggcggggccgagcttgcggacagggggcatctggatggcgcccgggtccacgaagagctcgtgctcctcgatgagcgcctctgcgacctcctccgcgttgatcgccaactcttttgggcggccgtcctccccgatgtggatggggaacgtgagccgcacgcggcttagcgctcgctccaagaccgcggcttcctccctgcgcctttttgtggactcccgcatgtccggcgccggtttgccgtcgggctttgcccggttcctccttgcgagttcagccaatccatggcgaaagagcacgcgtttggcaaagcgctcggagacctcaaccgtctccccaagcctgccaattcccgtgatatcctttcgcagaagcactggcacctgcatagcgttttttctcctcaggttttttctttactgcgcgcctccgtcgtcatcgtccccgtcgtcccggccgcgcaggccagggtcgcgcagggtgggccggccgatcttgcggaagtagaagatctgctccaggaacccgacgaggaagagcaccgtctgtaggaacaccaggcccgcggccatcaccagatagcgcagcgcgcgcggccagccgtgcttcttaaagaaccactcgcacaccgagagaccctgcaccgcgtagacgaactgcacgacgctccagaccgcgaggtagacggcgtacgcgttggagctgatgagcatcagcacccacatcgcgaggatgcccagcatcagcgcgaggttgagctttgtcgggatgcgcacgcgcccaaggtccggcagagcggagaaggatccgccctttcccgcgcgccgcgcggccatcagcggcaggagcgcgccgaggagcccgatgtgcagcgcctgcttgacgagcatatcgatcaggttcagccgcagcgagaggtcgaagatctccagcagctcgcccgtcagctgcgcgcgggtggtttcgtccagcgcggcaaaggggctggcgttcgtctccgagagcaggcccatgctcgaccaggtggaaaggagcatgtcgtagagctggggcgcggcgtcctgcagggactgcagcaactgctccagccagctcgtgacccaggcgacggcgtcgcccagcagcaggttgcaggcgatgtagctcagcgcaccgtagacgaacacgccgatgcccgtgttgaccatggcctgccagagcggcgtctttgcgcgcagaccgcgcaggagcagcggcggcaggaccagcatgggcgccagcagccacagggcgatgggccagagcccgtcccccagggccagggtgaacaccgcaagcccgccgcagaagcccacagcgccgcccgcggcaaagaccggccccacaaagagtccgcccgcggtcagcagcgcgaacaccgcgccggtataggcgggcgcggtcgggagcaaaaagctcgacaccgggcccaacaaaaacatgcccggcgcaaagaggagcgtccatgcgatctgttttttctttcccatctgtttctcctgacaaaggatcacgcatttttacccgtctattttagccccaaggcgggccgtttgtcaaccgagggggcgctgtcaattcctgcgcggaacggcaaaaaaggaggaagcgccggtcgggcgtttcctcctttcggaaaaaatccgcgcatcagtccgcggagtagggcagcagagcgatgtggcgcgcgcgcttgatcgcaatggagagctggcgctgatgcttggcgcagttgccggacatgcggcggggcaggatcttgccgcgctcggtcacaaagcggcgcaggcgggccaggtccttatagtcgatgtgctcgatcttatccacacagaactggcagaccttgcggcgcggcttgcgtccgcggggccggcgaactctttcttcagacatgttctcttaacctccttgtactcagaatgggagctggtcgtcgtcgtcgacctgtgtaaagccctggctggcaaagtcgtttgccggggctgccgagggtttttgggcaggggcgccatagccggcgctgccgccgtaggactggccgccgccgtaggaggagcctcccccgtaggactggccgtcgccctggggcttggaatccacaaactcgcactcgtcgcagacgacttcggtcacgtagcgcttggagccgtcctgcgcgtcgtaggtgcgggtctgcagggagccgatcacgccgatcttcctccccttgccgaagaagcgatgcacaaaatcagcctgctgccgccaggcaacgcagtcgatgaagtccgactcgcgcacgccctgctggttggcaaaccggcgggtaaccgcgatgcggaaattgcaaaccggaatgcccgagccggtggtgcggtactcggggtcgcggaccaggttgccgacgagaatgactttattcatcttgcaccgtcctcttttattcctcgatgcgggtcacaaggtaacgcatgacgttctcgttgatctgcaggttgcgctcgagctcgcgggggaactccggagcggcggtgaactgcacgagcacgtaatagccctcattcttgaagttgatgggataggccaggcggcgcttgccccactcctcgaccttgtcaacggtggcgccgttgttggtcatcagggtctgaaactgggcgatgaggtccgtgcgggcctgatcctccatcgcggagtcgatcacgtagagaagttcgtacttattcaagactttcacctccttgtggactttggcatggcgcggcagcgccacgcaaggatgaatgcgctactttacatagaataccacagcctccccggttccgcaagtaaaatttccgcttcttttccgctttttccgtgcgcgcgggcagcgattctggtatacttctctttgtacaaacaaatacgccggctcaacggaccaaggaggctgcacaagaccatgtacacctggcacatcctgaccatcggtcacctttcgcgaaacaagttctggggcgagcgcaacgacaccgcctaccgcgcgccgctggcgaccagcgcgctgctgctgggggaggggcaagtgatcgtgacggacccctcgctcccggctgcgggcatgcgcgcggcgctgctggacgcggcgggccttgccccggaggacgtgacgctggtcttttcgacgcacaaccatctggaccaccacgtggatccgctctgcttcccgaacgcgcgctggttcatgccgcaggtggacctcacctacctgcacgagcactgggacgagcacaagcgctcctttcccggggacgactgggaaacggtgcagcgctgcgaggccgcgccggaggagctggcgccgggcctgaagctgctgccgctcccgggccacacggcgggcacgggcggcctgctcttctgcgcgccggaggggcgcgtgctgctcacgggcgacgcggtgatgacccgcgagttctacaaggcgggcgagccctacttcttcggctgggacaacgaccaggcccggcagacgatcctctccctgcgcggccaggcggacgtcatcatccccggccacggcgaggccttcctcacccgcgcgtgggagtgagcgcgcaaaaaaagaagcccttttcagggcttcttttttgtcacttctgcagcttttccagcgaggtgcgcaggcggcgcagcgcctcctcgcggccgagcagcacggcgatctcgatcgcgccgcagggggtgacgagcttgccggccatggcgatgcgcgcgggccagaggatcacgccgttcttcttgcacttcctggcggcaaggccgagcagggcctcgtgcacggcggcctgcgcgcgcaaaaaaagaagccctttgggcttctttttttgtcacttctgcagcttttccagcgaggtgcgcaggcggcgcagcgcctcctcgcggccgagcagcacggcgatctcgatcgcgccgcagggggtgacgagcttgccggccatggcgatgcgcgcgggccagaggatcacgccgttcttcttgcccttcctggcggcaaggccgagcagggccttgtgcaccgcggcctgcgcgcgcaaaaaaagaagccctttccggggcttctttttttgtcacttctgcagcttttccagcgaggcgcgcaggcggcgcagcgcttcctcgcggccgagcagcacggcgatctcgatcgcaccgcagggggtgacgagcttgccggccatggcgatgcgcgcgggccagaggatcacgccgttcttcttgcccttcttggcggcaaggccgagcagggcctcgtgcacggcgctctcggtccactcgggcagcgcctccagggtggccaggatgtcgggcaggtcctcccgggcggtgtcggcgttggtcttcatcttcttggagaagtagagctcctcggagaactccggcatctcggtgaggaagtcaaccatctgcggcagctcgccgaagacctcgacgcggggctgcaggctccgctggaggatgtccaggtccatgtgcgcgatgccggccttttcataccagggcatggccgcggcggtgaactgctccggggtcatgcggcggatgtactcggcgttcatccagcgcagcttctcgacgtcgaagatcgcgggggacttggagagcccctccagcgagaaggcctccatcagctcggggagcgtgaagaactcgcggttgtcgccggggttccagccgatcagggcgatgtagttgagcagcgcctccttgaggtaacccttttcgatgaagtcgctgtagtaggcgtcgccgtcgcgcttggagagcttgcggtgctggtccttcatgaccggggtcaggtggatgtagaccggcttctcccagccaaaggcctcgtagagcaggttgtacttgggcgtggaggagaggtactcgttgccgcgcagcacgtgggtgatgcccatggtgtggtcgtcgacgacattggcgaagttataggtgggcatgccgtcggccttgatgaggacgttgtcgtccagctcggcgcagtccacggcgatgtggccgtagagcacgtcgtcaaaggaggcctcgcccgtctcgggcacgttctgccggatgacgtaggggacgcccgcgtcgagcttggcctggacctcctcgggggaaaggtgcaggcagtgcttgtcgtacttccaggtcttgccctcggcctcggccgcggcgcggcgctcggccagctcctccttggtgcagaagcagtagtaggccttgccctttgcgaccagctccttggcgtagggcaggtacatgtccttgcgctcggactggatgtaggggccgtagtcgccgccgacgtccggtccctcgtcccagaggaggccgcagtcgcgcagcgtgtcgtagatgacctgcgttgcgccgggcacgaaccgctcctggtccgtgtcctcgatgcgcaggatgaacttgccgttgttcttcttggtgaagagataggtatagagcgccgtgcgcaggccgcccaggtgcagatacccggtggggcttggcgcgaatcgcgtgcgaacgttcatgttggtcgtctccttgcgtttactcgggcttgtagctgcccttgagctccaccgtgcggttgaagacgaggcggtcctgcgtggagtccttgtccacgacaaagtagccctggcgcaggaactggaagtggtcgccggccttggcgccggccaggcccccttcgaggaccgcgcggtccagaacccggatggagtcccagttgaaggaatcggtgaagtccttttccttgggggcttcgctctcctcgccctcctccaggtctgcggcctcctccggctcgccgccgtcctccttgagcatgtagtcatacaggcggacctcgatgggcttggcggtgctctcctccacccagtggagcgtgcccttgaccttgcggtttgcgccctccccgccggacaggctcgtcaggtccacggagcacagcagctctgtgacgttgccggcctcgtccttgaccacctcgtcgcagcggatgatgtaggcggccttcaggcgcacctcgcgccccggcgccaggcggaagaacttcttgggcgcatcctccatgaagtcctcgcgctcgatgaggaggtgcttgccaaaggcgacctcgcgctcgcccatctccgggtggttggggtggttttcggtcttgaggcggatgatcttgccctcctcccagttggtgagggtgacgcgcagggggttgagcacggccatggcgcggggcgccttgtcgttgaggtcctcgcggatgcagtgctccagcaggccgatgtccacgaccgagtccgccttggcgatgcccgcccggcgcaggaagtcgtggatggaggcgggggtgtagccccttctgcgcatgccgacgagcgtgggcatgcgggggtcgtcccagccggagacgaaatgctcctcgaccaggcggcgcaggtagcgcttggagagcttggtgtgcgtcatgttgaggcgcgcaaactcgatctgccgcggatgggcgggcaggccgcagttgtcgcggacccagtcgtagagcgggcggtgaatctcatactccagggagcagagcgagtgcgtcacgccctccaggcagtcctggatggggtgggcaaagtcgtacatcgggtagatgcaccacttgtcgcccgtctggtggtggcgcttgtgcagcacgcggtagatggtggggtcgcgcatgcagatgttgggcgaggacatgtcgatcttggcccgaagggtgagcgagccgtccgggaactcgccgttcttcatgcgttcaaagaggtccaggctctcctcgacggggcggtcgcggtaggggctgttgcggccgggctcggtgagggtgccgcggtattccttcatctgctcgggcgtgagctcgtcgacgtaggccaggcccttcttgatgaactccacggcgatctcatacgtcttgtcaaaataggaagagccgtagaccagcttgtcccactggaagcccatccagcggatgtcgtcctggatggcgtcgacgtactcgacgtcctccttggcggggttggtgtcgtcaaagcgcagattgcactttccgccgaacttctccgcgatggaaaagtcaatgtacagggccttgacgtggccgatgtgcagatagccgttcggttcgggagggaatctggtttgcacctgcccgatcacctttccgtcggcaatgtcctgcgcgacaaattcctcgatgaagttcgaggtggttttctcgttcgcttccaatgtactccctccttgaaaaaaaatttcagcgcgtagccgatacggtattatatcaccgaatcccccgtttctcaacgggggatttgtaaaacccgcgcatttttgcgcgcggcgtttcgtcggatttcaaaaaagatggggttctactgtttttcggtgtttctctcgaattcaatttgaacatttcggtttttgtgcaaaaggcaggcagccgtctgaacccagcaggaagcgcacctccgcaggaatcgggggtgcgcttcttttcttctattcctgcgcgtccgcgcggcgcgcgcggcacagcagcaggtcgccggagggcgtcagggcgacgcccgcccactcgggccggcagagccaggccctttgcgtcgcgcagaggggaacgcagcgcgcctcctccacgacggccgcttcggcgcggcgcagggcggcccggcgggcgctctcgctgcgcgccccggcgaggtcgtccagcgcctgggcgagcgcctcgctctcccgcgcgagtccggacaggcgcatgtccatgtcccacagggcctgcgcgtcgccataggcgttgaagaagctgccgatcgccagggaaaacgcgccgtccatccgggcctgggccgcgccggccgcgtcccgctccgccgcgtgcacgcgcacgccgagcacctcgcgccactgcgtgcagagcgcctccgccaggccgctctccacgtcctcgggcagggcgaggagctccagctccgggaagccctcgccgccgggatagcccgcctcggcaagggccgcctgcgcctgcgccgcccggccgccggatggcacggccgcagcgcccgcctccgcgccgccgatgcccggcgggtagagggaatccgcggcccgcgcgccgggcaggtccgccgcgcccagcagcgcgtccgcgtccagggcgagcgccaaggcctggcgcacgagcgggtcatccaggggcgggaccgcggcgttgaggtccaggtagaggacgcagtcctccgggctgaggcgcacaaatccctcctcctgaagcgcgggcagcgcctcggccgggtagaacaggctcaggtccagctcccccgcgcgcagggcgcggaccgcctcctccccgctcgcgtaggcgcgcaccgcgatctcctccggcaggacgctctcccggtcccaataggtgggcgagcggcgcaggcgcaggacgtccgcctccgcggcctcgaggccatacgggccgttatagagcgcatccgcctcgcttctgcgcggcgcgagcgcgggcagggcgaggagcgcgtccaggtacgggcagcgcgcggtaaggcgcacctccagcgtcttgtcgtccagggcgcgcacgcccagcgccgcgccctcctccccatagagggaggcctcgccgccctcgatccacaaggccgcgtccagcgcatagggcgaggcgctctccggcgcgagcaggcgctcccacgcgtagacgaagtcctgcgccgtgacgggcacgccgtccgaccagagggcgtcccggcgcagggtgagcgtgcaggtcctcccgtcctcggaaaggcggtagctctcggccgcgccgcaggtccagccgcccgccccgtccgggcgcatcagcccctcgtacagcaggcgggagagcgccagctcccccgtgtccagggcgagctgcgggtcgagcggccccaggtcctcgcccaggcagacggtcagcgccgcgccggccgcctccgccggggcggaggcctcgggaagcgccttcggcgcgcagcccgccagcgcgaacaggaccaggctgagaagcgcggccgccagccggcgcgttcctctcttcatgcggagcccccctttttttcgcaaaaaagaagcggagggcgcggcaggccgccgctccccccaggtctttgctcagcgatgatcgggcggcacgacctccacccagtagccgtccgggtcctcgacaaagtagatgcccatggacgggttctcaaagcagatgcagcccatcttctcgtgcagggcgtgcgccgcctcgtagtcgtcggtcacaaggcccagatggctctcgttctcgcccaggtcgtagggcttgtccgcgtggtcgcgcagccaggtgagctccaggcgccagtagtggttctcgtcctcgaggaagacgagcttgaagctcttgtcctcgggctcgtggacgcgggcgatggtcaggccgaaggcctcctggtagaacttgacgctcttgtccaggtcgcgcacgttgatgttgttgtggttcatgacaaacttcatgttctgttcctcccaaatccggtttgtattttggaaaggcccaaagggcccggtcaatcgatctccagcgtctgcccgcgctgcgtcagggtgcggacctgcgggtgctgcgcggcaaagcgctcggccagcgccgcgtcgccctgcaggtgcatgggcacgagcaccttcggccgcagggccttgagaaaccgcaccgcgccgcggtccgtgtgcttccccatgcgcgggtccagggggaagaaggccaggtcgatcgtgccggccgcgcagtccgcaaggtccgcaaggatgcgctcgaacccttccgtcgcctcagcgatctcctgcggggtgctctcgtcctcccagtgccagaggttgaagtccccggcgtggaacacgcgccgcccctccacctccaccaggtagctcagccccaggtccgtggagccaaaggcgcgcacgggcaggccgagcacggagaagctctccccctcctgcgcgcggcggccggggatggacgcggggaagtcgccgctgagcaccgtctccccaaagggcagggccagcacctcgcggcagtagtggtcggaatggctgtgcgagaggaagagcgcgctgcgcgcgtgggcgcgcacgtccgcctccgtcacgaccccgcccgcaaggcccgccctgccgggggcgggccgggggttgtactcgtcaaagaccagcagggtctccccctgctccacggcaaagccgctgtggtccagataggtgatcttcatgcatgcctccgaaatttctgcggccggccctcgccgatgggcgggacccagttcgtctggatccaggccgtcaggccctgcggcgtccgctcgatgtccagcgtcagggtcgggatgtccgggaagaaggtgacgcggccgaagaagcggttgccgctccactggccccagccgcaggaggcataggcgcggccctccgggtcgtgccaccggctcaggcggcgcacgccgtccaggccgagctccaggtcgatccgcgccccgcgcagcacgagggacaggcccatgccgccgggcgtgcgccggatctcgatttcgctccacgccgcgccctcgtccgcggcgcgccagacgcccagcgccgcctcgggcacggggacgaaggcgcgcggctgcggctgcgcgatctcctcccgcagggcgttcagccgggccagggccgccgggttctccggcagggggtccttgtgcacgccgggcagcacgaagaagcgcgcgagcacctgcgcgtagtccgagacctcgccgtgcagcgcggagttgaagaggatgaccatgtcctccgaggggacgatggccgcctgctggccgcccgcgccgtcgatgcggtaggcgtcggcgtagtcgcacatccagaactggtagctgtagcccgcgccccaggagtcggtgccgtcgccgttgtcgatcttctttttggagacgaggtccacccattcctccggcaggatctgctcgccctgccaccggccgcgcagcaggtagaggttagccaggcgcaaaacatccatggccgtggcgtgcaggccgaagccgcccgagcacgcgccccgcacgcggtcccagtccccgtcctcgatcgtgatgccgatcttgtcgaacacgcgcgccttgaggtaggcgtagagggactgcccggtcacgcgctcgacgagcaggcccagcatgttgctgttgcccgtgttgtagaggaagtgcgtgcccggctcatagggcaccggcagcgcaaagtaggcctccggcccgccctggcggaaggcgtccatggtgtcctggtcgtggccgctggccatggcgagcaggtcgcgcacgcgcatcttccgcccgttttcgcagacgccgtccgggttcacctccgggaagtacggcaggacccggtcctccagcgtcagccgcccctcccccacggcaaggcccagggccgtggccatgaagctcttggtctgggagtagatggcgtgcttgacctccgggccgtagggagcgaaatacgcctcgcacacgagcttgccgtggcggagcagcaaaaagtcgtggatttccacgccgcggcgcgccccggtctgcgccgcctccagcgcgcggacgagccaggcggagtcgatgccctgcgcctccggcgcagagcgttcaaactgcatcgggatcattcccctcccccttttttctctctattttcaaaagtattatacaggaagggcgaagggttttgcaaggagaaaaagcgccggcccctgcgcgcggggcagggcttgacagggccctggccgcatggtatcctacctgccggacaatttctgcacccggtccgcagccgcgggcgcggcggcagggaccttgaggtgcgcgatggatacgatcctggtgatggccgccggcgtcgcggtcggccgcttttttcccgcaaaataccggaagcaaaacgagtgggtacagcttgcgtgcacgcttttgctgatcttttccatggggctgggtcttgggcagcagccggacttcttttccgaccttgcggccctgggcctttccagcctcctgttcttcctgctgcccacggccggctccgtcgcggcggtctggctcctgacgcgccggcgcggcggccccgcccacgggcgcccgtcgcctgccgcacagcccgagtcgagcgccccacagcccgagtcgggcgccccgcggcccagggtgggcgaccccatgatgttcttcgccctgggcgcggtgggcctggggctcgtctgcggcgcggtttcgccgctggccgccgcgcttgcgccggtgcgcgacggcgcgcagtggattctctacctgctgatgttctgcgtggggatcagcgtcggggggcagcggggggtcctcgcaagcctccgccggcacagcgcgcagatcctgctcgtgcccctgggcgtcatcgtggggtcgctggccgggggcgggctgtgcgggctgctgctgcggatgccgctgcgcgaggcgctgtccatcggcggcgggctggggtggtacagcctggccggcgtctccgtcagcagcgccgcgggggtcacggccggcagcatcgccttcctgagcaacctcctgcgcgagatcggggcctttctcctcatccccctggtcgcgcggcgcgtaaacgcctgcgcctgcatcgcggtggccggggcgaccagcgaggacaccaccctgcccatgatcctgcgctatacggacggggagacggccgtgctctccgtgctcaacggggtgatctgctccgcctttgtgcccgtgctcctctcgctctgctactgaggcgcgcattttccggcccttgcgcaaaactttcacattcccggcgcgaaaatgctcttgacaccgcgcacgcggccggcctataatggcaaagaacgcgatgaggaagtcatgcgccagcgatccgtttcctcaaaagagagcccgcgcgcggtgaaagcgggcagggaatgctgctggacgcgccgcttcggagcacccgcaagccaatgcgggcgggttccccccgatacaggggaaaaacgagttgggcgtacgcgccaacttgggtggtaccgcggaagcctcgccttcgtcccaagacgctttggggcgggggcttttttgttccacaaaacccatgaaaaggagagttttcgtatgaagaacgtcacctccgcagagctgcgcgcgatgttcctgcgcttcttccaggagcggggacacgcggtcatcgcctctgcctccgtcatcccggaaaacgacccgacggtgctgttcaccaccgccggcatgcacccgctggtcccgtatctgctgggcgccaagcacccggagggcacgcggcttaccgacgtgcagaagtgcatccgcaccggcgacatcgacgaggtcggcgacgcctcgcacctgaccttctttgagatgctgggcaactggtccctcggcgactacttcaagaaggaggccatctcctggtcctgggagttcctgaccagcccggagtggctgggcctcgacccggaccgcctggccttctccgtcttcgcgggcaacgaggacgccccggccgacaccgaggcccacgacctgtggcgcgcctgcggcgttaaggaggaccacatcttctacctgcccaaggagaacaactggtggggtccggccggcatcaccggcccctgcggcccggacaccgagatgttcatcatcaccgacaaggagccctgcggcccggactgctcccccgcctgctcctgcggccggtacctggagatctggaacgacgtcttcatgcagtacaacaagcaggcggacggcagcttcacgccccttgcgcagaagaacgtggacaccggcatgggcctggagcgcacgatctgcgtgctgacgggcaagaagagcgtctacgagacggacgcctttgcaggcatcctcaagaagatcggcgagctgtgcgacaagacgtacgaccccgcggacgaggagaacgtgcgcgccttccgcatcgtggcggaccacacgcgcaccgccaccatgatcatgggcgaccgcaggggcgtctccccctccaacgtggaccagggctacgtcctgcgccgcctgatccgccgcgcggtgcgcatgggcatgaagctcggcctgccggaggggtccctggcggagatcgcgcaggtggtcatcgaccagtaccgcgacgtctacccagagcttgccgagaacagcgcctttgtcctggagcagttcaagctcgaggaggagcgcttccagcgcacgctgcgccagggccagaaggagttcgacaaggcggtgtcgcgccttgcgggttccacggtcatcgacggcctgaccgccttccacctctacgacacctacggctaccccatcgagatcaccatggagatggccgccgagcggggcctgaccgtggacaaggacggctttgacgagaacttcaagaagcaccagcagaactcccacgccggcgcggagcagcgcttcaagggcggcctggccgaccacagcgcgcagaccgcccgcctgcacaccgcgacgcacctgctgcacgcggcgctgcgccaggtcctgggcgacgaggtcgcgcagaagggctccaacatcacggccgagcgcctgcgcttcgacttctccttccaccgcaaggtgaccaaggaggagctcaagcaggtcgaggacatcgtcaatgccaacatccaggcggcctacccgatcaccgtggaggagaccacggtcgaggaggccaagcaggccggcgccatcggcctgttcgagtccaagtacggcgagcgcgtcaaggtctacaccatgggcccggcctccaaggagatctgcggcggcccgcacgcctccaacaccgccgagctcgtctccttcaagatccagaaggaggagtcctcctccgccggcgtgcgccgcatcaaggcggtcatcggcgccaagcccgaggactgattccccctgcgccaaaaacgcagccgagcctgccccgcaaacattgcgggccgcaggctcgttctttttttatacttgcttttcaggaggcgatttttcttgaagtcctttgacgatgtcgtgttcaacctgcaccccattgacctggccgccgggcagaaggccgtcgcgcccctgctccttccgggggaggaggtcgtggccgcctttgccaccgtgcgcgacaaggtggtcttcaccgaccgccgcgtcatcgcggtggacatccagggcatcggcaagaaggtgagctactgcaacctgccctactcccgcatctccagcttctgcgtggagacggcgggcatgttcgacctggacagcgagctcacgctgcacacgccttccgggtccaagaccacgttcgagttctccgcgggcttcgacatccgcggcctctgccgcgcgatcgcggcgcgcatcctctgatccctagcgcgggcgggtgcggggccgtgtgcggggccgtgtgcggtcccagctcccgtccagcagcgcgaggatctgatcgtcgctcgccccgccgtccagggggatggtcagccagtgcgccttgttcatgtggtaggcgggcaaaaagcccggctccccccgcagggaggccacgagcagcgggtcggccttgacgttgagcacgtccgcgcgcccctccccgggcaggcccagccgcgcgcgcggcacggtcatgagcagggcgaaccacttgcccccggccggatggcgcagcaccgcgctctccccgtcccgggcaaagggatagtcggcggcgacgccgtagcgcgcctccacgagccggagcagttcttcccggcgcatgttccttccccccttttctgcaaaagaagcgcggagcgcaagcgccccgcgcttttccctgcgcgtcaaacgttgaagcggaagagcatgatgtcgccgtccttgacgacgtagtccttgccctcggagcggaccaggcccttctccttgcaggcggccatggacccgttctccaccagcgcgtcgaaggagacgacctccgcgcggatgaagccgcgctcaaagtcggagtggatcttgccggcggcctggggcgcggtcatgcccttggtgatggtccaggcgcggacctccttgggcccggcggtgaggtaggagatcagccccagcagccggtagctcgtctgcacgaggcggtccaggccgctggccggcaggcccagctcctgcaggtactccttgcgctcctcgtcctccagctgcgccagctcctcctcgatgcgggcggagatgacgaggacctccgcgccctcgcactgggcggcctcgcgcacggccttgaccatgggcaggtcgtcctggccggggccgatctcgtcctcggcgatgttggcggcgtagagcacgggctttttcgtcagcaggaagagggactttgcgtactcctcctgctcctcggtcagcgccacggaccgcgcgggcagcccggcgtccagcgcggcggcgatcttttcgagcacctccatctcctggcggctcttggcgtcgccggactgggccatcttgcgggtgcggtccatgcgcttctggatgctctccaggtccgcgtagatcagctccaggttgatggtctccatgtcgcgcacggggtccacgctgccgtcgacgtgcgtgatgttctcgtcctcaaagcagcgcaccacgtgcacgatggcgtccacctcgcggatgtgggagaggaacttgttccccaggccctcgcccttggacgcgccgcgcacgagcccggcgatgtccacaaactcgatgatggcgggcgtgtacttctccgggtggtacatctccgccagcacgtccagccggctgtccggcaccggcaccacgcccgtgttcggctcaatcgtgcagaacggataattcgccgcctgcgcccccgccttggtgatcgcattaaagagcgtgctcttgccgacgttgggcagacccactacacctagcttcattgctctctcaacctctcctaagccctgtcttttttggcgcgcagcctgcggccggcgcgcccatgtacccttcattgtaccatgaaccgcccattttcacaatagcggccttgcccccgcgcgcaatgccgggatttctttctgaattttcccccttgacagaacggaagattccgcgtaatatgaagctagcttcacatgaaggaaacttcacatcacgggaggggaggaagcgcccatgaagacgaaactgcgcgagctgcgcacggcgcgcaggctgacgcagcagcagctcgcggcccaggtgcacgtctcggcccgaacgattctctccatcgagaaggggcagtacaacccctcgctgatgctggcctaccggctggcggaggtgttcggcacgagcgtggaggacctgtgctgcctgaaggaaaacaaggaatgggaggatgcgcaaaatgaggaactgtaaacggatgccgtatgcgcagatcatccgctggcggattcgcgtttcctacgcgctgctggtgctgatgctggcctacatggtcctcgtcgcggagatgggcggcggcgactcgcggcggatgacggacctggcgagcgcggtcagcaggctgctcttcttcggcgggttcggggtcgtcgtctcgcggatcgtgcacaacaagcgcctgctgcgggaccgcgcgcgcctgcgggagcagcagctgcgcgagcaggacgagcgcaaccagtacctgcacgacaagagcggcggcgcggcgctggacatcctgctggtgctgctgctgttcgccacggtgacggcggcgctgttcagcatggcggcgttttccgcggtgtttcccctgctgctggcggcgctggcgatcaagggcgggctctacgccctctacagccgcgcctgcgcctaaaaattggaggcgaaaagcagtatgaacgcccagttgctggggtttttcagcggttttccaacgcatcactttacggatcgcattgcagaggtcctaagggaagaactgaacgtccgcgacagccttgtgttcatcagctgccagccggaaaattccgcgcaaaacgatgaggatgcagagggaatgcaacgctgcaatttcggttcctgtgcgagaccggcatgctggatgcgattcgccgaagcagcgctgtactattgggcgtgagcgcaggcgccatgaacatgggaaaacatgtggtggatccatatgaatcccttacgccttatgaagggttgggacttgcggatcttacgatcaaggcgcattatccgtttgaagaggaaacctgttacaatctttgaagcaggtttccatggagctccccgtgtgcctcatggaggatgaaagcgccatttttgtaaaaaaagaccgcattctacaaatcggccgaatctatcggatgtgcaagggagagattgctccgctggcacaggagcaattggaacagatgcggatttgaaacggttcgccacggtgacggcggcgctggcggtcaaggccgcgcttgcgcagaaaaaacaggagcgccctctccgccggagcggagggggcgctctgcgcttcctcagaggagcagcgtggcgtcgccgaaggagaagaaccggtagcgcatctgcacggccgtctcgtacatgtgcagggcgttttcccggcccatgaaggcggaaacgagcatgagcagcgtggactcgggcaggtggaagttcgtgatgagcgcgtccacggccttgtagcggtagccgggcatgatgaagatctgcgtccagccgctgcccgggtggacgacgccgtcctcggtggcgacggtctccagcgtgcgcacggaggtcgtgcccacgcacacgatgcgcccgccgcgccggcgcgcggcgttgaggcggtcggcggcctcgggcgtaaccatgtagtattcgctgtgcatgtgatggtcctcgacgcgctcctccttgaccgggcggaaggtgcccaggcccacgtgcagcagcacgggcaccacgtccacgcctttttgccggatgcgctccagcagctccggcgtaaagtgcaggccggccgtgggcgcggcggcggagccctcctccttggcgtagacggtctggtagcggttcttgtcctccaggcgctcggtgatgtagggcggcaggggcatctggccgagctcgtccaggatctcctcaaagacgccgtcgaagtggaactgcaccaggcgcccgccgtcctccgtggaggaaaggactgtggcgcgcagcttgcccccgccaaaggagaaggcgacgccggtctttgcgcgcttgccgggcttgaccagcgtctcccaggtgtcgtaattcacgcgccgcaggagcaggaactccatcgcgccgccggtgtcctcccgctccccgatgaggcgggcgggcagcacgcgcgtctcgttgatgaccagcgcgtcgccggggttcagatagtcgatgacgtcccggaagatgcggtgctccatctccccgctggcgcggtggtagacgagcaggcgcgactcgtcccgcacgggcgcgggggtctgcgcgatgagctcctggggaaggtcgtaatagaagtcctttgtgttcatggttcgtcctcttcgctttccaaatcgtccacgtccatgcggagctgctggtggagcgcgccgctggcgctggcggggtagcccatgtgctcgcagcccagggccgtgaccacgcggccgcggggcgtgcgcatgatgaaccccagctgcagcaggtagggctcgtagacgtcctcgatggtgatggtgtcctcgcccgtggccgcggcgagcgtgtccagccccacgggcccgccgccgaacttctcgatcatcgagcgcaggatcatgcggtcgatgtggtccaggcccagcgcgtccacggcgagcatgtccagtccctcgcgcgcgacctccaggctgatgcggccgccggcgcgcacgaccgcgtagtcgcgcacgcgcttgagcatgcggttggcgatgcgcggcgtgccgcgggaccggcgcgcgatctccagcgcgccgccgtcgtcgatctccacgcgcaggatgtgcgccgagcgcttgacgatctgggccagctgctccgggttgtagagctccaggcggaaggtgatgccgaagcggtcgcgcaaagggttggtgagcatgccggcgcgggtcgtggcgccgatgagcgtaaagtgcggcaggtccatgcggatggaccgggccgagggtcccttgccgatcatgatgtccagggcaaagtcctccatggcggggtagagcacctcctccacggcgcggctgaggcggtggatctcgtccacaaagaggatgtccccggtgttcagccccgtcaggatcgaggccaggtcccccggccgctcgatggccgggccgctggtcacgcgcagctgcgcgcccatctccgcggcgacgatgcccgcaagcgtcgtcttgcccaggcccggcgggccgtagagcaggatgtggtccaggggctcgtgccgcatggaggccgcctgcatgtagatggacagcgtatccttgatggcgtcctgcccgcagtattcccgcagggttttcgggcgcagcgtggtctccgcctcgtcctcaaacgggttgtagtcgcttgcgatcattctgtcttcgggcatggttcctctccttttcttctccctttacccctgcgccatggcgcgcagggcctggcggatgagctcctcggcgctcgcgcccgggtccttgacgcgggagagcgcggtcgcggcctcggcctgcgtatagcccagggccatcagcgcggcgagcgcgtcctgcgcggcgctgccctccacaacggctgcggcggcgccgcccgcggcaaagtccccgaccagctcctcgtccgaaaccttgtcccgcagttccagcagcaggcgctgggcggtctttgcgccgatgcccggcgcggccttgagcgcctttgcatcgcccgctacgatggccagcgcaaggtcccgcaccggcagcgccgacagcacccccagcgccatcttcggccccacgcccgagaccgaggtcagcttttcgaacatctcccgctcctcgcgcgtggcaaagccgtagatctcccagacgtcgtccttcttggccacgaccttggtatagacgcggcagcgcgccccgctgcccgagacggaggagatggtctggggcgtcgcgctgacgaggaaccccacgcccccggcctccaccaccatggcgtcggcatacttttccgtcacgcgcccctcgatataggcaaacatggccttccctccctagattctgtagttctggcgcatccgcatggagtgcgcgtgcgtgatggcgatggccaggccgtccgccgcgtcgtccggccttgggatctccggcaggttcagcaggagcttgaccatctgctgcacctggcgcttgtccgccttgccgtagccggtgaccgcctgcttgatctgcatgggtgtatattcaaacaaattatttgtatgtttacgcatcgccacgatggccgcgccccgcgcctcgcccacggcgatggccgtggtgacgtttttgcagaagaagagctcctccatggcgatgtcgtccggatcgaagcggcggcagaggtcctccacgccctcgaagagcgcgagcagccgctggggcatgggcatgtccgccggggtggtcagcgccccataatccagcaggcgcggcttcacgctgtcgtagtggatcgcgccccagcccatcgtggccaggcccggatcgattcccagtatggtcatttcgttttcctcttgaattacagtttttttacacaaaggggcttgtatttttatgcaggtagatgtatactcatttcatcacatgcgcaagacgctcatgcaggaggaacgcatcatggcagaaaagaaaaaggtcatcctcgcctactcgggcggactggatacctccatcatcatcccctggctgaaagagaattacgactttgaggtcatcgcggtggccggcgacgtgggccagggcgaagagctcgagcccctcaaggagaaggccatcaagaccggcgcctccaagatctacatcgaggacctgcgggaagagttcgtcaaggacttcatcttccctactattaaagcacaagcggtttacgaaggcaagtacctgctgggcacttcctttgcgcggccggtgatcgccaagcgcctggtcgagatcgcccgcaaggagggcgcgacggccatctgccacgggtgcacgggcaagggcaacgaccaggtccgctttgagctgacgatcaaggccctggcgccggacctggagatcatcgcgccctggcgcatctgggacatcaagagccgcgacgaggagatcgactacgcggccgcgcgcggcatcgacgtgcccgtgaccaagaagaagccctactccatggaccgcaacctctggcacctgtcccacgagggccacgacctggaggacccgtggaacgcgccgcaggacgacctgtacatgatctgcaacacgccggagcaggcgccggacgaggcggaatacgtggagatcgagtggatcaagggtgagcccgttgccgtcaacggtgaaaagctcggccccgtcgccctcatcgagaagctcaacgccctgggcgccaagcacggcgtgggcattgcggacatggtcgaaaaccgcctggtcggcatgaagagccgcggtgtgtacgagacgcccgccggcaccatcctctacgccgcgcacatgaacctggaggagctctgcctcgaccgcgagacgcgccacttcaaggacacctgcgccatcaagttcgcggagctggtctactacggccagtggtacacgcctctgcgcaaggcgctgagcgcgtttgtggactccacgcaggagaccgtcaccggcgtcacccgcgtcaagctctacaagggcaactgcatccccgcgggcgtcaagtccccctgctccctgtactccatggactttgcgacctttgacgcggacacggtctacaaccagaaggacgcgggcggattcatcaactgcttcggcctgccgctcaagatccgcgccatgcttctgggcagccaggacctgctgtaaggcttcctcgtttttcctttccctccgcgcttccggcacgcccggggcgcagggggattccatttaccagcttccgtcggggcgggcatgggcgcatgtccgccccgacgatcgtcaaggagggtatttcgcatgaaactctggggcggacgctttgaaaagtccaccgacggcatggtggacgacttccactcctccatcacgttcgacaagcggctctacaagcaggacatcgaaggctccatcgcccacgcgacgatgctgggcgagcaggggatcttgaccccggcggatgcggacgcgatcgtcgcgggcctgaaggacctgctccaggacattgaggcgggcaaggtggacttccagctcgacgccgaggacatccacatgaacgtcgagacgctcctgaccgcgcgcatcggccaggcgggcaagcgcctgcacaccggccgcagccgcaacgaccaggtggccctggactgccgcatgtacgtcaaggacgtcgccgacgaggcggtggcgcacctggcggagctgctgcacgcgctgctggacgcggccgaagcgcacaaggccgacatcatgcccggctacacgcacatgcagaaggcgcagcccatcaccctgggccaccacctgtgcgcctatgccgagatgttccggcgggacatcggccgcttccaggcggccaaggcggctgcggacgccatgcccctgggcagcggcgcgctcgcgggcacgacctatcccctgaaccgcgcgcgcgtggcggagctgctgggcttttcccagctcacgcgcaactccctggacggcgtctcggaccgcgacttcgtgctggactacctttacgcctgctcggttacgatgatgcacctctcgcgcttctgcgaggagctcatcctctggaacacgaacgagttccagttcgtcgagatggacgacgcctacgccaccggttcctccatcatgccgcagaagaagaacccggacatggccgagctcacccgcggcaagaccggccgcgtctacggcgacctgctggcgctgctgaccgtgatgaagggcctgcccctggcctacaacaaggacatgcaggaggacaaggaggcgctctttgacgcgcgcgacacgctcatcaagtgcctgagcgtcttcaccggcatgttcaagaccctgcgcttccgcacggacgtcatgcgccgcggcgcgagcggcggcttcaccaacgcgaccgacgccgcggactacctggtcaagaagggcctgcccttccgcgacgcgcacgaggtgctgggcaagctcgtcctccactgcatcggcgaaaacaaggccctgctggacctgcccctggaggagctgcgcaccttctccccgctctttgacgaggacgtctacaccgcactctccatggagacctgcgtgaacacgcggcgcctccccggcgggcccgcgccggacatggtccagcagaccatcgacgaggaccgcgccttcctccgctccctcgagtagccggcgcccggcgggtgcgcgagcgcctcggcgtgcggggctccgcgccccggatggccaagggccatccgcttttccggcgcgccggaaaagcgggcgaatgctgcgcattcgcccggggcgcg

SEQ ID NO: 2694 - DNA, 2999 bp, Unknown
  16S sequences of unknown bacteria
gcagcgcgcctgcgggtagcgcttctggaccgccgtcgcgttggcgacgacttcctggatgtaggggatgccgagctgggctgcgaggtctttgcttcccgagccgctcatcgagaagcggcaggggcggtcggggaagcgctcgaagacctcttcgacgatggcctcgaggctttcgatctggtgcgcgaagtggcgccggtaggtcgagtagaggacgtcatgagtctgcgggtcgaggacgacggccttcgtggtggtggagccgatgtccaacccgacgctgtaggttgattgcctgggtttctcgaagtcgattacgtcgctcaattcattgcctcgctcatctacgtgcttggtaattcatcaagtgccagtaaaagggtactcagttaattaacttcaattgagatactatcgcattttcatcagaataatcccctcaagatgacacttgaagacacgaagagggccgcccccatcggggcggccctcgtgctcgaacatgtgaagctgtgtatggcggttactcggtttgagctgctgcttcctgagccttctttgccgcctcgaccttgggagtgagctcttcgacagcgcgctgcgccttgagcaggtgcgcctctgcgacggtgcggcgaccgaacttgcccttgaagatcaggaaggtgaacaggccggggaagaacaggcccgcgacggcgagcagaaagccgccgaggtgggtgagggcgacggcggtctcgccgagcgcgaggtccatgccgacgttgtacatgttgtagccaccgacggggatcatgacgctgaagccctcgccgaaggtgctcgccaggaagccggacaggccgcagggggcgcagaccgcgcccatcatccatgcgaacatcaagatccagacgggcttggccttgggggtgatcgacttgacgatgagccagacgatctggaagacggcggtcaggatgccgcccatgagaaacgcgcccgggaagacgagcggcgtgctgttggcgtcaaagtgcggcgtctgccaaccggccatggtcatgatgaagccgaacaggatgcagacgacggcgccgacgacgttgaaccagatgacgagccacaggcctgcccagacggacttgcccatggtggcacccttggaataggggccgtgcatcttcatgccgaccgccatggcgaagccggagaaggggagcagcgcgccgaaggtcgcccactcttcgaagtactggtagttgccgaagccacccaagaagcagccgacaacgcccatgagcagcagaaccgagccgccgatccagaactcgagcggcgttcccgtgaacgcggtgcgcgtgcagaccagcattgcctgcgcgatgagggcgagcaagccgcccagcaggaagctgtagattacggtcttataaggtttcatccccgtctccttacaaacaagccaacaaaaaagcctgcggtgatgcatgcgccgtaggctttcaaacctcaaagattataacggttcggtatcggtttgctatagggaatgaataattcatgcgccgcttgctgctttttggctgtggaggggccgttggtatgtgagaatgcggcatgtgagttcttgcggcgcgggccgtgacgagagattggacatgttcatgcccgagtttatttaccagatgtatcaggcgagaaaatcccatgggagcaaggtcatcctcgacgatgtcaccttgagcttctacccgggtgcgaagatcggcgtcgtcggccccaacggcatgggcaaatcgacgctgctcaagatcatggccggcctggaagaggtcagcaacggcgaggccaagctgacccccggcttttccgttggcatcctccagcaggagcctccgttggacgatgacaagacggtcatcgaaatcattcgcctcgcgtttggcgatgtgctcgcgaaggtcgagcgcttcaacgaggtgtccgccgcgatgggagaccccgacgcggacttcgatgcgctcatggaggagatgggcaagctccaagacgagatcgacgcggccgacggctgggacgtcgaccgccagctcacccaggcgatggacgcgctccagtgccccgatcccgatatgcccgtgagcgtgctctccggaggcgagcgcaggcgcgtcgcgctgtgcaagcttctgctcgaggagcccgacctactgctgctcgacgagccgaccaaccacctcgatgccgagtcggtgctgtggctcgagaaccacctgcacaactacgagggcgccgtgctcgccgtcacgcatgatcgctacttcctcgacaacgtggccgagtggatctgcgaggtcgaccgcgggcacctatacccgtacaagggcaactactcgacctatctcgaaacaaaggcgaagcgcctggcagcccagggccagcaggaggccaagctcgccaagaagctcgaacgcgagctcgagtgggtgaggagttctcccaaggcacgccaggccaagaacaaggcgcgtctggagcgctacgaggagatggcgagccaggccgcctcgatgcgcggcatcgacttctcagagattcacatccccgtgggcccgaggctcggaagcaaggttttggtcgtggagcatctgcacaaggagttcgatggccgcgtgctgttcgacgacctttcgttcgagctgccgcgaaacggcatcgtcggcgtgatcggccccaacggcgtgggcaagtcgacgctgttcaagatgatcgtcggcaaagaggagccgacgagcggcaccatcgagctgggcgagaccgtcaagctctcgtatgtcgatcagaaccgcgagggcatcgacccggacaagaagctgtgggaagtcgtgtccgacgggctcgacatcatgcaggtgggcgagaccgaggtgccgagccgtgcctacgtcgccgcgttcggcttcaagggagccgaccagcaaaagcccgcaggcgtgctgtccggcggcgag

SEQ ID NO: 2695 - DNA, 17617 bp, Unknown
  16S sequences of unknown bacteria
tggcagtcaccgcctcctgtttgcgggtaaaataagtaatcgccggtttttctccgaattttcgggaaattccgtccagatatgcgggaaaagtctcatagtaatcagccttgttcagcgggattcttttcatatgggttcctcctgtctcttccaaccattgcgccggtcctcggcaaagctgccggaccgcctatttctctaaatcggccagatccttttgtaacctttgcttgtcctgcaaaacccgcaggaacgcctctaccagcgttgcgtcgaactggctgcccttgccggcgatcagctcgccgaccgccctgtcctgccccaaactggaccggtaacgccggttggaggtcatggcgtcataggaatccgccaccgctatcatccgtgcttccagcgggatctgttccccgcgcagtccgtcgggatacccctttccgtccattctttcatggtgggcacggacaatcggcacaatcggctggatgcagctgagcggggacaaaatccgcgcgccgtcggccggatgctcctttattttggcatattcctcgtcggtcagccgcccgtctttaaacaaaatttcatccggcacaccgatttttccaatgtcgtggaacaggctcgctacacgcagtctctcgcaaaaatcctcgtccctgcccatctcgtgggcaaggcgcactgcataataggccacccggtcggaatggccgcgggtgtaaatatcctttgtatccaccagcaggcgcatggcgctgatgatctgcgtataattttcccgcagaacatcgttggctctgaccagttcctcgtttttctgaatcagcagccggcgcagcaccctattcaaaaccaccgacgacgcctgccgcgcaaaaatctccagcagctggcgctggtagtgctgaggggccccttctgtctgaacgcccagatatccggcgatttctttttcattgacaatcggcgcgataacccaatttccttctgtttgaacgatatcctgcccgatttgctgttggaaaagcgaatctggattctccagcggcggcgagccgatggagcgaatgaaataggggccggtctgctccgccggcggctgctccagaaggcttttccactgtaaagccaaatacccgctccggccgtccaaaagctcttttgccgcctgcacaagcgcgtcggcaacctcttcccggccacgcaggctgtaaatccgcggcatggtctcggtgattttggtcagccctttttggtagttttgaatggtgcgcatctgcttgatggatttgatgcaggattccaccagaagttccagctggtcgaaccggtcgcttttttcgtaatatccctggatttccaaatcccggatggttttaatgggaggcgccatgcttttatgcccggtgagcaggataataaacaaatcctggttaaagctgcggatctgctccaccacctggtcaccgcagataggcgtcatcaaaaagtccagaagcagaatgtcgtaatgtccggtacgcacccgctctatggcctgatacggatcgttttccgtgtccacatgatagccggaacgctgaaaatatgtttgcagcgtcaacgtcatggtagggtcgtcatccaaagccagaatcgaatagctgctgacgacgtccgctaccttttgatgctttctcattgcctgctcccccctttgtcattggattgggccaccgaaactgcgcacagcgggatcgacatgccgaaaatcgcgccgccgcccggattgtcctccacccacatgctgccgccgaattttccgcggaccacggtattggaaatatacagccccagcccggtgcccatagtccctttgctggtgatcatctctttaaacagccgctttttcacctgcggcttcacgcccgggccggtatcctttacatagattttcaagtcgtccccgtcctgcttcacgccgatggtaatcaccccgccgccggactgtttctgcgcatatacggcgttggacagcaggttgttgagcacctgcaccagattattgatgtccccgtgcagggtaaaatcccggttctcgtcctcgccttccacctccagcgtacagttgccgctttgcagctcatggcgcatcagcagcctggagcgttccaccagttcgctgatggtgaacgaggtggattcggaaaggttgaccgtggccgcctgccctttgatcgcggtgatgatatccgacatatacgccgttgcatcccggatgcgctggaaccattcgcccatttcgccgtagatttcccggtaatcatccggggtgacttccgcatcccccaggctgccggagcattcctccaccaggtcctccacggcgaaaacacagccggaaatactcataatcggcgttttcaggttgtgggtcaggccgcccatcatctgccccaaaaaagccatgcgctcctgttccatcattctcgtctgactgtcctgcagctgctgcatgctctttttcagctgggtgatgtctttgtaaatcaccacaaacccggaaagtttttcatgaatgatcagcggcgtcacatcggtgatgtagtaattctttttatacaaatccccttcgtacacgcctaccgcctgttcgtaggaaatggtggaaccgctttggcggcaggagtcgatggcggtcatgagattataaaccgccgtctttttcgccacgtcctcttcctgcacgctctcggacaggtaatggttttccgaaataccgaaacgggaggcaatcatctcctcaaacggcttattgtaggtgatgaccagcccctcgtcgctgagcaccagataacagtcggtaatccagtccaggatatgctgggttgcgatgggcttaatgtccagcagatgcagctgataaatggcgattccattgcacacaatcgtcgctacaaagctcaaaggcgttgcggtaatcgggatatcaggcggcccgaaggtggcgattgagctgaccaccagaggaacgatgccgccgacggaaaagaggatacactgttttaaatacaggcggctgtcgttttttatcgcaaagctgatcatcaaaacaatgccggtgaccaggcagaaataggtatagataccggaaagataaatataaggcccgaacacgatctcacttttgaccacggaaaatacccggtactgcaaatggtgaatcgggttcgtccagacgatcagattggtcaggaaaggcaccagcaaagttgcccagcccaaaggccgcattctctcccagcctttggtgaacaccagcgcaatgcacaaggtgaaagccggagaaaaggcaacgccgatataggtcaaagaatcccacacccaaagcatcgccgtattggccgggtcggtatatttcatacataacagcgctgccagccaaacgccaaaggacactgcgatccccagataaagtttatggatcagcggcagatgccgcatttttacgctccatatgataaaaagcccaatggcaacaagaataaccgtaaatatggttgccacccaatcggaaatcatcctgctcttcctcctttagcgatcttgagaaaatgcccgcagcaaaaccgaaggttccgccggcgcacgggcaatccccagcgcggccagctgccgccgggtcttgacatcactgacctgaatgcggaccgccggccctgcgcaggcgcggttccacaaatccacaagcgcggaaagggcctccgggccgttggtttccagcccctttgccaatatcccgggaaatgctttctccggcacaacggcaagctgcgggcagaccgcccgggccgcagactccagcggataaaggcgccccagcagatgccagaccctgccgccgccctcccgcagggcaacaatttcccgggcgcaaacgtctaccggcgtcaaatccaccggcaccgacgccagacaatccggcatggcgcccaggacggcgatgctccgcaacagccggaaaaatgcgttttgctccggatttttctggaacacaccgtcgctggcgcggcccaccagccttcccacccggtaaatccgggcgtccaggccgttctgcaccgcctgccgtacctgctgctctgccaggaatttggactttacatatccgttgtcctgccagttctggccaatatccagatcattctcgtcaaactgcgcggcagattccggcagatccagcagatattccccgctgacgcttgccgtagaaatatggtgcaggcgggcgccggccttttgggcaaacgcgattatctcttttgtgccgcccaaattgactgccagcaattccttttcctccgccgcatagtggcggacatccgccgcgctgtggtaaacctcctccacccgcgaggccagcgacgcgtaatccgcctgcgccatgcccagattgggaagcgttatatccgcgcggagaatttctattttcgcggtattttcctgtatccagtcatacccgaaatcatcgcacagtatctgcaacagccgcgcgccgtttccgtcccgcagcaggcagatcactttcggcgcgccggcctgcagcagcgcggccaacaaatgcgcgcccaaaaatcccgtcgcgccggtgagcagcaccgttcccagcggccgggctgctgcaggcctggaacgctgcggcttctgcaaagaggccgggcccgggctgcgggcaagggtgccggtgagcagcgccgcctgctcccgcgcggttggatgggcataaaactgcgtcagggtcagggcatatcctttattgaagtaacggctgagcacattgagcgccgccagcgaactgccgccctgctcaaagaaagaacggtccggcagcagatcgccgctgcccagcacctgctgccaaatttgcagcagctcgtcctctccgcccagatgccggtccggctttgtcccggcagcatccgccgggccgcctgactgcaaaggccgatccgaaaccggggcctcctgcgccggggcaaacggctgctcctgcgggaaaggcggctgtgccgggctttcttccgctttggggcctggtttggattctttcctgtcttctcccggcagatcctgctgctgtgccaactgccgcagagcgggcagatccagcttgccgctggccgtatagggcatctgcggcaggcgccggtaagaggacggaaccatataagagggcagctgctcctgcagccgcgcttggatctgttctgcggcgggcggattttccccggtgcaggtaaaaaacgccagcagttcggctgagccgtccgcctttttcaagggcagcaccgccgcctcggatatgggctctatctttccgatcgcttcccggatctcatccagctctacccgctggccattgatcttcacctgcgcgtcccggcgccccagaaaatccagattgccgtcggcccgcaggcggcccatgtccccgctgcggtacattttttctccggggaaaaacgggtccggcaaaaacgcctgcgccgtcaaatcctcccggccgatgtagcccgccgccagacagtcgcctgccaggtacagctcgccgcacgcgctggggaaaaccggatttcttttttcatccagtacataaacgcggcagttgcgcagcggtttgccgatatgaaccggaaccccttcctgcagctgagcggctgtcacataaacggccgcctctgtcgggccgtacaggttgaaaacttttgccttgctcaccgagcgaaaatcccggaacagaccttcgctcaccgcttcccccaccaggatgatccggtccaggccgggcgctgcggcgcaaaaggcgtcgctgcccaggcaaagccgcaggcgggagggggtaaactgcatcatcttcaccgcgtaccgctccatcagggccgctgtttcccagggcaaaagcatctgctcatcgtccgccagcaccacgggaatccccatggccagcggcagcaggctttcggtaataaaggtatcgaacaccacattggtggtgcagaggatcggcccgtccaaaccggccatccactctttcatgccgcccagcaggttggacagcgcccggtggcgcagcatcacgcctttgggctgcccggttgagccggaagtatacagcacatacatcaaatcttccccgccggtttcacagggcagataaggcgcgcccgcgccggaatccagcgcaacgcaccggcagggcaaatcctcctgcgccagctttgccagcgccgtttttccgcacagggcgatcttcaccccggcagtctgcatcatataggaaatccgtttgaccggattggtttgcaaaaaaggcacataggcgcagcccgccagcaaaatccccagcatcccctcgaaaacgccttcctcccggcggcagcaaaggccgatccggtcgcctttgacggcgccctcctgccgcagcccggcggcgatctgccgcgcccgctgcatcagctgccagtaggtaacggcccggtcctgacaaaaataggcggtctcatcgggggtaagctgcgcgcggttttcgatcatccgatgcaccggctgattcagataaggggaggacagaaggttcggctcctcccagtaggtcagccggtcccgcaccgaaagctttggcagctcgtccactgtctgcgccgtatcccgcaccatcccgctcagaatggcttcatagcttctggcgtacagctgcgccgtctccggtgcgaacaggctggaggcgtactccaggacaaaacggtagccatcctcctgctgataggcctccaggctcaaatccagcttggcgctgccggtcgggaccggcagataggtaagcggctgcccgtccagcacaaagcggtcggcccgcagggggcgcagggaaaacaacgcctgatacagcgcgttctgcgcaaggctgcgcggaagctccagcatcgacaccagctcttccagcggcatggcctgatggtccagcaggcctgccgtttccacccgcagctgctccaaaaggtcggacacggacatctgctctgtcagtgtcagccgcagcggcaaagtattcaaaaaagggccgcagacccgccgcagctgcggctgcaaacgcccggaaaccggcgtgccgaccagcagatcccgcttgccgctgacggcggacagaaggatgccgtaggccgccgcaaacagcataaaaggggtgatccccttttgacggcacagctgctcgcacgcttcgctcagcggccggggtaaagcaaagctcacctgcctgcctttaaaatcaaagaccggcgggcgcggataatcggtgggaagctccagcccttcgggcgcagccgacagtttttcgctccagtactgccggtccggcaggctggaggtttcctttttggactgttggtaagcccagtcgatatagcttacctgcggcatctccggctctttctgctgatacagccggtccaaccgctccatcaccagcggcgtgctgagcccgtcgccgacgatatggtggctgtccatcagcaaataccaatgatccgcgccgtctgtccacagtgccgcccggaaaagcggcgcctttgccagatcaaacgggcgcagaaagccgtcggccgcctgctccagtgaaagggcctccagcaccggcagctcaaacattacccgatctgccagctggcaatacaatccgtccggccccatgtgaaacgacgcgcggaacagctcttcccgatcggccagcgtttggaacgcctgccgcaggcgggaaatgtccggcgcaaaagaaagcgcaaacgcaccgggcatgtggtaagcatagccgatttccgcccgacaggactgcacatagatactctgctgaaccagcgaaacgggatatctgccgcacagcggcgctttttccagtaaatccgccgccgctttgtccgcctgctgaccgtctaaaaacgcggccacctgccgcgccgtccggcagacatacagatccgaaattctcaggctttttccggtttgccgggcaatttctccaatggcctccatcgcgttgagcgaattgccgccatgaaggaagtagtcgctgtccgcccccagagaaggctgggacaaaatccgccggaaaatatccaaaagctcctgctcccaccgcgtatggggcaaatcgtccttttcttccatcctcggcgcgggcaggctgttttcatccactttgccgctggcggtataagggagttttgccagccggacgatggaagaaggaaccatgtaccgcggcaggtattccccgatgaaccgcatcagttccccttggggaagcggttcgtcggaggtatagtaagcggccaggatcccctgcccgttttgttccaatacttttgcggctgccgcttttacctgcgggtgggcggccaggcgcgccgcaacctcctgcggctcaatccgcagcccccgcagcttcacctgccggtcggtccgccctgccaaaagcagctcgccctcctgcgtccagcaggccagatctccggtgcggtagatccgctctcccgcttcaaatgggctggcaaaaaagctttgctcggtcagctgcggcgcgccgcggtacccgcgccccacgcatatgccgcctacatacaaatccccgtatacgcccaccggcagcggctgcatccaacggtccagcacgtacagccggcagttttccatcggtttgcccgctgtgatggcagcgcagccgtttaaccgtttgatactgacggccaccgtcgtctccgacgggccgtactgattgtaaatatcagcggtggtcagctgctgcaggcggtgcagaagatccgccggaaaagcctctccgccgcagataatgctgcgcagtccgcttaccgcccgggcaaaatccggctgctgcaaaaaggccgacagccgggagggggtcagcgacagaaatcccaccccaaacgaccggatcaaatccgccagcttctgcggggattcttcctcttcttcccgaggcagtaccaccgtgcgcccgtccagcatggcggcggcgctttccaatacaaatgcgtcaaaccccacgttgcacaccgaaagcaccgcgccagcgccgtatactgcctgcatggcctgcgacagattcaaaaggctccagcggctgatctccaccccttttggcacgccggtgctgccggaagtgtagacgacatatgccaaggcatccggcggcacggcccgcgccggcgcctggctttccggcaggttttccatatccacgcaggcgatgggcgccgggtccactcccagccgcgccagaatctgcggcgtgctcaacaccgcctgcgcgccgctttgggaaaggatttgccgaatgcggccggcgggcagatcgcaggacagcagcaggtagggcacgccggcgcgcattgcccccagcattgccgcgtacagctgcggcgtgcggggcagaaggacggcggccaaaggagactctttttcccgcttttggccgtccagcgcgttttccagcgcggcggcgacctgcgccgcctggcgctccagcgtttgataatccgtccggctgccagcaaaaatcagcgccgaccgggtggggtgcgcctgcgccgcagcagaaaatttctcgtaaagatccacagggggaagcggcgtttcggtctggttaaaagcatacagcacctgatcccgcaatgtacggggaagaatccccacctctgccaggggtttttccggatcgttgagcgcttcgtccaaaatccgcgtcaggcactgatgcagcacttcgatctgctgttcggaaaaaacctgggtcagatagtcatactccaccgaaaactggcggccgccctccatattgctcaggtgaacgcacagctgctccgcctgaaaaccgctgtaataccaccgtccggaaaaagcggcggcctcgcttctctgggtaaaaatccggctgtcctgataggacagggcaatctggaacaggcgcccttcgcccattttctgcccgcgcgccagccgctgaatgcgcccaaacggaaggcgctggtgccgcagcagctcataccaatgctccgtaaacacctcgctgaactgggaaaatccctttgtctcatccatcgggcaccaaaagggaagggtgctgacaaacatgccggttgtctgtttggttgtaaaattggagcggttaaacaccggaacgccaatcacgggattttccaggcgggccgcttttttcagatagatggccaaggccatgtaaaacacagcaaaaggcgccacccgccgctgctggcaaaaacgcatcatcgcatagctgacacttttgggcagcagatagcttttgcgctctcccaccgggctgaccgccgcgctgtgaacctgctggagcgaggccggctcgcagctttgctcgaagagcgctgcccagtaagcctcatcttttcggcaggcggcgctttgcagataccgctgctcctcgctgacatgcagccggtattccggcgcaggcggcagctgcaccgtgcgcccttccagcaaatccagatagattttttgcagtttgttgcacaaaagcacctgagaccagccgtcggaaatcaggtgatgcagtttcatcaggatcccgccgtcgttctcaccggttttaaacagccaaaaacggcacaaagcgccgcccagaaccggcatcggttctcgggccagtgcctgcgcccagttttctacgccgtcctgccccgacagagaaaaatcgaacactgggaccgcctcttcctccatcggcacaatatactgaaccaattttccttcccgcatttcgatacgggtgcgcaacgaagaatcggactccaggagcaggcggatgctcttttgcaaaagatccagccggaactgtccttgaatccgtaccgaggttgtaatgtgattgattgaagtgccggaatatgccctctctaaatcccagatattctgctgactctgggacaaagggaaggctgcattttcctcatgcatccgctgtgtcacgatatcctccatctcattcattgccaaattgaaaaaggcccgtttgattttttctgtttttcacaaaatacacgatatcccatttttatttataccttgaaattgacgaaaaagcaagaaaaacaggaaaaaagtctgcataaaaagagggaaaatcaggatttttgcgggaaagcggcaaagttgtggaataatatgtatttttattccatactttcatccattttcctcctccctccgtcttctttttccagggataagcgaccaggacgctcacagatcccgctgattttgccatttacttttggggaaatttggggaaagggggatgtataatagagttccattttctgcggctgcaaaaaatcccggttcggaccaaaagccgcattttttccgtaacccaaaacagaaaggcaggagatttttatgaagcagtatatcgtagacgctttttcggacagggtattccacgggaatccggctgccatctgcattttggaccaatggctcccacaagagcagatgatggatatcgcaagggagaacaatctttccgaaaccgcctttgccgtaaaaaagcaagaccggtaccatcttcgctggttcacccctgccggggagatcgacctgtgcggccacgccacgctggcggcggctggttttgagccggttcagcagccggcttttcacggcggggcgggttttccggttttttcggatgttttgtgcacccgccgaaccgacatatatatccccggtgcaggttccgggaaacccaaaaaggggccggggcgaagaatggtccggccggagggccttagctgttgaagcagcggcgtccgctaaaccgacgccaaaacacaaggcggattcaccggcgcttcctgccgcgaatccggttttttggcgcaaacctgtgaattttccactgttttttccgtgatacggatagaaaaaaaggcccggcttgggagcgttgttgtcagaatacccgcaggcgcatactgtgcgcccatacaggatgttttctgatctcaacgcccttttgccgggcctttttacgccgctttatcctttccggtgcttcttattcgggataaaccaggttttcctcccgaatacagtacaggcaggtgtccaaatattttttagcctgccattttgccataccgagattctggtccagataattgccgcagtcttttgccgcagcgcctgggatttccccctcaaaatcgcggataaactcgaacatgccggtaaccaggggcaaaatatcccgggaagcgtaatcaccgcttaaaatcaggtagttcccggtccggcagcccatggggccgaaataaataacccgctgcgcccagtccggatgattgcgcagataagtggcgcccaaatgctcgatggtgtgcagttccgcagtattcagcaccggctcccgattgggttttgtcatccgcagatcaaaagtcgtcagcaccgcttcccccgctttgtctttgcgggatacataaattcccggcagcaaatccaaatgattgatggtaaagcttgcaatcttttccacacaggtacatccttttttccagattactgccctttattatagcgaaaatgccgccgctttgcaatcgctacggccctggattttcttgcatccgttatgattttgtactatgctcaatcacaaaaaagcagggcgcgttttggataaaaaaagcccaaagagcgcaccggaaaggaaaagaagatgcagaattggtttgatactgcgccggaccaccggaaaaacgggtcctaccgctgggaacagtcggtgggccgggaggacgtcatcggcatgggcaccgccgacctggattattgctgcccagaatgtataaaaaaggcctgtcttgccgtcgcgcaggaaaatgtttacaactgccgcaagctgccggatacctattttcaggcggtaaccggctggtaccaaagaaaatacagtctgaacctggagccggactggctttccaatatccccagctctatcggggccatccgcattgccctttccgctctgacctgtccgggagataccgttatcatgcaaagcccctttttcggcccgctcgcccaagcggtagagggggcgggatgccgcttggcggaaaaccccatgacagccaaaggcggggtatatacgctggactttgacgattttgagaaaaagctgcggcaggaaaaacccagcgtctttctgctggtcattccccacaatcccaccgggcgggtcttttcccaggcggtactggaaaaactggttgcgctgtacgaaaaatacaatgtcaaaatcatttcggatgaggtacacgggctgatcatttacccgggcaaaaagcacatccctatcctctgtgtttcggctgccgcccgggcgcggtctgttcaggtgaccagcatgagcaaaggattcaatctgatggccctgcctcacgccatcattgctattgccgacccggcgctgcgcgaggcctggcacaaagcggctgacccctttgatttttattacgcctccaaccccttcagcgtcgcggcggtcacaaaggtaatggatggctccgcagaccagtggcttgccggcgcaacggattagctgcaaaaaaacaggaacatggctgtttcctttttgcagagggaggtgcccggcatgacggtcaccgtcccggaaggcaactttttattgtggattgactgcagcggcctgaaccttgcgcatccggcagaatttttgctggaaaaggcccgggtcagcgtcaacgacggagcagccttcggaaatgcctatgggcagtttatccgcgtcaattttgcgctgacccgccaaaaattgcaggaggcgttggagcggatccgtcaggcgctggacgaaaaggcataaaaagctgccggcgctggacgaaaatcgctgtaaaagcgcttctccccagatgagattggggccgccgggaaaacggcggtttcccgcactttcatttttggtttccccgctcaaagcgcttcccattgccgggaaggatcaaaacaaaagcaggatgccgttttgtgctcctgtttcaaaaatccatctactaatacaaaaaaaaggaaggggttttgccatgcggggcgccgtcggacgaaaaggtgcgccacaccgtttacccggatgttgtttgaatcccgtttttcttcccgcggataaaaaaggggttatcagagtcccgcctgccttgattggcaagcgggctttttctatttcaccatattttgcgccttgctgatgatttcctggatcccggctttcagggcttctactttctgaacctccgcttcatacaaggccttgtagtctgtttctgttttttctaccagcttcggcacatccaggtcattctgtgcgatccagccggaggatacgccgctgccgccccatccgtcatgcagcgcctgtcccggcccacataccacacttttgacgggtctgccgtagtatccttggttccctttttgataatgttcccgctggccttgatgccaaccgcgtactgcggatactgcacatccgtgtcaaactctacatgcaggtgcgggccgctcgtattggccccggtatttccgtatactcccagcacatcgccccgcttgaccgtctgtccggctttcaccgcgatagaatccagatggaacatgcggcaggccagcggggtggtgttcccgtcgtttcgctccacatccgggaacaccagcacaatggcgtttcccatgcgctgcgccgctgtcgccccgtccatgccgcaggcgatcaccgttccgtcccccgggctgtaaatggtccgctgacggtccggattgcccagatcaacaccgtaatgggtaaagccccaggctttggtatacgccgccattttgtatcccgcgttgacattgcattgattcaacggcagaatcagcttttggctcattgggtctcaccgtcccgatagggtctttcataagccatagctctttgactgtctttcagtccggcggtggttgggtcgttcacagcattccaaacgctggcaagcacggcggcaatcacaaccgggtttttcaccgcctgcagcagcaggttcccgattgccgcccagctggtcatatcctcccatgtcaggccgaaataggtcaggatgggcaagaccaccgctatggcagcctgcacccagaacaccgggtttttgattctgactttccagttaatacggttcatatgtattcctccttatttgatcaacatcgtagcaatggccacaaccagccccccgccgatggcagaaccgattgccgtcaagatgctttttaccgtaacgttccagttttcgccgggcttgccttccagcttgtccagccgctccccctgccgctcctgctccttgagcattccctccatattggtggccagccgttccaccgaggacgcaatccgcccgaatcggtcaacgctctgctccaacgcttcaatgcgccggttctggcgggtattttccgcgtcgatccgcttggcaaattcctcatgctctgcccgttcaatacagtcttccatttacgccacctctttccacaggctttcggtaccgattactcccggttcccatacgttgttatccaccaggctttcccacgtctttccgttgtgcgtgaccttatctcctttggaatatccgttggtactgcccggctgttcccattccgggataaccgacggctctgggatcaacacctttgcccacaaggacggcgatacatccggcgtccagctttcctgcgccgtgtgcgctgtcaggcatttatacaaaacatccgcgtaccgcacccggtctcctgcttcgtaggcactgttgggatcccatggttcaaacgcaaaagctgccgttgccgcgacttcatccggtgcatactgtgcaagctgcacgatggacactctgagttttctggcttccgctacataatcagtcatttttatctctccttgcctgtcaaaatattgtaagccttttctatgatggtataaacgtcgtccatatcaaatggctttttgtcttgaaatcggtctgaatatatcctcttgaccttccggccttttgggcgatatacgcctgatcgatctctctttcaaacatcaggctttttaatttccggtagtattttaaattgactgccatatatgttcctcctatcctaattgttggcttacccatggcccccattgttgccttgcccgtggctcgcatcgttggcttcccctagcctgcatttcttcccttcccgtggtccgcattgctaccctgcccatggcccccatttctgccctgcctgtggcctgcatcgttgccttgcctgtggcccactgtgtttcagccctgtttatgggacagcgtctatgccataatggatttaccgggaatggccccggcgctggacaaaaatctgttccatcgctttgcgaaaccgtttttctgcatggggtggttcccgatgcccgttaaggaccatcctcacgtattccggcgtgaccccgtttgcgccgcgagctgtctttggaaaattttgttgatcgaaatgttacaggcaatctcatcgatccattcgcaggcatagaaacaaaaccttctttcacgtgttgaaatgatgaaacacatatgatatgatttcattgttgttaaataacataaacacattagcttaatttattaaactttacatcttattatagctaattttattaaacttttcaacagtttgagtttaattttttaagcttctgcttttttcacaaatttgaggaggtcatcttgtgttttatgatctgttttgcgaattgtgcgcgagaaagggcattgccccaaccagagccgctcttgatatgggaatgagcaaggcaaccccgaccacatggaaaaacaaagggacaacgccgcaagccgctcagctgcaaaaaatcgccgattactttggtgtatcggtagactacctgttggggaacaccaaacaaaaagaaaagcccctcgtcaatgaagacgaggagctgacggagtatctggacgagctgaaaaaccgcccggagatgaaaatgcttttttctttggcaaaaggagccacgaaagaagacgtggaaaaagccgtaaagataattgaaacactattgggaaaataaggtgattgtttgggagatgtatttatcaaaaaagcaccgctgcctgcaaaaatccgcggcgttaccattgtaagggatgatgactacatcgtgatggtgaatgaaaatctaagcccgtccgcacgcagaaaagccatccagcacgaaatccggcacatcaagcgcggccattttgataatgacgatccggcgggcgccaatgagcaggatgtgggctgagctcttgccaacctgcctttgacggcgaatccgtatggcggttgtgagatccatttccctttcggaacagttttgtcaagatagaaaacggagatattacagataattttcact

SEQ ID NO: 2696 - DNA, 19965 bp, Unknown
  16S sequences of unknown bacteria
tcctcacgggccgccttgtcaaccttagacgggcggcctgtgaggggctccgccgctttctcttttttctccgcagtcggcccggcctgctctttcggcgggcggccccggcgcttcggcgctttttcctgcccgtcagcctcagcagacggaacctccgcctttgatacggcatcccgcgcaggtgcccgccgctgggacatcagctcgttgatcttatcaaaatcaaccaccacctcaccaggggcaggccgggccggggcgtcctcacccatgccagggatcacagactgcttcggctcagtgtgttcctccgcttttttcggcgcggcggcttccggggccgggggcttctgcattgacggggcatcttccacaggcgtatcaccggggcgatcctggccaggggactctgggcttgttttcagcttgtcatctgccattcactaacctcctttaatttcagcgtgttgcataaaaatcaaagctaattttctatcgaaaaaattcccccctttccaagtctaccacgcaaaaagaccgcccaggtttttcccggacggccctctgcgtaatgtgatagtctttaattttattttttcggattgtaggctccgaaaagccttatttttgcagttttcctattttatatggcccttagggctgactttcctatgcccataacgggtttcatggtagtacggctacaatgacaagagcgccggaaggtggcataatatatgtgcagagtaattgatctggtgaaaaccggaaagaacatcgagcggcttctggctgaacgcggactgacagcaaaggacgttcagcagcgcttgggctttgcagagcggcgcccggtatatttctggattgcaggcaagaaccttccctcaatcgataacctgttcattcttacagaaatgctgcaagttccgattgatgagattctcatcgccaaggatgaatacatacagcagagaggtgaaaattcacatgagtgaaattgttcatcagcccgggaaattggattttctgatcgtaacaaaagatgtaagcgtgactgaattccgcagaaagccatccgcagtgtgggcctatttgaaaacgcccgggcatgtcattttcttcactcgccgcggcaagcgaaactgcgcgatcatgtccatcgagacccatgcttgcctgagcggtgattacgaaaagaccatgcgtgaaattgaagaagctgcggctgcatggcgcgaggagcagaaggctctgaggagggccagaagggaggccaagagtggtaccggaaaagattgctcaaatgctgacggcgctaaagacgcctgactttttcatcagggacaatagaaccgcaactgaaagcatccatgatatcctccgtgattatcttgcacgcgctaccgataccatgaccgttgaggtcgatgcagaactgcttatggtgaaaatgtatgaactactatattgctgatcttcatctgggtcatgccaatgcaatccgctttgacaatcgaccatttgctgatgttgatgaaatgaatgaatcacttatccgcagctggaacagcatggttaccaagcaggatacggtctatgtactgggcgatttcatttaggcaaaggagtcacagtggccagcctttcttgaaaggctcaacggcggaaaagttctgattcgcggcaatcatgatcccagagaattcagtcagaccaccaaacggtattttcaggatatcgcacctataaaggaaatcaccgacagcggcaagcatgtaattatgtgccattacctcatcccttttcatagggctgattatgatgaaaactgctatatgcttcatgggcatgttcataatacccgtgaaaatactttccttcttcgatggcgcgaagagattcgcaatgcctgcacggaaagacatcatgtccgcgggcagttcatcaacgtcggctgtatgatgccttggatggactatcagccaagaacattggcagaaatcatcgaacgggaggaggctgcttctcatgcattgaggctctggaacaaacagggccggatttctaatcttcttcatcctatctctcatctgcctgatagatatatggcagcgagtttcttcccggctgatgtgtcccaaatatgtgctgaaatatggcatgagcatccttccaagattggagttgtcagccagtcatctttaaaatcactccgcccacgtctcgaccgcatacatgccgtcatccattaccagcaatccctggtaaaattcaaatctcgccagaaaagcgccttcgggcgaatgaagcgtgtacacctccgtatttcccgtcacacacagggcgttgcgcttgcctgtcaccacaagcccggacaaccactctatcttttccccagtttcctcttcgtcaatctcaatgtcgatgtatccagcctcgcaatccaaacggcttgcggtgagcgtcgcgccctcaaacacgccttcatcaacccccagaaactcggccagcggagtacggcggatgttcaagggcttgatcgggcaatcaaactctgcttccaaatcgtaacccatgacctctgtaaagcaagctatgtaaagcgcataggcgttaggctccagattctccaccacccggttgcctgtgattgccaacgggatgatctccacaatgccatccgagccatagcgcacggcgctgtatgtatccaggccgtagtcgcgtatcccaaaggcttgatcctccatctgtggctcggccgcagcggcaatcaggctttccagttcaagaacgcggttcacatcaagccgcctgacaagagtcacgttctggcactccgccagaaatgccagccgttcttcatcggtatccggcagcgggtcgtcgctttgatattgccacacgcacccctcctcatctagcaagacagcttcagaacaaacgcctgatctgtcttgctggtagcagcgcatgagcaaaatgcgcgcgtcctccgcctcacagttcgctggcgcagcgaatatcagtatcagggctgctatcagtattagcgccgtccatgtccgctttttcttcatggatgattcctcctgtaaaatgctgtcatcggtcgggattccggctctcgccggcctcctgctcattcaggggcacaatcatattttctatcgccacgcacagcttcggatggtgaatgacaaagtgaatggtgggttttctacacttggatatgcttacccactttccttcactgatgaatatctgaatattccggaatgcgccacgaccattttcccgggcggtatagccggggtgcgactgcgcgaaggcgcgtgtgaggcgcaggtgttcccaatagtctgcttcgtcgtagtgaaccggcatcccggcaaacacctcagacatcgcgaccgacacgctctcctgcccaaactctttctgcgtcaggacggggaattcttcctcgtagcttccgttgtcgagcattgccgccacaaaacctttcatctgcgcgcaggcctccagcatacgccgcccatcgctgtcaggaacgccgtttttctccagcaatcgcgatagacattcctccgaaagcgtgtggggcggaagggtggtcaggagacttcggcgcttccccggcttaagcgcctccgcagcaaggaatgagccatagacgttttccgccgtcccgcagtagatatccatcagtggctgcgcctttttcagaatggcttcggcgcgccgtctgtaatatgccagatcgctgccggatttggaaaacaggtagcggccatgagcaaaattcccggagatgcattcgccctcaaccgccaccgcgccggaacagaacagcagatgcccgtaaacggcgttctgtctgccggggagataccacggcataatctgtcccgtcatgtacagcggaatccagctttccagccccagcatcatttcgccaaaggggcggttgaggtcatgcaccatatccaggcgcagtccctttttgaggattgccgccagtccgagcatccattttttggagaattccatatcctgcgccagttcctcaattggcatatcgctgcagataaataccggctcacgcgaccgggaaagcgccgtggccttgagaaaatccagcgtggcctgacggaagttctccagcccatagcatgtcctggtcgtaggaagctggaagggaacggtaggcaccttcaattcgtcaaagcggatagcgcgaatatagtcgttcaggtcaaaattgtccagcttttccaaaaaggaaataatcgggtttttctggctggccgcaccgctcagcagccactttgccacctcgcaggcgcaagcgccgtcttcgctgagcgcaccttgctgcacacccatcagatgcgcaagcgcagcgcgttcagacggctctgcgcaccggcgggccgcaaaattacccacaccttgcgcaaacgcggcggaattcgcgggcgtgcgctgtcccgtgcggatacgggacagataggaggggtcgaaattcagcgcccgcgccatatcgctggaacgcaggttaagcacattgatgagcagatcgaaattcactgcgagccggtttccctctttttcgtcatatctcagtgatttttgcagggccgaaagcagctccggctgtgtaaatccgtccattcctttacgctgcgcaaggcgagccaaccccttggagagattgagaagcggttcgccatccggcgcgggcgtacgctccccgcttcggtagcggctgataaccgccgtggacaagccgctggcgtcggccagatcctttgcggtaatgcctatttgatggatataaccgttaagagcctcttcgaatcgcatgacctcttttatctccttttctcatggccggacgccgtttttcctgccctgattataccatgaaaaggaggccctttcaaatccgttcctttcgatggcaaagcctgcgtttcctgcgcagcgatccagcgcttcatcattccgttctttttttgatgccttccctcgtcctgtcgatggcatcctgcgcatttttcaagtcctctaacttttcaagttcctccgtgcttagtgcttccaccgtatacatgccgtctggccgcgccagcagactgtcgctgaacacaaattctgcctccgccccctccggcgtgaccagcaggtacgttgtttcgccgccttcaggtttcagggcgctgcgcttgcctgtaaccgcgaggctttgaagccatgccagcttttcctccgcctccgtgccctcgagcgtccgttccgtgccgttttcccgcaccgccaccgtcgcgtcttcaaaaatattcttttcaacgccgcagaaatccgtcagagacatgcgctcaaacggcgtgggctgatacagaaattcatattcgtcgctgtccagatcattgcccagcacttccgtaaacagggccagataaaccgcgcgggcgttgatatctgtattttcataggtccagtctccccacttcgccaggcagatgatttccgcctctccaccgtctccgtaacggatggcgctgtatgtgtcaagaccgtaatccaatatatgtcccggaccacgtttcacttcttcaggctgtatggcagcgatcaggctccggatttcctccaccctgcgtttgtccaactgccccacgtgctccacgtcttcagttttacccagcagttccagccgttcggcgtcttctctgggcagccccatttcgttttcgtagtgccaaattccgccctcttcatccaggaacgccgcatctgcgtaaacgccccatcccacctgctgatagcaggccatcaggatgatctgcggccgctctcctccctcggccagcgccggcgccgccagcggcaggcacgctgccagcaaaaacagcataatccttttcagcatattctgttttcctcctgttatggtatgtcagcatcatccagaagccatccgggagcgcgccccatagtcaaggcgatagagggaaaatgcaaggataatccattcctttatgggcttatattcctgcgcacgtctccactgcgcttttccgctcatatataagccggcagcccattccctcatatatgccagccaatgcgcgcgatcatttatccggttttctgcggccctttccaagtccggaaagtccttcaacaatataaaccagccccatcaccgccggcgccacgcccagcgtaaacagcccggcgcccatcaccagtgacggtatgtggggcgacggataccctatctccgaagccagcagatatccgcccccgcccaggcaggccgccccaaggatcagccaaagcagggcaaagagcaggaaaaatgccggatgcatgttgatataacagtttaccatccacgccgtatgagggctgtatcccccttccggagggccccctgtattcagcgcggccacgatttcagcggcagtccgggcatacggtttcatgaacgcccctatcagcatccacatagccgcgccgcagactgccatgcccagagccgccggggcgcgcgtctctccgcgcagcagccaccatatccccatccctacgcatacaatcgtcaaaagtgccagcagccaccggaaaagccgcatcacgacaaagcatattctcgtctggcgcagggcatattcctgattttcgcgccatgtatcttccattctatccactccccctttcttatcgcttcctgactgcccaggcgctcctggcgtatacgacgcccgccgcccctaacggcgccccgatgagcgcaaaaaggacgctcagagggacaaacagccagaaaaactccctgaaatccacatctatcagaacaaaagcgatgcccaaaacccccattccggcgaatgcgaccgcgcaaaagagcagaaagcctgcgataaccgccagttttccacagatcgcgcccagcataggctcgcgcagcttctgtgtgtccggcgtatactccggcggaaaacttccgctttccccacgacgcaccgcagccaccgccgcttccacttccgcatacgcgctgacatagctcccgttgaatttaggcttacagagtttgatttctttgtatatcagtacaacgccaaacagcacaacgatgagattcctctcaatcagccccacggccaacatgatggccgccaccagtgcggcgataatgcccagtatccgatagccccaccgaaacatagccgccgacaccctgaagtgattcaggatgacctcctcgcgctccagccacgcattgcgcaggctttccatctgctcccgttccctgtcggctgataaatcccaggccatatttgccctccttccctgaaagctcgtatgcgccctcagcctgcgtagcgtattccctcaaacaacgcctgctcgccaacgccgccgataatatagccccagcccgcggtttcatcgggcgctatggtcaaataacccctgcggccgtcctgcacggtgaaccatgcccgggaaacgccgtctgtggcggtgatcagtatctttatttccgccgccagttccccccgggattccttcccggtcaaatccacataggtaaccggcactgccgttttcgccgtcaaagcctgctgcgcccaagtttcctcgctttgcaggtcgtattcaaagtgccacagcccgtctccgaccgtgaccagcttcccgtcctctaccgtcaggcggcgaatgcccatgtgggttcccagcgcgtccacatatccggccatggtcattccttccgcgtccatgcccgtaatccggccctgcgcgtattccgcgccttcaaacggcagcggcttgagctctcccgcctcatacgtcaggcaccatgttacgtcgtcgtcagacatgggatcgccgctcacgcagatctccttgacaccgttcctgtccaggtcggcaatccacacctgcgcctgcgagcagtccatgctccattccgcctgcgtcccatcttcttcagccacagtcatcttcacgcccgcgccgtcctctgtctgcgtccactggatcgcttccgtgccgcggttcctatcaaggttcatatccaatatctcgtccgccggcagctccagcgcggagaatccgttctccgtcgggctttctgccgccgccatagcaccaaccagcatgcataccgcgcagcacagcgccagccatcctttcatgatctttatgcctccgattttctccatcttttacaggcaggagggcagcgattgccgccctccccgcttcttattccgccgtctgccgaaccggcatcgcctccaggcagcccgacagcgccgttgtgaaccgttcgatcagtgcgctcaactgttcctccgaaagggattccagcgccacatccgtgccgccgagctgcagaggctcggcctcatgcagttcaaagctcagccccgtcagctcaggcatatcctccgttccaatcataagcctgcccctgccctgcagtccgtccgggccgggctccacgcccgcttccagcgtaaaggcgtaggtatccgcgctctgcgccgcgtccggacacagcgtgccttccagtgtaaacgcctctccgccgtcgggggtcataaacgcattcatctcatgttcgtattccattacgatttccggattgccgacgcctatgtagacctcgcctccatagcccggcaggccttcctccgtggtggtgggtctcttgagcgctcttatccgcagcagccccgtgtccgtctcgccctcgctgacggtcagctgcacaccccagcccgtcagcgcagtgtccggaatgcttaagatgcccacaatcagctgcatgtcgtcgcccaggcttccgtccacgagcgtctgcgaatagccaaggtcgaagaaatacggggtgttttcctctgcatagggctcaaagctcagataccattcatcggtcgcgccgtcctcctgcgtattggtaacaatgacgtaccacggctcggcagccgcatcataattcgtcccggcgcccagtacgaaatggccttcggactgcgcaagcaacccggctgcgccacgcatcatttccacaatcgcggcagatcccagcccctgagaggcgagcatcacgtccagcaccggagccagttgcccgtcgccttccagctggtcggccagccgtgtgagcagttctgccgcctgcgcatgtgtacaggtaatgtagatctcgtaggccacggcgggaaagccgtattcctcgggcacgtcgtagaattccttcacggacagttcctgcataaattcgtcaacgatcgcgacatacggctccatcagcggttccagcgtgccgagcaatccggccgtcatttcctccagattcattcccagcagcgtctcccagttcatcgtatagcgttcatccggcagaagatcgctcgctatagccaaaccctgcgcgtccgcatccagcgcgatgtcaaagcccacgttttcctggctttcccgcaggcccagttccagacgcgcaccctggctgaaggccacgcccagccgcaggacgagatccggcatctccgcttcaagggggataccctcgccgcgtacctccgccacaatcattgtaccgtgttcctgcccaaacgcctgagccagcagcccggacgcaatatcgcccggctcgtaaacatgggagaccaactgcccgccaccattatcccctgtggattccacggcttcctgctctgccagagcgccgggaaagcaaaacaccgttgccagcagcaaggccagcagcatcgtccattttttcatcatttttctcctgcatgatccgtctacttattggtaattgttaaaaaacgtcccagcgcagcagtatgcactgcgctccccccgtcggccagccccagaaccgccaccgcgtctcgccgttatggcggttcgtcacccgcgtcatcgctgcgttgatgccgtctataggcagttcctcaccatagccaaggagcagtacccatatatcccgctcgccgtcatatacgcgcttattgtagcagtactgcgccatcgcgtccaggtcgtcgaatgtcgcgccaaatccgggaattcccgcgtgaaagaagtaactgccgcccgaaccgtccgcgatatccgcggtttcccagacgggatcccaggaaagagcacccgcgcaacggtcgcggcctgcgttaaacagcgtgtaaacgccggtttccggcgcgaccaggtcgcctgcaatatccgctgtggagacgtccacaacataccattgcccgcctagttccaccgtgttccacgcatgcagaaccccggcgttgtatccattttggaatcccacctcaaatcccgccatgcccgccagcaggtagaaagcgtcggaatagccctggcagttggcccagccatgggtcagcgcgaaggcggcgctgacgccgggggcgtcctcgcccggctccttttcaagcatctcattgaacgtcaactgggcgcacaattcgtcaaagatcgcccgctccagttcaagcgaggaggagtaccgcgcctgtaagcgctctacaatggcttccgcctcatccagtgccgaccgttcctgatgcgaaagcgcgctttcgtcgccggttctccatgcgtccagcatccttacgcccgcccggtataccggcgtgattacaaccttcacgctgttcctgtcatagtcgatggaggcgtacaggcggctcatcagcggcgccatctgcaaaaactcctgacgcagatcagacttctgcatggtcaaagcctccggctccgacagtgtaaagcgaatttccttcgccctgtcctgcgtgcagctgcgcagatactccgccgtttcccaccatgtgtcaaaggacggcgcgcgctcgcccatggccggtatggccacggccagcaggcagaccgtaagtatccagaaaacaagcctgcgcctgaacatcggaatccctcctttgcgccgcgcgcctcccgccgggtcggtgagaggcgcgcgttcagccgtatcgttatccgttcacggtaaagctgctcagaatcgtggccgcgtccgcgtccgaaacgttcgtcagcgtaatcgtatagaacacgttgttgacgatgtaatagtactgcatcgtgggataaaccgcgtcataggtgcccgtataatacgttcttccggaaaactccaccgggcccgccatatcgtaattggttatgcccatgctggcataggcggcggcgtagtccgcctccagcgtcgggagcgtatccatggtaatgccctgcgcgctctcctgcgccacgttcatgttggcattaagatccgccgagtaatacagcagaatgcccatcgactgggtatactgcaactgctggctgagcccggcagcgtccacagccgcctgaccgttggtctgtatcagctgctgaagcgtggcttcgttcaattccatccagccctgcggaacctgcagggtaaagccgtttccagttacggtctgcccgcccacagcggggggcatggtcgagggcagagccgcgccgccctgacgcgccataaacagcgttatgccgtctacatcgacgctgatcgtgccgtccgcctgcatgacaaacgtccaggtgtatccatcctgctccgtcacggtggcggcggagccgttctgcacccaggtgcaggcgagcgattcctcgccgtcccagattgtgccgcttccgccggcgttgaaggtcgcggtcatctgcacacccatggccgctgggtcaatggtctggccgtttgcggaagcctgcgtcagcacccactggccctcaaaactgcccgtggcgggagccgtgccgcccgtggagggcagcaggccgtccggcagcagccctccgccgggcgcgttcgtcgcctgcggcgcggctgcggtctgcgtaaagtacatggccacgccgtccaccatggccagcagcgtgccgtccgactggagcgtgaacgtcgaaacctctccggtgagctggctggtgatcgtgaccgtgttgccggcctgcgtccacgtcccgttctcttccataggagcaccgttgatggtttgtctggcaaaagccgtaccgtcggggttaaggacaatcgtcatgctgaggccataggcttccggcgacatgaccacgccgcttgcgactgtcttcgtcatcgtccattcacccgccaagctcgccgtctgggcgaatgccggcgcggcgagcaatagcgccgccaacagtaccgccaataatttcttcatgatatcctctccttttttctcaatctgatttcagagcgcgcccgcgccagaaatgcttttgtcattctcccgctcaggcaagcccacggatgccgagcgtctgcgcaaggtcgcagtcgatcacatatacgccgtctccggagagatactcccgccattcgtccgccgtcaggaagcgggcaaagagcatcgtttcctcctcggtcgcgttatagggcagcatggtcgtctccagcaggtagtacgtgccgctgttttcccaggtttccagcgccacctgcgcgtgtcccggggtgatgatgatcatggcgtgcatctgcgccgactgcagggcggacgccatcagaagcgcggtttcaatgcagatgcccgaccggctctggatcaccgcatcgggggtcagcacgcgctgcgagccgccaaaggaatacggtcccatgttatagcgcacgccaatatcgctgatcgcaccttgtatggccatggcctgcagtacggtggtagatggctcgtcggtaccgtccggataggcgagctgatagccgggcagggaactgtaacccgcgccagcgttggtttccagccagtagatggcctcgcgccgcagcgccaaaacctcctccgcgtcgggccggagccacgccagcaggttgtacggttcgatcacgccgaactcgctgttcagcatcgtaaaatcgtatatgctgtgcaacgtgatcgttttgctctccgcgaccagcagttcgccggtatccatttgggtcacgcgcagcgtgatctgcgtctcgcgtccgcttcccaggctggtcaggccgctcatggccgggggcttgatcatcagataggtgatctccggccccacgttcaccgtccgctggtatttttgcgaaaagccctcgatctccacctcgaccagcagccgggttttccccgcatccgtgctcagcgccaggttcaccgccgaatccatggagggatacaggttaggatagatttcttcggccatcgagtaatccacccatatctgctgctcgccggtatcatcctccagcgtcagcatgttggccaggttgacaaactgctgctctatgacggcgtacatcagtatttcatagcgcagcatcaggtaaggctggcgcataagaagctgcgttgcggaaaaatccatcagcgcgtcgtccagcagcgccgccttgtaatcagcatacagcttttcctggaaggcgtcgatctgacggatatacaagggccatgtctgcgtcatggccggcgggcatgccagagcctgataattctccttgacatcgcccatggcgatatacatggcgttgagggaatcggcttccgaggcgtacattccctgcgcggccttttgctgatacgccccgagcgggtcgctggaatcgtagtacccgatataaaaggccagcaggctttccgcgatgcggcaggcctccagcgcgttctcatactgaaaggcgccttctccgccagaaaccattcccttcatgccctccagtgcgctccggcaggcggaaaccttttccagcttctccctgcacagcgccgcgtacgcttgcatttcggcggcgtaagccgtatcggcattgttcacggacgcctgataactccgggcaaacgctgccgtggcctgcgcgatctccatgcagtcctgataaagcgccgccatccattcggaaagtgctccgccctccggtactttttcctgagcgccctccgcaacgggcgaaaacgtttgcgaggccagcaccagcccggacagcaccgcgtcggcctccgccgggatatatgccgcgccgtaaagtatgctgtagccctcccgctgttcccacagataagcgccctctatgatctggccgctttgcgcgtcggtataggcatacatcatggcgtccatggggatgccccgcatatccataggctggctctgcgtgccgggatcgtacaccatgctcccgcccatggcggcgcgcagcgcttcgcccgtctgggcaaagaagtcctctttgttcacatcgccctcctccgcccatgtcaggcggaaattagaggcggtttccccgggatagacccatatatagccatccctttccgtaacgctgtagccagcgtccacctgaaaagagagcctcagcgcttcgcttgtataggtggtatacgcctgttccgccgccgccggaaatgcggacagcagcataaccgccgcaaaaagagcagccattctcctgcagtgcttgcgtttcatccacgcacgctcctctctaaaacataagcttacttatattatatttcagcgatgcatggcagtaaatattgttgacgtatttgtcaatgacaagtacaagcagcgtactttgagcccgcaaacaaatatgtatgatacaaaaaatacatgtcgcgcagggatgctgaaaaacggaaaagaaaaaggtgttgtttgtcacgctctgcataatggttgcggagatagttttgccggtacacggcacactctccgtaagcgtcaaataaaccgccgtgagatgtagcaaggcatttcgaggtaaggtaggaaatcttaggaaatctcaggagcaccgaaaaaggcttctcagcgtttgtcacgaggcaattcctttctggcatgaccatctatgccgccatatacaagaaatgaggccggattgctccggccccaatgtgcgtttctacattatatatgttcgtcagacgacctgcgaatacttcccggacacccaccccacctgagcattgaccacgatggcgtgccagccgttctccgcagtggcgatccattcgaaggtcgcaccatccttcacggaggtgatgcggctgtacttggtgtcattgcccacgcggatgttgacagagccgctggcgcagacgatgcgcacctgcttcgtggcaggagtctgcacctccggtttctcagtttcgggctgttctttgccgtcatcatcgtcagccacagcgtccatcagcgccgtatgggtctcgctgccgtagatgccgtcctgcttgattccaaccttcttctggaacttcttgagggcggtttcagtctcggagccgaactcgccgtccgccccatacttgggcaggctgtattccagctgcagcaggaactcctgcagcgccttcacgtccgtgcccttggagcccttcttcacagttcgggtgccgagggtatattccgtctgggcagagtcaggctttacatagctgccgccggtaaagacggcatcgccgtagtccacgaagggcagctggaaccagtgcgtccacttgcgggaagccaccttcgttttgacacagccgtagttgaacccgcgctcctcgacagcataaccgccgccgacatacacgcccacatgcccatcagagcgcagcgccacaccgggaatctcaggcaaggtatcaatggttccccaagcgcagcccttgttcttggcgtaggtgaacatgccgttggcagacttgtcgggacagccattgccgccatacttgctggagaaagtcttgtcggtgccaattgcttcaacaacgcccacgccgccgctcgtccagttgtagcccttgatcaggccaacgcagtcagcgcagaccttcttattggcaatatcctgcttatagcgggcagtgcgggagtccttgtaatgggacggatactgcttggcctttcggcttcgcagggattcggtacacttgtagactactgtgccgtaccaatagggctggcccagcatggatagacagaatgcaacgaagtgttcactggtgtacggagtattgattctttcgctcatgatttcctccaatcaaaagagcggcggttatgcgccgccgccctggtcggtcgtggtatcgtcaattcgattgtgaagctgagcaagaatgctcttcatcttttccgggataggcagtccaaggtgagccgcattctccagcagggatacaccctcattggacaggtagaagcacaccacggcgccgcgcagagcattgccggttcctaccacatgaagatcaacgatgtgggcaacacccaccagcatgataatgagcaccttcttgcagatacccttaaagcccacgctggaggacagcttcttgtctgccacagcgcacatgaggccggtcacatagtcaacggccataaagatcagaagtgcagtcagcaaaccgtccatacctcccagaaagtagccgagccagccaccgacagccgcgatagccatctgaagcttggcccaaatgatgtcgatagagaaatccctcatagtcaaatcctccttagagttgatatagcaaagaccgctatgacagcggccttatacttcttcgatctggttttcatcggttgattcttcggctgaaccggagaccttctcctgccacagagcggggacagcgggcggttcccagccggtctgtgcagtgtgagcctgctgacaggtgtacctcgtgccgttctcatccggataagcgacctcatcgccaacgatgtagtcaatgcccgcagcccagatgcgcacggcatcttcggagagaatctccaccttgcgccagagagcaggtacaagatcaggcgtccaggtaccctgcgtggtgtggtcctgcaggcagcgccagaggaacgcgccgaaggtatacacatctccaaccttgacatccagccccggttgccagaggcggccctccagcgcaggctgaatacggagcagttcgctgtccgtcacgcgcccgtctgccacagccagccgcagaagcagaccgatggcattgggcagcgcctcttccgcgctcacggaaacgaagcgatccagcggaagggactgagcgatcaggttgtgtgtcagttccatgccttcggtgatcacaaccgagtcatcaaagacatagacctgatcggcagtcacgcccgtcagctggaagctctcgccgctcagatcgtagtgggtggtatccttgcgcttggcaataacaaaggacgagcagatcaccatacggatctgcccgcccagcgggatagcaatattcacttgaaatcctccttcttagccgacagccgtgctgccgctgaatacgcattcgatatagggttcgtaattggtgtccgttccgctcatgcgcatgtacgcattggagtaggtggacgaaccgaagttgtacggggtttcatacaggcacagaccgccgtagtagccgtctgccaatccctgcacagcatccacagggatcgagaacgtaacctgcttgtctcgaccgatggtgccgatagcaccatagttcctggcaatgctgggtgtgccgcttgcagaggtattcgtgatcgcacacaggtagacgctcttcgctgagctggaaccggagccggttttgcggtgaagcgtaagcgtcgcgctcttgactgtacaccccgacagcaggttctgtgcattactgaaccacatgcagcctctgttccagttaagggacgagttgtagccgctgtcgtagtacacgccctgaatgacatccagcgtatcggttcgccagctgccgcgccacgactttgtggttgttgcgtacagaatgccggtttcatccggtgtgacagtaggaatggctgtgccgtaatcggttgtgacgctgtttgcatacagaagcccgttttcacccgtgcctctgctgcccgcaggaaccgtaccgctggcaataataagactggcgtaggaaaccatcgcccagctgcaggagccgcagcagtccttcacattgccttgtgccagatagcattccagcccctgcagagcattgtacagaccgcaattgtacaggaaaacatgagaggagcgggcatatacggagtcatacgtgataccgttggcgtcgagcgtacaaccgctgaactccacgaagtggcactttgtaacctcgcacagatacggctggcggttgcttccattcagcgttctgctttcacgaaggtacagattctggaaacagatgtgggcaaagcagccgtgaaccttgatgtagctgttgaggatactgttttcaccgtagccatagatcgtcagcttgcccgggccggaaatgccccggatgacaacaccggagggttcataggtttcccggccccacggcagatagatggtcacgtcattgggcaggaatctgttgttcagcgtctgaacagcctcgcccagcgaacggaagtccgtttctgtcggcgtctcaatggatggttttacccacagccgggaagaaccggcataggactgtgctacggagtcagagataacctcatccgcataaagctgtttgaaaccgacgttgccgttggcgctcatttccatgagtacgttttcattgtcgccgggatcgagcagctgaagcagaaagttctccgttgtaattgccacgttgttggggccaatggtgatgccgctggccttgacctcctgcgcacctgccgccacccatgtgcttcccgtatatcgtttgagcaggttcgggcttaccgaggtgtccagccagagcatgttggtgtacagagttgtgggcgcagtcgaaccacggtagaccttctcggaattgtaagtggacgtggaaaccttgagtgcaatgctgctggcattctgggtgatacggctttcagcgttgctcatacggctggaaagaccataaatgtcctcgggcgcagcactccagtctgtccatgtttctgatgtttcgactttgaaattgcggaactcgactgtaccggtgcaacccttctgcgaggcagtaccgatatacgcataagcaacgctgatcggattatagccggagaagttatatacgccgtaggtcatatgcacccagtcgctgtcggtggcagcaaagtttgcatcgcttgtgcgcagataaaagccgcgtccggtggtggaaacagtcgtgccatccgccccgtagaggttgtagtaaatccagaaaccggaatacacacctgcagtcgaggcggcggaggcgtcaatgttggtacgcttgatgtcaaaggaaaagagcattctgctcagcccattgctgtgtgagaagaagtcatccgacagatccagccgctgacctgttgcagtagtggttccgcccgatgccagtcgatagtacccgtccacgaacttgtgctccacagcactgtttaggcagtagttgcgtccatcggctttctcaaaagcatactgtgcggattgcagcaccttggaagtaatcgcttccggtgtgatctgctgttcagccgaatcaacacggctggaaagtgcagtaacagttgtctggtcagccttgagcgcaatcgcagtgttggtctgctcgatggcagtccgcatctctgtgcgtacttctccgacctctgaatatgcctcgtatgccacctgcgaaagaggctggaaagcgccgttcacaaagcggtacagcggatgctccgggaagaggttcatggcatacgcagaggtcatgatgcccagcagcatgtatgtgaggccattttcttctgtcggtggcgtgcaggtcaggtaattctctgctgggaggaaagtggagccaaccagcgttccaaccagatattgttttcggtaaaatagaaatcgagcaaaagggcgccaaaatgtgagcaccccaa

SEQ ID NO: 2697 - DNA, 8727 bp, Unknown
  16S sequences of unknown bacteria
ctggacgcactggttgcagccgatgcactggttgcggtcgatgaccgcgcgcccctcgtcgtccttgccgagcgcggggcatccgatctggatgcacacgccgcatttgcggcactccgtgatcgtggggacgacacccttgctgcggtcgatgaggcggcagggcgacttgaacacaatgaccgagagcgtgtcgtgcgcgctcgtcgtctccttgagcgccgtgcgcacggccgagaggtcctgcgggtcgacgagacggacgtcctcgacgccgagcgccttgcacagctcgacgatgtcgagcggtttgcctgcgggagcatcgagcgggttgacgcctttggcctgctccatgagcgtgacgccgttgcaggggttgccctggcagccggtcatggccgtcgtgcggttgtcgaggatgcacagcgtgcccgcgccggcgttgtagatggtgccgagcaggctcgtgatgcccgaatgggcgaaggtgctgtcgccgatgacgccgacgacggggcgcttgttgcgctcggggacgccggcgagctcgaggccgtgcgccatggacagcgacgcgcccatgtcgatggtcgagtgcaccgcgttgagcggcgccaccgcgccgagggtgtagcagccgatatcgcccgtgacgatggccttgatgcggcgcagctccgtgaagacgaggcggtgcgggcagcccgggcacagcgcgggcgggcgcggcggcaggtcctgcgccgcgtcgaggtgctcgggttgatcgatgccaaacgaggcgcggatgcgcgcgggggtcatctcgccgtcgtagggcagatggccgcatggcggagtcgcgaggtcgatgcccatcgcgaggatgtgctcctcgaagtagcggcaggcctcctcgacgacgtataccttgtcgaccgaggcggaaaacgccgcgatcttctcgggcggcagcggccaggacatgccgagcttgaggacgcttgcctcgggcagcgcctcgcggacatgctggtagtcggcaccggagcagatgacgcccatctcggtgccgcgcatctcgacgcggttgaggtcggtggtctccgcgaaggcgatgaggtcgcgctcgcgctggtcggagacgagacggcgcctcttggcgttggcgggcatcatgacgtacttggccgcatcgggctcgaaggggcgtggcgcgagctcgtcgcgcgtggcgctcgtctggacgagcgtcttggtatgcgcgatgcgcacggtctcgcgcagcatcgcgggaacgtcgaactcctcggatatctcgaaggcgcgcttgacgaagtcgagcgcctcctgagaatcgctcggctcgagcatgggcacgcgggcaaacgcggcgtagttgcgggagtcctgctcgttttgggacgagtagatggacgggtcgtctgccgcgagcagcacgagcccgccgttgaccccggcgttgcaggcggacatgagcgggtctgccgcgacgttcacgccgacgtgcttcatggtgacgagcgcgcgaatgccgcccatcgccgcgccgatgcccacctcgagcgcgaccttctcgttgggagaccactcgcagtacacatcgccgtgcttggacaggttctcgagcgtctcggtcgacggcgtgccgggatagcccacgccaagcgcgacgccgcactcccaggcgccttgcgcgatcgcctcgtttccggatagaagttcagtagccacgtttcctcatctctgtttgagcacgacgcttgcgcgcgtgcagggtttcctattcgagtccgctttcttctgcgacgaggttcttcacgccgtacttctcgcgcagcttgggcttttcgatctttcccgtcgcgttgcgcgggacctcggcgaagatgaccttgcgcgggcgcttgtagcgcggcagcgcaaggcagaactcgttgacctcgtcttcgctcagctccgcatccggcttcacctcgatgatggcggccgcgatctcgcccaggcgctcgtcgggaagcccgatgacggcgacgtccttgatggcaggatgcgccgccaggaagtcttccacctgcaccgggtagatgttctcgccgcccgagatgacgacgtctttcttgcggtcgacgagccagtagaagccgtcgtcgtcctggcgtgccatgtcgccggtgagcagccagtcgccgtcgagcgtctcggcggtggcttcggggttcttgtagtagcacaccatgacgccgggccccttcacgcgcagctcgccgacctcgccgcgcttgacctcgttgccgtgctcgtcggtgatcttgacctcccagcggtagccgggcacgccgatcgcgccgacatggtcgatgttgtcgaccccgagatgcacgcagccgggccccatcgactcggataggccgtagttggtgtcgtactggtgatgcgggaaaatctctttccacttggcgatcaggctgcgcgggacgggctgggcgccgatgtgcatgaggcgccactggtcgagcttgtagtcctcgagcctgatcgtgccctcctcgagcgcgagaaggatgtcttgcacccacggcacgagtagccacacgatcgtgcactgctcggtgctgacggtgtcgaagatgctcttgggcgtcacgccgcgcaggagcacggccttcgacccgctgatgaggctgccgaaccagtgcatcttggcgccggtgtggtagagcggcgggatgcacagaaagacgtcgtcgcgcgtctggccgtggtgcttctgctccatctccgccgcctgcgtgaggctgcggtgatggtgcaggatggccttgggaaagcccgtcgtgccgctcgagaagtagatggcggcgtcctcgtcttccgaaagcggaatcatggggtccgaactcgagcagttggcggtgagctcgcggtagttctccgcgaaggtcgggcagtcctcgcccacgtagaacagcaggcgatgcgcctggatggacgggacgatctcctcgacgcgcccggtgaactgcgggccgaagacgaggatgtcgacgtcggcctggttcacgcagtactcgatttcggccgaggtgtagcggaagttgagcggcacgaccgtggcgccgcttttgaggatgccgaagtagatgggcagccactcgaggcagttcatgagcaggatggcgaccttgtcgcccttcttgacgccacgcgagatgagcaggttggcaaagcggttgctcttctcgtcgaagacgcgccaagtgatctcgcgccggtaggcctcggtctcggtgctctcgatgaggtcgtagtcgcgccaggtgacgtgcttgggctcgcggacctccgggttgacttcgacgagggctacctcgttgccgtatgcagctgcattgcggcgcagaaaatcgacaataggcacgttgcagatccttcttatccgagacggttcgatgctaatgccgccaccgtgcagacagcattgcacagatgataccgcagccgcaacgcagtggggcactcattacgcgagtgccccacacgtgaaggtaatctttttcgcccgagcggcgtgccttacggacgaaccgccatgtaaacgctcctgctgctcaagctcccgtatctgaccacggcgcccgtgtacggcgcatggatgtaggtgccgccgcccacgtagatgccgacgtgctcgccgccgcggaagaagacgaggtcgcccggctgcagggcgctgacggctatgcgcgtgccgcagcccatctggtcccaggtggtcctgccgacgtcgatgccgatcttgcggtagcagtactggacgaggccggagcagtcgaagccggcaggcgtgtcgccgccccacacgtacgggacgccgaggtactgctctgcgatgcccacgaccgacccatgggcaccggaggtgctcgtggagccctgctcggcactcgagctcgaggagctggagctgctcgagctgccggagcccgaagaagaccccgaaccggcattcgagctggagcccgactgcgacgaggacgcgctggaggaatgggagccgccctgtgcggcggtcgcgttgctgaccgtgcgcgtgaccgcgttgtcgtcgtcgaagccgcccctaccggaagcaggctgggattcctggatttgctcggcacgctcggataccgcctgcagggtgttgcggtcgaggttttccacgagcgtctgggcggcgttcacggacgtgtcgatggtctgggtgcgttgttgctgctgatctttgaggctttcctgctcgctcagcttctggttgagggtgttttgctggtcggtgagctgctgctgcagcgtgttcaccgtctcgatggcgctcgccctattgtgcgcgacgcggtcgagcatgctcagacgggagctgaagtcatcgaagctcgtcgagccgagcagtacctcgaggtacgagacgctgccgttacggtacgtctccgagaccgtcgcggtaagcgctttcttggcagattcgaggtcttgctgggtgctctcgagaagctgctgcgtctcgtcgatctgttgcttggtcgtggcgatctggtcgtcgatggagccgaggtcgagagctgccgattcggtctggctggacagctcggcaaggcgctgcgccgcctgctcgatagagacgttcgacgagtccttgagctgggcaggagtagcctgcgccacgttcacgggcaagcatgccgccgtgagagcgaccgtcgcgacacctgcgacgaccgcgttcgtaatctttctctgtagagagttagcccctagcatgaagcccccatctgctgcattgtgttcgtgttcggagagctacgcgaaatatgtagattgtgtagttgcgattgtagttcgacggggatgaattgtacagggtaatttcagctgccggcgcgcacgtccggaccgtggagctgcggggcggcctgacgggtcgtgtgcgcgagccttcgtacctcatcgcttctcaaagcgctgtgaaaggacccccccccgagatgggcgcttggccgcatcgtctcgtggtggcgctccttgttgaggtacatctcctggtcggcgcgctcgatcatcgaatggatatcggaggcatccggctcccatgcaaagcccgtggagatgctcatgccctgctcttcggacaggcgctcggccagggcgaggcggtagtgctcgaagtcctcgcgggcgacgttcttgagcagcacgacgaactcgtctccgcccatgcggtagacgttgctctcgctgaacacatcgcacagcgcctgcgcggcattcatgagaagcgcatctcccgccgagtggccgtggtcgtcgttcatctccttgaggttgtcgatatcggcgaagacgatgcccacgcccgccgtggcctcgtcgatatcccgcacggccgattcgaatgcctcgcggctgcgcacgctcgtgagcgcgtcgtaggttgccttgaaacgcgcgaggttgccgacaaagctcgagcggatgaaaaacgacgcggtctcgaacagggcgaccgcatcgatcgtctgctcgaaacgggcgttgacggcgacgagcacgccctcgagcgttccccgctccacgaacggcgcgatcatgagcgtgtcgacgccgccccatgcgaccctgttgggaatttcgacctgctcgaagaatgcgccgctgcccagggggacattgctggagacgacgaacttgccctcctcgagggcgacgcgccaccaggcgggcaacccagccgattcgagcgggcagcccttggaaagcgtttcgtcgcagcccgggtcgaggtaggtgaacgcgcgcttcacctcgtcgtcgaggcattccaagacgaagatgccgtccaccccgagctccctgcccaacgtgaagagcgctgagttcatagagctttgatagctggcaggcccgacgagctgacgggcgatctcgatgaccgccgtatcggtcgcgcgcccagaggtaagcttgctcaggcgctttcgctgttcgtcgatggggaccgacaccatgacgcagcagccggcgacgctcgagggaacggcgtagacgtccatccagtgcttttggaccggcccccacaccttctcgtggatgagctcgcccgcggcggcacgctgcccgaactcgacccattcgcgcgagccccactcgaacagctcgaggtacccgtgccccagaagctctgaggggctcttgcccacgagacggcagtacctgtcgttggcgtacacgtattccatgtcatgcgcgccgttggcggtcacggggcgcatgacgatgcacggcagcgggacgtcgttgtagctgttgaacagctcctggccgacgagccccgtggtgttgtcgggcgtgaccaggatcacggccacgcggtctttcccctcgagcggcgccatatagcattcggtccaggaatcgagggcctgcccgtagatgaggtagtgcatctgcgagccgagcgagacggtgctgtccatgttgagcggccactggtacgacccctgcggaaagacctcgaggtatcggcgcccggcaagttcggctgccccgacgtgcacgcgcttcgcgtaggccgcattcgcgtacaggtacacgaagtcgatggggctgccctggccatcgcgcagaatctgcacctcgacatatggaaacggggactcacggcgagaagccgcgaccggttttgccgcagcgtctgcgacctcacgcgaatgctcgtcttcgaggctcgacgccgcgagaatccgaaggtcggcaaggtccatggggcacgcccgggcgcacatgaggtacttcggcgtggaaggcgtccccactcccacaaacgagaactcccaccactcgtatcctcccgcagtcgtcttgcagcggatggggatggaataccggccacgcctggcactgcgcgccgcctgctcgagccgggaaggttcgagcatgtccacgaaacgaagacggtcgtcgggatgcacttcgtcgaggcccctcaggctcgaggtgggcaccgtctcgcccggacgctcgccttcgagagacgagaacagcacggtgaccttcgcggcctgcggatcgatgaggtatacgccgtcgaatccatccgagacgccgagcagcagcgcctctttcctgtcctgatactggcgctcgcccatgatgtcggtgcagtcgacgagctgtatgcgcctgccggcatggtccgcgagcgtgcgcacctcgaagcggaagcggccggcagcgacgctcgcgtgaaacgactcgggtgatttcgaggaagcggcgcaatcggcagcagcgcgcagcttcgcgccgaaccccgtcgagtcgtcgtttgccaagcgcacgtactctacgggaagcaggtccgggtcgtcgtcttgcagcttgcgaatgaaggcgtcgttggcatacagcgggtcgaaccgctcgccgtcgtcatagagcagcgcctgcagccgggagggcgtaagctggacaagccccgcctggtcgtgcaggaaacggtccgcccggtgctcgagctgaatatgcgacagctccatccagcgggcaaggcgacgagcgggctggggccttccatagtagaacccctgcagatactcgcagccgatggagcacaggaacattgcctgcgccttggtctcgactccctccgcgagcgtgtgcatgcccagctccttggccatcgtcacgatggcggtgacgacctcgcgcgtcttcacgtcgaagtcctccatgaaggccatgtcgagcttgatttcgttgaactcgaacatcctgagagcgttgagcgacgagtaggcgctgccgaaatcgtccatgagcacctcgtgccccgctgcgcggaagcgcctcaccgcctctgcgacggcaatgggatcgcgcatggcggcggtctcggtgatctcgatcgagatgaggtcggcatccaacccaaaagactcgacgcacgacgtgatgatcgacaccgggtcattcgaggtgaaatcgacacgagagatgttgatggagatcggcacggcctcgtgccccaggccggcccacgccgcgatcgacgagcaggcatgctcgacgacgaacctgtcgaccttgtagaccaggcgtttctcctcgagcacgggaatgaagcggctcggggagatcatgccgtactccgggtcgttccagcgtgcgagcgcctcgaagctgctgacctcctccgtcatcgtccggatgacgggctggtaccacacctcgagttgcccgttctcgatcgcgctgtcgatatgctccactatgtagacgtcgagccggagttcctcggagagctcttcggaatagacgtttacaaacctgcggccgtctccaccgaccgcatcgcaggcgaccttggcgcggtcgagggcgaccgcggcggtcacctcttcagaccctaccgtgtagatgcccgcctccacgcgcacggtgtacccctcgcgcaggttcaacgctcgctcgtgcagctcgcggcagcggtcctcgacatcgtctccgcagtagaacacggcaaactggtcggcatagagccgcgcgcacgattccgtctgaaagacgctcgtcatgaggccgccgaggtcgtggagcagcgcgttgccggcgtcttgcccataggcctcgttgaagtccctgaagcgcacgatctggaggtagcagacgctgcagcgtccgtgg

SEQ ID NO: 2698 - DNA, 5540 bp, Unknown
  16S sequences of unknown bacteria
aagccatagttttccaacagggttttcacaatatttttgccaatgtcatgcacatcgcccttcacggtggccagaatcagacgccctttgctttcctgggctgtgccggaggcgttcaggtgcgccttgagcacgtcaaaggaagctttggctgcatcagcgctcatcagcagctgggggagaaatacggtttttgcctcgaaccccgcgcccacctcatccaaagaagggatcagctcgccgtcgatgatcgaaaggggggcggtgccggcggccagcagggctttggtttcctctgcggcctcatgggacaaccccttcaaaacggcccggcgcagcgtccgctcctggctggacggcgcgggggtgggagtttctgccgcggcgctgtagtgagccacataggctgcgcagtggtcgtcaaaacccatcagggcacaataggaacgataggcgtccataatggcggcctcgccgggattgacgatgccggcggacaggccccggcccatggccagcgtgaaaaatgctgcggtgattttttcgcggcggggcaggccgaaagagatgttggatacgcccagcacggtctgcatgccgagccggtgacgcacatagtccagcgtttccagcgccacggcggcattgtccggaccggtgctgacggtcattgccagtgcgtccacgatcagatcctgttcagatagaccataggttttggcggtggccagcattttttcggcgatggcgatgcgccctgcggcggtggaagggataccgccttcgtccagtgtcagggccaccacagccgcgccgtacttcttggccagcgggaagacggcggccatgctctctgcgccgccgttgacggagttgatcagggggcggccgttgtagatgcgcagcgcgcgctccagggccacgggatctgaggtgtccagctgcagcggcagatcgcatacagcctgcactgcctgcacggcccggcagagcatgtccggctcgtcgatctcgggcaggcccacattgagatccagaatctgtgccccggcgtcggcctgggccagggcttcgcggcaaagatagtccatatcgttccggcgcagcgcttctttcagagcttttttgccggtaggattcagtcgttcaccgatgatgaggggggcgcggccaagctctgcggtatgggtgtaagaggcggccagcgtatgccggtgcgcgggcggcggtacgacagtacagccgcggcaggcgcgcaccatggcggaaatatgctccggtgtggtgccgcagcagccgccaacaatagcggcgccggcctccagcagagcgcggcagtctgcggcaaagtcctccggttccaccaaatagcaggtctgcccctctaccaccacgggcagcccggcattggcgctgacagcgatgggaagggagcacgctgcgcgcagctgcggcagcagagccagcatctgtttcgggccaaggccgcagttcaggccgatcacgttggcgcccaagccctctaccacggcggctgcggcagggatatccgcgccggtgagcagcttcccgctttcatcaaaggtcagcgacaccagtactggcagcgtggaatgctctttggctgccagcagcgccgctttggtttcgtagatgtcgctcatggtttcaatgacgatcaggtcggccccggcggccgtgccggcctcaatctgttcggcataagcagcataggcgtcctcaaaatccagatcgccgtatggtttgagcagctttcctgtggagccgatgtccagcgctacccaggcacagttcgctgctgcctctttggccagacgcacaccggcggcaatcagctcggcagagcggggcgcccagtcctccagcttgtagcgattggcgccgaaagtgttggccaggagaatgtcggctccggcggcgcggtaggcgcggtgaatgtcgcgcaggacttccagatgggtgatgttccagctttccggcagctcgcccgggctgaggccccggctttgcagcagcgtgcccatggcaccgtcaaaaaacatcgggcgtgtattcagcgcttctaaaaatgactgcatggcgttatccttcccgccggaaggggcagtctatcctgccgcagttccggcatttgcgaaaactttttttgggttcggcggagatcccgatcactgcggtgacagacttgctgggggtcataatgaaatgttcattcaaactaagccccagccgtttaggcagttccagcaggcggaaaaaatccgcctgccgggaaagagacaggtcgccgtagcccggcgaatagcggggacgcaggtacagcccccgtgcttcgtactcggtgctcagagcctcctgcacatcgtcgcagtattgttcgatcatggccgcgccggcagcgtgcaccatagagccccgcgccatggagcgcaggctttccatgcgggccatgcggtccgcctctacgcccagggtagcggcgaacagcagcagggaagagcagcctttcaggtgtcggacaaggtcggtgccatcaaacgttatgccgccgaaggaaacggaggtgtccgccacggagcaggggtattcctgccatacggaccggggcgttatacactgttccatactctggcatacgctacgcacttcggcgcacagaggctcttcggcccgggatacgcccagatagcgcaggacttcgttctccggaatgacggtcattgcaggatctccgagagattggccatgatgctcccggcaatctcaggcttgttcatggtgtaaatgtgcacatgatccacaccgttggccagcaaatcgatgatctgttcggtggcgtaggcaatgcccgcctgcttcacagcagcggggttacccgcaaagcggtcgatgatggcgcgaaagcgggccggcagctggctgccggacagactcatgatacgcttgatttgggaagcattggttacgggcataatgcctgctatcaccggaatgtcaatgccggagcggcggagtttgtatagatagctgtacagttcgttgttgtcaaaaaacatttgggtcgttagaaattcacagccggcgtccactttatatttgagattgtcgatgtcttcatacagtgtggccgattccggatgaccctcagggtagcaggcgccgccaatgcagaaaccgccgaacgtgcggatctcttccatcagttcgctggcatgatggtagccgtccgggtgcggaaaggcaccgtctctgggcagatcgccccgcagggccaggatgttttcaatgccaagttttttcagatcctccagcgaggcgcgcacctcgtcccgggtggcggccacacaggtcaggtgggccagcgctgtaatgccgttgatgttctgcacctcattggccatgtcggcggtggtgacgccgccgttgccgctgccgccggcgctgcaggtgacggacatataagccgggtgcagcgctgccatgcggcgcactacgctaggggcgtccagcagagcggtgccgggtttgggcggaaacagttcgcaggatactgtggggcgattggactgcagcagttcggtcagtttcatgctgcgcctcctcagttcagtttggccagttcagccagcacatccacctccgggtgcttttcgcccggctgctcgccgatggcggcgctgttcagcagttggttgagcgtaaaagtgcttgtcaactggttgtaggtttctgcggacaggatgaccgtgtcacctacgccgttttcatcggcgatatataccggctcgttgtgttcatggacataggccgaaatttcttcgtactgttccagtaattcctgtttgcttcgcagcagggacatttatatcagcctccttggtttggatagaatgaaacatagtgttattatagggattgcgggagcattgtgcaaggtttttatatctaaaaattaaaaaactcccggccggtgggccgggaggcgcggtcagtgtgtttcttccatggctctcagccacaggtcagcgatggttttcatgccgtcggcatgaggatgcgccacatcgatagcggcgtattccacgccgcttttggccagatcggccacatgacagccttcggcgtcagctgcggcgcggatgatttcgttatatccgtccagcggggcgctgacttctgcattgtagtaggtaatttcttcgtctttcacacaatagctccacagcagcgtgccgcaccagattgcggcattgggataattgcggcgcagcttttgcagcatcaggcggtaatcccggtcaaattcgtgcagggggatgccgtagccggcgtcgttggtgcccatataaatgagaattatatctggatggccaagatgagacgtgcgatgatcgctgcaaccgctcagatagttcggggagcggtgaaagcggtcggtgatagctgcggcggtgccggcgggagtgtaccggtcactattcgatactgtggtgctggaaaaggaatcgttgacgtccagcacgccgtccagcccccggatgacccgcatccaccaggtgtcttccacgccgcgcagatccgccatagccatggcgaacagatcgtaaaatacgccgtcgggagtggtataaccggaaaatgtgctgatggaatcccccagcacggaaatttttttcattgcaaagttgcccctttctgcgttgacaaagactgccgcattgggtacaataatccatatgctgcggcgcaaaagcgtagttgggtttgtctgtattataacaggacttcccggcgagcacaaggcgcagattttacacttttccggagggaatgtgacaggatcttccggtgaaagccagtgaattgcggcgcctgcagccagaccgttttcgaatatgcctccgtagttcagttggacagcagtgtttgcctctggagcgcaccagctgtgaggcggcatgggggcggaaccatttcataatttgtatgcgccagtagctcagttggagagagcacgagcctcctaagcccggggccgcaggttcaaatcctgtctggcgtgccaaacttaaagctgcatcagcctccggctggtgcagctttaagtttggggcaaagacggggaaggatcgaacaggacggcgcaccgcagtgcgcaaaaaacatttcgggggaatgttttttagtccgcgggtagattcccgccgccttcaccaagttggaagctacatttttagtctttggaaagaggctgaaatgtagcttttctttcatacagatttggaaatcaacacaattttctgtttgtgcagcctatggacagaattgtccatttacttttcatttttatccatgtatcttaacattagagagaaaaaggaggcgctctatgtgaaaactactggacaaaaaattaagtcccttcgtattgctctggggttaagtcaggaacagctgagcgaggctattgatgttgcgcataagtcaatttatcgttacgaaacaggaaaatccttgcc

SEQ ID NO: 2699 - DNA, 16105 bp, Unknown
  16S sequences of unknown bacteria
caagaatcggcccctctctcgacgaggttaacgccgtcaacattcgtggccttgaaaataatgtcggcattgatttcggcggcgcgaagggaggctccggtgtcggttgagaagaagggacttccggttccgcatccgaaaataaccactctgcccttttcaagatgacgaatggccttgccccttatataaggctcggctatctgctgcatgggaattgcggtctgaacccttgcctgaccgcccgcctgctcgattccgtcggcaagggcgagacagttgatgaccgtggccagcatacccatatggtcggctctggtgcggtccatttctccgctggaacggcctctccagaagtttcctccgccgacgactatggcgacctctatgccctcgtcggtgcattttttaacgctcttgcagattttgagaacggtggcaaaatcaagaccgctcttctgtcctccggcgagcacctcgccgcttattttaagtaaaattcttttatatttaggtgttcccatttttgttctcgctccgcctttctatagtttgttcttattatacaacaattcacccgcaaattcaaccataatattcccccgaaaggttcaagaaaatttcggggaaattttttcgattttacttgacagttttcttcacgggtagtaaaattatatccgtaagaacgtggccgtatttgcgaaagcggttacgcaaatctatacaaatcacaaaggagtcaaagtattatggcatatctcgactttaccggaaagactgtcggtatcacaggttccaccggcgctctcggaagctacatggcaaaggtattcgccaaaaacggcgccaacgtggccgttctcggcaacaatgtcgaaaagggcaaggctgttgccgacgaaatcaaaaaggacggcggaaaggccgaattcttccccttcaacgtatgtgacgacgagtctataaagactggtcttaaaaacatcgccgacaccttcggcggcatcgacatttggatcaacaacgccggagtcaacgttcccgccgaggagcgtttccatgttgacaaattctccgacgaatggtggaaaaagatcgtcagcgtggacatggacggcgtttataagtgctcaaagcacgttgttccctatctccgcggaagaaagggctcaaacattattaacataagctcggtcgtgggtatggttcccttcagaaatcaagtcgccttcaccgccgcaaaggccggcgtcatcaacatgaccaaggccatggctcttgagcttgccgacgacgacatccgcgtcaactgcatcgctcccggcaccatctgcatggacaagaccgccgctctttgggccaaggacgactccatgaagcgtctgcttgaccacattcctcagcaccgtcagggcgatcccgacgaaatcgcataccccaccctctttatcgccgacagctatatgtccggttacatcaccggccagtgcctcgccgtggacggaggctggacctgcggctatgcaagagatttctaaaaaccgtaaaagtggctgtatcctgcggtacagccgctttggcctgttaaaaaggagttatcttaaatgaaaatttccgaaaacatcgcgtcggcaaccgtaaaaagcggcagcgtggcggtattttccatgggtcaggccggctttgtttttaagctgccctacggaaccgccattgctctcgacctttatctttccgactgctgcgaacgctatttcggttttaagcgcataatgccgaaaatcatgtcggccgacgaatatacattcgattatgttgtggcaagccacgcccactatgaccatttcgaccccgacagcgttcccacgctgctgtcaaatccgaacaccaaaatgctcgccgcctgcgacgtcaaggtcgaggccgagcgcctgtcgctcagaaaggatcagataacctatctcaaggtgggcgacagctttgacggagaaaacttcaagctgaccgccgtcccctgcgaccacggcgagcttgcgcccgacgctctcggccttgtgcttgaagcggaaggaaagaagatctatgtcatgggagacacctgtttcagagccgatcttcttgaaaacgattttataaagaactgcgatttgcttatactgcccataaacggcgccttcggcaaccttaattccgaagaggccgcaaaggttgtttcgattttaaagccgaaattggccgttccgtgtcactactggaactttgccgagcacggcggagaccccaacgcttttgccacgatcatgaaggaaaaatatcccgaacagaaatatttcctcatgcagatgggcgaaaaaatgtatatctgaacggaggaaaaatatgaaagcacttgttgccgaaggccctcacaaggctgccttcagagatgttgagcttcgtcccattaaggataacgagcttctcatcaaggtcaaaagagccggcatctgcgccaccgacaacgccatttacaccggcgactgtatgtttgtacgcgacggttcgatagtttatccctgccgcttcggccacgaatggtcgggcgtcgtggaaaaggtcggaaaggacgtcacagatttcaaagccggagaccgcgttatatgcgacaacggcgtttcctgcggcgaatgtgacgcctgcaaggaaggaagatacgacgactgcgtcaacgtaaagtcggtgggaacggtcaactgctgggacggctgctttgccgagtatatgatcatgcccgtttaccatgtttatcacattgccgacagcatgagctttgacgccgccgcccttctcgagcccatttccattgcatacgaggcctttaagcgcacaaagctgacaaaggacagtaccgtcgtcatcaccggcaccggcgccattgccatgggtgccgtcgctttggctaaatattacggtgcgggacagatcgtctgcgtcggaagaaaagagccgaagcttgccgttgccaaggacatgggagccacccaccttgtaaacaacacaaaatgctccatgcccgaggaaatcaaaaaaatcaccggcggcaagggagccgatctccttatcgagtcttccggctcggaaaactgccttatcgactgcatcatgtcggccaaaaagggcggagttgtggaaattctcgcattctatgagaagcttataaacaatcttcccatcgaccatatgtccttcaattccatcgacgttcacggctgcgccggacattacggcaacgccgaggcggtcaaaaagatttttgaacaaaaggactacggtcttgaaaaaatgatcacccacagggtcaagtttgacgattgtcttgaatttttcgagcacaacgataaataccgcaacgaaaaaatcaaggtaatgatagattttgattaaattcttggaggaatataaaatgatcaacgaaatgattgaaaaggcgcgcacagccgccaaagagcttgagaatttttctcaggagcaggtcgacgccatcgtccgcgaaatcggcaaaaccgtttatgacaatgccgagtattacgcaaagctggccgtcgaagagacccgtatgggcgtttacgaggacaaaatcaacaaaaataagggtaaggcccgcatcatctggaacagccttaagggcaaaaaatccgtcggcgtcataaaccgcgacgaggacaactgcattaccgaaatcgcccgtcccgtcggcgttgtcggcgccatcaccccctgcaccaaccccatcgtcacccccatgtgcaacgcaatgttcgccgtcaagggccgcaaccccattatcgttgctccccatccccgcgcaaagaaagccaataagatcgtttgcgacgagataatcagaagaatcaccgctctcggcgctcccgcaaacaccattcagtatatcgaagagcccacctccgacctttcggcacagcttatgcacgccgttgacgtggtcgtagccaccggcggtatgggcatggtccgcgccgcatattccagcggcaagcccgctctcggagtcggtgccggtaacgtccagtgcattgtggacgagggtatcgattttgccgacgccgccgcaaaaataattgcaggacgtaaattcgacaacggtatcatctgctccggtgagcagaccgtcatcgctcccgaaaaggactatgacaccatgatcgaggctctcaaggcaaacggcgcctatttcgtaagcgacgccgaaaccaagcaaaagctccgcgacgccatattccccgagggagtcatgaacaagaaccttgtgggtcagagcgttgccaaaattgccgaaaccgccggtatagaagtccccgccgacaccaaggtaatccttgttgaggccgacggctgcggcaaggcagaccttttctgcaaggaaaaaatgtgccccgttatcgctacatttaaatacaacggcattgaggacgctctccgcattgctcaggccaacctcgacgtggaaggccgcggacattcggtcagcttccacacaaacaacaaggagcacgccgaattcatcggcgaacacgccaccgtctgccgcgtacttataaatcaggtttgctcgacctgcaacggcggcgcattctccaacggtctctcccccacaaccaccctcggctgcggctcttggggcaacaacagcatttccgaaaacctcaactatcgctgcttcctcaacatcacccgcgttgcctataacaacggcaaggctcagccctccgacgaggaaatttggggataaatccgaaacccgtttctaaagcacaagcgggggcgtgaaaattcccccgctatgaaaggaaatacagtatgaacttaatggaatataaagcccgcgagctttttgccgaagcgggtcttcccgttcccaccggctttacggtcgattcgattgaggaactggagcaaatggaaattcccgttcccaccgttgttaaggctcaggtcgagaccggcggacgcggaaagttgggcggagttaagcttgccgacacccgcgaggaagcgattgcccacgcaaagaacatactcggaatggacatcaagggccacatcgtcaaaaagctcatgatcgtcaaaaagaccgaggtaaagagcgagatgtatctttcggtcatgctcgaccgcaacaccaagcaccacatcatcatcttctccccctgcggaggaatggacatcgagcagaccgccaaaaccgctcccgaaaagattttcaaaatgcccatagatccgctgctcggctatcttcccgaggacggttattatctcggaagcaaggcgggactgaccttcccccagtgcaaacagctttccgccattatcggcaagctttatgccctttgcaaaaagcgctactgcacgctgaccgagataaatccccttgtcgtcaacgacgaagacaatcttgtggccattgacgcaaaggtagtcatcgacgacagcggcgttgccttccagcccgaccttatggagcttaaaaaggaaagcatgaccgaagaacttgtgaaggaagccgacagctttaatttcctttacattccctgcgatcccgaaggcgatgttgtcgttatgagcaacggctcgggaatgcttatgtcctgcatcgaccaccttgcaagaaagggacgcaaggttgcggccgttctggatctcggcggcggcgccacaagcgaccgtatccgtcacgccgtgagaattcttttctccacccccggcgcaaaacagcttttcatcaacattttcggcggaatcacccgctgcgacgaggttgcgggcggaattcaccttgccgttaccgaggacagggttacccacccggtcgtcgttcgctttgaaggaacaaataaggacaagggtctcgaaatcattcacgatcttaccaacgtaatctacgccgacggacttatttcgggcgttgacgcaatcgtaaacggaggtgcacaataatgagcgtattggtagatgaaaacacaagactgctcgttcagggcatcaccggacgagagggcaccttccacaccgagcagatgctggcctacggcaccaaggttgtgggcggagtcacccccggaaagggcggacaggaggttctcggcgttccggtgttcaacaccgttaaggaagccgtggaaaagaccggcgcaaacgccaccgtcattttcgttcccgcaagatttacaaaacagagcgccatggaggcaatcagagcaggccttaagctcgttataaccattgccgagcacgttcccgttcaggatatgcttgacgtttaccacgtcggcaaatattacggtgccaccgtaatcggccccaactccttcggcgtcatctcccccggcaagagcaaggccggatttatggctcaccgcatattcctccccggaaacgtgggaattatgtccagaagcgccaccaactgctatgaaacggtattcatgatgtccaacgccggtatcggtcagagcacctgcatcggcgtcggcggagacatgatccccggctccacctttgtcgagcttcttcccctctttgaaaacgatcccgaaaccaaggctctcgtgctcatcggcgagataggcggagacgaggaggaaaaggtggccgccgccatgaaggcaggcgtattcacaaaacccgtcgttgcctgcattgcgggtaaaaacgcccccaagggcagaagcatgggccatgccggcgctatcgtaggtgccgacggcacgggcagcgctcagaacaaggaaaaggttctcagcgaggccggcgctcacattgccgacaccaccacccacatcgtggaaattctcaaaaccattaaatattaaaagggatgaaaactatggataaaaaacatttgtgtcatgtctactacacaatgaaccttatccgggattttgaaaatcagtcgctcaaattttttgaggaaaacgtgctcagaggctcggttcacctttgcgtaggcgaggaagccgttcccgccaccgtatgcgagctgcttaatcccgacgattacatcgcaagtacccaccgcggccacggccattgccttgcaaagggcgccgatcccggaaaggctctcgccgagcttatgggtaaggaggacggatattgccgaggccgcggtggctccatgcacattgccgacgtcgacgcgggcaacctcggcgcaaacgccattgtcggcggcggtattccgatcgccgtgggcgccgctctcgccagcaaaatgcagaacaacggtaaagttgccatctcgtttttcggagacggagcaaccaacgaaggaatttttcacgaatcgctgaaccttgccgccgtttggaagctgcccgttgtgttcgtctgcgaaaacaacggatacggtatcagcgttccccaatggcagagcacggccgttaaggacatttcggtccgcgcaaaggcctatgacattcccggcgtcaccgtcgacggaaacgacgtggaagccattgccaaagaggccaaaaaggcaatcgaccgcgcaagaaagggcgagggccccactcttatcgagtgcaaaacctaccgtatctacggccattggaccggcgaccccaccccctaccgcacccgcgaagaggttgaggaatggaagaaaaaggatcctatcaagagactgcgcaaggttcttgaaaaggacggcgtaaaggccgaggagcttgataaactcgagcaggacgccgccgacgccatcgcaaaggccgtggaatttgcacttaacagtcccgagcccgatcccaataccgttcttgacggagttttttatgaggaggctgacgcataatgagcaagaagagttacgttcaggctataagagatgtcactgccgaagaaatgcgtcgtgacgaaaaggtattcgtaatgggcgaggacattgaggttctcggaggcattttcggcgcaacaagaggacttgccgatgaattcggtgccgacagagttcgcaacacccccatttccgaagccggatttataagcgcgggactcggcgccgcctgtgcgggtatgcgcccaattgtcgagcttatgtatatggacttttcccttgtggctgccgattccataatcaatcaggttgccaaaacaagatatattttcggcggaaaagccaaggttccgcttgtcatcagaggacagcagggcgtcggacgcggaaacgccgccacccattcccagagtcttgagaccctctttatgcacttccccggccttaaggtcgcaatgccctccaccgccgaggacgcagccggtcttctccgcgccgccatccgcgacgacaaccccaccatcatgatcgagcacaaggctctctacactcagaaatccgaggttcccgacgatcccgagtttatgattccctggggcaagggcagagttttcagagagggtaaggattgcaccatcatcgcaacccacacctatgtcaaaaaatctctcgacgccgccgaagagcttgccaaagaaggcatcgactgcgaggttatcgacccccgcaccctcgttccgctggacatcgacctgctttcaagctcggtcaaaaagaccggcagatgcgttgttgttcacgaggctcaccgcacctgcggcgtaggcgccgaaatttcttcccagctttacgagcaggccttctgctatcttgacgctcccattgagcgccttggcgcaaagcagtgccccctgcccttcaacctcggtcttgaaaacgccgttgttcctcagcccgaagacattataaacgccgtcaaacgcaccctttataaataattcggaaaggaagacttcacatggctgaaaaaataattatgcccaagcagggtctgcaaatgaccgagggcaccattaccaagtggcttgttaaggaaggcgacaaggtggaaatcggtcagccccttttcgagatggaaaccgacaaaaacaccattcagatcgacagcaccgccgccggcgaagtgcttaagctggttgccaaggaggacgagaccgtcccaattaccgaaaccatcgccatcgtcggcaaaaaaggcgaggatttttccgaccttctccccaaaaagaaggaagaaaagaaacccgagcccgcacccgctcccgccgcacctgcagcgcccgctgtaaagcccgcgcccgccgtcgacgacacgacccccattgctcttgagggcggaagaatttttgtcactccccgtgccaaaatgaccgccgagcgcaaaaacatcgactataaaaccgtcaatggcaccggcccctccggacttatcatcgaaaaagacgttcttgccgccgctgccgtcaaggcaagcccggttgcaaaggcaatcgccgcaagaaagggcgtctccataaccaccgtcaccggaaccggtgaaaacggaaaaatcgtcaagcacgacattctctcgggcgacgcaaacctttcgagagaggacaaggtcattcccatttccggcatgagaaaggtcattgccgacaacatgatgaacagcgtacagtcgatggctcacgcctatcataaggttgccgtcgacatgagcgaggccaagctcatccgcgccgcctttaaaaaggccgaaaagaaggtttccttcaacgacatcatcatcatggctctcggccgcgctctccaggagcatccccgcatgaacgcatgggtcgaggacggaaaaatcaccgaaaagggttcggtcaatgtcggtatcgccgttgcggtggataacggcctcatcgtccccaccgtccgcgacgttcagaacatgaccatcggcgaaatccatgacgaatcggcccgcctcatcgcaaagaccaaggcaggcggactcaagaaagaggaatattccggcgccaccttcacggtcagcaacctcggaatgttcggcattgacgaattcaccgccattgtcaatcctcctcaggttggcattctcgccgtcggctccatgaccgacacccccgttgtccgcgacggacagattgtcatccgtcccatgatgaatcttgtgctgacctatgaccacagggttatcgacggcgctcccgccgcgcagttcttaagcagagtcaaagagctgcttgaaaatccctatctcatgattgtctgagtaaattatattcaaccgaaaggaaagaaatattatgaaaaagttacctccccttcaagtaaaagtcgaccgcgtaaaaccccttatctacggtgattcctacgaatcaagaatgattctcgaccatgtcatcaccggccgcgacaacgttatccaaatcaaccacggaaccgttaaggcccacaaggctctcggcggcgccgcccatgaagaggacgaaatttactacatcctcgacggcaagggcaagctcaagctcgacgatgaaatcatcgacatcgaaggcaaccaggtcatctttattcccgccggcgttttccatgccctcgacaacagcgaaagcgacaccgacatgcacattctcaccttctggagagactatcgcttcaacgacgcctatgaggatcgcatgaagcagtggggcaaatccttcaagaccattgacgaggactgattttatcttctgcgctcgaaaaaagctttcgggcgcagcttttccactttaaaagaaaggtctgaaaaaaatggaatatgatgttgccgtcataggcggaggccccggcggatatgttgccgccatcgcctgcgcaaaacagggcaaaaagaccgtgcttatcgaaaaggacaagtgcggcggaacctgcctcaaccgcggatgcattcccaccaaggctctgcttcattgctccgagctttataaagacgcaaagaccgcagaaaacttcggcgtcaatctcgatgtcaaggattttgactattcaaaatgctatgaccacaaggaggccacctccaaaaagctgcgcggaggagtggaatatcttctcaaaaagagcggctgcgacgttaaattcgcaaatggcgagctgctcaacgaccacaccgtcaaggcaggcgacgagacgatcacatttaaaaatctgatcatcgccaccggttcggttcccgctcccaatcccttcaaggttgaggacggcgctcccctcgtcaacagcgacggatttttggagcttaaagagctgcccaaaaaggttctcattgtgggcggcggagttatcggtcttgaatttgccaccgtgctttcggaattcgaaagcgaggtcaccgtcgttgaggccactcccggagtgctccccaacatggaccgtgaggttgccgatttcgcaaaaagcggccttgagaaaaagggcgttaaattcttcaccggcacctttgtcatgggtgttaagaaaaagggcaaaaaggctcttgtcgaacttaaaacaggcgacaaaaatttcgaggaaaccgccgatttggtggttgtcgccgcaggccgccgcgccaacaccgagggtctgaacataaaggccgccggcgttaacaccgagcgcggatttataaccgtcgacgaccgctgctgcacaaacatgccccacatttacgccatcggtgacgtcaacggcaagtccatgcttgcccacgccgcttccgagcagggcaaggttgtggccgaaaacatcgcaaagggcaaaaatctcgcctgcgatttcgatttggttcccggctgtatctacacccaccccgaggttgcctcggtgggactcaccgagcaaaaggccaaggacgccggaatcaacgtaaaggtcggccgttttaacgccgcaggcaacggaaagctgctgagcatgggcgccgccgaaggctttgtcaagcttgtgaccgacgccgacaccggcgaaattctcggcggacagatctgctgtgagcacgccaccgacatgatttccgaggttgccgttgcaataaagctcgagtccaccgttcacgagcttgcatcggtcattcacccccaccccaccgtttcggaaatggttatggaagccgccgacgacgctctcggcctctgtattcaccaataattttgtaatatttaaccaccttaaaagggatattttgtctcttttaaggtggtttttcgtttgtttgcacaaatattttttaaccatacgaaatttattgacggctgccgtgaatcaatgtataataaggatgtcgggaatagaaaatttatgaaggagttaaaaaatgaaaaagaatattgttctcgcgtcaatctcgccatggcaatagtaacatttcccgtttccgcgcaaagcacaaatctcaccgaaaatattcgttctcccgaaaagacatcagaaagcggatatgacatttcggagctttccctggacaacattcccgacgaactgttaacccagaccgatttagccgaaatgattgccgaaggtacgatcaccgacattgaatcgaccgacaccgaagttctgaattcaataaccgtcataaacggtgaaggcagtcgatcaacctattcctacagtgttcccgttaaatacattgatgaacaaacaaaccaaatcaaatttatcgacaactctttagaaagcggaggaatttttgacaggacagcatataaaaacaccgacaacagcataaaatctgaaatgccaaaaaaaattacagatggaatcatcgtttcggaaaacaacaactccattaaaattcttccgcaaacagaaaacaatgtttctgccgtaaaaaaagagcaagatgttttcggaaataaaaaatccgttgtggaatatgaaaacgcttttggacagggaatttcacttcaatatgaggcaacaaatgccggattaaaagaaaatgtcgtcatttccgaaaaaagcgacaaaaatgtctttaagtttgttttggaaacccacggacttgttcccgatacgctctgcgggcaaacaatcatgttcggagaaaaagacgccgaagaaccgtcatttgttctcagcgcaccttggataaaagattcatataatgcggagggaaatgacgaacacatttcaaccgaaagctattacgagataaccgagctctccgacggaaagtatgaattggctcttgtcgccgacaagacttttctcgattcacccgatacggtttatcccgttgtgattgacccgccgtatgcgacattcggaacttctaaaatcaactatgtttccctgttttcttcttcgtccgaacgttggtacaacagccaatacggcatgctcggcaatcagagcggatacggtgaatgccttatgtatctgcaatttccgaatgtaaaggaatataaacatctaattccaaaaagcataacaagagttaccgttaacatgtatcaatcagtcggagcctcaagcagctattatatcgactgttatgattcgaacacatcagaaacagcctcctccgtttcctacggaacagtaaattcaaacatcggtacacggcttgaccgcaccctatgccaaggaaacgcaacctacggttggtggattaccggagtgttcaaagattggcttacatacgagcgcagcggaaaaggatggccaaaatatcaagtgattttaaaggccgaaaacggaggaaatccctttaaacaattcctctgttccggaaattatatgtgggtaaaaatcgattatgaatgtacttttacaatgatcggaattcaggatccttcccataaaataagtcacactgcgtatatgggtaaaattgcaaaatacacatcatggtataattgctcaatacaaaggagtgttgaaaattgcagtgccacaaccgcactaaaacactttgagagttcaactgtgttggttttccgcggccacggaagcagaacatcaataggttgttacaattcttcacttacaaatgatactttttcttcaaaaggaagtgaatatctcgctaacgaaaagctaattgttttgttggcatgcgcaactgccaaagggggtgagggcgcagcgaattttgccaccacgcttaataaaaaaggcgctcaaacagttgtaggttttatggacgatatttactgcaatgaagcagaacaatggattgaacatttcatttgggcggcaggtcttgacagaacagttgaagaggcctgtgaatatgctaatgtagaaacaggcattgaaaagcaatcacgcagggcaactgtaataggcgacaaaacacagcgggcctatcaaatttcttagacggggtgaacaatatgaaatatttaaaatatatttttgcaatttctgcgatttcagccgttatgctttcggccgtctcctgcaaaaaggccgcagacacaataaccgaaacggtcaatcaaacggccgcccccgcaggaaccaatgaggcgtttgaagacgtttcaatcataaattcttttcccgatacaacaaccgaagaacagtcaacacttaattcttttcccaaaacaacaattgaggaacaggcaacccttaatcagagtaccttttacgaaaatgagacctctttcgcactcgatcgcgaagaagatacggtgaaaacctatgacaaaaacggaaatgttatcggcgaatatttcaatttcagctccaagcccgatatgtccggtctccccgagctttccaaagagcagctacagcaaaaatgcgaggaatttatgtcacaatatgtggacatcaaaaagtatactctcgacgactgtttaggcggtcaggattcctccgacgattcatacacattcgaatattcctatcataaaataaaggacatgagaagctcggattcgttttttatgaacatttataataacggaaccataataaattataaaataaaaaacgccggaatttttgacaacttcggaaacatccccagcgttgactataacgctttaaacaaagaggtcgacagacttgcaaaagaaaaatacggtcagaacatagaatatacaacgaaggaacctgtgctttctcttgcggacggacgtccttgtgttgcagtagctgtttcaccgcagaattacgaatacggcgagctttatgactttttaattcctttggcgcaataaaggagttgacaacgcaatgaagaaaaaaatcatcataatatccgtcgttgcggttcttttgattgcactgtttgtcccctattcggtacaatgttatgacgacggagggacaaaggagtattccgctcttgcacttaaggtcgtgaaatggaaaaagatttcgaacgacgatttcggggacgaagaatttcccgaaaccaaatattatgaaaaaacctcggtttattttttcccatacagcacaaaggatttaagcgaactgtggaaaatcgaatcgggagaatcgtgacggcatcgacggaacaaccgctttaacttttccccttaagcaacagatacttaacaacaaaccgcctttgaaaaagggcggttttctcttgaaaaaaattttaaaacaactataatatacacgggtgatatttatggcaagtgaaaaaaccaacgttatgagaaagctcacgcagcttaagctgccctttaaggagcattattatgagggggtcgtcagcggctcggacgtggccgacgccatgggcgaaaaccacgacaaggtttttaaaacccttgtgacagtcggcaagagcgggcagcactttgtgtttatgattcccgttgacgaagaactcgaccttaaaaaagctgcctcggcggcgggcgaaaagtcggtggccatgataaaatcgaaggagcttttacctctcacgggatatattcacggcggctgctccccaatcggaatgaaaaagcaatttaaaacgtttattcatcaaacggcagactcatttgacaccatttatttcagcggcgggcgtgtgggaagtcaggtggaaatgtctccctccgacttgaaaaaagccgtacccgtcctgccacgggatttaataaaggagcagaaataattcagtttaaaaaacacccttcgggcatagtgctttttttgataaaggcattatgcccgatgttttttgcaaaaacgcactggaccacacccacgtgcgtccggaagcccagttcc

SEQ ID NO: 2700 - DNA, 4210 bp, Unknown
  16S sequences of unknown bacteria
gccgtcgatacggatctctccctccgtggcatcataaaacctgggcagtaagtttatgacggtggatttcccactgccagtgcctccgatgatggctgtagtttctcccggctttgctgtaaaggaaatgtgttccagcgtaggctcctgtgcacctggatagcagaacgtaacgtcatcaaattctaccaggccctgcacatcgctatggtccaacggctgtacgggatccaaaatagtaggctctgtttccagcacatcggcaatacggccagccgataccgatgcacgcgggatcatgatgaagatcatcgatacgataaggaaagagaacatgatctgcatagcatactgcataaaagccatcatatcgccgacctgcatgctgccagcgcccactgcattggcaccaacccaaatgataagcaccgtagttaaattcatcagcagcatcataacgggctgcataatgaccatcaaacggttgacaaacaggctggtcttggttagattcctgttagcctcgtcgatccgcttttcctcataggattctgtattgaaagcgcgaattacgcgcatacccgttagattttctcttgtaacaaggttcagcttatccaccagactctgcatacgcttcattttgggaaggcccacagagaataaaatccccatcaatacaaacaggcacagcaccgaagcggcaatgatccatgtcatagaggggttctttgcaatcgccttgctgagcccgccaattgccataataggcgccaacacaatcatgcgcaaaaatatgatcatcaccatctgaacctgttgcacgtcgttggtggtacgcgtaatgagcgaagcggtggaaaatttatcaaactcgctcagagaataattttctaccttttcaaaaatggcgttgcgcaaatcgcgtgcatagcctgtggccaccctggaggccaaaaaaccagcggcaatggtacagacagcgcctaccaatgcgatggcaagcatttcaagccccgtagagagaatcacgccgttatcacctagcagcacaccctcatttacaattttagacatgtaatccggcagctttaggtctgtcatcgcctgcacaaacacaagcgccaaaacaagcagtatctgccagatatagggttttaggtattttacgattcttcgcattttacagttcccctttcttgctgcttgtgataggtttgttcaacttccaacgctttattcaataagctccgcagctgtccactttgctcttcgcccagcgcctgcataatctgccccacccgcttcagcatttcgttttctacttcttccagcccagcccttcccttttgcgacagttctaccagaatacgccgtttatcaagatgatccatcgttctgagaatcagttccttttcttccagcgtgttcaaaatcgccgtgatagctgggcgtgagatccctagtatctctccgatttcggaaggagacaacgcctttttcctatgcccgtgggcatagcatacacagcccaatgccatcagctcgcttttccttaaatgaaacggcgcacactgaggccttaaaaagcggtttacatgcgcaaatccgcgaataagctcaaaggccatatccttatccatctctgcggttcaccccacatttaattcatttggttaattattttataattgtactatttcccatttgaatgtcaatgaatttctggtttatttgcgaaattgtcaaattgcggccataatgcacaaacatatgtgtttttacacaccaaaaaagcacccatatagtttgggtgcttttcttatgttgtcttaacccaccactgcgtcgctccaagcaatgatatcatccaatatctttcgagattcaaacacatccttgcctttggcgccgccgtagaatttgattttgggctctgtccccgaaggacgcacacaaacccattgatcgttttccagcgtataatacagcacatcagaacatgggaatccatcgataccgggagcataatccttgttttctatcacacggcttccggctatctgcttcggaggctgttcacgcaaagtgcgcatgatttccttgattcttttcgctccctccatgccttgcagcgtataggatttcacacgctctgcatgataaccatacgttttcagcaaaagatcaagttcatccaataacgttttgccttctgcctttgctttagccgccgcttggcacagcaacagagatgcaatgacagcatccttatcacgaacaaaggtccctgccaaaaaaccatagctttcttcaaagccaaagataaactgatgctcttgcccatactgttctatcttttcgccaatgtatttgaaccctgtcaacacattatatagctttacgccatatgcatccgccatgctcttggccagctgtgttgtgacgacgctcttcacaataaaatcgtctttttgcagcttatcctgagccttgagatccctaaggcggttattcagcagcaaacagccaatttgattgcccgtcaaaggcacatactcgccttcggcattgcggatcgcggtacccatgcggtctgcatccggatcggttgctatgaccaagtccgccccacatgccttggcctgttcaatggccattttcagcgcatcgacttcctctggattgggcaggcgtagcgttgaaaactctgtatccggcacacactgtacctccacaggatgcacatctgtaaaccctgcctgcttcaaaacaatctgaacaggcttggccccggttccatgcagcggagaatataccaccttcagctgctttctctcctcttccgtacaggaatccttcagcgtcatcacattttctacataagcagaaagtacctcatcgcctatcattttgatcttgccctgctctatagcctgatcaaaatccattcgctgcacatccagctccgcaacgccctgcatttcctccgcaatggctagggccatctggtccgtaatctgcccgccttgctcattgtataccttatagccgttgtattctttcggattgtggctggctgtcacgacaatgcctgcatcgcaatgtaaatggcgtaccgtaaacgaaagaaccggcgtcggcataatttgatcaaacaaataagccttgatgccgctttgcgccaatacgcaagccgctacctgcgcaaattccgtggatttccggcgggagtcgcaggcaatggcgacccctgatttcaatccttgtttttttagatattgtgccaagccttgggttgctttggatacggtatatacattcatccgtgcacacccaacgcctacctccgcgcgcaatcccgcagtgccaaaggaaagctgcttataaaagcgcgattcaatttccttttcctgatgtctgataagattcaactcttccatcagatccggttcgctgacctttttacaccaagcttcatacagttggtcaatgtccatgctacacctcatattgttttcgattgttattatctgtactatatcatttttatatttacgccgcaagaattcaactttttttctgaaaataaggcatagagattggcagtaaaaaatcaaaagataaaacaggcagctaagatggaggaatttctttgtccatattacattcacatgaataggggcattcctttggcagtattttatatgaacggagcgtagatattgttacaatcatcaaactgatgggacaatctagcattgaaattactgtaaaattatatgtgtgcgatttcttgaaaaagagggagatcattcaaaagctatcataattttacgacttttttacgacggttttgtgctaataatcactgaatttagccgttatcataaaaatcgagcgtcataggaagcattcagaatatacaaaaaagcccgaaacacatgtttcgggctttgatttggtaccccctcagggactcgaaccctggacaccctgattaagagtcaggtgctctagccaactgagctaaggaggcatgtccaacaatcaagaaaaacgcctgattgtattttggagcgggtgatgggaatcgaacccacgtagccagcttggaaggctggagctctaccattgagctacacccgcaatcagtggagcggtagacgagattcgaactcgcgacatccaccttggcaaggtggcactc

SEQ ID NO: 2701 - DNA, 16508 bp, Unknown
  16S sequences of unknown bacteria
cctgtgcttccgcgccgtagtcggtgcgccattccatcggctcggcggtgaaatttttacgacagaatcgttgactgccgataaaagcaggggttctttcctcgaagcaaacgatcggcgcggcctgcactgccatgagctccgcttgcagcttgcctgaactccggttcattccccctgcacccctttgggtcgcctgccgaagcaaattaactaacggcccattgaaatggtaagccccactctcgcgccgtagtcggcgagtcattctcttcagcaagaaaacgcacctgtgaacgcaccaaccgccttcctgccttgacaaatcccagatttccctcgtatactggtgtcaaacatccatgcgatatttcattggaggaagagaaacgatgaaggttttgtgctttggttctctgaatatcgactatacctatcgggtgccccattttgtgcagaagggggagacccttgccgcggaagaaatgaacgttttctgcgggggaaagggatttaatcaggccgtggccttcgcccgcgcaggcgcggagacctatcacgccggagccataggcaaggacggcctgttcctgctggatagcctgaaaaatgcgggcgtgcatacagagctggtcgcagtgctggaagatcagaagaccggatgtgccatcatccagaacgaccatagcggagataactgcatcatgctttacggcgggaccaatcgtaccattacccgggaaatggcggatcgggtgctggaaaagtttggtcaggatgacgtgctggtattgcagaatgagatcaacgaaattccctatattatggaaaaagcccacgagcggggcatgaagatcgtgttgaacccttcgcccatggatggcgctattgccgcgttcccgctgggaacggtggattatttcttcctgaatcaggtggaggcttgccagcttttgggcagcgaaaaccgggaggagccggaaaaacagctggacgcgctgcgcaagcgcttcccggccgccgcgatcgtgctgacgctgggcgaaaaaggttccttgtacgccgatcaggcgcagaagcactttcagcccgcttttcgggtgaaagcggtggataccacggcggcgggcgacaccttcaccggctttttgatgggcggactgctggccggccggacagtgcctgaagccatggaactggcggccaaagcgtccgccatcgccgtgacccggcccggcgcgtcgccgtccattcccacgctggaagaagtgctgaactggaagggtcaggactgagccagctcctgacggaggataaggagaaagtcctccatataccgggtaaagtgcatgtcccggcggcagcagagataaaagtgccgcatcatatcgccgtccagcaggggataggcgttcagcttttcgctcaagtccagatcgggcacacgggaaacgtaggcgtccgggcagagcatgacggccccaagcgccagcgtcaaccggcggcaggcctcgaaattatgggattccagcagaatttccggctggatgccgcttaagagaaacaaacgatcctgcaccgtgcggatgctgtggcccacggccagactgatgaaacgctcctccttcgcctgagcgatgtggaggggcgttccatttggaatgcggcgggccaactgggtgcttcgagcggcgataaggagaatttcctcgttttcaatcagctggtagcgcaaacggctgttggagggcgtggtggtgatcagcgccagatcgcaggtgccgtccagcaccattttttccagcgtgttggagccaaactcctccaattccactcgcacatggggatagcggctcataaactccggcagcacccggggaagaatctgcatcccgcgctgcacggagattcccagtcggagggttccgtgggtctcgcccttgatctcactgatcttgttggtcaggtcggtgtggatggccaccacctgctgggccgcgtggacgtattcctgcccggcggcggtcagacgcatgggggaggaactgcggtcgaaaatgggcgcgcccagctcccgttccacctgacggatgacctgacttaacgcgggctgggaaatgaacagctggttggccgccgccgtgacggagccggtacgttccacggccagaatatagttgacgtgtttcaggctgaagggcatggcgtgttcctttcttgtcaaataacataagaaaaagattatattcaatataatataaaaaatacttgccttataagcaactttagtttatcatgaaaatgccagaaaagcaagcgaacaacagataagaaaaaaaacagccaacggaggcctttatggtaacgacgctgatctccccctgtggcattttaggctatggatttccggccgcatctttggaaaaggcactggagcaatccccggacgcgatcgtggtagacgcgggcagcacggacgcaggcccgcataagctgggcgcgggtacggccatcgtcagccgaatggcggcgaagaaggacctttccctgctgatggcgggggcgcggcggctgcacatcccgctggtgatcggctccgcaggcggctccggggcgcggaagcatacccagtggacgctggatatcattaaggaaattgcccgggagaccggctggaatccccggctgatggtgatctgggccgatattcccaatgaggccattctttccgccatggaggcgggccgggtcacgcccatgtcccccaatgtgccggaattgacggcggagagccttgccgccaccaatggcgtggtggcgcagatgggcgcggagccggtgctcaaagcgctggaacagcacccggacattatcgtttgcggccgggcctacgaccccgcgccctttgcagcagtgggcatcttccgcagccatgacccggcgctgtgctaccacctgggcaaaattctggaatgcggcaccctgtgtgccgagcccggaacggccaaggacgtgatgctgggtcgtctggacgatacaggcttcgaggtctggcccgccgacccggcccggcagtgtacgccggtttccgtggcggctcacaccttctatgaaaaagatcatccctatattctgaaaggcccgggcattgaactggatctttcccagtgccgcttcacccagaccgcacccggacgggtgcgggtggagggcagccagattcgttatcccgcctataccatcaagttggaaggcgcacggctggcggcctaccgcaccttcgtgctggcgggcatccgggatcccctgctcatcagcaaactggacgaggtggaggcggcagtgaaggaatccgtccgcagctattacagcgatatcgacccggccacttatcagatcaacttttatcattacgggctggacgcggtcatgggcgaattggagcccgaccgcacgctgccccacgagatcggcctgatgttcgaagtcatcgcggacagtcaggaaaaagcggacgccatctgcgcgtccacccgttcctgctacctgcactacggctatccgggccgcaagtccacagccggcaatctggcgttcccctttgcgcccagcgacgtttccttcggcgcggtatacgcattctccgtttatcacctgatggcggtcagtgatcccacggaatttttccctgcggaatgggtggaggtgagcgcagaatgaagctctatgaactggcgcacgtactgcgcagcaagaacagcggcccctttgcggtcacactggatattctcttcgatgacccggcggtgtacgaacgggtcaagcgcagcggcaagatcacaccggagaatatcgcccggctgtatgggctgaaagtggaagatatcaccgactttgccagctatgaccccggtctcggctttaagatcacctacctgcgcaagaccgcgtcgggcacggtgggggatcgggacgtgtacggcgcgcagcagcacgcgccgctgatgaacattgaaattcctgacgagctttgaatcagggctgtgggagaggagcgtgaacccgtgaagcgggaagtgctggagaaaatttacgcgggctttctgggcatgaacgccgggattcggctgggtgcgccggtggaacctgccttctgggacagcgaaaacattcgcaaatattacggtgagcttcacggctacgtgaaggattacaagcatttcgccgcggatgacgacgcgaacggccccgtgtttttccttcgggtgctggacgatatgccggtcctcggcgagcctgcgcctcaggacgtggccgaggcgtggctgaactatggccgggagggcgtaggcctgtactggtggggcggttacggcgtgagcaccgagcacaccgcctatctgaacctgaaaaacggcatccccgcgccccagagcggttccattcatcagaacggaaagacgctggcggaacagatcggcgggcagatttttattgatacgtggggcctgatcgccccggcagacccggcccgggcggcacggtatgctgtgacggcagccagcgtttcccacgacggcgaagggcttcatggtgcggcctttatggcggcggctatctcgaaggcattcgagacctccgacatggaggagatcatcgccgcagggcttcagcagattccggcggactgcctgtaccgcaaggtattcgacgcggtggaacggtgctaccgcaatgatccgcaggactggcgggcttgtcttgccatgctgcaggcagaatggggctatgacaagtatcccggcgtgtgccacatcatccccaacgcgggcgtgtgcgcgctggcgctgtattatggcaggggcgacttcgcccgcactatcgaactggcctccatgtgcggctgggacacggactgcaacgcgggcaacgtgggcaccattctgggcgtggccgtgggcccgcagggcattgacgaatgctaccgcggccccatcaacgatgagatcgtgctttccggcatttccggctatctgaacattctggatattcccagctacagcaaaaagctgttcggactggcctgccgtttggcgggcgagaaatgcccggagcctccggcgcaggatgggacgctgcactatgatttcaccctgcccggcgcgacccatggcttccatgtttccgacccgatccgctgcatggcacaggccagcccggaacacggcggctcccttcgctgcttctacgagaagctgatccggggcgagggtttcaacctgtttgtgaagaccttctaccgccgccgggattttgacgacgagcgctatatgcccgtcttttctccgctggcctatccgggacagactgcttccttcacggtggcgctggaacggcttcacggcgatcagctcagcctgaccccctacgtaaaggaaacctttaccggccgggaaattctgctgaaacccgtcgtattctcggattccgttgattctcagaccctttcctttacgctgccggacgtggagggcggcgtgatcgaagaagtgggcctgaagctgactagcctgtctcaagccaaactgtacgatgcgggttcgctgtacctgacggatttccgtctggaaggcaagggccattgtacgctgaatttgagcctgagcaaaaaggagtttgcgtccgtgctgcccttcagccataaccatggcgcgtgggagttggtcgacggccacatggaggtcatgagcctcggccatgccgaagccatgaccggcccctattttgcccgtgacatgaaggtttccggtacggtcactcctctttccggcacgagccacctgatgagcgtccgcgtgcagggagcccagcggggcgtgtacggtggtttcggcgtagtggacggcgttcgttcgctggtcgtcggcaaaactgtccacggcgtgtggcagctgctgacctcccggccctttgactggcaggaagaccatgaatacgccctgacgttggcggcggaaggccagacctttaccttgacgatggacggcggggagcctctttccgtccgggatgataccgcctgcgcctacggcatggtggggtacgctcaatacgccatgggccgcacggctttcggcaatttgacccttgaagaacgttaaaaaacggaaaagcgataaaggagtatatccatgaaaaccagacaggaattgaaacaaaacccggagctcctcaaggataagtgccggggcgcgatcatcggcattgccatcggagactcctttggcgatgcttcccgcaagccggacaatcagctgagctacggcatcaccactgatttccacaagggcgcgtcctggtccaccgacgatacggagttcgccctgctgaccgccaagaccattctggaatgcaagggccagctgaccgacgagcacgtggtgaaagcgtggctggaaaacgtggccacgcaggatgaattcaagcggggcggcgcgtccgaatttgaggccagccgcaacctgcgccggggtctgcggcctccgctgtccggtcagtacaacagctattgccactccgacggcgcggccatgcgtattgcgcctgtgggcgtgtactgcgcgggcgatattgacgcggccatcgccatggcggagacggacgcgcacatcagccactatggagagggcatttggggcgcgcaggcggtcgccgctgccgtggcctgcgccatggtggacggaaccatcgacgagattctggcggcggccatgaagcccattcccgaggggacctggttccgggcggctatggaaaaggccttcgccattgtggatcgggcggaaggcaacttcctgaacgcgtggatgcccctgcatgacgaactgtggtgctcctacaaggccacggtctccgaagcggttgccgaggccttcggcgtgctgaagctggtcaacggagacttccgcaccggcgtggtggctgcgggcaacttcggccgggacgcggacaccatcggcgccatcgtaggctccattttgggcgcaaagtacggcgcgtccaccattcccgcccactgggtggagaagccccgttatcccaccggcacctgcctgaccttcgccaagggcgaggatatgctggcggtggccgatgacctgtgcaaactgattctggaataaaccaacgattggaaaggagcggcccatgcagaccagcttgaaacagcagcccaagtccaagggacagcggctcctgatgcggatatggcaggatcgggtgctgtacctgctgttggccccggctatgctgtatttcgtgttcttccgcctctggcccatctggaacatgcggctggccttcttcaattacaaggcccgctccgagtggacgtgggcggggctgaagtggtttgagatcattttttcctccaacgggtttttcaccattctgggcaacaccatgcgcatcagcttcatgaagtacgtgctgatgttccccttctcggtggccttcgccatcctgctcaacgagctgcgttccagccggatgcgccggctggtgcaggtgagcacctatttgccccactttctgtcctgggtggtcatcgcgggcatctttatcaacattctttcgcccacgggcggcattctcaacgactttcgggccctgttcggcctgcctgccgtggactacatgactcagaaggacaccatcatgggcgtgctgttcgcgtcctccctgtggcgttcgctgggttgggactccattatctactttgccgccattatcggcatcaatcagtcgctgtatgaagcggcctacatggacggcgcgacccggatgcaggtgatccgctacgtggtgctgcccgcgctgatcacccccatggtgaccaccttcatcctgaatctgggcttcttcctggacgctggcttcgatcaggtgttcaacttcaccaacgacgcggtcaactctaccatcgatattctggatacctacatctatcgtttgggcctgactcagggtcagtacgaggtctccactgccgttggcctgctcaagggcgtcgtgggcgtagtgctggtgctcattacccacggggtgtccaagaagctcaccggcacgggcgtgtggtaagaaaggaaggtgcggaaaatgacagttggcaaaaaacgcttttctttcggccagatgctgctgaatgtatttttcctgctcatcgttctgacggtggcggtgccggttatcaatctggcggcccgttccttcgccagcgccaagggcgcgctgcagatgcacggcttctccctgtggccttccgaccccacgctgctgaattatcaggtggtgttctccaaccggctcatcctgccctcgctgtggaataacatcgtcattaccgtgctgggcacggcggtcaacctgcttatcaccctgatggcggcctatgccgtcacccggccccggctggtgggcaagaagttctttatgggcttcttcatcgtcatgatgctcttcaaccccggcctgatgcccgaatatctggtggtgaagcagctcaagctgatcgacagcatgtggagcgtcattctggtgggcgcggtgaacgtgtactaccttttcatcctgcggcgcttcatcgaggaagtgccggaatccctgatcgaggcggcccgcatcgacggggccagccacctgcgcattctgttctccatcgtgatcccgttggccaagaccggcatcgccaccatcgccatgttctatgccgtggcccggtggaacgagtacttcaaggcggggctgtatctgctttcgccggataagaccacgctgcaggtgctcatccgcaagttcgtcgtgcagggcgatatcaccgacttgatcggcttttccaacatgatgaataagacggaactggccaacgtcaactacaattcgcttaagagcgctgcgatcgttgtgggcgtagcgcccattttgctgatctacccctttgcgctcaagttctacgccaaggatgtcatggagggcggcgtgaaggaataagccgtccggcccattcatcatatctagaaggagggtacctcaatgaagaaactggtttctctgctgttggcccttgcgatgctgctgagctgcactgcggctctggctgacatcggcactcccgacgctcccgtgaaggtcacgatgctgctcaaggatatgcccgccgacgatcctgccggtcaggctttctgcaaggcgctgaatgaaaagatggccgaacagggcatgtacgtggacttctcctttgtcgatgctcccgccggcaagtacgtggaagtgatgccgctggccgtcatcaacgaagtgctgaacgcggacatcctgtacttccagggcaacaccgacaccaccgccgccgagcagggcttcctggaggacatgaagccttacgtggacggctcccagtacctgaagaacatcatgtacgcccacaacaccgcccgtctggagaatcatccctacctgctggcggctgcccccatcgccgtgttcacccccgtcatccgcaaggactgggtggctcagctggacacctacgaagctctgatggccgaacccaccgtggataactatctggccttcttcaaggaactgaaggacaagggtctgtgcgaatatcccatctgcgtgtacggtgaccacagtcgtctggacagcgtgttcggagcggccttcggcgtgaccaccacgctggtcaagaccgaggacggcaagtggatctacaagcacgtgaccgacgaaatgaagaacctgcttgccttctatgcccagctgtacgccgatggcatgatcgacccagaatacctgaccaacacctgggacgtggccgaagaaaagttctactccggcaaggccgccatgctgatcggcaagaccggcgcgaccatcaacgtgtatgacaactccatgcaggccaccaacggcgcggacgcggccctgaccgtgctgccccccgccaagtctgaactgggccagtactgcgccgccgtggacgtgtccaaggaagaacgcggccgcgttatcagcgctgactccgaagtgaaggaagccgctttcgccatctttgatttcatggccagccccgagggccgcgtgctggatctctacggtgtggaaggcttccactacaacatcgtggataacaagatcgtgcccatcgaaggcgctcccgactggtacggcgtgttctacgacagcctgatcggtctggaaaacatcccctatgaagccgacgctcccatgggcgaagcgggcctgacctctctggatatcgccagcgagtacttcctggcggacaacgccgtgaacctgcccagcgaatactccgcttactgggatgccatgatcagcctgttcaacgagtacgcggtggacgtgatccgcggcgacaagaacaccgacagcgattggaacgcctttgtggaggcctggaacgccgccggcgctgacaagatcagcgagtatctggggaccgtgatggaatgatccacattcttcgcgggaaggaagggactttgggggctgtgcgcctccaaaccccgcaacaggaggcagtgcctcctgtacctccactttgaccgcgctatgcgcggtcaatagggggtcaagggcgaagcccttgtggggtgcaggggcaacgcccctgcgtcgtccctcccttcccgcgttttttagtgaggtgagaaaatgcttccggaaaactatgccgagcgggtgtatgccgccgtgctgggaaaatgcatcggcgtgcgtctcggcgcgcctgtggaggcggaaaactggacttacgagcgcatccgggcagtatatggcgaacgcatccacggctatctgcggccctatcgggtgttcggcgcggatgacgacatcaacggcccggcgtatttctttcaggtgctggaagaaaaggacgacccgcagctattggactttgcccatgcgtgggtggatttcgtgcgggagggaaagggtttcttctggtggggcggcgtgggcaaatccaccagccatacctcctaccacctgatccgctccggcgcaccgttgcccctgaaaagggaagacctgcgggggctgaagggcgaggacgaaagcgtcggcgggcagatcttcgtggattttctgggactggcgctgccgggacaggagcagcgggcggcggagctgggcggacggctggcggcagtggctcacttcgacgacggcgtatccggcggacggtttatggcggcggccaatgcggcggcctttgacagcgatacggtggaagaaatcgtgctgcgggccttgcgtaccatccccgaggaaggcgactatgccagggtgacgaaagccgtgctggactttttccatcagcatcccgagcgctggcaggactgccggaacatgctggaaaaggagtggggctatgaccgctactccggcgtttgccccatgatccccaacgcgggcgtgtgcgtcatggcgcttctgtacagcggcggagacctgaaccggggcgtggagatcgccacgttggcgggctgggatacggactgcaacgcggggaatgtaggctccattctgggcgctttcggcgggctgagccccatcgacgcatgctatcgggagccttttcacgatacggccattctttccggggtcagcggggagatcaaccagtgtgacctgccgtcgctggcgaaacggatcgcccggcggggctatgagctgctgagtcagcctgtgccggaggagcttcgtgcggaagaagggctgcacttcgactttgaactgcctggttccacccacgggatgcaggtcagcaatccctttgtgctgcagctgagcaacagcacggcgcagagttatcggggaacgcattccctgcaggtggtcttcaaccgcctgcaaaagggcatggagacccggctgtttttcaagaccttttatactcgggcggaatttgaggacgggcgctacagcccggttttttcgccgcgggtttatccggggcagacgctgtccatgcggcttctgatggaaaaatggggcggtacggagccgcttcgaatgcggccctatgtgcgcaccgcctttgaccatcgggattatgagggggaggacttccggcttgaaaacggctgctggaaggaaatcaacttccgcatcccggaggtggacggcggggtcatcgaagaagcaggtctgcaggtattctccgactcggtgaacactggtgaggcttcccgggatctgggacggttctttgtggatgagatccgcgtgacaggggaggccgagtaccggctggacttcgcccaaagccgggtggagttgggcaatctgactcccttcgcccacaaacggggccagtggacgctggagggtagcgccattcacgccctgtgcgaggaatgcactcagagcttcacgggggcctatcacacggccgacctgactctttcctgccggtcaacgccgctgtcgggcggagcctgtctgctggtgcggggaatgggcactctgcggcacgtgctggcggggttgaccgcaccgggaaaagcaggaatctggctgggcggcccggagggctatcggccgctggcggaagcggacttcgactggaaagccggtcagccgtatcagctgaaagccgttgctcggggcgcaaagacggaattgttcatcgacggacagaaaatcgccgaagcggaagtgccatacacccatggtatgtacgggctggcgttgcccggggtcggggaagcgatatttgaagatttccgggtcggaaagtaatggaaaaagcctgtttccgctttgaaaagactgcggggacaggcttttttgattgacaacccgaaaaaataccgttatactctttttctggcaacaaaaaaagaaccgtttgaacggttcctcctggtggagcataggggagtcgaacccctgacctcgacaatgcgaatgtcgcgcgctaccaactgtgctaatgccccacgcaacaaaaaagattataacaaaccctgaaaagaaatgcaaggcttttttcaggagaattttggtttttttattgggaaggacggaaaaatatggtaatattaggcatcgaccccggtttggccacgctgggctggggcgtgatcgacgcgcagcccggacggcagcgcctgatcgagtatggctgcatcctgaccacgcccgatcagcgcttcccggagcggctgaagcagatcggcgaggacatgcgggcgctgctccagcgctttcagccggaggagatcgcctttgaggagctgtttttcgccaaaaacgtgaccaccgcgctgaacgtgggcgcggcccggggcgtgagcatcgccgcctgcgccgagtatacggatcagctttacgaatatacgcccatgcaggtcaaacaggccattgtgggctggggcggggccgagaagaagcagattcagcagatggtgaagatgctgcttcatatggagacgatcgccaagccggacgacgcggcggacgcgatcgccattgccctgacccacgccgccgccgggatggcccgcggccaattccgcatgaaatgaggaacgatacggatgatcgctttaattgaaggaacggtagtggaaaaaagcgagggcgaggccatcgtgatgaccgccgggggcgttggctaccggctgatgtgcagcatgaataccttgtcctccctgcccgccgccggggacaaatgccgcctgtacacccacctgaacgtccgggaggacgcgatggagctgtacggttttctgcagaccgaggaacgggagatgttccggcgactgatcgctatttccgggatcggggcccgcagcgcgctgcaaattctgggcagtatgcccctgtccaacctgcggctggcgatcctgacgggggatgtggcggcgctgtcccgggctccgggcatcggcaaaaagaccgcccagcgcatcagtctggaattgaaggacaagctggccaaggaggccctcagcggcgcggatgagctgaaggagatcgccgccgtaacggacagcgaagcgcccgccggcgacgcgctcagcgaggccatgcaggccctgaaggcgctgggatattcgccgcaggaggccgcgtctgccttgaagggcgtcgcaggaaaagcggagaccgccgacgaaatgatcaaactggccctgcgccacatggcacagcagggataaaccgacaggaggaacggcatggacgaccggatcgtatcttcaggcttccgtcagggggatgatgagcaggaacagagcctgcggccaaagaccctgcgggagtatatcgggcaggagagcgtgaagcaaaacctgcatatttccattgaagcggcgctgaaacgccgggaatcgctggatcatatcctcctttacggcccgcccggactgggcaagactacgctggcgggcattatcgccgctgaaatggggcagaacatccgcatcaccagcggcccggccattgagcgacccggcgatctggccagcattttgaccaatctggcggacggcgacgtgctgttcatcgacgaaatccaccggctgagccgttccgtggaggaagtgctctacccggccatggaggattacgcgctggacatcatgatcggcaaaggccccacggcccggagcatccgactggatctgccgcattttacgctggtaggggccaccacccgggcgggcctgctgagcgcgccgctgcgggatcgcttcggcattctgttccggctggaaatgtatacgccggaggagctttccgccattgtcagccgcagcgcgggcatcttgaacgtggacgccgagccggagggcattctggagatcgcccgccgcagccggggcacgccccgaatcgccaatcggatgctgcgccgggtgcgggactatgcccagacccgggcgggcggtgtgatcacgctggatgtggccagagaagcgctgaatatgcagggcgtggacgagctggggctggataaactggaccgcaccatgctgctgaccgccatggacaagttcggcggcggcccggtggggctggacaccctcagcgccatgaccggcgaggatgccaccaccattgaggacgtgtatgaaccctatctgatgcagctgggctttatgatgcgcaccccccggggacgggtggtcaccccggccgcctacgagcatatgggccgcaagccccagcagcctgcggatgatggacaggagcagatgagaatatgaagacctcggattttgactacaatcttccggaagaactgatcgcccaaacccctgtggagccccgggatcacagtcgcttgctggtgtatgaccgggaggatcactccattcagcatttgcatttttacgacctgccccgctttctgaatgcgggcgatgtgatggtcatcaacgacacgcgcgtcattcccgcccggctgctgggggagaaggaagaaacccatgtgccggtggaaattctgctgctgaagcggctggaaaaagacctgtgggaagcgctggtgcgtccgggccgccggctggctcctggaacatggtgcagcttcggcgacggccttcttcgggcggagatcgtggatcgggccccggagggtgcgcggctggtgcgttttcattatcagggtgtttttgaggaaattctggaccggctgggacagatgcctttgccgccctacattcacgagcgtttgcaggatcgggaacggtatcagacggtctatgcccgggaagaaggcagcgccgccgcccccaccgccggactgcattttaccccggaactgctggaaacgatccgtcagaagggcgttgacattgtgccggtgctgctgcacgtgggcttgggcaccttccgcccggtgaaggaggaagacgtgagccagcaccagatgcatgtggagcattatgaggtcacgccggaggccgcggagagaatcaaccgcgcccgggctgagggacaccgctgcgtctgcatcggcaccaccagcgtccgcacgctggagaccgccagtactgaggatggtctcgtccacgcccaaaacggcgacacgagcattttcatcatgcccggctatcatttcaaggccactgacgcgctggtgaccaattttcatctgcctcagagtacgctgctgatgctgatctccgccctgatgggccgggaagaggccttgcgggtgtacaacatcgctgtagaggaaaagtaccgcttcttctcttttggggacgcgatgctgattttgtaaagacgaatccaaaaaaacgcccccgggaaggtgattcttcccggaggcgtttcagattgtcaaaaagtggaggtgcaggaggcactgctgccactcaatcgtcgcagggactactgccgtagtccctgctcgtttcgtgtcacacctgcgggtcgctaaccgcctacggcggttgtgccca

SEQ ID NO: 2702 - DNA, 1726 bp, Unknown
  16S sequences of unknown bacteria
gcataaaaaggggggagcaagcaaccgttttctgcaaaacctcgcttcttatattattttaccatgctttggaaaaaaagtataggctttttcaacaggaatctgagaaatacacttgcatttatgcgccaatattgataaaattcaagtacaaattgattaggagatgaagtttcatggcacttgtttcatccaaagaaatgttcgaaaaagcatacaagggcggctacgccattggcgcttttaatgtgaacaacatggaaatcgttcaggggattaccgaagcggcaaaagaagtggacgcgcccctgattctccaggtctccaaaggtgcccgcgcttatgcaaaccatacctatctcattaaactggtggaagcagctgtgattgaaaccggtttaccgatctgcctgcatctggatcatggcgacacctttgagttgtgcaaaagctgcatcgacggtggatttacctcagtcatgatcgatgcctcgtccaaaccttttgaggaaaatgtggagcttaccagacgcgttgtggaatatgcacatgatcacggcgtggtcgtggaggctgaactgggtgctttagccggcattgaagacgatgtcaatgtttcggcggaagattcccattatactcgtccagaagaggtcgaagagttcgtcagccgcacgggctgcgattctttggccattgccatcggtacctcccacggcgcatacaaatttaagcctgagcagtgtacgccaaatgaaaagggtattctcgttccgcctccgttgcgctttgatattttgcatgaggtggagaagaacctgccgaatttccccatcgtactgcacggatcctcttcggtgccgcaggactatgtgaagatggtcaacgaaaacggcggtgccatgcccggcgcaatcggcgtaccagaagatcagctgcgcgaggccgcccgcagcgcagtctgcaaaatcaacattgactcggatctgcgcttggcaatgaccggtacaattcgcaaattcttccacgagcaccccgataaatttgatccccgtgaatatctaaagcccgcccgcgccaatattcacgagttggttaagcataaattggtagatgtactgggctgtgccggccatgcacacgaactgagcaacggctgattctctgttgtctgttatgttttaaggaaattcctgctgatagaatcagcaggaatttcttttttacagctgcagaaagaaagtcaccacttttgaaataaacgcttcgacacgcttcaccattgccctagtgcaggcatacaataaaaagggcagggaggtgtattccttttgactttatatccatacaaccgacaagccgccgtagcgtacgcccatcggtgggcctttcgccggaacccgcggttttatgattatgaaaaccttggcggcgactgtacgaactttgcttcacaatgcatttatgccggtactggtatcatgaattttacaccagtatttggctggtattatatcagccccaacgaaaagtctccatcctggacaggtgttccatatttattcgattttttaacacgcacgcagacatcagttggaccagccggacaggatacggacattagtcaaattgaaccgggcgacgtgctgcaactgtcctttgatggcattcagtacaaacatacgcctgtagtcgtatctgtgcgtcggcctgtcacgccggctac

SEQ ID NO: 2703 - DNA, 4101 bp, Unknown
  16S sequences of unknown bacteria
ggtggctcagctggttagagcgccgccctgtcacggcggaggtcgtgggttcgaaccccatccgggtcgtttgcagtttacttctgcagatgccggcgtggcggaactggcagacgcacaggacttaaaatcctgcgggacttacctcccgtaccggttcgatcccggtcgccggcacttgaagtttttgcaagtttgtagtagtatttgttatataatttaatatgtgcgcgtagctcagctggatagagcgtctgactacggatcagaaggtcgggagttcgaatcttctcgcgcacgtttaagatcatttgggttgaccaaatgatcttttttttatataatctgcctaagaaaaggagattctatatgaataaagaacaatttattgacacattgagacgggctttatatggaaagattgatgactatacactgcaggatcatattcgttattacgaagattatatacgtcaggaaatgggaaaggggcggacagaacaggaagtattgcaggaactgggagatccaagactgctggcaagaactatcgtggagacatcttccctgaagaatccggatactgtctatacagttgatgaagaaggacagaattcttatggtacatcagaagatcgggtaaaagttcatacctttacgggatggaaggcaacccttctgatggtagtggtcgtggcagcgatcattttatttgttgttgctatccttggactggcattttatctgttgccgatcattcttgtagtcggggcagtgatctggttgttccggtggctgaccggatctggaagattctgacaggatgatattttccacagtcaatgcataatatgccatgagatatcccatactacccctgtaaacatttcaattacaggaggttaaagacatggctaataacaatcgttctgcaaacaacgcaagcaatagctcagaaaattacagtaattacagcaatagcagcaatagtggaagcagctccagcaagaactcgtccaaatcaaagaacagtgcgaaaaactctgctaagaacgagaaatccgacaacagcagctattaagacaacatcacagaaaagaggtacaggcagtcagccctgtgcctcttttcacgatggcagcaagaaacgcatatactggttaataagggaagaaatggattggagtcaactatggaaaccatctcggcaagagaaattgaccgttatatatttgataaaaattacttactggtagatgtgaggaatccatcagagtatcggaaacagcatatccggggagctgtgtgtgtgccgcgggaatatttacttcagcgtgtgcgaggatttggaaagatcataccggtgctttattgtgaccggggaggtttaagcatgcaggcggccagagaattggaggagtatggatacagggcaatttcagtggtgggaggaatacaggcctacaatggaaggtatctggaatcagacctgaagaagagatgagacgggaatgcatgatccaaggcatgaatcgcttgacataagctatggaaagaagataagatacaatgagtatattaagattgttatacaggaaggataatcaatgagcaaaatagaattagtggcgccctgtcattttggactggaagctgttttgaaaaaagaaattctgaatcttggatatgaaattgtacgtgtggaagacggaagagtaacctttgccggtgatgaagatgccatctgcagagcgaatatttttctgcggactgcagagcggatcctgctgaaagtaggccagcttcatgcagttacatttgacgaattatttgagggaatcaaagcgcttccttgggagaattatattccgtcagatggaaaattctgggttgcaaaggcttcctcagtgaaaagtaagctgttcagtccgtctgatattcagtctattgtgaaaaaggcaatcgtggagcgtctgaaaggggtatactctctgcagtggtttccagagactggtgcagagtatcccatcagaatttcctttatgaaggacgaggcagttgtctgcctggatacgacgggactgtctttacataagagaggatatcgtaccatggtcagcaaggcaccgatcaaggagacgctggcagcagctcttctgatgctgactccctggcataaagaccggatcctggtagatcctttctgcggaagcggcacatttccgatcgaggcagccatgatggcagccaatattgcaccgggtatgaatcgttcctttactgcagaaaaatggacaaactttgtgggacgtaaatactggtatggagccattgatgaggcaaatgatctggtagatgatcagattgagacagatattcagggatatgatattgatggagatattatcaaagcagccagacagaatgcaagagaagcaggtgtggatcatctgatccattttcagcagcgtccgttgtctgaactgtctcatccgaaaaaatatggatttatcgtaagtaatccaccatatggagaacgactggaggaaaaatctcatcttccggcattgtatacagagattggagatcgttttcgcgaactggacagctggtccatgtatctgatcaccagttatgaggatgcagagaaatacattggaaaaaaagcagacaagaaccgtaagatttacaatggtatgctgaagacctactattatcagttccttggaccgaagccgccgaagatgaacagacaggagaaacagtaaactcatggataagattatatttgcaacaggaaatgaaggtaaaatgaaggaagtccgtatgattctggaagatcttggattaccggtattatccctgaaggatgcggggattactgcggatgtggaagaaaacggaacaaccttcgaggaaaatgcacagatcaaggcaaaggcgatcatggaaatgaccggtgcgctggtgctggcagacgattctggtctggaagtggatgcacttgataaggagcctggaatctattcggcccgctatatgggacatgatacttcctaccatattaagaatcagaatattatcgaccggctggaaggaaaagttggagaagagcgcagtgcccgttttgtatgcgcgatcgcagctgcatttcctgatggaagagtgctgattaccagaggcaccatggaaggccagatcggctatgaagaaaaaggggaaaatggatttggttatgatccaatcttttatctgccggaatatcagtgttactcagcagaattgtccctggaggaaaagaacaagttgagtcacagaggaaaagccctgcgccttatgaaagagagattacatgaaagttttaattgtcagtgatacccatggaagggaagataatctggaaaaagtactggaaaaagaatcgcctatcgatgctatggtgcatctgggagatgtggaaggctcagaagattatattcggatcctgacagatgctccagtctatatggtagctggaaataatgatttttatacggatcttccaggtcaggcagtgattgatctggatggataccgggtgtttattactcacgggcatggttatcatgtaagctacagtccgaatcgcctggtggcagaggcactgcaccggaatgcacagattgccatgtatggtcatactcatgtgcctcatctggaacagatggaaggtgtgatcgttctgaatccaggaagcttaagctatcccagacaggcggggcgggagccgagttatatcattatggagacaacaccagataagcaggttcattttgatattcgctatctgagaaaatgatatcagagcggtctgaaaaggcatctaaaaataatttgaaaaaaatgaaaaaagttgttgacatttagcgagtcgtcctctataataaacgagtgtccaaacgaggacgacagagatgcaagacggggtgtggctcagtttggctagagcgcctggtttgggaccaggaggccgcaggttcgaatcctgtcaccccgatgctgtaaacaataccgtttcagcgacatgcgggtgtagttcaatggtagaacaccagccttcca

SEQ ID NO: 2704 - DNA, 5492 bp, Unknown
  16S sequences of unknown bacteria
gggacggagcttcgccgcgcgcagtgcgcgaaacaggcgaagcggaagtccaatgagcaaaggagacttgcaagcggtagcgtagcaaggcgactattgcgaattgaggaacgaagcagcgcgaagtaagcccaatgagggcgaaagaggtggcgcagccagtggggcgcacgaaggccgcgcgcagtgcgcgaaacaggccgtagtaagcccaatgagcaagggagtactgcaagccgtagggcgcagcaggacgaccattgcgaattgagggtgcaatagccgccgatgagcccagtgaagcagggagcaccgcgagtgagcttgcgaacgatgcggagcgaccatgctgaactgagaggcgggaacactgcaagccgccaggcgcagcagggtgaccattgcgaattgtggatagcttactcccccgtccaccagcttgtcaaaaagacttttttgacaagctaaatattgactttatgcagatgtgcaggtataatgcaagcagacaatttcaatggaggtttttgccaatgcgacccaatatactgctaattttggcggacgatcagggcgcctggtccatgggatgtgcgggaaataacgacgtgcgcacgcccaatctggaccgcttagcgcgagaaggcacgcggttttcccattttttctgcgcgtctcccgtctgttcgcccgcgcgggccagcctgatgacggggaaaactccctcgcagcacggcgtacacgattggctgtgcaggggctacacggatgaaagccgcctcgccccgcgcctgcgcgaggcgttcgagcggggcgatcccgcgccgaaataccagtggcccaagagccagctacacggcgaccacgccatctgctttatggacgggcatttgatgtattcgcagctgctggccgacgccggctacgattgcgcgctctccggcaagtggcacctgggggattccgcgctgccgcagggcgggttccgctggtggcgctccatcgccatgggcggggacaactacttcacccccacggttttgatgccggacggtactttcgacatgctggacgaccattacatcacgaactacatcacggaaaacgccctggattacctgcgcaacgaccgacctgcggaccggcccttctatctttcggtacactacaccgcgccgcactcgccctttgaccgggcgaaccacccggcggaattcttcgagccgttcgcgggcaagcccttcgcgtccgtgccctttgagccgcagcacccctggagcgagccgcgcgaggattggcccgcctaccgccagatgtgcctggagggctattgcgcggcgctatacggcatggacaagggcgtcggccaactgctcgacgccttggaggaactgcatctgcgcgaaaacacgctggtgatcttcaccggcgacaacggcatgtgcgtcgggcaacacggcgtcatcggcaaggggaacggcaccttccccatgaacatgtacgaggaatccgtgctcgtgcccatgatcgcgcgcctgccgggcgtgatccccgcgggccgcgtggaaaacgggctgtacggccacatggacattttccccaccgtggcggagttcaccggcgttcccgtgccggaaggcctgtgcggccagagcctgaaaaaggccctgctcggccaggcggcggaggacgacggcgcggttttcctctgcgacgaatatggccccacgcgcatggtacgcacgcgcgattggaaatatatccaccgctacccctatgggccgcatgagctgtacgacctggcaaatgacccccacgagcgcgtcaacctggcgggcaagccggaatgcgcgcaggtggaggcggccttgcggcagcagctcacggaattttatgtgaaatattccgatcctgggctggacggttcccgggaagcggtgtatggcaaggggcaaacgcagagggtcggcgtgcaagcgggcggaaagccctcgttccggcccccaaaaacggaggtactcgtatgaaaatgatcgaccggcgcggcgtatggcggttatatgaccgccataccactttgatcctcaccgacgaaaagcaactcgagcgcatcgcctacgcgccggatgaaccgctcttcgacgacgaagaccgcggcttttccggcgaacggcacggcctgtatcccaagggaaccacgctggattcctttatggcggacgcggcccagcgcggctgcacgcgcgtagaagtctcctacgactttttctttggcggcaccacgcgcaccagctatccggacagcgaaatcaccgtgaaagcctatcaggtgatctgcgaaaaagcgcgcgcgcacggcatgacctttggcgcgtcgctgatttccccactggatctgggcggcggctacgtaaaaacgcatgagaacaccggccgcacctggcaaatggccgaggcagatctgcaagacgggcatttttcgctggaaatgcgcgagcaaatgcaatggtacaacaacaagggccccatcgccctgcggctcacgcggctcatggcctacgcgttcgatgaggaacgcctgggcgattcggccaatttttacgtgaacgcggcggccatggaggacatcaccccctcggtgcgcttcgagcggctggcgggcacggaaaaggtcaccggctcgggctatgggtaccggctgatgcgcgtgagcggcgattgcggcagcgcgaaggggcatgtgatggtgctggcggaatacgccacgccggagttggactacttcgcggacaacgccctgccctacattcagagcgtcgtcgacctccacgcccaaaacggcatcgcctatgaaggattctattccgacgaaatgcacatccagttcgactgggatctgaacgagcacttcggccccacggagatccgcacgcgctacgttaccccggcgctcatccgcgaatacgccgcgcgctatggcgaaaaatacctcgatttcgcgcgctatatggtgtacttctgccagggccagcactgggtggacggcaagcccgcgcagcacgtgatgggccgcggcgaagcggacatcgccgaaacctggcttttccgcaagcgctatttcgaactgctctcgcgcacggtggtcgatctttccaaggcggcgaaggactacgcggaaagccgctttggcgcgcccatcatggccaaggcgcacgccacctggcaggaagctcccacctgcgaccatttctgcgatagaaccctggacatcggccaaacccccgccgacgtttcccgctacgattacggcaagccctattcctggagctccaccatccgcgaaaacatgtccgcctgcggcgactatttccgctggaacgagttcctctccggcgcgggcaccgaccatcccgagggcggctatctcgaccggaactattacgcgcaggccttcgcggcctccctgggcaacctgaatcccttcgaaaaggcctattgcgcctgctggggctcgcccgcggaagccatccgccgcttcggcgcggtgggcgcggcctacggcaccggcagcctggagcacagcctggtgcaggatatgcgccaccgcgaaagcgcggtgctcgccctgtatcccacggagctgaactatgccgatgagcgcttcggctcctggatggtgcaatacggctattgcgactacatcaccgaggaaaagctgcaggaattcgcccgcgcggacggcggcaagctgctggtgaacggccgcgcgtacggcacggtggtggcgctgttcgagcccttcctctcgccaaagaccgcccaattgctgcgcgcctttgtgatgaacggcggcaaactgctgtggacggccgtgcccgccgcgcagttcgacgatggaagcagcgctgcggcctggtttgaggatctgttcggcgccaagggcgcaaacgcggcgcggcccgtttccctggaagaccgcgaaatccgcttcgagggccggctggcgggcgtcgcgccgatgaccccctgcacgggcctgctgccggatatgggctatccctgcgaggcggcggacgcgcaaatcgtggcccgctgcggcgaaaccgtgctgggtacggccaaggaatacccgcgcggcggcctggccgtctacctcggtttccgcccgcgcgacgatcaatcgcaatccatgggcgcggatatcgacacgctctttgccgtgctcgacgccatgggcgcgtacgacggcagcctggaacgcctttcccgcccggaaaacgcgcgttacctcctcaaccgcttccccaacggcgcggtgaccgtcgccaaccattaccgtaccttccaggaagcgtgggacggcagcttcttccgcgtggaagaggacgaccgcaaggcactggagggccgcgcgcttccgcccatcgaaatcgatctgaacgggcgcgtcggcggctgcgacgtggtgtattccggaaccgacgccctgagcttttgctggaaagacggccaactgcttggcttcgcgggcaacggcaccaccggcatctccctggacggccatgaattccgctttaccgacgcgcccgccagcatcgccttcgcgcaaatggacgcgcggcacctttccagcggcgtgcgcgaactcttgctcgtcaagtgtgattccccggcgcgcgtgcgcgtgcccatcggcttcgtgcccagcggcgcaggcgtgtgcgagctggatgtgttcgaaaccgcgcgcgaaatccccttcaccgccgccaatggaacgctctccatcgatgtttccccggaagacgcgggccattggatcgcggtgtacgccaaggcataattgacaaggccgcgccaaaggcgccacgccgaaaaacaatctgggccgccgcggatggtacaaaccgcggcggcctttgatcgttgacaaagccaatatttcattcgaaatcgcaggttcttatcgctagcccattctgaatcgtcccgcccagcaggtctttcagcgcttcctgggcgtccgccgccgtcttgctgtcgtgcatctcgatgagctatccaatggtgttccgcttttcttcactcagcccgttgtttctcttcctcccgccttgcctctattctatcacactccgcatcccttttacagaaaaagttgaacaggctctgaccgaaaggcacaggctcccgctaagcctgcggggcaatttcgccggccagcgattgtagttcttcccgcgagaggcccgtgaagcgcgcgacctggtctatgggcagttccttcagcatagcccgcgccgtttccagcttgccgcgcttttccccgcgctcttcgccgatggcgatcccgcgcttttccccgcgctcttcgccgatggcgatcccgcgcttttcgccgagttctttgccaatggctatgccgcgttcttcgccgatggcaatgccgcgcttttccccgagcagctccgcttcccgttgacgaatttgcc

SEQ ID NO: 2705 - DNA, 12998 bp, Unknown
  16S sequences of unknown bacteria
ttgggcttacttcgcgctgcttcgcgcacagcgcgcgcgcttcgtgcgccccctttaggaaaggggagccttttggggcgcaagccgcaacaataagtaggatatttcgaacttcattttaaggagggaacccccgtgatcgaaaccgagggctttatccaggatctggccgccgtacgcgagcggatccgcgaggcaggtgactcactttaacctgcccgggttgaaggaacagttggaagaataccaggcggacatggcctcgcccggtttttgggacaatctggagcacgcgcagagcgtgaaccagaaggcgcacgccgccgaaagcaaaatcgaaaactacaacaagctcgtttccgcggcggacgacctggacgtgctcatcgaaatgtatgaggaatccggcgacaaggatctgctggcggaaatccaggcggagtttgccaagatgcatgacgagctggaaaccatccgcctcaccacgctgctgcgcggcgaatacgacgcgctcaattgcgtgctctcgctgcacgcgggcgcgggcggcacggaagcccaggactggacgcagatgctctaccgcatgtacacccgcttttgcgagcgcatggggcttaccgtgcgcgagctggacatgctggagggcgacgaggcgggcatcaagtccgtcacgttcgaggtttcgggcgattacgcctatggctatctcaaatccgagcgcggcgtgcaccggctggtgcgcatttcgccctttgattccgcggcgcggcggcacacgtcgttcgcctcgctggacgtcgcacccctcatcgaggacagccaggtggagatccggcccgaagatctgcgcatcgacacctaccgcgccagcggcgcgggcggccagcacgtcaaccgcacggacagcgccgtgcgcatcacgcacattcccacgggcatcgtggtgcagtgccagaacgagcgctcgcagattcaaaaccgcgaaacctgtatgagagtgctgcgcgcgcgcctgatcgagcgtcaggaacaggagcgccaggaacagatgagcgagctgaagggcgagatgaaaaagatcgagtggggcagccagatccgttcctacgtgttccagccctacaccatggtgaaggatcaccgcaccggccacgaaaccggcaacatcgccgaagtgatggacggcaagctggaagatttcgtgatcgcctatctgcaaaaaatgtaaaaaaaaatcctgcggcgcgcgcccctgcgggcagcgcgccgtctatcgaggttttgtcgtatgtggcaggatatttcgcgcccgctggcatcgggcatggaggtttaccccggcgacccgggctttgccgcccggcggctgcgccaggtggaaacagacggctatgcgctcacggaaatctccatgagcgcgcattgcggcacgcacatggacgcgcccgcgcacttcgtcgcaggcggaaagaccatcgaacaattggatagcgcgctctttttcggccccgccgcgctcatcgaaatgcgcgcgccggaagatctcttgcgcgtgcccgcgggaaccgggcgcctgctgatccacgatttgggctacggcgggctgcgggaggccgacgcgcagcggctgctggccgcgggcgtgcggctgatcggcacaaacaacctttccatcgcggcggaggaagtttccagcgccgtgcacacccgcctgctcgaaagcgaagttttgctgctggaagggctgtggctggaaggattggccgaaggcgcctatgaactgatcgcgctgcccctgcgcctggtgagcgcggaaggcgcgcctgcgcgcgcgttcgtgcgcgccatggaatgaagccgctcagtttttttaccgcgctctttgtgtgcctggcgctgctgctcgcttcgctctacaccgtggccatcgacccgcgtacctacgcgcgccagcaggcgcggctgaacgtggcggagcgctcggatttttcgcaggaggcgcttctcgcgctggatgaggccgtggcccgctacatgcgcggcgcggggccgctggacgatgccgtcttttccccgcgcgaaatcgcgcacatgcgggacgtgcgcgcgctgatggccctgtgcgaacgcgtgctggcgctgcttgccgcgctggccgcgctggggctggcgctggtgtttggccgcctgcggcttaagggcttttgcgcgctgctgcgcggcgggcgctgggcgctgctggcgctggcggcgtgcgtcgcgattctggcggcgtgggcttttatcgatttcaccggcctgttcacggccttccaccaattgttgttcaccaacgatttgtggctgctcagcgcgtcctccacgctgattcgcatgtttccagaggatttttttcgggcgatggcagcggaaatcgcgctgcgcttcgccctatcgctgcttgccctcgcggcattgggaaaggggatgagccgctatgcggatactcgccgttgaatcttcctgcgatgaaacggccatggccgtggtggaagacggccggcgcgttttgtcgcaggccatcgcctcgcagatcgacatccacgcgctctatggcggcgtggtgccggaaatcgcctcgcgcgaacacgttcttgcgctggacccgctgctcgatcaggtgctgccgcagggcgaaaccgtggacgccgtggccgtcaccttcggcccggggctggtgggcgcgctgctcaccggcgtgagctgggccaagggattcgcctacgcgcggggccttccgctcattcccgtgaaccacatcgaagggcacgtgagcgcgaattacatcgcgcatccctcgctggagccgcccttcgtgtgcctggtggcctcgggcgggcacagccacatcgtgcgcgtggacgattacggcagctatacgctcctggggcagacgacggacgacgccgcgggcgaggccttcgacaaggccgcgcgcgtgatcggcatcccctaccccggcggcccgctgttggacaagctggccgagcagggcgacgagcacgcctaccattttcccaaggcgcacgtcaaggggaaatacgattattccttcagcggcgtaaagaccgccgtgatcaacgaaacccaccgcctcaaacagatgggccaggagatccggcgggaagattttgccgcctcgttccggcgcgcggtggtcgatatgctggtggaaaaggccgtggccgccgcggtggatagcggcgcgggcaagctggcgctctccggcggcgtggccgccaaccagcttctgcgccgggaagcgcgcgagcggggcgaacgagcggggcttgccgtctacatgccgcccgtatctttgtgcacggacaacgcggccatgatcggcagcgctgcttattaccgctatttgaagggcgagctcgcgccgctttcgctgaacgcgcagccgtccctgcgcctgatcgggcaggaatagcgcccagaagactcccccctgccagcaaaccgcggcgacgcaagacaacccctcagttcagcaacccctcagtcagcttcgctgacagctcccctggaaccaggggagccttttggaaagtggtacaatcgtaggaagttgcccggccaaaagcctcctttttcccgaagggaaaaggggcgcacgaaagccgccgccagtggcggaaacaggccgtagtaagcccagtaaggcaaggaaagccgcgagtgagcttgcgaacatcggaggcccgaagggctgaagtggcgagcacacggagcgaagcgcagtgcgcagccacggaacaccgggccgctaaaggcggcacggtgcgaaggtgcggattgactatgccgcactgtggaacggtggcacggcgcagccgtgacggagggattgacacggtagcgctgcgcgagccggtggattgaaatgatacgcgcgcataactctcgcaaatttctcccgcgcgggtagaaagaggtacacatatgaattttgcctggatggacgaagccgcccacgcgcgctccggcgcgttcgagcgggccatgcgcgttttgcccagcgcggaaatcgccgctaagcccgcttacgacaaggccaagcgcacgttcgatcttgtattgggtgcgttggcggcggtcgtggccgcgctgcccatgctggccatcgcgctggcggtgaagctggattcgcccggccccgcgctttaccgccaggagcgcctggggctggacggcaagccgttcaccctgctcaagttccgctccatgcggcaggacgcggagcgcgacggcccgcgctgggcggaaaaatacgatccccgcgtcacgcgcgtggggcgcgtgctgcgcaaaacccggctggacgagttgccgcaattgtggaacattctgcgcggcgagatgagctttgtgggcccgcgccccgagcgaaaatatttttacgcggcctttgaggagcggttgcccggcttttcgcgccgcatggcggtcaagcccgggctcaccggctgggcgcaggtgaacggcggctatgatttgcagccgccggacaagctcgtgtacgacatggaatacatccgcaagcgctccctcgcgctggacgcgcgctgcctgttcatgacggtgcgcatcgtgctgggcgggcacggcgcgcggtgaacgctatcgcgctgagcgcgccaaaagattgccatatccacgcgcttgacggcaagccgaaatgcggttacaatagagaatacaaattgacgcatacggagaactgcatgaagaacgtgtttgagcgcgccgcgggccgcgcggcggattccgcggccaccgatttccgcgcggggagccatttcccggcgcggctcatcgcgcgcgcgctattttggcttttgccgctgctatttttgctgggcgcgccgtgcctggccagcgaaaccgggctggtgctcagcggctatctcaccccgggcgagctggtggtgcccggggaagtgacgctttcgctcacgttgcaaaacacctcggacgaggccattttcaacgtgcggatttttatgcaaaccgcctccggcgcggatgaaatcagccggtatgacgcgattgccgcgggcgaaatcgtggaggccacgcaggtcatccgcgtgacgcaggcccaactggacgcgggcgaagtggtggtgttcatcaacagcgggctcgaaacggaaaccatcgccggttcgggcaacatcggcattcccatcgaaaaggcgcgggccaatgtgcagctcgaattcacgcgccagctttccagccaatacgtggaggaaggcgaaaccatcaccatcgcctatatggtgcgcaacctgggcaatgtggacctgcgccaaatcagcgtgcacgacgcgctgggcaattttgaggagcgcatcgcctcgctctcgcccggcgaaagcaaaacctttttgaaccacgccatggtcggcgccgacgcgcaatccgaagcgtatgtgacctacaccccgcaaaccgaaaccgcccagcgccgccaggatctggccaatgtggagatctacctggcccgcgaatccctggaagtggagctggaatccaacatgcaggacgtgtactacggcgggcaagtggagctgaccgcgcgcgtgaccaacacgggcagcgtcacgctcacggccatttcgctcacggatccggcgcttggcatattcacggacaagccgttctcgctggatcccggcgaatcccaggaattcacgcgcctggccacgctgttcgcccggcggcagttccagctcacggcgcgcgcctcctcgcccacgggcaaccccgtttccgccaccagcaatcccatcgacgtggccgtggaaagcgagagcggcgcggtgttcctcagcgtttccgcccagccggaaatggagcgcatccgccgcgcgggcacggtgaatttcaccgtggaggtcatcaacagcggctttggcagcgtttccaacgtggaaattggcgagcgcgcgctgggcgcgctgcacacgttcgcggtggtgcccgcgggcgaacccacatcgcgcacggtggccctcaacgtgacggaaaccggcgagttccagttctattgcgccgtgcgcgacgaaagcggccgccagagcatgatctacgccgaacccgtgaccgtgaccatcgccagcgacggcgaggagccctccgccgccctacagccgacggaatcccccatcctggcgggcgaatccacgcgcccggattccttcaacgtctatccctatatgatcgcgggcgcgctgatcctgttggccgcgctcacgacgctgctcgccgtcacttctttccaggagcggcgcgcgcggcgcttgcgcaaaaagcagcgcgaggaggcgaaaaagaaatagcatgttcgctggattcaccgaagaaacgttttcgtatttcacggccatccgcttttgcaacaaccgggagttcttccagtccaaccacgattggtacgtgcgcgcggtgcgcgagcccctgctcgatttggcggacgcgctgggcgataccgtgcgcgccatcgacccggaactggaaacccgccctggccgcgtgctctgccggcccaaccgcgatatccgctattcgcgggacaaatccgtctaccgcgattatatgttcctcaaattccgccgccccggcgaggagcgcgccagcacgctaggcctgtatttcgatatcagcgatagcggcgcgagctttggcgcgggtttttacgcgcccaatctgccgcgcatgaacgcgctgcgcacgcaaattcgtctgcagcccgaaatctgcgaacagcgcctgaacattggcgaattcgttctggtgggcaatgtgatcaagcgcatgcgcgtgcccgaaacggtgccacaggccctgcggccctggtatccgctgcgcagtttttatgtggagaaagaaatccgcgatttcgacctgctcaaaagccccgccctggcgggcgaggtcgagcgcggttttcagcgccttgcgcccatgttccagtgggtgcagggccttgtgcctgaggaaaacgatttgccatccaaggaggattgacccatgatcaatcgcattcaagccgccgcggattgcctggcggccgccaaactgctgtacaagcgccacctggtcaacgcgtacgagggcaatgtttccatccgcgtgggcgattccattttcatcacgcccacgcaaatctgcaaagagctgctcacaccggatgacctggtggaagtggacatcgctagcggcgccgtcatccgcgcgggcaaggggcgcaagccttccagcgagctgaagctgcacctgtgctgctaccgcaaccggggcgatgcccaggccgtggcgcacgcgcatccgccgtatgccacgtcgttcgcgctgcgctgcgaacccatcgagacccgcggttatccggaactgatgctgcactatggccgcgtgcccgtttgccgctatggccgcgcctccaccgaggcggtaaacgccgatgtgcccgcggttttgcaggaatacgacgcgttcctgctggccaaccacggcctggccgccgtggccgccaccgcgctggacgccgcctacaagctggaaggcatcgaaaccatcgccaaggttttgcacctggcgcgcgagcgcggcggcgagtgcccgctgggggacgcggacgtggcggagattgaaaggcttcgattaagcgcgcgttgatttttgccgcctgctcttgcggcgcttgcggcaatccggtacaatattgcacagaaaattcatcaagggagagattacttatgggtctggaccaaaaagtcgtcaacgcaatccgcgtcctctccgccgagggcgtgcagaaggccaagagcggccatcccggcatgccgatgggcgccgccgctatggcctatgccgtgtggggcaagcacatggtgcacaccaacgccgatcccaagtgggacaatcgcgaccgcttcgtgctctccagcgggcacggctccatgctgatctattcgcttttgcacctgttcggctatgggctgacgatggacgacctgaagtccttccgtcaatacggctccaagacgccgggccatccggaatataagcacaccatcggcgtggaaaccaccaccggcccgctcggccagggcattgccaacgccgtgggcttcgccatggcggaaaaatacctggccgcgcacttcaaccgggaaggcttcccggtggtcgaccactacacctattgcatcctgggcgacggctgcatgatggaaggcatctcgcacgaggcctgctcgctggccggcacgctgaagctcaacaagctgatcgccctgtacgacgacaacgagatctccatcgaaggcgatacggacatcgctttccgcgaggacgtgcccgcccgcttccgcgcctatggctggaacgtgatcgacgtaaaggacggcaattgccacaagaacgtgggcgccgccatccgcctggccaagggaagcgataagcccaccctcatcgtgtgccacacgcagatcggctttggctcgcccaaggcgggcaaggccagcgcgcacggcgaaccgctgggcgacgaggccctggcggaaaccaagaaggccctgggctgggattacccgcccttcaccgtgccggaagacgtgtacgcccgcgcggcggaagccacggcccgcggcgaagaggcgcgccaggcctggctgcgcctgatggacgaatacaaggccgcgcacccggatctctaccaggaataccaggcgtggcacagcgaagaactgcccgtggacttgctgcacgacgaggcctattgggcctttgacaagaaggccgccacccgcaattccagcggcgaggtcatcaaccgcttggccgcgcgcgtgccgaacctgatcggcggcagcgccgacctggccccctcgaacaagaccgaaatgaagggccgcggcgatttctccgccgagaaccccaccggcgcgaacctgcactttggcgtgcgcgagcatgccatggccgccatttgcaacggcctgaagctgcacggcggcctgcgcccctattgcgccaccttcttcgtgtttagcgattacatgaagaacgccatgcgcatgtccgccctgatgggcctcaacgtggtgtacgtgctcacgcacgattccatcggcgtgggcgaggacggccccacccaccagcccatcgagcacctggccggcctgcgcgccatccccaacatgatcgtgttccgccccgcggattcccgcgaagtggccgccggttggtaccagggtctcacgggcgaccggcccgtctcgctggtgctcacgcgccaggatctgcccctgtatgaaaagagcggccccgccgcgctcaagggcggctacatcattgccgattccgagaaggagacgccggacgtcatcctcctcgcttccggcagcgaggtcgaaccctgcgtgaacgcccaggccctgctcaaggaaaagggcgtcgacgcgcgcgtggtctccatgccttccttcgaactgttcgacgagcaggacgaggcctataagcaatccgtgctgcccgacggcgtgcgcgcgcgcgtggccgtggaagccggcgcggagctgggctggcacaagtatgtgggcctggatggcgcggtgatctgcatgcacggcttcggcgcttccgccccgtacaagaccctcttcgaaaagttcggcttcaccgccgaaaacgtcgccgccacggcgatgaatgtgctcgccaagaagtaaaatctaaaacgacgcggccccggctcgaaaaagccggggccgcgtttgcctttgcggcacttttcaggagtgtgtggcgtagtcaatgcctgcctcgaagaatcaatatctcggcaacgaacacaccacttcatccgcacaatgcgaatgatcccgtgtgtgcacatgtaccgatccattattgctaccgcaataatggcagatccaataggtatacgccaatccttgcctcacatagcatccagggttccgagtgcaacgtgtttccccagtatatgaagatacggtatatgagcaatatacatcaaaagagcccacattaccatttccacatttgcaggtaaccatccttaatggatgtatatgcccctcttcctctcctgcaaccccacctattggcagcattgtgagcatcataatcagcgcgagaagcaaactagcctttttcatttcattcccctcctttcttcgcttgatacacacactccctttaacaaatcaattattgtaattaaattgtaccatattgcatcgccatatgcaatattgattttttattaaattatctaaaataaattataatatatatatataatttaataaatttaaattaaatcatgccatctattgcattttgtaacactacatgttatactttatatagtaattccatcttgaaaggagattttgccatgaaaaaagcgattcttgccctgctgttgctgtgcatgctgccgctggcctgcgcgccgcccgcgcgggcggaaaagagcgcgatgttgttccagagcggcgtctccgcacccatcttccccttcgaagcagagggcgcgctctacgcattggccaacggccgcctgtacgcgctggacggaaacgcggcgggcgaagccattcccgtggcgctggaaggcgagctggatttggaaagcgcgtggctggaattcctcgcgcccgtgcgcctgaacggcgcgctgtatctactagggcgcgtgggcggcaacgaaggcggcgcagcgtatgtggcatacggcggcctgttttcgctcaaaatcgcggatggcgcagccaccgccgcgctgcaaacgcgcctggactgggacggcattggcgccgattcgttatcttcccctgcgctttcctgcgtttttgcgcaggagaacacgatatacgccctcctgacggacgatgccgcccaaacgcgcattgccgccttcgacgcggaagagggcagttgcacgattaccgccatagacggcctttcctgcattgcgccctactacgggcaggaaggcatgctcgccgcgctgcgcagcggcgagctggggcagatttcctatcgcgacatgcgctatgcgccgctgggcgctttcccggcggacgcagccgggctgttctacgacgcgccctccggcgcgctctatttttattccgaaggcgcgttgcacagcgcgccggacatgcgcctggatgccatagaaaccctctcgcccctgccgctgggcacgcagatcgccgcgctgcccagcgtgacggaatcccactacatcctcgccgaccagcgccaagtgtggcaagcgcccctgcgcgccacggcgcaggaggcgcgcaagttggtggtggaagaccggttcgacgcgccttctgaccgcgccttttacgccttccaggccgcccatcccggcgtggtggtggagcgcgccaacgatgacgccaccgccctaagcgacatgctgaaccaatcgccggagaccgacgtctatctggtgaagctcatcggcccggaatatctgcctctcttcgagcgcggctatatggcctccctggcgccaagcgaaaccctcgcggcgcacatcgcggccatgtatcccgccatgcaggaatggctcgtgcgcgaaggcgaacccgtgggcatgccgctcgcctgcgattccatgagcctgttcggcctcaatccagaggccttcgcgcagatcggtctcacgccgcaggagtatccccagacatggccggagctttacgcgctgctcgagcgcttgcccggcctcttggcggatgcggcgggcgaaatcacgctgttcgacggcttcacccgcgcggagttcctccgggagcgcctcttcctctttatggtggaaagctatctcatccagcagcgggccaacggcgcgcccctgcgcctggatacgccgcagttccgggagatgctatcggcgtatgaggccgtggactgggacgcgctgcaaccgtttctagcgcccgcggccagcagcacgctcgttctgccgcaggtttccgccctgttccagctatggcacgacatcggcgtaaccgaaggggattacgacgcgcacttcgtgccccatccgctgggcaacgcggccggggacgcgcccgtcatttccatgcagatgagcatcgcctttgtgaacccctattcgcaggaaccagaactggccatggaatacatcgaggcgctggcggcagagctggacgaggcgttctggatcatgacgcagcccgagcaaaatacccccgtgctcaaccgcacattcgagctcgatgtgcagcgctatgacgaggccatcgccagctatacggagcagctagagcgccaaagcgacgcgcagcgggccgcggagctagaagcgcgcctggcggaagcgcagcgggaaaaggcggaatacgaacaaacccgcaaatactccatcagtccgcagagcatcgccgcctatcgcgaagccgcgcagcgcatgcaatttgcgccgtataccgcgctctccggcaacgatcccgccggacaggcgcaatccgaaattgtgcaacaatacgtgcagggcctgctcagcggcgaggcgttcatcgccacgatggacgagcggtttgctatgatggagctggagggacaatagcgcgagaaaagaacgcgtttgggcagtactgcttcctatggcgtaccacttcccaaaaggctcccctgtgtaaggggagctgtcagcgaagctgactcagagtattgacaaagtatcggaagaacgaggctctaatcagaaatgacggcgtgtacgtcatttctggcattttttgcagagcaaacgcttgcgtttgcggaaaaaatgcattcccgccccgaccgctggccgttggaggccgcgaagcggctggaggcgcgagcacacgcagtgcgcagcgccggaacactgggccgcc

SEQ ID NO: 2706 - DNA, 4225 bp, Unknown
  16S sequences of unknown bacteria
ttggagggcccgcaggccctccaaagtgaattcgtatcgcccggctttgccgggcgggcggggagtttgcgcccccggcgcaaacatttcttaagccccggcgggaaagatcgccaccggcgagctttcccgacgaccgacgaaggaggtgtttctttgtcaagacgcatcagggacccgaggggccgtcaggggtacaacctgggggccaggtatctggtatttttgatcatcacgctggggatgtttgcgtatctgctgacgggcgtattccgcctgcaggtggtggagagcgaggagtatgcggacagcgccgagagccgccgcaccaccaccatcaccctgcgcggcagccgcggcatgatcaccgacgcggacgcggtcgtcctggcgcgggacgcggacatctacaacgtgaccttctaccgcgacgcgagccagaactccgccgcgcagtaccgggagctgacccagagcatcgtggagacggtcgagatcatcgagcgaaacggcaacgagctggacgtggatttcgtcatcgagcgcgacccggagacgaatgagtggatcttcaacttcggcagcggcgtgagcgactccgtcctccagacccgtgaaaaccagtggcgcagcaaccactacatgaccaacttgagcgccaccggctatcccacgccggagagctgcctgaaccagctcaagaagcgctacaagatcgccaacacccaggaggaggccgacgcgcgcaaggccgccagctccgacccggcgacgtacgtcgaggacatggtgctggatgaggaaaccatgctcaaggtcatggccgtctactccgaaatgcagatgaacctctttaactcccagcccatcgtgatcgccgaggacgtgccctatgaaaccgtcatcgagatcgaaacccggtcgatgacgctgccgggcatggagatcgccatgggcaccaagcgcgtctacccgcgcggcacgctggcctcgcaggtgatcggctacatgggcgcgattccctccaccgaaaagtggctggaactcaaggagaagggctacaagtactccgacaccatcggcgtggacggcatcgaggcctccatggaggactggctgacgcaaaacagcgacctgcgccagggctaccgcgaggtggagcgcaacagcgtgggcaaggtgacccgcgagctgagctacaccgagcctgaggacggcaacaacgtcaagctcaccatcgtggccagctatcagcagcaggccgagcgcgcgctggctgaaaacgtggcctccacccgcgcggtgcaggagggaaagctgatggacgcgacgtggctggagaaaaaccgcgacgacatcttaagccgctcatgggacaaataccccctctccctggccgagcgcgccgccatgatggtggtggacatggagggccgcgtgctcgccatggccaactacccgacctttgatctaaacgcgctcgtcgccgccgggccggagagccgcgccatcctctccgacagccggaacgtgctgatgaactacaacatccacgcccgcggcacccccggctccatcttcaagatggtatccgccctgggcgcgatgctcgagggcgagctgtacgtggatgaaaccatctccgacgagggccgcttcatgctggtcaccaacgtcgaaagccaggcgcctaagtgctggatcagcgaaagccagcgctacaagcaccagagccagaccatcatccaaggcctgtcccacagctgcaactacttcttctacacgctgggctaccgcctgggcgaaacccgcctgtaccagtacgccagcgaattcggcctgaccagcaagaccggcgtcgacctgcccggcgaacagcgcagcgtcgtgggctgccagaccagcctctacgaccccgacaaggccatgggcgaggccgatcaggacaccgccgtgcccatcatcgtgtttaactccatcaagacccacctgcgcaaccagggcgcgagccgcaacatcacctacgacgacgagcgcctcgaccgctgcgtcaagcgcctgatggacatggccgtcaacacctcccagaacgactggctgctctacatgcgccccattttgatggaggagctcaacatgacgcgcgagatggtctacacgcagagcatcatcggcgatacgtacaactatttgaacgacatcaagtggggccccgcccagaccgttcaggtcgccatcgggcagtccatcacggtggtcacgcccgccgccgtcagccgctacatcgcggcgctgggcaacggcggcaaggtctacaacctgatgatcgtcgattccatcacatcccccgagggcgagatcgtcagccagcgcgcgcccagcctgttcaacgagttcgagggcgcggagaaatacctgccctacatcctcgaaggcatgaagggcgttgtggacgagagcggtaccgccgccaagtacttccgcagctggccctatcagaacatggtgtgcgcgaaaacgggaaccgccgaggttacgaccatcgatttggaaaacaacgcgtggttcgttatgctcgcgccttacgcaagcgagatggtggacggcgtgcccaccacggtgacggagccggaaatcgcggtggtggtgttcatccccagtggattcagcgggggcgaagccagcatggcggcccgcgaattcgtgggatggtacatggaccagaaaaccctgcgcgacaatcaaaacagcgtgttcccgggcggcaacgagctggccccgtgacgcgcgcgggagagatgcgaaaatgagtcaggcatggacggtgctttccggcaagggcggcgtgggcaagagcacggtgagcgtggcgctgggcatggcgctggcgcgcaagcggctgccctgctgtctggtggatgcggacctgggcctgcgcagccttgacatgctgatgaacctgcacagccgcgtggtatacgacgtgctggacgtggcgcgcaaggactgcaagctgaaatacgcgctgatccgccacacggaggacggcgcgctgtggctgctgcccgccgcgcaggagggtcagccgggcgacgcggggcacggggagatggagcgcattgtcaagaagctgaaaaagcgcatggcctatgtgctgctggacgcgcccgccggcctcgggccgggggtgagcgcgctgctgcccgcctcggaccacgcgctggtggtgaccacgcccgacgacgtggccatgcgcgacgcggagcgcgccatcgcgctgacggaagccgcggggctgccccggcccatgctggtggtgaaccgcgtgcggccggacatggtggcgcgcggggagatgtacagcccgcaggcggtggcctcggcgctggacgtgcccctgctggggtatgtgccggaggaccgggccgtgctggccgcggcggcgcggcatgagagcttcatggatacggaaggacctgcgaagcaggccatggagcggattgcccagcggtttctgggcgagtttgtgccgatgccgacgatggagcgaaagcggcattggtgggagcggggaaggaatgtcgggataggggtataaatgagtggggtgcaggggggtcacggttgctcaatcattcgcgcttccctgcctttcgcaaatatcggcgttccgcgcgctgtccgcgcgcagcccttgtatttgctcacgcctgcgggtcgctttgcgctacgcgcaacagcccacagggctgacgcttccctccggcgcactcatggtttcgctgccccgctgcgggtcgctttgcgctgcgcgcaacagcccactgggctgacgcttcccttcgcgccctgccggggtttggggcagcgccccaagtcctgtgccgcagcacagaatgcaagcgtttcgagcggccggaggtcgcaagaaacgcggatggatgcagtttctatgtttttgatttgaacccgtggcgggccggccgcgtccctaaagggacgcggcgcgcggcgggcgcgacggaagggcacgacctgccgggcgcgactcgccgggcgcgacttgccggaaggggcgggcgcgtgacggaacttgccgcgcaggcgtgcggcggcggctcccggtccgcgggaccggtcgccgggcacggcctgccgggcgcggctcgtcgggcgcgacttgccggaaggggcgggcgcgtgacggaacttgccgcgcaggcgt

SEQ ID NO: 2707 - DNA, 3145 bp, Unknown
  16S sequences of unknown bacteria
gtatagattttcaccaaaatgctgtcaagcgggatttgagattatatttcacaaacattatattttaaagataaccttaattgtatccaaccgattttccgccaccgcaggctttctgcggtggtcctgccaatcttttgcacgcaaaaaacggtgcggccgatcggccgcaccgttttccatcgcacaaaattgattaagcgaactttcgggtcagatccgggcaactccggttttgcgggccgcctcggcaaccgccgccgctaccgcctgggataccgagcggtcgagcgcactcggtatgatgtaatccgggctcagcttgtcgtcggtgacgaagtccgcaatcgcatgagccgcggcaattttcatctcgtcgttgatgtcgctggcccggacgtcgagcgccccgcggaaaatcccggggaaagccaggacgttgttgatctggttggcaaaatcgctccggccggtccccactacagcggcacccgcttccctggccaaatccggcatgatttccggaacgggattagccatcgggaagaggatcggattgggattcatcgagcgcaccatctccggcgtgacacagccgggtgccgacacgccgatgaacacatccgcgcccttcagcacatccgccagggtcccccggcggccttcccggttggtgatctccgccatctccgctttttcggcattgagaccgccgcgccccttatagatcgctccctgccggtcgcacagcacgacatccttgaggcccatcgcaatgagaaggcggatgatggcgataccggccgcgcccgctccgctggtaactacccggatctccccaattctccggtcggtgagcttcagggcattgagcagtgccgccagcgtcaccacggccgtcccatgctgatcatcgtggaagatcgggatatcgcagctctccttgaggcggcgttcgatttcgaaacagcggggggccgaaatatcctccaggtttacgccgccgaaactgcccgcaagcagctgcacagtccggacgatatcgtccacctccttggagcgcacgcacagggggatagcgtccacatctccgaaggctttgaacaaggcacactttccttccatgaccggcattccggcctcgggcccgatatcgccgaggccgagcaccgccgtaccgtcggtgaccaccgccacgaggttggagcggcgggtcagatcatagcttttgttcacgtccttctggatctccaggcagggttgggccaccccaggggtgtaggccagggacaagtcgtcccgggtgtccagaggagcccggcagaccacctcgatctttcctttccatttttcatgcagtttcagagactccatcgcgtaatccatttgcttgattccctccatcagccgatatccagcgacgaaagaacgccgcgcaggacatccgcgcttttatacagtttttggagctcgtcctcggccaggggcggcgtcagtgtcccttcgatcccctgatggccgatgatatgcggcaggctcaggcagacgtcggaaagcccgtattgcccctccagcagacccgaaaccgtcatgaccgcatgcgtatcccgcaggatcccattgcagatatgccggacagccagggcgatcgcataaaacgtcgcccctttgagcccgatgaccctggcgccggaggtgcgtacgtcctcctcgatatcccgcagctcttccttcccgcagcggttgtgacgttcacagatatgggtgcagtagtttgccatcggcataccggcgatcgtagtcagcgaccaggggatcagggacgagtccccatgttccccgaaaacgtaggcatggatattttgtggattgaggcccacatgcttagccagcttcgcccgcaggcggctggaatcgagcatggtccccgtacccatgacctgggacggcggcagtcccgtcgaccggatgagggcataggtcaacacgtcgaccggattgctcaccaccacatagaccgcgtcgggggctattcggaccacctgcggcatcaggctcttgatgatgttgacgttcccctgcgccaggtcgatgcgggactgccccggcttacgcgccgcgcctaccgtcacgatcacgatattcgaatccgcgaccgcatcgatatccccatcgtgaatatccaccggcggacacagcggcgtgccctgatggatatccagggcctctcccctggccttatccttattgatatccacaatcacaatttccgaagccattccatccacggccagggtataggctatggttgcgccgacattgccggcacccagaatgctgatctttttacgcataactgcatcgctcatttccagaaaattcactgccccggcctcccgtggcatttccggattattgtagcacaccgccgttttgtcctgcaatggtaaatatcgaaaaataaccgatagtgcaaatatgcgaccttaaatggatacgattttaaccggattgccgcaggaacggacaaatcgaagtagatcggcccccgatatccagagcgtagccgtattcaccagcggatggacgccgagccgatccatgccggtcagcgattcgtccagcagcacctgcacggtatggtcgggatcctgtatgactgcgaggggggtgacggatccctttgtcagccccaggtgcttcatcagccgttcttcactggcaaagctcagcttggatgagccaagcgccgccgcaagcgcccccaggtccgcctgcctgtcgccggggaggaccaccagaaaatgctgccggcctttggcgtcccgcagaaacaggtttttgcagacggatcctttgatccccagctcccgcatctcgtcgatggtaaaaaccggggcgtgttcttccacttcatacgatattcccatgccgtccagataggcatacagctccggcggtgtcatccgtcatcctcccttcgttgcacacgggcaccattgtagcacaaccggctccgcgttacaaggcctccgccggtgtttttcgaggatacggctgtcaacgtcccgcggcttggaaatccacggctcctggatcggaggcggcgaggcggtggatgaaacggcggagggccgcccactcg

SEQ ID NO: 2708 - DNA, 12879 bp, Unknown
  16S sequences of unknown bacteria
aacaggcgcccgccgagtgccgtggcctccccgagccccgagacgatgccgataacgagcgcgtttgccccgagcgaggccaaaagcggcccttgcaccgcgagcgcgccctggtagacgacgtccatcagcatgctgacgacgccaaaggagacgatgaaggcgtacggcctcaccgaattggtatctggacgattcatcctgcgctccgcatccgtaatcacatccctaacgcgtacgacaaatgtcagttccattctagtaggtccacgggccaccggcagcactgcccgaggcttcgggcccataataggtgcatggtgcaatctcgagccccgcatcgtgccatccgcgctgacgcacgtggtttgctacactctccctacttgatttcagtttgagagggggcatgcgttgagcgcagcagagcaaaagagaatcgcgtacacgaatggcacgatcctcgacggcacgaaggatatggagccactcgagggcatggtgctcgtcacggcgggcaacacgatcgaggcgattgtgcccgagtctgaaaagagcgcctacgcggggtgcgaggtacacgacctcgaaggcggctacctcatgcccggcctcatcaacatgcacgtgcacctggccggaaacggcaagccccagaaaaagcagcgcgacaacgaggcgctcgtcaagaagatcatgtccaacgggctgtcgcgcgccatcgcgtaccgcatggtcagaagcttcgcgcagaccgagctcatgagcggcgtcaccacggtgcgcgccgtgggcggcctgtccgacttcgactcgcgctgccgcgaccagatcgtggcgggggacttcctcggcccgcgcatcctcgcggccaacgaggcgatctcggtgccgggcggccacatggcgggctcggtcgccatcgcggcggtctccatcgacgaggcgctcgcccaggtcgagcgtgcgcgcgagcaaaacgtcgacctcatcaagctcatgatcacaggcggtgtgctcgacggcaaggagaagggcgaggcgggcgtgctgcgcatgaagccagagatggtgaaggcagtgtgcgagcgcgcccatgagctcggcttttccgtggcggcacacgtcgagggcaccgaggggctcaaggtcgccctcgaaaacggcgtcgactcgatcgagcacggcgccacgcccgacgaacacatcatcgacctgttcaagcaacggggggcagcgctgtgcacgacgctgtctccggtactgcccttcgtcatgctcgaccgttccgtctcgcatgcctcggaagtggagcagtacaacgcgagccttgtcttcgagggcatcgcggcgtgttcaaaggctgcacttgcagcgggcgtgccggtggccctcggaaacgacgtcggctgcccgtggatcacgcaatacgatttctggcgcgagctcgtctacttctgcaagttcatcggcgtctccgaggcgtttgcgcttcacggcgcgacgctggccaacgcgcaggtggcaggcatcggcgagctgacgggatctctcgaggtgggcaagcgcgccgacatgatcgtgaccgcgaaaaatccgctcgaggacctcagcacgctccgcaccgtcaaacacgtcgtgtgcgatggcgttttcatcgcgcggccgcatgtcaaacgcaacgccgtggtggacaaagagctcgacaagttcttgtagattgacgtgtccgaatacaattttcgtgactggcgcgggcatcaagaaagttcgtttggcgaataaaactgtgaataagagaattattagccgtattgtcatattccgacgagtctgctaggcgtatgctgaatctgaaaaatggataacctggctcatgctgtgctgtgtttttccgcatggcagctgtggcgttcgaacacttgggatgtgatgcatatagtcagaacgatacgcagattcaggttcggcgttcttggcaccttgctcgcgcttgccatggtgctcagtctctccgcaatcgcatttgccaatcagtctccgacggtgtcgggggccgattgccagctgacgcaggcttctgacgatggctatgccgtgctctccgtctcgggagaagacggcgcgacggtctacgtggacgtgctcgccgcaaacggcgatccggttgccgagcgcctgaccttccaggtgagctccgacaacgccgatcagcaggccaacggcaggctcgtgggcaccgtcggcatcgatgtcgacgatgggggcgctgcagcgctcgtgggtgacaccgtcaccgcataccccgatcatgaggcacggcaggcgccgcttttcaccggcaagatctacggcgtctacgcgcagcttgaaggctcgggcaccccgcagctcgtgggtctgcgcaccatcggctccgagcagcgcgcgttcgtgccgcaggagcaggttgatttcgacggcactgctggcattctcaagcgcgacggtcaggggcagccggtctcgagcgtcaaggacgattcgattacctatacctacgagaaggcggacgcaggctccgacgaggcaaagatcgacttcgtggacgagagcggcaacgtcgtcagctccaaacctgtgccgggcatcgcgcaaaacgcgagcaaggcggtcaagctcgatgaggcgctcatcgcaactgacgccaacgacaagcagtcgctgttccgcgtgctcgactacgatggcgtcgtcacgctctccaacccctcgttcatgcacgccgtcgtcaacgtcaagcagatgagctccgaagacattgccggcagcggctcgtgctttgccacggtcaaatgcgtcgacgccgatgacgagaacacggttctcatggccgatcgcatctacgttcagggcacgttcaagtacacgcttcccgagaagatttatcagggcgaggggccgagcacgtctgtctacacgctcgtcgattccgataacccgacggtcaccttcgatgcctctgcaggcgagaccgtaaagcaggtatcctacaagaaagagaccgcgcacaacgagtggacggtcgtctgctacgacgcctccaacgcgaatggcgcagagctcgcgcgtcagacgctctccacgtaagactccttcgatgccgaaaacatcacggtcgatggcaagacctacgtcccggcgcagggcgcgcgcacctacacctttgccgagagcggttcgctgctgtacgtctactacgtgccgcaagggtacacgcctgcgtcctacgatgtgacggttaactacgtggatgcggccaatggcggcgtgctccagagcacgacgcagtccatctcgcccgatatgcaaaaggacgtcgagttcaatcccgagaagtcgctcgagataaacggcatcgcgtatgcgctggttcccaatcagaagcttcccgtccgcatcggctacgggtcacgggcctcgtacacggtctactactacaaccaggctgagccgctgaccgaccaatcggtcgtggtccggacacgcgtcgtgtacctccccggcaatcagacggggcagaccggcacgcaggcaggcacgcagacgctcgccgaggggcagacctataacgctgtctccaatgcggcgacgggcggcgccacgctcacgaacggcaacgggcaggatagcgccagcacgcagatcgacgagaacgagacgccgacggcgagtgcctccgacctcgcaggccaggggctgcccggctgggttgtgccgctcatcatcgggctggttatcgcgctaatagcggtcgcattcatcgccttcgcggtcgtgcgccgacgcaagaactccaagggtgaggaggacgcgaaatgagacgccttccactgacgcaagggatgcacatgaacgattccaagaacaagcacagagcacgcagtatcgcgcagaaggcggttgctgttctggtctgcctggcgatggcatcgctgcagatgccgctcgtgggctctgcctttgccgagagcgcaaacgccgcggcgaccgagcagcagcagacggaagcgccggcacaggcgacggacgctgatgcccagacgcagcctgcaacccctgaatcggacgagaaagcgtccgcttcagacgagcaggcagaagaacctgaggctgccacctcgacaaagagcgaagctgctccggcagctgccgcaaaggctgccccgctgcgcgcaccccaggcacctgcggcaaataccttcccgagtgcgcctccgacctccacgttcgaggcgtcggcgttcaacaagctacccggcggcaagcttggcgtgctcgccaacttcggcctggtcgggttcgagagcatccacggcaatacgcataccaactccaacattgccaccgagaccttcgacgcaaagtcggcgttcggaacgaacaatctcgccgagcccgaggtctcgtatatcggtaccaaggtggtcggcggcgcgaccgtcaacatgaaagacggaagcgggaagtacaacggctcttctgtggtactcggttccggtagcaaagtcgaagtgctgggcgacaaccccgattccgtgcgccaggtcaaagtcgatggcgatcacttcgacatcaacggcccgagcagcgcccaagaacaacggcagtcgatctaccaggagcaggcgggtcagaagaagtacctcgacctcgcctctctcaaatcgcagatgggctccgtctcgcgtgagatcgcctcgatgggcgcctctggcaccacggtcgattttaaccacgagaacaatcagaaaatcacaatcgataaggacgcgaaggtctccgtggccaagctcacggcaggcgagctcaacaaatggaacggcccgcgtcccatccaggtcacgggtgattatgacacgtctgtgaagcgcctgatcgtcatcgacatcgacgcgcaaggtagccccttgatcactattcccaaggtcgaagtgaaaggcggctccagcggcgtggtcagtacctgggcaaacaccaacgtcatcttcaacgtgcacgactcgacggtcgcggacgggcagtatcgtggcaaggttaccaactccgatgcgatgtatggcgtcatcctcgcaccctatggcacagtggatgcgaagagcaacgtcaacggacagattatcgcgaacgagattttcgtcgacgccgagttccaccgcgattcgttcacctacaacgacgagacgatcacgacgggcgctgccttgacggtgaagggcagcaagacgctcgacggcactgcgggcaatatccccagcttctcgttcaccatgacggcaaaaggcgacgcccccatgccgacgggttccgaggatgggtcgattacggttaccaacagcgcttcgggtgacatcaacttcggccagatcacctacagcaaggcgggcacgtacgagtacaccattgcagaggtgcaagatggcaagagcggctacgactacgacacgcgaagctacacgatgaccgtgtccgtctcggtcgataaccaggcaagcacttccaccaagaccgtgtacaagatcgacaaggtgctctcgaagagcagcgagctgctcgcatccgacaaggagatttcgccggcttcgggcacggattcgacctacaacgtggcgacctttgccaacaagacgcataaggacctcaagacctcgtaccagatcggcggcaccaaggagctgtctgggcgcagcttcaagtctggcgatagctggacgttcacgctgtctgcacccgagggcacgccgcttccgcaggacaaaacggtcaccgttagccccagccccacgcagggcaccgaacaggcatttgtgttcgacagcatcgaatatggacaaggcgatatcggcaagacctacacgtacaccgtgaccgagtctggcaacgcggcgggcgtcacgaacgacgctaagaaccatacggttaccgtgaccaacggcaaagacgatgagtcgggtgcgccggtcgtgcacgcgaaatatgtaaacggaaaagatgcgagtgaaaacctcctgcgcttcgtgaacacctaccacgccagcggctgggtcgaccttgccgccacaaaggacatctccggcaggagcttcgcgcagggcgacgcctggacttttgatgtgagctgcgacgacgcggacgctcccatgcccgctgagaagagctacacgttgcaccccactgcgggcgtcaacactcaatcgttcagcttcgggcatatcaactacacggagaaggacgtggacaagacctacacctacaaggtggctgagaccggcgacgttgcaggcgttgccaacgactccgctgtccacaccatgacagtgagcgtttcggacaatgggaatggctctctcaagatcgaccgcacgttctccgacggcaacgagatgctcttcaagaatgcctattcagccaagggctcgattgtccttgcaggcacgaagaacatcgagggacgcagcttcaagtccggcgacgagatgaccttcacgctgacgggcaaggacggggcaccactgcccgcggatggctcgaacagcgtcacgatcaagccagattccggcacgagcgcgagcttcagcttccccgagattgacttcacgcaggaagatgcgcacaagacttacacctacacggtgcacgagagcaccaagaatatgggcaatgtccaaaacgacgacgacaagaccgtgacggtttctgtggcggacaacggggacggcaccttgaaagtgaccccgacgtaccccggtaacgcggacggcctcgtcttctccaacacgtacacggccagcggctccacggacctcacggcgtacaagaagctcaccgggcgtccgttccaggcgggggatagctggacctttaccgtgagctgcgacgatgccgcggcacctttgccgctccataagagcgtgacgcttgatccgcaggcggggcagtcgagcgcgtccgttgacttcggcacgatcccctacacgcaggccgacatcggcaagacctacgtctacaccgtctccgaatcgggagacgtcgatggcgtggccaacgacgcgcgtgagcacacggtcacggtgagcatcgcagatggcggcgatgggcagctcgcgatctctcgcagcgagtccgaggcaggcctcaacttcgtgaacgcctactcgtctcagaccgactttgagctcggcggcaccaagcatctcgacaaccgcgcatttgcgcagggggatagctggaacttcaccgtctccggcgtgatcgaaggcgatgcttccgttgccgcgccgctgcccgagaacactcagacgagcgtcgagccgagctcgggctccgatgccggcttctcgtttggaaagatccactacacgcagcaggatgcgggacacacctacgtctataccgtgaccgagaccggttctgtggccggcgtcgacaacgacgctacggtccatacggtgaccgtgaaagtgaacgatgacggcaagggcaacctgacggcagatgccacgtactccgatggggacgccctcgtcttcaccaacgcatacaaagcgatgggcagctatcagctcgaggcaaccaagaacctcgtcgggcgcagcttcaagacgggggacagctggaccttcggcgtcgtcgccaaagacgccgacgcgccgctgcccgacaacaacacggtgaccatcacgccggagagcggcacgtctgcagctgtcgactttggcagcatcgcgtttggcacgggagacatcggcaagacgtacacctattcgatcatcgagcgcggcacgattgccggcgtcacgaacgacgcccaagagcatatcgtcaagctctccgtgagcgatgacgaccacgacggcaagatcgatgtgacgcgcaccgacgagggcgcgggcaccacgttcaccaatacctacactgcggcaggcaccttcacgatgcaggcggcaaagcatctcgtgggccgcgatttccagaagggcgaccacttcacgttcgtcctttcgagcacgagcgcaaatgccccgatgcccgagaaacacaccgtcgagatcaaccccgaatcgggctccgagcaaggcgtctactttggcgacatcaactacacgctggcggatgccggccaccagtacacgtacagagtggacgaggctggcagcggtgccggtatcacgaacgactccgataaccacatcgtgaccgtcgatgtcgccgatgcgggcgatggcacgctgactatcacgccgacctattccgatggcggcaagggcatggagttcacgaacaaataccaggcggctaagtgcaaggcgaccatccaggcgaccaagtacctgtttggcaagtaccagaccgacggcgagttcacgttcgacttgacagacgccgacggcaacgtcgtgcaggagcagacgaacaacgcgaacggcgaagtcacgttcgatgccatcgaatacgacacgcccggcgtgtacacgtaccacatctccgaggtgaactccggcgaggaagatatcgagtacgacacgcatgtggaagacgtcaaggtgaccgtcaccgaggacaaggccacggcgcagcttgcgtccaacgtggagtacacgtccaaggacggctcgcctgatagcgcgacatttgcgaacagctacttcaagtccgaggtcaacttcgaggttgccaagatgttccacggctcgaacgcgagccaggacttcaccttcaaggtggttgcgctcgacggtggtccgctgcctgtcaacgacgaagtcaccgtgacggctgcctcgggccagaagacgcctgtaaggttcgacgccatcacgttcgatcgcagcatggcagacaagaccttccgctaccaaatcgtcgaggaaaacgacgggcaaagcggtgtctcctatgacgcgactgccttcgaggcgcaggtgaaggtgggctctgtcatgagcggcggtacgcccacggtgacctggtccaccgtctccaacggcgtctcctcgcaggtcgatgcctctgacctcgtcttctacaacaaccagcgcatccgtctcaacgcgcgcttcatggccatgaaccgtggacacgtgagcatggaggcgagcaaggtccgcgtggagccgacggtgcacaaggagctcgtgggcgcatcgctcaactctggcgagttcacctttgagcttaccggtgccgatgagaacggtcagaccgtcgacaagacggcgaccaacgacgaaaacggcactatcgacttcttcacgggcgacgacatgctcaccttcacgaagccgggcacgtacgagtaccagatttccgagaaggcaggcgatgatagcggcatcagctacgacagccgcaccatcacctacacggtcgtggtggcaaaggaccagcagggttcgctctacgcccagcagtcctacacggactcgagcctggacgacgccgttgtggtcgacccgaagttcgtcaacaccgagcttctgaacgtgcgcgtgcaaaagacctcgcgtgaaggcggtgagggcctctatgacgcgctgtacggcctgtacatggaaaaccccgacggctcgggcaacgacgcgcttgtgggacaggcctcgtccgacaaggacggctgggtcaccatcaaggacgtgcatccgaacttcgacgcggtgtactacttcaaggagatcaaggctcctgcgggccatacggtcgacccatacaagactgatcgcttcatgatcgtctcgaacaacggcacctatcagctcaagtacctggacaggtaaggtgaggcaatgagcatctcgagaaagataacgacaggccttgtcgcaagcgtgtgcgcgctgctgttgggcgttgccgtgctgctcgtggccgccgtgccgcaggcgcatgcggctgacgtgcagggctcgacgcttaccgcgacggcaggcgtgtccgacgaggtcacgaagctcgacgttgccaaagtcgatgcgggcgtaaagcacgagtccgtctccggcgcccaactgcagatcctcgagaaggacagcgggaaggtcgtgtactcgtggacgtcgagcgacgaggcggagcagatccacaaggtgctgaacgtcaacacggcctatatcctgcacgaggtcgcagctcccgaaggatacgagacggcgcccgacaccgagttcagcatcgacgactacggcaccgtgtcgttttccacgggcggtaccatcgagaacaatgccgagctcaccgacaagtactcggtgaacctctacgacaagaaggtcggggaggagcgcatcatctacctgcatggcgatgtggcgagcaccaacgtctccacggcgcagaccggggacagctctccgtttgcgctcgtggcgattgtcctcgtcatcgcggtagcgggcgtgggggtcactgcggcagcgcggcgtcggcaccactagcgtctgatactcgtcatctttataaggcggcagcgtcgcacgaaggcgccgccgcctttcgttttgccagcaaacgcggggcttgccgacagcccgaagcatacggggcgcacgcgcccgggaacgccttcctgattctgctgtatacgcaaattgcctgcgcgcagccatccccatgccgctataattcgcaaggttacctatgagggggaaagatacatgtccaatctgtccgagcagatctcttcacgccgcacattcgcgatcatctcgcatcctgatgccggcaagacgacgttgaccgagaagcttctgctgtacacgggaagcatccagactgccggctccgtgaagggcaagagcagctcgcgccacgccgtctccgactggatggacatcgagaaggagcgcggcatctccgtcacgtcttcggtgctccagttcacctacgagggcaaatgcgtcaacatcctcgacacgccgggccaccaggacttctccgaggacacctaccgcacgctcatggccgtcgattccgtcgtcatggtcatcgacggcgccaagggcgtcgaggcgcagacgaagaagctcttcaaggtctgcacgctcaggcacatccccatcttcacctttgtgaacaagctcgaccgcgaggcgcgcgacccgttcgacctcatggaggagatcgagaccgtcttgggaatcgacacgtaccccatgaactggcccatcggcagcggccgcaacttccgcggcgtgttcgaccgcaagtcgcgtcacgtgatcgccttcgagggcgacgggcacgccaacgcgacgaagaagatcgccgaagtagaagccgagctgggagctcccgagctcgacgagctcatcggcgaggagaaccaccgcaacctcatggacgatatcgagctgctcgacggggccggcgacgaattcgagatcgacgaggtcaacacgggcaagctcactccggtcttcttcgggtctgccctcaccaacttcggcgtcgagcccttcttgcaggacttcctgcgcctcgcgccggagccccagccctacaccgacacgctgacgggggagaaggtcgatccgtaccgcgaccagttctccggcttcgtgttcaagatccaggccaacatggacaagaaccaccgtgaccgcatcgccttcgtgcgcatctgctcgggcaagttcgagcgcggcatggacgcgcgccacgtgcagggcgacaagcgcctcaagctcgcgacgggcacctcgatgatggcagatgaccgcgcgacggtggacgaggcctatgcgggcgatatcgtcggcctgttcgacccgggcatcttctccatcggcgactcgatctgcgcgatgaagatgaacgtgcagtacccgcagatcccgaccttctcgcccgagcacttcgcgcgcatctcgcaggtgaacaccctgaagcgcaagcagttcgtcaaaggcgtcgaagagctcgcgcaggagggcgccatccaggtcttcaaagaggccggcacgggcatggaaagcgtcatcgtcggcgtggtgggcgtcctgcagctcgacgtgctcgaacggcgcctcaaggccgagtaccacgttgacgtgcgccgtcagccgctgtcgtacacggacctgcgctggatcttgaacagcccctccgagctcaacatcgccaagctcaacctgacgcgcgacacgctgcgcgtcgaggatatgcgcggcggcaagctgctgctgttcacgagtccgtggaacgtgaactgggccatcgagcacaacccggagctcaagctctcggagtttggcaatatctcgttctaatgcttgatggcgccgcgctcgcagcggttgccccacgagtcgatgacctcgccgtcgcggcggaccacgatgatctcgcagtggttggcgcagcgcccgcactcgacctcgcgcgtggtgaactcgaactcctgcacggcgtcaaaatcgagcgccccgctcgcgaaggggcccttttgtgcgggcggcctgccgtcgcgcgccgcgttcatcgcgagcagcgcgatgccgtagcagcccatgagatggccgtcctcgtcgacgatcacctcgcagcccagcaggtcctcgaacgccttcacgacgccgatgttcttgctcacgccgccctggaacacgacgggacctttgatcttcttgcccttgcccacgttgctcaggtagttgctcgcgacggcgttgcagagccccgcgacgatgtcctcgcgcgcgtagccgacctggatcttgtgcacgaggtcgctttccgcgaacacggtgcagcgtgccgcgatgttggcggggtgcttgctcgtgagcgcgatggggccgaactcctcgacctccaggccaaggcgatgcgcctggctcgacagaa

SEQ ID NO: 2709 - DNA, 32759 bp, Unknown
  16S sequences of unknown bacteria
aatagcccagcagggcttttttgatattggcgttggccgtttccgtggccgattgaatggaaaggcaggtcagcattaacgtagccatgaccagcagaaacgccagcagcgtgagggtcttgcccttttttcggatggaatacaggcaggcccgtttgcacaagttcatgtctgagccacctcatttcctttgcgtaaaaccagtgggttcacttgtttgcctcctatcgtagattggttccctcgccgggaatgcctttatgatactggagaaaagtggagccgcgatagagctgagaagttttttgggtggagcgggcagttttcatagattgccttccggcgtttgggcaaagaaaaagcaggaaaccgttgcggatttcctgccggatagcgccgccggtggacggccggtatggataacggggatttattccactttccttatcggaaaatatagataggcctttcctgttgcgggatcggtatagtcgtggacggctccggccagagaaatgccctccgccttcatttgttcaagggtttctgcaaacgctcccgtatggttttccacaacgatatattcatagccgggaattgtccatttagaccatccatccggcgcttccgcgtggtcaatacattccacgcctgccagatacaggcctttgcgaaagccatcctcccacggctggaatgagcgagagaaatcggacatggcgccccaaattcccacaagcgccccgcttgcgcctttctttgccagatgcgctatttcaccaaaatggtcgtttgcatccttccacaatttctgaataaacccctcgccgtccaaggttgaaccctcttttccaatgacggcaaatgctttcttcgttactttgaccatgcgatccctcctcaaattcttcgctgcttttattatacatcattcatttggatgagtatagccaacgcattgccttttaccgcagaaacgccgtaaacttcacgccgttttccgtattcactatcttgtgaaggattccatggtgctccaggatggtcttggtgatatacagccccaggccgctgccgccgctgttgcggctgcgggatttgtccacccggtagaagggcgtgaagatgcgctccaaatcttccccggcaatgtggacgccggtattctccacggaaaacacctcgtccttttgggtgacggtaatcacagcgcccaccggcgaataggccacggcgtttccgagcacattggtgaacaccttctccatgagccgccggtccccctgatagtggtattccggctggatgtccatgcgaagctccatctgcttatcctccatccggccacggaactgctggcagacctttcgcagcatttggctgatgtccaggtcggtgcgctccaggtggaaatcgctgccgcccatccgggccgccgacaaaatctccttgaccagcgcctccatgtcattggtggttttcaggcaccggcgcagggttgtatcccggtctttgtattcgcctacctgataaatcatgccttccagttgccccttgatgatggcgatgggggtttttagttcatgggacacagcggtgaaaaattccacacgctgcttttcctgttcccgttcccgctcaatatctttcttcaactgccagtttgccgagcgcaggctggctagcgcgttgttgagccgctccgccatttcgttcaggctggcggccagcacaccgatttcgtcttgccgattgacttcgcacttccaggtcatgtccagggtggtcattcgctttgccacattgctgatacggaccagcggcttggagtagtaccgggaacagaccaccgccccaatgacggagatcagcagaatcacaacggcaataaaggggatgagcttcagcaggatgccataggactgcgccaccgcaaccagggcggcattggcaaatacatggtaggtctgcccgccttgctggaatgtagcggaacagctcatagagggggcagaagtgtccaggttctccatatcggcaaagttcacggagaacaggttgttcccacaatcatcgctgacttccaccgatgcgttgttcctcatggaaaattccatcaggctgtccgaactggcctcccagccattccgctccagaacctctaccaggtcataaaaatcggaagtgacctgaccttccagctccgtatggtaatttctcggcaggaaaatgattaccatgccatagatgaggatgcagcaggccaccagtagcgccagcatgctgaggaaggctttggcccagatgctttcacggatcttcttttgcaattttgtatcccacccctctgatggtttcgatatactctgcgcccagctttttgcggatgtttttgatgtgggtatttacaatcttttcatcgccaaagaagtcgtatccccaaatgctgttgagcaggtgatcccgcgtgaacactctgccctggttttccagcagaaatttcaggatttcaaattctcttgtggtgagcggcacaagttcctggccgatgtggacggtaaaactgtctgtatccatggtgatgtccttataatgaatcaccgcgggttcggactgcataccctgctccgaccggcgcagaaccgcctcgatccggcgcaacacaaggggcatggaaaagggttttgtgatgtagtcgtccgccattgcgtcgaagccctttatctggcttgcatcatcatccagggctgtcagcataataatgggtacgcggctttcctggcgaagcgttttgcagacggcaaagccatcgatcccggggagcaggatatcgagcaataccaaatccgggaggtgctgatggaatttttccaggccttccacgccatcgccggccaacagcacggtatatcccgcgtccaccaggaacgctttgagaacgctctgaatcggcttctcgtcttcgatcaccaaaatggttttgggcatggcacgcacctccggacatagtataccatggccaggtgaagtttgggtggagaacctccttgggttaatggataacaaactggcccggcgcagcaggcgccgggccagttttgcatccttccattgcggctatgcagcgtcgttttatcccttcacgctgcccaccagcaggccggaaacgaagtgcttctgcgtgagcaggaacacgatatagatgggcaaacttgccaccagcgtggcggccatcagctggttccagcggatttccccttcgtcgcggaacatggtgagcgcgagctgcacggttttcatatcgtcggtatgcgtcatcaccaggggccaggtgtattcgttccaagcgccggtgaatttggtgacgcacagcgaggcgaacgccgggccgctcaggggcacatagatgcgcaggaaggtgcgcagccggccgcagccgtcgatgcgggccgcgtcgtccaacgcggtggggaagctgacgtagaattgccgcatcaaaaacacgccaaaggaacccgcgatatagggcaaaatcagcccgccgtaggtgttcatcagcccggtgccgccctggccgagcaggtcgttccctccggccagcggcatggagcgcagcatggtgaacacggggatcatcgtgacctgcggggggatcatcaatcccgccagcgtgagcgccaacaccgcggcgcggccccggaagcggatgcgcgccagcgcgtagcccgccatggaattgatcgccaggctgagcaccagcgtccacagcgtgacataggcgctgttgaacaggtagcggccccaattgccattttgcatggcgtccacataattgtgccattgcggcttggcggggagaagcaccggcgaggaagcgtatacctcgctgtgggattgcagggaagtgctaatcgtcaccagcagcggaaatccggcggaaaccaggagcagcagaatgatcacccacgtaaatactttgaataaccgttccactttattcctccattccatacgctcggaagttgagcgctgtaacaatcagcagcatgatgagcagcaccaccgacatggaggcggcatagcccattttgtattccccaaacccgcgctggtaaatttggtgcacgatggtggtggtggaatagagcgggtcgccgccggtcatggtttgcacctgctcaaaggttttgaacgcggcgatgcaactgttcaccgaaacaaacaatagcaccggcttcagtcccggcagggtgacgtgccgcatctggccgaaggcgttcgcgccgtccacgcgggccgcgtcgtacagcgccgtgtcgatggcctgcatgcccgccagcagcaccagcatgcaataaccgctgtccttccaaacgctgatggcgatcaggcagcccagcgccagcgacgtatcgaacagccacatgcgccggggcaggtgcaagagcgtgagcagcttgttgatatagccgttggtgggatccagcagcaatagccagaccatggaaaccgcgatcatggacatggcgtaagggtagagcgtcaccgcgcgcacggcgcgcgcccagcgcgtggcccggttgagcgcgatggccgcgcacagcgaaacgagcaacagcccggccaccgagaacaccgcgaagatcaccgtgttgagcaccgcctgctggaacacctcgtcgcccatcaggcgcgtgtaattgcgcaggccgatccaggagggcgcgcggcccaggttgtaattggtgaagctataatacaaattctggatcacgggatacacgatgaacgccagcaaaaacagcaaaaagggcgccagcagcagatatgcggcgatgtcgtccgcccggcgcaatttcccggagggtttacgcgtcatactcatttacgcgcctcatgatttcgcggaagttctcttcgttcacgtactccaggatgaacggcttgccttcggcgtatttgtgatacagctggaagaagagccgccaatcgatatcgccgtcgcccaccacgcggccccacacgtcgttcactttgcggtctttgccgtgcagataggcaatgtgcggcgcgagatagcggaacatgtcctcctccgagctgttggcgatcaggttggcgggatcgagcagcaccttgagccggtcggaaccaacctgctcgatcagatcgcgggcgcgcttggccgaaggcacgatgtccaccaggctggcttccagcgcgatgcagacgtcgtattgctccgcctttttgcacagccaggaaaggctgtccttcagacggtcgaattccgcttcgtagcggtcggtgttcacgccgcgttcgccggggaaaaagccgcattccgtgggcacaaagggaatgcctgccagatgcgccaggcgcatgtggttttcatagtatgcgagattcgcctgccgctcgctttcctcgcgggcgatcagattggtgaacacgcccagcgcgggcacttcgatgccgtggtcgcgataggtctgcacgatggaaaggaagcgttcgtcgctcagatcgctcatgtccgagcggccgttgtacacccagtaatgggtgtcggaagaatgcaggcacaactcggtggaaaccgcgcccgcctcttgcaaaagcgtggcgatttccaggtgagagcgctggggaaagctgcgggatacgacgccgattttcatgcgaaaccctccttattggattgcgcgcaaaagcggcgggaagcctgcgcgcttttggtgtgaaagaatggggaaagcaaagcttggggccgggacgcgattgcgtcccggccaatgcgtgacactttgaaatttacaggaattcgatttcctcttccagcttttcttgggcttcagagagcgcggtggcggggtcgctttcgccgaagagcaccttttgcaccatttcgttgcggatggtctggaactgggtgctccagatggcgcgcggcatgcccacgccgatttccacgcactcggcgcgcgcggcgttatagggatccagctcgatgtaggcgtccaccagcgaagtgcgcgtgaccggcacattgagcatttccgcgcggcgcagctcgatttccgggctgagtgcgaaggtgatgaaatcgaacgcttcttccggatgctggcaatcgcggccgatgaagagcatgttgcagccgcagaatgtggcggcggtgccattggtgggcggggcggacacgccgaccttgcccgcgtactcttcgttttccagaatcgggcgcagggccacgttgttgatcagggtcatcgcggcgttgccggagatgaaggggttggtgtcgttgttgtcgtaggggatgttcacatccgcgaggaaggtctccaggaattcaaaggcttccagcgcctcggccgtgtcgagggtggggttggagtcctcatccatgaacaggccgccattgccgaacacgaacacgtcgtattccaccatattgccgcccgtcatggggaaggcaaagcccgcgcgggtgatgttgcccgcgtcgtcgcgcacggtgagcgcgagcgcggcttccttcagctcttcccaggtggtgggcacttcgaggcccgcctcttccagcaggtcgatgcggtaggcgaacacatagggcgtggccgaatagcccaggccgtagagctggcccttataggtgccgttggccagcacgctttccatcatgtcatcgccgtcttcccaagtggcaaaatattcgtcgatcgggatgtagtggcccagatccgcgcgctgcgcgacggaaagaatgccgtgcccaatgatgtccgggccgtagttggcggcgaagagcgtgttcaacttggcgtccatggcgtcgccgatggcagcgtcgtcgtaaaggattttcacgccgggattcgcggcctcgtaatccgcgatcacgcttttccaaaattcggtttccgccgcgtcgttgccaatgcgctggaagcgcagttcaatcacttcgccctcttcggccagcgctgcgccgctgagcagcagggagaacataaccagcagggacaggagctttttcatggggattcccctttctttaggatggattgcgggttacaggaattcaatttcctcttccagcttttcctgggcttcggagagcgcggtggcgggatcgctttcgccgaagagcaccttttggatcagctcgttgcggatggtcatgaattgcgggctccacacggtggccggcatgctgatgccattttgcacgcagtcgctgcgcacggcgttgtagggatccatcgcgttgtattcctcgagcaacgaggtgcgcaccacgggcacgttgagcatttccgcgcggcgcagtacgatctccgtgctgagcgcgaacttgatgaattcaaacgcctcgtccggatgctcgctatcgcaactgatggagagcatgttgcagccgctgaaggtcaggtgcgtgccgttggtgggtgggaacgcgatgccgactttgccaatgtactcttcgttttccaggatgggccgcagagacacgttgttgatcagggtcatcgcggcgttgccggtgaggaagggattgatgtcgttgttgctatagggaatgttgacttcggcaaggaagctgttcaggaattcgaaggcttccagaccttcctcggtgtcgatggtgggattcatgtcctcgtccgtgaagcggccgccattgccaaagacgaacacatcgtattccaccatattgccgccggacatggggaaggcaaagcccgcgcgggtgatgacgccattttcatcgcgcacggtgagcgcgagcgcagcttccttcagctcttcccaggtggtgggcacctcgaggcccgcctcttccaacaggtcgatgcggtaggcgaacacatagggcgttacggaatagcccagggcgtagagcgtgccatcatagtagccgttttgcagcacgcgctccaccatgtcgctcccctcgtcccactcggcgaagtaatcgtccagcggaatatactggcccatagaggcgcgctgcggcagcgaggcaatgccgccgccgatcacgtccggcgccaaattcgcggcgaacatcgtgttcagcatggcatcctgatcttggccggagatgtattcgatggtgatgccggggttggccgcctcataatcctcgatgaccgtcgcccagaaattggtttccgccgtgtcgttgcccacgcgaataaagcgcagggtgatgccttcttcctccgccagcgccgcgccggacaaaaggagcagcgccgcgagcagcaatgccagagcctttttcattgcgattccctccatggtttgtgtttgcgctcgcccaggagctgcccatccagccaaccgtggcggatgaatgggtcgccgtgcgccttgagatccgcgtatagatccgcgcgcagggctttgagcgcgggcgagtcgtatcgctcgcggatgagattgtggcattcacccttatccgcgtccaggtcgtacagctcgtcgatatcggtgaggttccacacgtatttcaggtgcccgtcggtgatcatgcgggaattgaacatgccgaattgctgcccattgcccgaggaagtgatcgttttgcgcgcggggccaaagagcgattggccgtgcgcgccttccggcggggcaaagcccagcaggctggcgagcgtcaccggcagatccaggcaattggaaaccaggttgtcgttgacctgcgcttcgacgcccggcccggccaggatcagcggcacgcgcacgatgtcctgatacagggtgcagtgcttatcgagcatgcggtggttgccgcacatatccccgtggtcgctggtgaagacgacgagcgtatcccgcaaatcgacgtgccgcagaatgcggccaatcgcgtcgtcaatctgcgaaaccatgccataatagcgcgcgacctggcccgccatttccgcccagggcatggcctccaggttccagttccaggcctgctgctcgtgcgcgaagggcttgttttcgaatgtatcgttccagccgggccattcggggatggcggcgggatcgtacatgcgggaaaacggcgcgctcgggcggcagggcaaatgcggcatgccgatgtccacaaacagatgccaagggcctctttgcgcgccaatgaactcgatggcgcgatccgccagccaatgggttttggcttgttccagcggcacggggctttcgcagcccagccagccgccggtgtattgcgcgccgccgtcggaatattgcgcggcgctgaccactgtatcgtagccgaacgcttccggcccgtccgcgggcgaaacgttccatttgccgatgaagccgcaggaatagcccatggctttgagtgccctgggccaggcgccttccggcgaaatgggcggcgtggggaaaaaaccgtagttccagtacgcgccgaaggaatccgggtgccgccccgtatagagcgcctggcgcgcgggcgcgcacaccggcaacggggtgtaggcgcgcgtgaaccgcgcgcctgcctccgccaaagcgtctagatgtggcgtttgcaccagggggttttccgcgcccagcgcgtcgaaccggaactggtccgccagcagaaacagcagatttttcatggatcgctcttaatagacgtacttcacatcgccatgcagcgggttgagcttctccggcaccaccagcgcgccgccctcttcataggagcgcatggcggcgaaggtataggaaagcgtggccagcgcgtcgcgcccggaagcgcggatgtgctcatgcggcaccttgttggtcacgtcctccaggaaggcgtggatgcgcaccgggaaggtctcgtcgaagctggtgaggcccgtttcgtacacctggggcttggggctggccatggagggattttccaccgtgtccacatcccagtaatgcaccttttccacgcagttttcgatgcagaaggtgccgcgggtgcccgcgtgctcatagctccaccagccgcccaggccgaacatcgcgtcgccgcgctgcgagagcaggtagcccacgccgccgttggcgaacttcacgtggatggagttgatggagagcatggggtcgcgctgcgtgcggcgcacgccgggcttatccataaaggcctgcacggcgacgatatcgccgcagaagtgacgcatcaccgagaacggatgcgcgcagaaggccttcacgtgcgaatagggcgtctgccaacgggggctcatggggccgccgtatttcttttcgctgccgttaaagcccaccttgtggatgcagtacaccagctcgccgatcttgttttcctggatcaggttatcggcgtagtccgcggtcttggtgaaatagtggttgaggtcgcagcccaggtagagcttgttcttggcggcgtaatccaccagcgcgtaggcgtcggaatattcggagcagatgggcttttccaccagcacggccttcttggcctcgagggcctccatggccggctcaaagtgcatggagccgttgtcgtaaccggaagtggtgacgctgaccacgtcgatttccgggtgcgcggcgagcatttccttcgcgctggcataccacgggatgttgaattcctcgccgaatttctgggccttctcgggcacgatgtcgcacacggccacgagggtggagagttcgtctttcacatagcaacgggcgtgcgtgcggccaatgccgccggcgccgatgattgcgcaattgagagccatttgcatatcctccttcggttgatgggtggtttgccgttattccaccgtgtccgccacgcggaccggcttgttgctcttgagcgaagcgatggccgcgtgaatcacgcgctgcgcttccaggccggaacggccggagccatcgatctcgctgggcttatcgccgcgcgcgacctgcgtaaagaagcaggtgatgcggtcgcggaacgtatcgtcaaaattggagaagccgccgaacacggggttggtgtacacttccttcatcaggttgccggcgggatagagcgtggcttcgcgccacatatcctcgaatatcagccggcctttgcgccccgccacttcgcagcgctccatgggatggccgcgggcgatgtcgtagctcgatgtgaggtggcccaccgcgccgcaggcgaacttcatgttgatggaagcggtggaatagatgttccggccgctggcgatcatcgcgtagcaatgcacttcttcgatgtcgcccatgaaatagcgcatgatgtccacgctgtgcgggttgagcgccttcaggtgataatagggcgaatccagcggctgcggcttgccgatccacagcgccatgttgcagaacaagagctcgccaatgcgcccgtcatcctgccattttttggccgcgcgggccgcaggcgtaaagcggtggttcatatcgatgccatagcacacgcccattttttccgccaaatccaccatttcctgcgcgtggcgcaagtcgttgctgatgggcttttcgcccagcacgtgacagcccgcgcgcagcgcctgcatggtgggttcgtagtggtcggaactgtattcatagccgccggtggtgatggaaaccacgtcgggcttttcgcgatccagcatttcctgcgcgtcgtaatacgcgggcacgcccagcgccttggcggcggcgtccgcccgctcatgatcccggtcgcaaacggcgaccagttcgctcaccgtctgctccttgtggatgcgcgcgtgcagatttccaatatggcccatgccgataacggcggaacgcaacatcgtgttcatgcctccaaacgtcgttattttttgttttcggcctgcagtttcaccgcgtcggcgatgccgccgatgtacttgctgtcgtaggcctcctgcgaggacttaaacggccggccgttcatgaggaaattggtgtaaatcggcgcggggcggccggtttccttttcgcgcttttcgatgaaagcgtacatgcgctttttgagcacttccacaacctcggggttttcttccgccacgttgtggttctcttcgggatccttcaccaggttgtacagttccacttcgggcttgaagtggaaatccggctccagggaaacgatcagcttccattccggcgtgcgccagccgtgcttgcgcatccaagtgcactcggtgatgtagaattccggctcggcctcgcgcggcttgccctcgatgagcggcttcaagctgcggccctcgaaaggcagatccacgtcgatgcccatgatgtcgagcagggtgggcgtcacgtccttgagctggcaatagcccgggatgcgcaggcccgcgggcaaatggttcttccagcgcagaatcagcggcaccaccagcgtgcaatcgtacatgccgtggtgatcgaaatagcaatcgtggtcgtaaagcgtctcgccgtggtcgctggtgaagatcacgatggtgtcctcttccaggcccagtgccgcgagcttttccaggatctgctggatgcaggcgtccatataggcgaccgccgcgtcgtactgcgcgatcacgtaatccggattcgtgcatcccttgggcacccaggagccgatgtaatcgccgaagggcttgaaatcatagaccttctgcatgcgcttgtcgttgggatcgaacgcgtcgccctggaagaagatgtcctggaacggcttgggcgcgaggtacggggagtgcggatccatgtgccgcatgaagaggaagaacggctgatcctgcttggccaggcgttccagctcggggatggccacatcgttgaggttctgcgccttgtgcgcgcggccgtcgtcgtgatccgggccccagcccgcaaagccgaggtacttatcgtagccgcggccgctagcgttgccttcaaaaccgatgcaggtgctggtgtagcccttttcgcgcaggatttccgccagcacgggcacgccgtcgatgatgtgcttttggctcagcgccacgacgtccgtgccgaagcaatcgcggccggtcatcatgttcgcgtaaccgggcgtggtggggatgtgcggagaaaagcactcttcaaacgtcacgccgccttcggcgtatttggaggtgtgcggcgtggtcagccggggatagccatagtggctcatgtgatcccggcgcaggctatcgatgccgaaaaacagcagattgggcagctttttgctcatgttcatcctcctgtatcgcgttttttagcgcgcgcccagcattttgagcaccgcgttcatatacccatagctttcgctggcgatggccatcgcgtccgccacgtcttgttcggggccgatcacttccaggcagacaggcccgtcgtagtgattttccaccagaaccttaaagtatccgaacaggttgatatcgccgcggccgcaagcctggttcatgggatctcccggagaggggcccgggcccttgcaatcgcggatgtgcacgtgcttcacgcgcgaaatcaccaggttgatggcttcttccggcttttcacccgcgcggtagatgtggctgggatccatgtccacgcccacgtccgcgctggcttccatcatgcgcagggtggtgggcgtgttgtacaccgccgcgcccacgtgcgccttcacgcccagcgtcacgccataggtcttggccagggccgcgaaatcgcaaatcatggcgagctgcttttgcaggctctcttcgccctcggcagtggagccgccggggccgatgttcaccagcgggatgcccagcgccttcgccgccgcaaaggccttttcaatgcgcgcgcggtcgttggtggcggcttccatggaaaggaattccatgccggtttcctcgcgcagggcgatcaattcttccttttgcttctcccattcgtccagcaccaaatgctcgcacatgccttggatggctgagagttccacaccgtcgtagccagcgcgcttggccataaggacggcttcgcgcacagggaattttttgaacaaaaccgtattcacgcccagcttcatgatgtcatctcctttaacaatatgaggtttcctacgtgcattataaatgcatgcggaatatcgcgcaagtgtttttcaaaattcaagtcggaaaacatcaaatcgcttctttttaagtcaatatagaggggcaaaaagcccaagaaaaaacgcccccatccaaccgcgtcaggcggaaagtgggggcggaaaaggagcgggagttttacagcacgccgcgcagtttcccgcgccgggtggcttccaaaacgcacagataggtggcagcggtatcgaagcgcgcgtcgtgcgccgcgttgccatcgccgaaccattcctgggccttggcggcgatggcctcttccgtgagttcgaaatattcgcacagctcaatcagctttggcggcttgggccgcccaatgttcaccttcatctttaggttcacatcggaagtgaagtggttcatggtgcaaaacgtgggaattttgggcagcttcatatcgagacgggcgaattccatttgcaaatagcgcacgtcggctgcgatgttgtgcccgataaacaggtttgccgaggcgaattccgcataaatggcgctggcgaggtcggcaaagcgcaatccgccggacaactcttccaacatctccatggagaagccatgcacggcctcggcatcggggttcatatcgtccacggcgaaaaattggtttttgcccaccacgccgctatcgtccacaatgagataggagagctggcagatttgcgcttccgagagcccggtggcttcgatatcgaacacaattcttttcacggcaattccgtcctttattcttctgtaagcgcttgcgcgaaagcctcttcaattgtcgccccgcccaggcattcgccctggcggtaaaacgcggcgaactggccgggtgtgaccgcgcgctgcggcgcggcaaagcgcaaaagccattcgccttcttctttccctggcagcagaaccacgtcttgcagcggctggcggtgccgcaggcgcacctggcaggcaaagggcggctctacaggacgcagcacccagtgcgcatggcttacgcgcgcgcccagcgaatagagcctgggcgaatcctcgccctgctccaccaccaggcggttgttctgcagatctttttccaccacgaaccagcgccgtccgtctccgccgccgccaattcccagcccgcgccgctggcccagcgtgtagtacatcagtccatcgtgccggcccagttctttgccgctgatgtccacaatggggccgggctgcgcgggcagatagtgcatcaaaaacggcttaaagctgcgctcgccgatgaagcacacgcccgtggaatccttcttttcgctcaccggcaggccgcgcttgcgcgcgatttcgcgcacttcggccttggtgtactcccgcagggggaacagcgcgtggctcagcgcgcgctggcccagcaggcagaggaaatacgtctgatccttttgcgcgtccttggcgcacatcaggtggtagccgtccgcgcgctcctcgatgccggcgaaatgcccggtggccagcttttgcgcgcccagcttgagcgcgaaatccaggaactcggcaaatttgatttcccgattgcacagcacatccggattgggcgtgcggcccgcgcggtattccgccagaaaatacgcgaacacgcgcgcctggtattggcgcgcgaaattcacgctatagtagggaatgcccaggtcgtcgcacacggcgcgcacatccgcccagtctcgctcggaggtgcaagcgccggtatcgtccttttcttcccagttgttcataaagatgcccgtgacatcatggccctgctccttgagcaggagggcggcgaccgacgaatcgacgccgcccgacatgcctactacaattttcaaaagatcactccattggcggcacaacggcggagccagcctggctgagcgcgttgagcgtagcctcgtcgatgacgaaccgatcgagcgtgtagccgttcaagttcaccgcgtcttccagcgtcatgccataggtcgcttcatcgaagagcagcgtgagcggggccgtgccatacaggggcacgtactgctcgttgtaggcaatctggaagtccagcaccgcgcgcaaggtcgccaggtcaaacgtgctggtgaccgcggaaccggccggcgcgccctcagcgtctttcagccagccgtactggtacagcgtggattgcaggttcaaaacgtcgttcgggttgctgttcaccgtcacttgcgtgggattgccaggctcggtgggcagcggttgttcggtgggcaacggctcggcggtgggctgcggttcggccgtgggttgcggttcggggtaggggtactggccgctgagcaggtattcctgcgtaaccgtatcgcacagcccgtccgtgggcagcaccggcgcgcccatcagggcgttcacatagttctggaaggcggacacggcctccaccgtcttttcatcgtacgcgccaggcgtgtacgcgtccggatagagccagcctagctgctccagatagctctgcatgttgagaatgtcttcctgcggcgaatccgggccgatcaccaccaccggcgcttgcgtgggcgcgggcgcttccgttggctgctgcgccagcgcgtaacgctcccagccctcgccgcgcatggcctcgaaggtcgcctggtcgcaaatgccggaaatggtgaggcgttcatagccgtccacttcgtttacgcgcatctggaaggcgaccacggcgttcagagtcgcgtcgtcgtacgtgccgggcgtatacgcgccgtccgtcaggtagccgagtgcgtcgcgcaggtattcctgcatctgggagatggtattcgcgtccgaatccgggccaaccaccggcgcttgcgtgggttcgggcgtgggcgcgctttcggtgggcgcgggctcggccgtgggctgcgcgggattggggttcacgtatttctcgaagccttccgacaccatggcttcgtaggtcgcgtaatcgcacacgccggaaacggtgagccgctcatagccgtccacttcgttcacgcgcatctggaaggcgatcacggcgttgatggtcgcgtcgtcatacgtgccgggcgtgtaagcgccgtccgtgaggtagcccagggtgtcgcgcaaatactgctgcatgccttcgatcaccgcgctctccgcgttttggtcgatcacctgttgcgtgggcgaaggcgcgggtgcttccgtgggcagaggcgtctcgacgggcgcttccgtgggcatgggcgtttccaccggcgcttccgtgggcacgggcgtgctggtcgcgggccgcgtaatgtcgttgagcagccaatcgagcgtgctcgcgtccgcaaggccggtctccggcaggatctggctgttgttgatctcgttcacatagcgctggaattcgtagaccgccgccgtggtcgccgcgtcgtatacgccggtcgcggtctccatttctagccaacccagctcgcgcaggcgcacctgcaggttggtgatttccagcggatcgctatcttggtcgatggtgtaatcctcgcccgggccatccgtgggcggagcgtaggttggcggcgtgcccagcgggtcgtaaatcgtgggcgaaggcgtgggaaccgccgtgggcacgggcgtggcgggccgctgggtgggccagggcgtcgccgtgggcgcgggcttgcgcgagatgctgtattggtccagccaatgcagcgtctgtggcccggcaatgccgtccaccgccaagggcgtgatgtcgtacgtggtgttcatgtaggtctggaaatccttcacagcctgcacggtcgccgcgtcgtacacgccggaaggcgcgctatagttcagccagcccaattcgatgagctgccactggaaggcggtgatttccgcgctgctcgagtggctggaaatggtctggttttgcgggcgcggcgtgggcgtgggatagccgccccaccacgggccattgtaaggcgtggcggtgggatagccgccccagttgttcccccagttgacatagggcgtaggcgtgttttgcaggatcatgtcgctcgcgccttcttcgtcctgccaatcggggttcacggtgttcacggccaggccgtcgcttgtgggcgcgggcgtggcgggctggttgggatcggtcagaccgtctaggctgggctgccaggtgctcgccgtggcgctggggccgggcgtgaactgcgcgccggggtcggtcacgtcgctgccgccgccgagcatgcgcgcgatcagcacgatcagcacgatgatcaccaccgcgctcgcgccgatgccgatccatttcaccatgggcgaaaggccggccttttcctccggctcttcgccgccggtgggcctgcggcgctggatcaaatacccagtgccgttgtccataaagaaaatatatttgcgctcgccgttttcatcgggctgggcgctgtgcttcattttgctcaggcccgcctggaagcgctcctcgctccctggcgcgggagaaacggagccgtctggattgcgcacggcgatgtcgcgcggcaaaaattcgcgcacgcgcaccactacgccgcggcgcgtgtccatcgcggcgtacacgatgccgctcgcgtcctgccccacagcgcgccccaccaggatgcgccccgccagcattgtgccgggcgaaagctggttgatgggcaccgcggcggacgcgtctccgccgcagtgcgggcagatttgcgtatcgctcggttcaaaacagtaaaggcacagattttgtttgtcttccactgcgcacctctccttttgtctctttgctttttggacggatgagcgtccgttgagttcccgcgcgcgtgaaaaattgcgcgttttcgcggaaagtgccaatttatgctatgccgccagcgctactggcgcaccacggcgatttccccgtccgccaggccgaaggttcccgcgccagcgcgccgcgcggcttcgagcgcttcaatggcttccggcggaatttcgtcgcccggcatgagccaagcgctgcccggcggatatagccccgcggcctgcgcggcaattcgcccggcggcctgggccagcggaacgcgctcaatgggggctagcgccgcctggcgggggcgcatgcggggcacgccgtacactggtgcgaaatctgcgggcgcgtcttttccctcgggcaagcggcgcagcgcttcttccaacttggcaaaggaagccggcgtatcgcacacggtggcgatgcaaaccacttcccgtgtgccgcccatttccacgtccacgcccatttggcccagcaaccgcgcggcgtgaaatcccgtgaggccgcggccggaaacgtccactacgatgcgggtgggatcgtccatgcgcgggcaggcgaaaccgggtagggcgttgacctttgcgcgcagagcgtcgcaccgcgccacggtttgttccagcaactgcgcgccgcgctcgtccatcagggcgcgcgcgtcgtccagcgcgcgcagaatgggaaacggcgggctggacgtcatcaccatgcgcaaaaggtgcaaaagctgcggatacaaccgtgcgtccttcatcaatagccatgcgccgcccgtgagcgcgggcaaggtcttgtgcgcggactgcacccacagatccgcgcccagccgcccggcgttgggcggcgaatcccaccagttgaaatgcgcgccgtgcgcttcgtccaccagcaacagctccgctttgggcagcgcgcctgcgcggccaaaataatccggccgggtggcaaagaccgcgccgctttcgcccacttccatatcgcccagcaccaggccggaaaccgcgctcacgtgcgcggtgcgctccatgcggatggcgcggtagcgcgtggaagcgtacagcagcatcgtaaggttgccggcggtcgccccgccggtgagcaggatggcgtctcccgcgcccgctgcttgggcgatccggcgctccgcctcgcggatggcgccctgcgggtgatacaaatcgtccgtcgagggcagctcggtcatgtcgaaaggatccagcgcgcccttgtggcctggcatatggaaccgcgcatgcccctgcgcctggagcagcatttcgtgaatgggccgcatggcgcgcctccttaccctttatgttactttgttattttactctatgcgtgggcgttttgcaagggtttgtccgtaaaacgcgtgccgccgccaaggctgttgtgtaaagaatttcgatttcgggtagaacttatgttcgagagttgataaaatggtattgccggtgacggcaatctatgcataaggaggcaacaataatatggaagaaaggcattctatggcgacagaagcgcagaagctgctggcggaataccggcgcggcaaggcggcgctcgatgcgcgcgtggtggaaaatgatcagtggtaccgcctgcgccattggcagcgcatgcgcccatctggcaatccgggcgatccggaaccggcgagcgcgtggctgctgaactgcctgctcaacaagcacgccgacgcaatggacaattaccccgagccggtggtgcttccgcgcgaagagggagatcgggcggatgccacggtgctgtccgccgtgctgcccgtgattctggaacagaacggatttgagcagacgtattcggacatgtggtggcaaaagcttaagagcggggcgggcattctgggcgtgttctggaacccatccaagcaaggcggccagggcgatgtggacgtgcggcgcgtggacattctcaatttgttttgggaaccgggtgtgacggacatccaggattcgcgcaatgtattccacgtggaattgcgcgataacgaggatctgctcgcgcgctatccgcagttggaaggcaagctgggccagggggcagaccggccacaggtgtacgtttacgacgacgccatcgacacctcgaaaaaatccgccatggtggattggtactacaagcgcgacgggcttttgcactatgccaaaatcgtcaatggcgaggtgctttacgactcgcaggaagatcctgcctgcgcgggccgaggattttacgaccacggccagtatccctttgtgttcgacgcgctgttctcctgcgaaggcatgcccgcgggctttggctatctggatgtgtgcaaggaaccgcagatgtacatcgatcggctcaatcaggtgatcctcaaaaacgcgatcatggcctcgcgcccgcgctggttcgtgcggcaggatggcattgtgaacgaagaagaatacgccgattgggatcgcgattttgtacactacacgggctcgggcgatcccgaggagcacatccgccccattcaggtgaaaccggtttccgacattttcgtcagcatcctgaacaacaaaatcgaagaactaaaggaaaccagcggcaaccgcgatttcacccagggcggcacggtgggcggcgtaacggcggcctcggccatcgccgcgctgcaggaggcgggcaacaagctctcgcgcgatatgatcaaagccagctaccgcgcgttcacgcaggtgtgctatctgatcatcgagttgatgcggcagttttacgatgagccgcgctcgttccgcatcgttggcgagcgcggggcgcaatcgtttgtgctgtattccaacgcgcgcctgcgcccgcgcgcgcccggcatggaatacggcgtgcccatgggcgggcgcgtgcccatattcgatattcgcatcaagccgcaaaaaaccaacgccttttccaaagtggcgcaaaacgagttggccaaggaattctattcgctgggctttttcaacccggcgaacgcggcgcaggcgctcatctgcttggagatgatggatttcgaaggcaaggacatggtggtaaagcgcatcgctgaacaggcggcgcggggggtgaacgcatggcagggataaacatcgagcttccggccttcgcgccggacgacctcaacgatccgcgcgcgcggcgtaggatcgtgagctatctataccggctggcggagcaggtgaagtacctctccacccatatcgacggcgagaacatgacggacgacttccagcaggaaatgatctccaccgccagcgccagcgtgcgcgacgagctttccggcacgcttacgaaattcgaaacgcagatcgaacagaacgcgcgcgagatcagcaccaaggccagccagacggaggtgaacgccctgggcgaggaaatcgaaaccgcctccagcgagttcaaccagacggccagccagctctccgcgcgcgtgacgacggcggatggcaaggccagccaggcgctgcaaacggcgaaagggttctccgcgcgcatcaccaacgccgaaggagacatcgcttccttagaattgtcgctctccggcgtggtggcgagcgtggaaggcaaccggctggtgttcgattcgaatggccttaccatcaaaaacgccgccggcgagaccgtgtttttttcgagcgccatcacaggcaccctcaacattacgggcaacatcaacgccgctggcgggacgattggcggcttcaccatcggggacaactcgatcaccgcgcccaacggcgtgaagctgtattccagcggcaattttagcacggtgaacaacttgcaactgagcagcggcacggacggtttcggccgggattatgccatgctcacgcaggcgggtggctttgacgagctgcgcatcatgcattctagcggcgacgcggactggggcagcgtgcgcttctacgcggagaatgggcaggcgaaagtttcggtgcattccccgctcaccgttggcggcgggctactactcatcaatttgcccaccaccacgcaggcgcccaatttgtatatcgacgaggcgggcaatctgtaccgctgcgccttgtgagtgagaaaggaggaattttgcatggcgaaaaaggcgcaaccagcgcgaagggaagaagccatcgcggacgggctattgcaattgctgggagaagcgttgcaggatcccaaacaattgtaccgttatttcgtgacggaaaagacggagcggggcaacgaaaccgtggagcgcacgtttgaaaagtttgataccaaggcggcgcgggaaatggcgaacctgctcaaggaattgatggaaatcaaaggggagcgcgcagtgggcgaaagcgccgcgggcgtgatcgtgttgccggaaagcggcatggaagaggaagcttaaaattagaaaggagagggaattatggcatatacaaccattcgggaaggctcgcggggcgaggacgtgaaacggctgcaaacgctgctgaacaacgagggatattcgctggatgtggacggcattttcggcgagaaaacgcaaagcgcggtgcggcaataccaaagaaaccagggactggacgtggatggcatcgtgggcgcgaacacctggagcgcgctctccagccccgcggcggcgcagacttttgcgccgcaaacgcccacgggacaggtggacgtgtcgggcggccgggatctcaccggcgcttcgagcgcgcagattgccttctctgggagccagagcagctggggcaaccgccccgcgtacacgccttcccaggcggtgacggacgcggaaaacgcgctgaaagaatgggaggccaaccggccgggggattatgaaagcccttacgcggatcagctcgccgcgctgtacgatcagattgtggggcgcggggagttctcgtatagcccgcaggcggatccgctctatgagatgtataaggatcgctatacggcaggcgggcagctagccatgcaggacgccatggcgggtgcggcggcgctctccggcggctatgggaacagctacgcgcagaccgtgggccagcagcagatgggggcttatatgacggccctggccgatgtgctgccggaactggaagcgcgggcttacgagcgctggcgggatgaaggcgcagatctgtacaaccaattccagttgacacaggggttggacgctacgggttacgaccgttaccgcgataccgtgggcgactattacaacgacttgggctatgcctatggcaagtggcaggatctctatggaaacgattataatcaatatctcaacgcgctggcagcgtggcaggacgaccgcaacttcgcctaccagcaggccatggacgcgctggctcagcagaactacgagcgggaatgggcatataggcaacagcaggacgcgcaaaagagttcgggcagcggcggcggaaagagcagcggaagcagtaaggccaacaaggatgacgggagcgcaatgattggagatttgtctgaggacaatttgcaggacatcgcgctgaacatttatctggggacgggtatgcaggatccgctgaaacgcgtggatggcacaagttattcggaaaagcaaaagcaatacatcaaagaacaaatcaaaatcctgatggatagctacggttgaccggcggggaggtgagggaaacgggtattttggataagctggcgctgcgggggcgcacgggctcaaaatactataaccccggtcaggcggatgggtataccgaaaccaatttgcagcggtatctggatttgaccgtcgcccccccctgcagcggcgctcggatgcgttgaacgcattttatgacgatacgatggcacagaaatacgtcccgcaggaagaattgcgggcggcgaaccgttcggcggccaacgacatgctatacgcgcgcacgggagcgaccgatgctagtgcctggctgtacgccaacgcgaatcgcctggaagacgatgccatagattctctggcaagggaaatcgcggcgcgcagggacagcgagttggcgctacgcaacatgtctgattcgctgggcaattattggggccagtttgaaagcgaggacgcgtacaaagaggcgctggcccagcaggcggagtatgagcggctgctcaatctggacacgcaggcactggaaaaagaaatcgcgcgcaaggaaagcgaagcccagtccgaagacgtggaaatggtggacggcaagccggtgatgcgcgtgcaaacactggatgaataccttggcctgcgggacgatgcagagcggagcgcggacgaatccaaaagcgagcttgcgcaaatgcgcctggatttgcgcaacgcgcagagcgtgcaaacgctggcgcaatacgaaaagatggcgcaggagccgggcttcgcggagcgcgcgcgggaaggtctggctatggagaacccgacgtggcaggagtaccttggctggctgctatttggcaacgcgcgcctaggcgggcaggatccggcaaaccttgcgacattcgcacgggacaatcgcaaatggctgcaggccagccagagcgatgcggctctaaatccgctgggcaacgacgcagtcgccgcgagctacatgtacgatgacgaagtagaaatttacagcggtcttcttgcgcgggagggaaaagaggttgcagacgcgtacttggccgcgctgcggccaaagctttccgcgcgcgaaggcgaaaacattgcgaatgcagcgtccgatagcatgctaaagcaggggatatacggattatccggcagctttaaggaaagcatgcgcgccctggggcagctcgcgcagccggatgaacccatgcccgtgagcgcgacggaatacgctttgagcgcaatcggcgaaaacctcgacgaaacgggctggcgcgtgggcaactggaacctgggccgcacggcatacgacctggccacgaactttggcggaaacgccgcgcccatggccatcggcaatctgatcgctccgggcgcaggcgctgtggccatgggcgtggtcagcggcgctggcgcgctccgggacgccatgcggcagggctacagctacggcgaagccctgccctatgccgcgatgagcggtttgagcgaggcgggcatgggctatttgctgggcggtatccggcaattgggcggcaagggcacgcggcacgtggcgcagcggctgattggcaaggtaggcaaccggtctgcgcgcgcggggctgaactggggcctgaccgcgctgggtgagggcgtggaagaaacgctgcaggccaagctggatctggcgcttcggaactggctgctgggggagaacaacgaaatccggctgctggattcggacgccttgtacgagggtttccttggcatgctcacgtccatggttctcggctccagggaattccggcaggacttgcgcacacaggacgttggcgtgggcgtgatgggcagcggtaaggtggacgatctgatcgaccatgcgcagcagatgggcgggaacgtggcgcgcctggcgcaggaaatgcgcagcggcagacggccggtcaccgaggaaactgtgggcgagctggcaaaggagtacgccgaaaatggcggggacgtatcgtttatgcagccgcagctggatccaaacgcggaggcccgaagggctgaaggggcgaggacatggagcgcagcggaatccgcagccccggaataccgggccagcgaagcgcaggccggcacgaacgctgtgggcgagatgggcgacgacgtgcttacacggctgtatgcacaggcagacgaggcggcgcaaaccccggaggaggcggatgcctggcggcgcgcagtggatctggcctatggagccgggcggcgcggcatgccggaagaggagcttggccggttcgacctaagcaacgtagaaccgcaagaggaggcccgaagggctgaagccccgaggacagcgcaaagcgctccgcaggggcggaacaccgcgcaagcgaagcgcagggcggtacggagcgcttattatgcgggcagggcggatgcgcagagcgagcaggcggcgcgggaagcggtgtacgaggaaggcaacacggaagccgctgcgcagcccgtgcaggcggatgtcgcgcaggcccaagcgaccgacgctgcggtgcctacggcagcacaaaccgatgttgcggcgcaaacggccgcgcaggccagccaggcagatgcgcgtatgcagggcggcgctccaaaaggctccccttgggctaaaggggagctgtcagcgaagctgactgaggggtcgtcttcccgcgcagcgcgcaaacgccttcccgactggacaaacacgcgcggcggcttggtacggcaggacagcgcaggcgaaaatctgaaccggcagcagatggcgcacttgcgcgtgttggaggcgctggggcggaagtacaacgtggtatttgttacgcgggatagcatctcggtagaaagcagcgcagcggaggcccgaagggctgaagtggcgagcacacgaagtgcgcaatcgaaggccgcaaagcggctggaggcgcgaggacacgcccaaagggcgtccgcaacgccggaacaccgcgccgccgaaggcgagggcggtgcgcagcgccggaacaccgcgcaagcgaacgcgcagggcggtgcgaaggaggggaatcgagcgaacgcccggtatgacggcggtcgtgtgttcgaagttgcgctggatgcgcaggaaggggcctacacctatttcgccacgcacgagatggcgcattatctgaagagccagggcgcggatatgtacgccgcactggaagattccgtgcgcgcttgggcggatggtgcaggcatcgactttgacgcgcgcgtgcgggcggcgcaggagcgctatgcaagagccggacaggagcttacgcaggagcaaacggcggaagaagtggtgggcgatatgctgggcacgatctttgccgaccccagcgcggcgcaggagctgctcaacaatgcgcctaggagcgtgctggaaaagattcgggatttcatctccgagcttttggacaccatcagcgccgcggcgcgcaggatcgccggggccaaagagcttaccgcgctcacggaactggaaggctgggcacgcgacatagcgaagatgctggataaggcgatgcttgaaaccggcaggcggatagcagagagcgtacgcaagcaggatagacaatccgcgctcgctagcgaacgatacgccatccgtgaaggtgtgagcatttctcgcgaggaaatgcagcaaaacatggctgaagtggcgcaaatggagcctgtggttacgctgggagggcatgaatttgacctgaacgccgggccccttgcagctcaggtcacggagtatttcaatggcttgggcaatcaggtagaaaaccccgtactggggacgattacgcttaaccggcgaggcgtaaaagattctctgtcgcatggaattgggcagcttaaagctaccggattttatgcggttcctgctgtgctgaaaaaagggaaaattatcgactagtcaggaggattggaaatcgcggcattatgataccgttgttctggtagcaccaatcaccatatctggtggcaattttgctggcgattactatattggcgcaattgtaatgcgcaggcatgacatgcaacgcttctatcttcacgagctaattgctcaagaaatagaggagaccagccgttcaaccgggacatctcttgcgagcagcacccccggcggtcgagtctcccctacgctcactagtatactagaacgcgtgcgggaaatcaaccgttccagtgaaagtgaaacggaaaattcacaattgagcgaatcagaaggcgattcccgctattccctggcagacgagggcgagagcacgccgggcattacgctggaggatgtaaatacgctgcgcagcatcggccgcaagagcatcaacgacttcaccagcgaagaaatccgtgcaaccgaatcgtgggcgcggaagttttatcgggagctgggcacgaagtccccgttcttccgcgcgtggttcggcgactggcgggagaatgatgagacgcaagtatctgtaacacaaatcactgataaagctataccgcgagggcttgtcaaaaatgcagataccggttgggaaatcaatatatctaatgttggtataagggatacgatttctcatgcagggcggaagcgcatttcacaaacggctttaaacaatgcggatgagcttctcacgagtgcggttctgctggatagtgaggtctcaactgttacagggaaaaagggccgtttactgcttttatgcacaagctatacgctccttttcgcgtgaatggcgaggaatatattgccaagctttcagtggaagagtactatatgagcgcaaacaacaccgcaaaacgcatgtacaatttgcgtggcatagaaatacctgaggccagcggtggcttaactggggaacccagggatgccacaatgcacatgcctcaggacaaaataagtgtagcagaactcttcgctcttgtcaagaggttcgacaaagattttgcgccgaaacccgctagcgaggtagtgaacgaggatggtacgccgaaggtgatgtatctgggaacggatagcggagacggagaagtcgggcccaacggggaaggaggaagatattacttagcgccagacgaagcgaaagcgcggcagtacggggaaaacgtgatagaggtgtacgcaaacgcggcggaaggaattcaggcggatggaacggtgatcgtccagggagcggagcacatcaaggcagtggagaaccagggtacgttcgatgcggggaatccggcaattcggtattcgctggtagaagaggggcgtatggaagcggaaggaaaagacgttttccatgagcgccaaggcagcacccggccgcgcggcgtaacaatagaggaaatcggggaggcgatacggacaaggaagcaaatgggagaactggtgctggaagcgcagaagctggggtataggagcgaagcgggaaggctggcacgggagatcatgaacggaagcgcggaacaaagcgcggcgaatattggtttactggcaaaggcgtatgcgcgagaaagcggagatgaaaagtatgtaggtttggcacgagaacgagaagagaaggaaggagcgagcgaaggcaggaacctggaggaattgggagtgaggctccaggcagcggggaaaacgagcgaattgataggggaggcgataaagcaagggcagaggcggcaaagcggacggatggcgcaagggatgatgaacggaagcgtggagcaaagcgcagcgaaccttggcctgttagcaaaggtttatgcgcaggaaagtggcgacatgagttacactcaggaagcaatggcagaggatagaagagaatatgaggcactcaaaaggcttcttggagagaatgcgccaaagagtcttgcggaatttcagaagttaaagtataatagtggggtatgggaagaatataggaattatacccgctctattgaaatcggggaattaacaccacttgctgattttaagctgtaccaaaacattagcgaagaaatcgatgaggttttaatgggggtgataacatcggatggaattagaattagcggaaaatcggcacattttgttgcgcgagtaatagggtgtattgagcaaagaaggaatggtgtatcgataagtaatataaagcaagcagtgatgcaaccggatgatgtgaagatttcatcgagtagtcatcaatacaaactaagtggtatgtgtggagttacggtaaatcccagtactgggaagcttgttcaatgcaatccattgcattaggaggggtgttacatgaaaataacaagagaagaaatggaagtgttgcgtaaatatattccagatgtagatgcaattgtgaaatctggagatgtgtcagaatttgaattaacattagatcgcgcgattatagaaaatggacttgacaaaaatgatgaaattacaaaggtgggagttatgttgcaggggatatatgataaaatattcgacagaaatggttgatgattacggtgagttatcaaaaagtaaatgcagaatctggcgtgaacaacaatggatttatatgatgttggaagaaagtggttgaatcgtgacgtggaacactatgggccagtgtatagacgtatgattagcccagatctatgctattttacgggaatgttttcgatttctcacataaaagaaatagaagatatagaagaagcaagaaagacatgcaaaagctgtgcatatagcgatttgggtggaggtacagattgctatgtttaaaagaggactataatgaatgatggcgtacataaatatgaaatagaaaatatagagatagtataagtggcgtgtaaagaaaacgcgttaagccatgtaagtggcgaaacgcgttttcctatgcagaaaagagcatgtgcaggagcgtcagaatccaggcggcgatatgctgggcacgatctttgccgatcccggcgcggcgcaagagcttctcaataacgcgcccaggagcgtgctggaaaagattcgggattttatttttgagcttttggacaccatcagcgccgcggcgcgccggattaccggagctaaggaccttgcggcgctcacggaactggaaggctgggcgcaggacatggcgaagatgctggacgcggccatgtcggaaacgggtagacggacggcggagatcacacgcaagcaggatatgcaatccgcgctcgccagcgaacgatacgccatccgtgaaggtgtgagcatttctcgcgaggaaatgcagcaaaacatggctgaagtggcgcaaatggagcctgtggttacgctgggagggcatgaatttgacctgaacgccgggccccttgcagctcaggtcacggagtatttcaatggcttgggcaatcaggtagaaaaccccgtactggggacgattacgcttaaccggcgaggcgtaaaagattctctgtcgcatgggattggacgccttaaggcaatggcgttctatgctgtgccggatgtactcgaaaaagggaagatcatcgattatcagaaaaattggaaaggaagaatgtatgataccttcgttctggcagctcccatagatgtgcagagcggacgatacgctgggcaatattatatcggcgccatcgtaatgcgcaacgcaaacacgcagcgctactatttgcatgagctgataacacaggaaagagggaaccagccgttcaagaccagggcatctctttcgagcgtgctacctggcggtcaagttccccctacgctcaccagtatactggagcgcgtgcgggaaatcaaccgttccggcggaaatgaaacagaaaattcacaattgagcgaatcgaaagcgaacagcgatatccgctattccctcttcgacgaaaccgcggatgcatcgcagctgctctcggagaacgagcgcctgcgcaggctgcacgagacgtttgccagcaaagtgggcgacgtgagccgctacaagggcgagtcttcgcgggaagcggcggatatctcttcgggcaagcccacggcgcatgggggctgtttggccttgcgcctgcggaattcaagcggcgaacagccgatgatggcccgaaaggttttgtggaaaaaggtcgtatccttatatcctacgcgttccgccacgtcgctgatgggtatggctgtattggcgagcaggcggcaactggcgttgatgcgcacatgcttgacaaattcggagaaggtcacgcccatctcctgcttgaagtgcttgctcaggtaagaatttgtgtattgctttgaaccatacgcgtcacagatgcaaataggctgcatatagtgcttttgcacataattgatgatgggcagcgaaaagcggatgcctgcatcgggtttatcggc

SEQ ID NO: 2710 - DNA, 18314 bp, Unknown
  16S sequences of unknown bacteria
caaacttgaatttattttaagctatcacgttttaccttcttaagccgtttcggcaagagaacacatggaaaccccgccgataccgataaggtgagcggttttttgtttgtcgtttataaactcgagtatgtcgggacgattgacgtcttccataaacgaacctcctataatctgaaaatgcctttttcggtcagcacgaattcgttggaattgattttctcatagtcggtgaccgggtcggtgaaggacatataatttttaaaggtgaaccgctcggtgtcgacctcaattatctttttttcgtcagcggcgcaaacgcgcagagcgccgtcgtcgcacacataaagtccgcacagcccggtgggaagatcgccgtcacccccgatacggagggtacggcggagatgatgctcggcggaataggcaataacggccgagggatttctatatgccgcccaaacggtgttccccgagacggcaagggcggaaggagcctgatccttgtaaagggcgtggccgctccactcgattttgccgtcctttccgtaaatgacggcgcttccgtttttaagcactataagggtgcggaaatcgggcaaaaccaccgccttgcaggaaataaattcgttgggatcgttttcgaattgctcgaaaatatttccgaattttgcgagcagaaaaacgcttctcgtaaccggagaaaccgctcccgtgccgcagtcatacatacggtagacaatggacgttttgccctcgtgctcgtcctgttttgccacaaaaacaaggttgttttgcgaacgcaccatctgaagggtgccctgttcatatatctgtttcatcaaagcacctcaagtcagttgattttatagcagagcgtcataagactgtcgcccaaatggacgttttccacggcaacgccggggtgattgagagccacgtcatagtggctgaaattccaaaaggcttttatcccaagcttaatgagcaggggaacaagctctctggcgctttcgggaggaatacagagcacggccatttcgggcagattttctctgcagaattcgtccagcccgtcgatatgtctgaccggaattcccttgatcatttggccggtgagagcctccttacggtcaaaaatgccaataagggaaaaaccctttgtttcaaaggtgatttgatttgaaaccaagcggccgagattacccgcgccgattattatggccttatgaccgctgtggactccgagaatggagccgatttctttatgaagctgttccacattatagccgtagccctgctgtccgaaaccgccgaagcagttgaaatcctgcctgatttgagaggcggtcagccccatgcgctgggacagctcgcgggaggaaatgcgaattattccgttggacttaagctcaccgagaaatctgtaatatctcggcagtctttttatgaccgaaaaggaaatggactcgtttttcattttatcaccgaattatttggtaagtttttttactgtttccataacataatcgccgaattcgctgcaggtacagccggtgtcgcggccggtgatttcaagcttcttttcctcaaacatacaaatgtcgagagcgcgggaaagaaggtcggccttgtcctgctttccgatgtgggaaagcagcataacggtggcgcggagcatggagcaggggtcggcgtatttgtcgcggccttcctcgaccatgcggggagccgagccgtgaatggcctcgaacatggcatagcgcttgccgatgtttccgctgcctgcggtgccgacgccgccctggaattcggctgcttcgtcggttatgatgtcgccgtagagattggggagaataaataccttaaagtcggtgcggcgctttttgtctatgagctttgcggtggttatgtcgatataccaatcgtcggttgtgatttcgggatattccttgccgatctccttgcagagattgaggaattttccgtcggtggttttgatgacgttggccttggttatgaccgatacgcggtctttgtgattttttctggcataatcataggcgagccgagcaatacggtcggtgccctgagaggtggtgacggtaaagtctaccgccaaatcgtcgctcacgttaactccctttgagccgagtgtgtatgcgccctcggtgttttcgcggaagaaggtccagtcaatgccctcttcgggaactttgaccgggcggacgtttgcaaaaaggtcaagctcttttctcatggcaacgttggcgctttcgatgttgggccacttgtcgccctgacggggagtggtggtgggtcccttaagaattacatggcaggccttaagctcggcaagcacatcgtcgggaatggctttcatgacctcggcacggtgctcgatggtcagaccgtcgatttccttgaattccacctttccggcggttacctcgtcctcaaggaggaatttaagtacgcgctcggcttccttggtgattacggggccgattccgtcgccgccgcatataccgatgacaagcttgtcaagagcgtcataatccacaaaatctttttcggctttcatgcgctcgactctttcgagctgctcgcggacaaccgcttcgaatttttcggccgcagcctttacaattgcttcattcatatttttcacccttacgttatgttaattcttatttatacattttaagcagtccgccggccaaaatcatctgtttctgacggtcggacagggggcattcaagctcaaattcatttccgtttgtgtcgtccttgagagcgattttgccgtcctgctcgattgcggttttgatgcccgcgagagaaagcttgtcgccctgagaaattttatcataatcctcggggttcttgaaggtcagcggaattatgccggcattgataaggttggcacggtgaattctcgcaaaggatttgactataacggcgcgtattccgagatagagggggacaagagccgcgtgctcgcgggaggagccctgtccgtagttttctccgccgaccacaaagccgccgcccagctttttgcatctttcggggaattccttgtcgcagacgccgaagcagaagttggacagatagggaatgttggaacggtagggaagaatttttgcgccggcgggcatgatgtggtcggtggtgatgttatcgcccaccttgagcaccacgtcggcggttatgctgtcttcaagagcatgggactcggggaaatccttgatgtttggtccctttatgacttcgacgctgtccatttcctcggcgggagcgggcgggtcgatcatattgtcgtttataaggaatttttcgggcagttcgattttgggcatttttccgagggtggtcgggtcggtaagcactccggtgagagccgaaactgcggcggtctcggggctgacgagatagacctttgcgtcggcggtgccgctgcgtccctcaaaattgcggttgaaggtgcggagcgatatacccgccgaattgggggattgtcccattccgatgcaggggccgcaggcacattcgagaattcgtgcgccggaggcgattatgtcggaaagggcgccgttttgagccatcatgtcaagcacctggcgggaaccgggggaaattgtcaggctgacggtgggacagacggtctttcctctgagaatttcggcaaccttcatcatgtcaagcagcgaagaattggtacaggaaccgatgcacacctggtcgacctttatggggcctatttccttaaccgactttacggcgtcgggagagtgggggcaggcggctgcgggggcaagagaagaaaggtcgatgtcgatgaccttggcatattcggcgtcatcgtcggcaaaaacgggagtgaagtcctgctcgcgtccctgtgccttcagaaattctttcgtgacctcgtcggcagggaagattgatgtggtggcaccgagctcggcgcccatgttggttatggtggcgcgctcgggaacggtcagggttttgacgccctctccgccgtattcgatgacgcggcccactccgcccttgaccgaaagcacacggagcacttcaagaataatgtccttggccgcaacatagtcgcggagctttccggtcagatttaccttgacaacttcgggcatattgatgtgatattcaccgccgcccatggcaaccgcaacgtccattccgcccgcgcccatggcgaacataccgatgccgccgccggtgggtgtgtggctgtcggagccgattagggtcttgccgggaattccgaaccgctcaagatgaacctgatggcaaattccgttgcccggacgggaataataaatgccgtgcttttttgccaccgtgcggataaaacggtggtcgtcggcgttttcaaatccgttttgaagtgtgttgtggtcgatgtatgccaccgaacgctcggtttttactctcgggattcccatggcctcaaattcaaggtatgccatggttccggttgcgtcctgtgtgagggtctggtcgattttaagacctatatcgctgccgacggtcatttcgccgctgacaaggtgagccgatatgattttttcggcaatattttttcccatgctgttcaatcctttcgataacattttatataaaaaacaagcacccttattatccaacaaataaaggcacttgtcaatgtttttatcaaatttatttatgaaaatatcaatctgatatggaaataaatcagaattttaacaaatatttgtcaaagtccgagataagcggtggggctcacccttgttccgttaacatagacttcgaaatggagatgatatgcggtggcgcgtcccgttatgcccacggctgcgatatactgtcctcttgcgacagtctgtcccacgcttaccgatgtggtggagcaatgtgcatagagggtggcaaggccgtttccgtggtcgattttaacatatctgccccagcccgagtcatagcccacggccacaaccgttccggcttcgccggcatagattgccgtgccgttgggagcgcatatgtccattccctgatgatttcttccgtcgccaaaataggccgaaatgtaaacgccgcttacgttgtcgaggggccagcagaaggttgccgttccgagattttcggatacgggagccgaattcgaaacaaccacctcggccgtttgctgagcctttttggtgccgtattcaacgacctttgaaatcggctccttggttaccgcttcgccggtaatggttcgggaaagctcgacaccattttccgaatatatgatatattcgacctgcttttcgccaggctcgccttcggtctttacacgataggtgccctcgggaagttcggaattttccacctcttcgtaatcatacatgattttttctgtggtgatttcggtgcgagtaacggcataggtcagacggcacataacgcttacatagtcggggtcgttcgaaatttcgtcggttttataaagtccttcgacatattctatatagttggagaagggcacaatttcttcgtccaccgtgacggtgtagttgtcggcaattcggtcaagcaggttttcaagaggctcccttgaggtgcagacggcggcaagctcaccgtcgatgaaaagcccgaccccctgagaaaggtcgctcgacaccgagacaatgttgtcgcaaagggaggaaacgtcggaaatgctgtcgggatttacatatttcgcatgacaggtggtggagtcggcaagggtgatgccgtcgcccacaaccttggagccgagggcatttaacacctcttcaagctgagatacgtcggaaatgtatccgacggttttgccctcatattcaacctcgtatgcaagagtctgccgcgaaaagagagaaaagcccgcaagcacgacggcaagggaaagcgccgacggcacaagtccttttatcagtcttttcagattgtatttatcacagccgagcttttccgaaagccgttttattctctcggctgccttctgtttaatgttcacgttaaaggtactcctttttgttggtaacaaaattgtaacacttccattatacacaaatgttacaaaattgcaacctttttttaaacattaagcagaaaaaatattgacgaagtagtttaaatctgccgtaaaaccttgatttataaggcttttgggacaggcggaaagaatttcgtcgggacagaaattttcaaaaaaagcttcggaaaatactgctttgtcggctcttttggggaattttgcaaggataaaatcgtcggcaaaggcgggtttgagacaaaaaccctggccgggaacgggggaaaaaatcggggtgtcggaattcggcagaataaatccgtcggttccgaagggggcaaaggcggcggtcagaccggttactttttgcgaaattatcggtgcttcgccgtatttatggcggcaatattcggcgcaggggccgtaattttcgggacggtcggttttgacaaaaacgcggcaaaggggaataagctcggcggcggcaggagcggcacgcccgtctttgtctataagtaaaactcgggtttttgcaccgtttgcaacacgggttaaagccgatttgagaaaattaagcaaaagccgcgcctttaactcgtcgcagccgcttaacacgttttttaaaccgtaaagcgtaaaatcaaagctttcggacggcacggcgacgcagtctttcggcaaaaggctttcgagagtcctttttataagtttttttctcatgggataaatcgaaaccgacatatagccgcatccgagaaagctttcccttgaaacaatcggaggaaagccgaacgttgcggactttattcggtttataaccccttttttcgggggaataatatcaatatacacaatcatggctttgctccctgttattattttaacaaaagcacttgaaaatcgggggaagatataatataataagatgtagctgtgcagacggctcttgtgctgtacacaatttttcatttaataattatatattggaggatatttttatgaacgcactcaacaagaaaaccatcgaagacattgacgttaagggcaagcgcgtgcttgtgcgctgcgattttaacgtgcccctcaaggacggggtaatcaccaacgacaagagaattgtcgaaagccttcccaccattaagtatatccttgacaacggcggcagagctgttctttgctctcacctcggccgtcccaagggaacctttaatatggattattctctcgctcccgtggccaagagactttccgagctgctcggcaaagaagtaaagcttgcgtccgacgttgtaggtgaaagcgccaagaagctttcgtccgagcttaaggacggagaggccatgctcatcgaaaacgtccgtttccacgccgaagaggaaaagaacgatcccgagtttgcaaaagagcttgcatcccttgccgacatctactgcaacgacgctttcggcaccgctcaccgcgctcatgcttccaccgccggtgttgccgcctatcttcccgccgtttgcggataccttattcaaaaggaaatcagtatcatgggcaaggccctcgaaaaccccaagcgtccctttgttgccattctcggcggtgccaaggtttcggacaaaatcggcgttatcaccaatctgcttgacaaggtcgacaccctcatcatcggcggcgccatggcctatacatttaaaaaggccgcaggcgaatccatcggaacctccctttgcgaggaggacaagctcgagcttgccgacaacattgtaaaaaccgccaaggaaaagggcgtaaatcttcttctgcctctcgacagccgctgcggtgataaatacgatcccgactgcgacatggtcgtggcaaatgtcgaaaacggaatccccgacggatatatgggcctcgacatcggaccccgctccgaggagctttttgcaaacgccgttaaggacgccggcaccgccgtgtggaacggacccatgggcgtttccgagtggccccgttttgcaaacggaaccattgccgttgcaaaggctcttgcagattccgacgccatttccatcatcggcggcggcgactcggctgctgcggttgtcaagctcggttttgccgacaagatgacccacatttccaccggcggcggcgcttctcttgagttcctcgagggcaaagagcttcccggtattgccgctcttaacgataaataattcttttaaggagtccttttagatgaataaaaatttgagaaaagccgttatcgccggcaactggaagatgaacaaaactcccgccgaggccaaggctcttatcgaagaggcaaagcctctgcttgagggcgccggctgcgacgttatcatgtgcgttccctttgtggacctttgcaccgctctcgaggcgacaaagggcacaaatatcaaaatcggcgcacaaaactgccattttgaaaaatccggcgccttcaccggagaaatttcggctcccatgcttaaggaaatgggcgttgagtatgtaattctcggccacagcgagcgccgcacctatttcggcgacaccgacgagaccgttgcaaagcgtcttaaagccgctctcgaaaacggtcttaagggaatcctctgcgtcggcgaatataaggaacagcgcgagcagggcattaccgccgagcttgtggcaatgcaggtcaaaatcgctcttggcggtctttcggccgagcaggtcaaaaatgtcattatcgcatatgagcccatttgggcaatcggaacaggtctcaccgccaccgccgagcaggcagacgaggtttgcggaattatccgctccaccgtcgcctctctttacggcaaggaaatcgccgacggcatgaccgttcagtacggcggttccatgaacgccaaaaatgccgccgagctgctctccaaggaaaatgtcgacggcggacttatcggcggagcttctcttaaggctcccgattttgcagctattgtcgaagccgcttccaaataagcgaggtgcaaatcatgaaaaaacctgttgttttagtaataatggacggtttcggaatcaatccgaaccacaaaaacaatgccgtttattcggccaaaacccccaatctcgataagttcgtcgagatgtatcctcacacgcaaatcggcgcttcgggcatggatgtcggtcttcccgacggacagatgggcaacagcgaggtcggtcacaccaacataggcgcgggccgcgtggtttatcaggagctcacccgtataaccaaatccataaccgacggggatttctttgaaaatcccgtgctgcttgctgccatggacaactgccttgaaaagggaaccgcccttcatcttgcgggacttctttccgacggcggcgttcacagccacaatacccacctttggggacttctcgagcttgccaaaaagaagggcataaaggaagtctatgttcacgctctgcttgacgggcgcgacgttccccccgcctcgggtatagaatatgtcaaggaggcatataaaaagcttgaggagattggcgtcggcaagcttgccaccatggcgggccgttactacggtatggaccgcgacacccagtggggaagagtgcaaaaggcctacaacgccattgcaaagggcgagggacttaaggccgactgtgccgttgaggctcttgaaaaatcctatgttaccaaggacgaggacggaaagttcatcaccgatgaatttgtcgttcccaccgttctcggggactataagggaataaacaaggatgattcctttattttcttcaatttccgccccgaccgcgcaagagagataaccagagcattcgtcgaccccgaattcaagggctttgacagagagcttgttcctctttactatgtctgcatgaccgaatatgacgcaaccatgccgaacgttaaggttgcctttgctcccgaggagcttaagatgaccatgggagagaccgtttcaaaggcgggactgacccagctgcgtattgccgaaaccacaaaatatgcccatgttaccttcttcttcaacggcggtgaggaggtcaaattcgagggcgaggacagaattctcatccccactcccgatgtgtccaccttcgaccttaagccggaaatgagcgcatatcccgtttgcgacgccgtttgcgaggctatcgaaagcggaaagtatgacatggtcattctcaatttcgccaactgcgacatggtcggccacaccggtatattcgacgctgcagtcaaggccgtcgaaaccgttgacgagtgcgtcgggcgcgttgttgcctccacccttaagatgaacggtgtggctctcataaccgccgatcacggaaacgccgactgcatggcctccgacgacggaacccccttcaccgcccacaccaccaatcccgttccctttattgtttgcggtcttgactgcaagctgcgcgagggaggacggcttgccgatatttctcccacaatgcttaaaatcctcggccttgaacagccgaaggagatgacaggagagagtatcattgtcgactgaaagaagaaagaaaaaaccgcgcaacgaaaagatatggatttgtgtcgccgtttgcgtggttgccgctcttttgatttttgccatagtcaaaatgattgccaaaaagaaaccgcaaaacggcggggacgatttgtcgtccgtttcgtcggtctctgttgaaagcggcggtcaaagtgccgagacttcctcggaaatttctgaggaaggacagccctccgacggcgaaagctcggctgccgagtcctccgagcaggcagacagtaaggcgccgtcctcgtcatcgggcggttcctctgccgcagccggtgcaagtaccgctcccgccgcgagcgtttctgccgaaacgggcgattggatgctcagacttgcaagtgtggcccatccgctgcccgagggctttgtccagccgtcggtcacgtccattgacagccaaggacgcgaaatcgacagccgcattgtgggcgcttacaacagtcttgtaaacgccgccaaagccgacggtataaatctttatcccatttcggccttccgcccccacagcacccaggtttccctttttaacgcaagggtcgagcgggcgagaaacgagggctattccgaccctgtggccgaggctgcacgtcacgttgcaaagccgggaacaagtgaacatgagcttggccttgccatcgattttaacagcgtcgacgaggaaaatttcaaaaataccgccgaggcgaaatggcttgcggcccattgtgccgaatacggttttgtcattcgctatcccgaggataaggaatcggtgaccggcataatatacgagccgtggcacgtcagatatgtaggaacggaaaatgccaagcgcatgaccgagcttaatatgtgccttgaggagtatgtcgactatgtcggctcgggaaatagctaaaaagaaccgtaaaaaccattgactttttaggcaaaaagaggtataatttacacattatgttcggggctttgtccgcaaggttcaaagcccttaatagacgaaaaatggagggaacgccaatgaaacgttcaggtagagttacctttgtcgttgttgcgctgctgatatttgctttcgcctttgtttcgttcttcggagtgagcaactactacggtgatacaaagcatgttatcttcaagggcaccgacgatattaggtggggaatcgacatccagggcggtgtcgaggccatttttacccctgacgtagcggaggatgaggtttcgggcatcacggccgaagaaatggagtctgccgaaaccattatcaccaaccgtttggtaaacaaaaacatcaccaactatgaaatctataccgacaacgagaatcatcagataatcgtcagattcccgtggcagtcggataacgaggactacaatccccaggacgaggtcaaggacctcggcgagaccgcgcttgtcaccttccgtaagggtcagcaggacgcaaacggagacataattctccagggcgccgccgatgttgaaagcgccaccgccagctatgacgcgcagcagggattttatgttgctctgaacctcacaagcgagggcagttccaaatttgccaccgcaacttccgagcttcagcaacagtacatatccatttatatggacgatcagtgcatttcggctcctaaagttaattcggttatcacaaacggcaaagccatcataaccggtatgcagaacgccgacgagtccaaggctcttgccgacaagatcaacgccggttcgctgccctttgctctgaccattgacgataccatccgagttatcaatccgaccctcggagaggcttcgctgagcgttatgctgctggccggaattatcgcctttgcggccatcgtgatcatcatgattttaaaataccgcgttcccggatttgtggcttccattgcccttctcggtcagatcgcgggtatgcttgcctgcacaagcggtctgttcggcggggtggacagcttcacgctgacaattcccggtattgccggtattatcctttcgataggtatgggcgttgacgccaacgttcttacttccgagttcattcgcgacgagctccgtcataacaagaaaacggtggacggcgcaatcgacgccggatatgctcacgctttctcggcaatcttcgacggtaacattacaaacattatcgttgccatacttcttatgggcgttttcggacccagcgacggtctttgggcaaaaattctttatccgattctttggctctacaaccacaccgtcggtcttattcccggtcttgcggtcaacaactccatcaccggttcgatatactccttcggctacactctgctcataggtgttatattcaactttgtcatgggcgttttcgcctcccgcgttatgcttaaaggaatttcccgctttaagttcttgcgcaagcctactctgtacggaggtgtaaagactgatgaataaagaattcgattttattaaaaacagaaaggtctgcgcgattattgcggcctgcgttctgctcttcggtcttgttttcaacatcattttcggtgttaagctggataccaactttaagggcggtacgatttacacctattccttcaacggcgaaatggatgaggacggcgttaaggccattgctgccgacgttctcaaaaccgacgcatccgttgctttcagcaaggagctgaccggcaattcaagccaggtcaccattaccaccaacgaaattcctcccacggtgctcacctattcctacacggccggtgagggtgctgaggcaacggtagaggccgacaaggctcagaccgtggcaaaggacaccatcggacaggacgcaactgccgaaatcgtggacggaaagcttgttataactcccgccgacggctcgagaatagcaaattcggttgaggaatccctgaccgacgctctgacttcggaattcagcggatacacattcaccctcgattcttccaacgacgttaacgacgttgccgaaaaacttcagagcgagcttgtaaattcctacggaaccaagcttgtctacgactatgcggccgacagcgccgaccagtcggctcttaaaaccgcttttgagggtgtgctcggatttgaggttaccgtaacggtggatgcaaacgaaaaaaccgttaccgtggttcccgccgatccttccgaatctaacggtgccttctccgaggacagccaggcggctttgtctgatgttctttcggaaaacggactgacccttaaggaagcccgctacaattccattaagcttatcacctccaatagtgttaagcccaccgtcggtaaaggcttcttcatcaagtgcatcgttgccatggtgatcggtgcccttatcatcacgctgtatgtttctctgcgtttccgcagaataggcggtctgtcggctgcaatgttcgcattccttgccctcattcacgacattctcatttcctattttgtctatgtcgttttcagaattccccttgacgataactttatcgccgttgtgctgaccattctcggttactccattaacggcaccatcgttatctacgaccgaattcgttccaacgagaagaaattcggctccaccaagacggtttcggaaatcgttaacatgagcgttaacagctccttcacccgcaacgtctttacctcgctctccacccttattgcggttgttgcgatctgcgtcattgccaagatcagaaaccttgattcgatcatcagctttgccttccccatgagcataggcatttgcgccggtttctattcctcgctcttcctctcgagtcccctttgggctttgtggagagagcacaagcttaaaaagcaggccgacaacggcggaaaaggcaaaaaataatatcacgcaattcggagcctcggtttaaagccgaggctcttttttgttcagttttgtgcgaaaaaagagcaacaaaaaagacagccgtttcatttgaaacgactgtctttttttatattttcatagggtcggatgtcgtccgatttatcagacaataccctgagccatcatggcgtttgcaaccttttcaaagcctgcaatgttggcgcccatgatgtagttgccctcgtggccgtagcgggctgcggcgtcgatagcattgttgtgaatgttgatcatgatgttgtgaagctttgcgtcaacctcgtcgaaggtccaggacagtctctcggagttctgggacatttcaagagccgaggtggcaacgccgccggcgttggaagccttgccgggggtgaagatgaggccgccgtttacgatgatgttggtagcctcgagggtggtgggcatatttgcaccttcgcaaacagccatgcaaccgttcttgacgagaagctttgcgtcgtcctcaagaagctcattctgagtggcgcaggggagagcgatgtcgcagtttacgctccaaacgcctctgccctcggtgtacttggcgtcgccgtgatagttgaggtaatccttgattctgccgcgcttaacctctttgatttccttgacggctgccaggtcaatgccgttttcgtcgtagatccagccgttggagtcgctcatggtgacaacctttgcgcccagctgctgagccttttcgcaggcatagatggcaacattaccggaaccggaaatggcaacggtcttgccgtcaaagcttgtgcccttgaccttaagagcttcctgagcaaagtatacgagaccgtaaccggtggcctcggtacgggcgagagagccgccgaaggtcagacccttaccggtgagaacgccctcgtagttgccggtaatgcgcttatactgaccgtagagataaccgatctcgcgggcaccggtgccgatgtcgccggcgggaacgtcgacaaactgaccgatgtgcttataaagctcggtcatgaagctctggcagaaacgcataacttcattgtcggacttgcccttggggtcgaaatcggaaccgcccttaccgccgccgatgggcagaccggtcagagagtttttgaaaacctgttcgaaaccgaggaacttaagaattccgaggtttaccgaaggatggagacggatgccgcccttgtagggtccgattgcgctgttgaactgaacgcggtaacccttgtttacatgaaccttgccgttgtcgtcaacccaaggaacgcggaacataacggtacgctcgggctcgacaagtctttcgagcagggagcactcctcatattcgggatgagcctccacaacgggggtcagagattcgagaacctcggtagctgcctggtgaaactccttttcaccggggttttttgctttgagttcttcgagaactctttcggtatatgacattataaacactcctttaagagatttttgacagtataaattatattgctaaaggtaatttttttcaataggtttgagtataaaaattcatgttaaacgataattttaacattttattcattaaatattaccttgcgtatacaaaattttacacattaaagcggaaaagaacgatgtctccgtccttgacaacataatcctttccttcgcttcgcaaaaggcccttttcctttgccgccgccatagagccgacctccataaagtcgtcatagccgatgacctcggcgcgtataaagccgcgttcgaaatcggaatgaattttacccgccgcctggggagctttggtgcccttcttgattgtccaggctctcacctcgggctttccggcagtcagataggaaataagaccgagaagcttataacaggccgaaatgagcctgtcaagacccgattccttgagcccgatttcttcaagaaaagccttctgctcatctcggtcgagagaggcgatttcggcctcgatctcggcgcaaaccggaacaacgcccgcgccctcctcggccgcaattttcttgacggtctgataatgcttgttttgctcgagatttcccgcaatctcgtcctcgcccatgttgcaggcataaataaccagcttatcggaaatgagggcgacctcctttatcatcttgtcgccgtcctcgtcgcggtcaaatgaacgggcggtttttccgctttcaaggtgggcataaagagcctttaaaaggtcaacctccttggcaagcgatttgtcgcccttcatcatctttgtgagtcggtcgatacggcgttcaagcatttccatatcggcaaaaatcagctcgagatttatggtttcaatgtctcttgcggggtcgaccgaaccgtccacatggacaatgtcgtcgttttcaaagcagcggacgacatgaacaacggcgtcaacctcgcggatatgggaaaggaatttgttccccagtccctcgccctttgaggcgcccttgacaagacccgcaatgtcgacaaattcaaccgttgcgggggttattttatcgggattgtggattttggcaagctcgtcgagacgtttgtcgggaacggcgaccatgcccacattcggttcgatggtgcagaagggaaagtttgcagactgggcgcccgcattagtgatggcgttgaaaagagttgattttccgacattcggaagtcctataataccgagtttcatttaaaaagctccttaacaattctttgacttgtaagtttttaacctaataattataaaccatttttccgccgatttcaatatttgagcataaaaaaacaccgtgacctcgcaagaaatcacggtgaataaaatttacttatgctttttcaacggggaagttgggaatcttgtctacggcgcgctgaagaatgagaagagcgtcgctgacggcgatgctgccgcttccgtcgacgtcgccggccttgacctgatcctcggtaaaggtgatctttccgacggctgcctgaagggcgagaagagcgtcgttaacggttacgttgccgtctccgttaacatcgccgtatacaatgggagaggcggcctggaattcaagaccgttgtcctcggcataggtctgggcatagctgccttcaataccgatgatgacgataccgtcgatgtcctcaaagttgtttgcgccgatttcggtgacctgctcgccgatggtgacggtcttaacgtttttgccggcaaaaacgccttcggcaattttggtgacctgagaggggataacaacatcctcggaggagccgttgtatttggtcagagtgtggctgtcggtgggatcatagctgaaatctctcgcgggagtccaggtgagggtctcggcctgatagggagtggagcccttggtaattctgataccgtcaaagtagatgctgacatcctcgggctgaccgccgtcgttgtcgggatcgtgaagtccaatcatttcgaaacgaatacgctgagcgcaggaaagagcatattttgcatttgcgctggtgtcaaatccgtcggggttgatgccgccgtcgggaccgtattcaaactcggttatcggaacaacaacatgataccatgtctgacccttaaggctcagctttttacggtcggcattgtagccgtgccatgccttaacgtcgccgcacatacaaattgagaaattgtcgatgtccatgtcatattcactggccatgtcgaattccacaaagttgtagccgttttcggtgattttaacgccgtatttgccaacgctgtcaaggttgtcggaatcctgcttgatgaaagctccgtcctcgtcccaaacaaagttgtggaagaaggtgagctggtttgtgaaggcaccgctga

SEQ ID NO: 2711 - DNA, 3180 bp, Unknown
  16S sequences of unknown bacteria
gacgagcttgttgatgatctccttcacgggctcgacgtcgccggcgctgaacagctcggccaggtactcgagcgggatgcgcatctcgtcggcctcggccatgttggcctgcgcggcgaggttggtgaggatcgggctcatgggcggcacgtaccacaccatcggaagcgtgcggtactcggcgtgcagcggcagcgcgagcccccattccttgatgagcttgtagacgggagagtcctgcgccgcggcgatccaggacgcgggcaccccttctgcctgggcagaggcgatgaccgcaggatcgttcgggtcggcgatgacgtctttgatggcgcgccagatctgcttggggtcctcggtggacgccgcgtccttgaccttgtccatgtcgtagagcagcacgcccatgtagcgcaggcggccgacgcaggtgtcggagcagacgctcggcatgccgctttcgaggcgcgggtagcaaaacgtgcacttctcggacttgttggtctcccagttgtagaagaccttcttgtacgggcacgacggcacgcaggcacgccagccgcggcaggcgtcctggctgatgacgacgacgccgtcctcgtcgcgcttgtagatggcgcccgacgggcacgcggccacgcacgcggggttcaggcagtggttgcacacgcgcggcagatagcgcatgaacaggtcttccatgtccatcttgatcttgcgcccgacctcgttggaacggaccaggtcgtagtcctggcgcgcgtagtcggtaccggccaggtcatcgtcccagtttggtccccactcgatgtccatgcgctcgccggtcatgagcgagcgcgggcgggcgacgggctggtgctcgcggcgcttggacgtcgtgagctcctcgtagtcgtaggtccagggctcgaagtagtcgtcaacgccgggctgctgcgggttgtggaacaccttgagcaggcggacgagggcattgccggagcgcaggcgcagcttgccgcctttaagctcccagccgccgcgccacttgtcctggtcttcccagccgcgcggatagccgacgcccggcctggtctcgacgttgttgaagtacatgtactcggtgcccttgcggttggtccacgtgttcttgcaggtcacagagcacgtatggcagccaaggcacttgtccaggttcatgaccatggagatttgggctttaatcctcaagccaatcgacctcctccatcttgcggacgacgaccatgatgtcgcgctggttgcccgtcgtcccgtagtagttgaatccgtagctgagctggccgtagccgccgatcatgtgcgtcggcttgacgtggatatgcgtcgggccgttgtggccggagccgcgtgttccaacgaggctcgtgccgggcacgttgatgtggcggtcctgggcatggtgcatgtacatggagccgcgcgggatgcgggccgtggtgacgacgcgcgccgcgacgacgccgttgcggttgtagacctcgagccagtcgttgtccttggccccgatggcagcggcgtcttgctcgttcaagaagacggactggccgccgcggaacagcgtgagcagctgctgcgagtcgaagtacatggagtgcgtggaccacttgttgtgcggcgtgaggtacttgagcgcgatctccttgcggccgcttccgtcgtgcgcgagcttgagcggcgtgtagtcgaggatcggcttgtacgtggcgagcgcctcgccgtactcctgcacgagctcgtggtccaggtagaagctctggcggcccgtcacggtgcggaacggcagcttctcctcgatggagagcgtgaacggcgtgtagcggcggttcgtgttggagccggtgaaggcaggggtcgtgatgatctcctgcggctgcacctgcgtggccttgtaggtgatgtggtggtcttcgcgcccgcgggcgaggtccgcgaggttgtcaaggccgctgttctcctcgagcttctcgaacgccttgacggcgaccttgccgttggaggtcgtggacatggcgagcacggcgtcgaccgcgtgctcggcctccatcagcgagggcatgccgcacgagacgaggtccttgtcctcgatgagcccgttgcgcttgccgatccactcgtattcctcggtctcgtcccaggcgtagcacttgccttccgccacgttggggccgagcgcgatgtacttgtcgtaggtcttggtgtagtcgcgcgtgacgtgcaccaggttgggcatggtcttgccggggatgggctcgcactcgcccttggaccagtcgagcaccctgccttccggctgcgcgagctcgcctgcggaatcgtgctgcaacggcatcgcaaccacgtcctcgagcggctgcaggtctgcctccttggcgaccttggacacggctgacgcgagcgtgcggaagatgtcccagtccgtgcgggattcccagccggggttgaccgccgggctgaaggggtggatgaacgggtgcatgtcggtcgaggagatgtcggtcttctcgtaccaggtggccgtcggcaagatgacgtcggagtacagcggcgtcgtggtcatgcggaagtccaggctcacgagcaggtcgagcttgccctccgtgacctcggggcgcaccttgatctcttcgggctgcgccgccatctgctcttgctcgtacacgccgtgcttggtgccgagcaggtacttgaagaagtactcggagcccttcgcggaagagccgagcaggttggcgcgccacacgatgaggttgcgcgggaagttctcgggtgcatccgggtcggcgtaggcgaagtcgaccgccttgtccttgagctgcgagacgagatgcgccttgatgccctcgtcgtcgacggcaccggcggcgcgggcctcctcgacgatcttcgcgccgggcttgttgaaggtcgggcacgccggcagccagcccagacgcgccgccatgacgttgtagtcgccggaatggtggtagcgcggcgtgcgcagcgggctcgtcaggtcctcggtctcgatctcgtcgcttcgccactggtcggtggcaaagtagaagaacgaggtgccgttttgcaggcgcggcggattctgccagtcgcccgccgtcatgacggtcttccagccctcggccggacggagcttctcctggccgacgtagtgcgccc

SEQ ID NO: 2712 - DNA, 1947 bp, Unknown
  16S sequences of unknown bacteria
cataagccttagtagtggcattagcatgttcgcgcgggagaggtagacgcggggaattcggcttaaatcggttgtactttgtcgcgcatggtcgagaataccaaatcaaactgaattggagtaggctaaccgcggattgtcgttcatctgtgcgctgacggagagaaaaacttgtgattccgtttagcttccgtagaagaaccaacgaacgtgcagtaaatttcagccaaataaacagacgcggtcattctaatgccactactaaggcttatgcgttatcgcgccccaaaactcaccgcgcgcacattttatgctccactactacggattatggaaaaccgcgcgactaatcggtaaaaatgtgcggagacaaaagctcattgctaagccatactccaccggaagccggtactcgcagaggggtggcgtttgaacccctctgtgcgccctccgcgtaggagcatacaatgaaatcgaaaagacggcagtcttttcttctattttcttcacttaaagcctaagtgaatcttcaccgaggggaagtctcttagaaggcgcaagtcgtctaaggtagaaaggagcttacgctcttttcaatttcccgcaacatagcgcgccgcttccgccgaagccttagccatagcgtcccgcgcactgtcctccgctatgtagcggtaatacacatacgccccgaggaacgtgtctcccgcgcccttcagccttgctactttcacggaagtagtcccctgcgtgaagacctcgctgcccgagcagtacatcgagccgtctcccgccatcgtcattatcacggagccgaacggcaacgccttgcacgccgcacgaagctcgttttcggaacgcactccgtccttggcaaagcaagcaaactccggtctgagggatgagagaagcccgcttagctccgctgagttcggttttatcagatccgccgcgtcgtcctcgtccatcttcgccgcttctatgagagcctcgccgtcgcagtcgagaaccgcaattccgccgcgccttctcaccttcttcgcgagatgtgcagggtaggatttctccacgcccgcgggaacgcttccgcagatgcacacgacgtctccggggagcaggttgtcgagcactctttcttcaatttccgcaagctcgtcctcggtgagaggtgcgccgggtgcgtttatctcgatttcgcgtccgtggtcggggatgagggaagtgtttactcttgtagagccggaggtttcgaccgcgccgtttgtgtccatgccctcgttttcgagcaggtttcgaagcagggttccggtttctcccgcgcacgggaacactgttttgagcggcaggggagtttcgttctcgtcggaaaggcggagaatagcgcgggagacgttgatgccctttccgcctgcggtaacggtatgagaataagtgcggttcagtcccggctgagagcctgcggagtggtattccacgtccactgcgggagcgagagtgagagtaatgatttgattcatagtcttaccttttagatacgcaatattttctttaagattatcaaatttggtttttcttagttttttttagatttcaagaaagagcaaagcaattttcttttccttagactacgagtgtattctaagaaacttcatgtctttcggaaagacgtaggtagaaaagactaacgtcttttgatttattaaatcgactgcggtcgaggggcgccactacgcgtggggcgcacaaggagactcagacgccgtctccttgtgaatctacgcttgcggtggagtttggcggatatgatttactgccgtcttcgcccgaattaacagctcagtcgcgcggctacgcataagccttagtagtggcattagcatgttcgcgcggtggagtttgacgcggtgaatgcactgaattcattcgtttcactttcgcgcggagggt

SEQ ID NO: 2713 - DNA, 32759 bp, Unknown
  16S sequences of unknown bacteria
ggtcggggccgccgtgggagccgcggtcggagccggcgtgggagccggagtgggcgccactgtgggttccgcggggatttccaccggcggcacttcctgcgcgggcacgccagaatctgcggcgggcacttcttccgccaaagccaccaagccgctgagcatgattgccagcaccgtgagccatgcaaaaaccttcagcaacgtctttttcatcctttttcactccttgtcttatttcaaccgttcagctctgcaagagcgaattgtcatcttacagggattattttactgctggacagttacctggccggttacatttgcggcccaagggaagtttttggatgaaaaagtgcgatttaacttacaattaacatcaggccttctgcgcagctctttatcgcgctaacgcaagcttctttttcattattttacagtttcttgcgcggtttcttctgttcgcttttcgctgctgagcgggccgacgcgataattgaacgccacattggaattgggatacttgcgataaaacaaccgtttcaccctttccattaccatgttacctgtggtgtaattcacactgggcaacaacaacgcgaaaatggtgggcgaaaagtgggtgatggtgtcgcccttgcggagattttgcttgaggatttccaacaagccgctcatgatattgtcctgcttgatgggctccatggcctggccattgagcgcgctcaccatgatgacggccaggaacatggtggaacccaggcgctccaggttgcgcatttgcaggttgaaaatttccttaaagacagcgtattcgcaaacgaacgcgccgcgctgctcgccgctttcgcgcagctcgttgcggatggattccagattgaattccagggttttgccggcatgaacgatttgcttataaaattcctgcatatcgtcgctgggctggatgcccagatagcggtagtgcaggtggatcacatgcttatattgcaccagcgcctcgctggtgcggttggtgcggatgagggcggtcatcagctccatgtggagccggtcgtcgaaattgtcgacatccagggccgcgcggcaaacgttgacgatttccttatggttctcctcgtccttaaggacgtcgatataggaatacaccgcggccatatattggttgtgcagcgcggtggcgcgggccagcgcccattcggcgggctcgccattttgcaaaaggtcgccgaaatacagtttcatcagccgcgcgtattgctccttgtgccaggcgatatcgccattgtgcccagagagcgcggcaaagatatcctcaatttcgtaaacgtccaccgacatgcccggcaatagctgccagtggtaagcgttgcgatccgccacaatggcctggcccagcccgggcgaaagctggttgagcagcgcgcgcaggcggctgaccagcgttttgagcgcgttttcgggattggcgctcttctcttccgaccacagggcagccaacaggcgctggttgggcaccggctgctcgcggttcaaaatcaaatattgcatcagcgccacgcccttgcgcgatttgttgaccatatggtccgcctgaatttcgttgatatagatggtgaaggtgttcatcatctgaatgcgaatggtatcgcccatggtttctttctctccttgccgctctggcccctatttatattcgcctgcccagcgcgtcgggattggtggcgtagcgcagcgcggtttcccgatcgatcttgcccgcgcgcaacaagcgctccaattcgccatccatgctgagcatggagcgatccgccgagccgccataaattgcgttatcgatctggtgggttttgccatcgcggatcatgttctgcaccgcgggcgtgaccgtcatcacctcgaaaaccggctcctgcccgccgccgcgcaccggcaccagccgctgcgaaaccaccgcgcgcagcaccatggaaagctgaatgcgcacctgctgctgctggcccggggggaaggtgtccacaatgcggtccaccgtcttggccgcgcccaccgtgtgcagcgaggaaagcagcaaatgccccgtttccgcggccgtgatggcggtttgcatggtttcgtgatcgcgcatttcgcccagcatgatcacatccggcgcttcgcgcagggccgcgcgcagcgcgcgctggaaggtgcccgcgtcgttgggcacctcgcgctggctcaccagcgattgcttgtgggaatgcaggtattcgatggggtcttcaatggtgatgatgtggccgccgcgcgtggcgttgatgcggtcgatcatgcaggccagcgtggtgctcttgccgctgcccgccgggcccgtgaccaggatcatgccgccgcgcatccccgccagcgccatcaccagatcgggaatgtgcagcgccgcgggatccggcaggccaaacgccaccacgcggcacgtggccgccaaagaaccgcgctgccggtaagcgttgcagcgaaaacggctcacgcgcgccagcgaaaaagaaaaatcatcgtccccgccctcgtcgagcggcgcacgactgcggttccccgccaggcgataggcctcgtccaccaggcgctcagtgtccttgggcatcagcgtttcctccgaaatggccaccaacgcgccccccaccttggccgtggcgggcgcgccggggatgaggaacagatccgaaccctttttctccaccgtgcgcatcagcaaatccaccagttccatgccgtcctccgccctccttgcgctcattcctctggcgaagcgttcagctccgtcaccagccggtgttccaaccagtccagccgcgggaactcgcccgcgggcgcgagcgccgccgcgcaaaccaaagaccggccgtcctccgcggattccacccagcgcacgacgcccgcctccgcgtccagcgtcatgccctccggcagcgcggcagccaccgccgcccggtacgccgcttcgccctgatccgtgggcgcggcggccagcgccgcgtccagcgccgccagcgattcttccgcccgcacgtccaggcgagccaccgattcggccacgcgcgcggcgcgctcgctgaggacctcgtccccccgcgcgctcagcagcgtgagcacgcccagcgcgctcatggccagcaccacggccaagagcgtgatcagcgccgcgcccggcccaaagcgatacttgcgattcattgcgccgcctcccccggaagatagcgcgccactggcagcgtgaacaacgccgcgtcgcccgccgtggcggcgatttccgccgtttgcatcgtgcccgcgggcgccgcctgcgcgtccagcgaaacggtcagccgccagccatcgccttccagcgcccagccgccttcttccgaaaagcccagttcgcgcagcgcctgctctggatcaacagaagcgcagagcgccgcggccacgttctgcgccccggcaagcgcctggtcgcgcgcgtccgcccggctggcctgctcatacgccgcggaaaaacagcgtagaatcaccgttgccgccagggcaaaaaacaaaatcgccagcaggatctccaccagcagcgcgttcacccgactgctcttgcccatcgcttcctcctatcccagcgcgcgccggcgctttttcctattaaatatatgcggggcggccctcttgcggaacaagcccatcagcccgcctacagcgccgctttgggcgcgagcagcacctgatgcgccgcgccatattcatccaccagttccacggccagcgcatcgcccacgcgcgaagccgacatggcctgcgccgcgcacagcgcgccgcccgccgcgggctcgaaaggccgctgggcggaaataaacagctcgcgcagcgccccatcgtacacatagagatagcggatgtattcctcgccatccaccgtactcgtaaagcacaacgcctgcacgccatccagcgtttccaccgaaagcgcgccctcggcatcggaagcgcgcacggcgttgcgcaccatggccgtgagcgtgcgccgcgcgccccgttcctgcgaatgcgccaccaccgagcggtaggcctgcgcgccaaacagcgccaacatggccgaacacacagcgaacacgcccagcagcaccaacgcgaacgcgccggtgatcgcatggctccgctcgcgcctcatgcgcccgtccccctctccagcacccggatatccggcagcacattggaggcaaacgcatcgtacaccacgatgaagcgctccgcgttgtaccgcaggccataatgctgcgaaagatagccaagatccgccggatacgcgccttccacggcatagcacgttagcgccgcggaacgcaccgccgagcgcaccagttccgcttccgcctcgcccgaagcgccggaaatggaatccaccagcgcgcaccccgcgatgaccagcgcggcaaataccgccgccgtagccaacagtccgcgcgccaagccgctcttgcgccgctccatccgctcacctccaccgctttttgcccgcgcttacatcaggctcgtcaacataccggccatcggcaacatcaccgacagcagcaccgcgccgatcacaatgcacatcaacgccaccagcgtgggttcgatcaccgaaacaagcccgtcgattccatcttccacctgttcttcgcaaacgcgcgcgatgcgccccattacctggtcttcgcggccagcggcaatgcccatgcggatcatgcggccatgcaccgtgccaaacagacccgtgccagaaagcgcgtccgcaaacggttcgcccgcgtccatcttggcgcgcgccgcgtccagcgtctggcgggccgcagcgtccgtcagcaccgagctggccaactccatcgcttcgtccggccggaagccgcccgaaagcgccatggccaacaccgaggccacgcgcgaagccgaaagccggccgctcagccgctgcactggcgggaaacaccgccgcagcgcacttagcacccgctcgcgcagccgcgtgcgcagcaagacagccgccgccagcgccgccgccagcagcagcgccaccagcgccagcaccgcccagcccgcgcccgtgcccagccgcatcagcgccaagcccgcttccgtcatccccacgcccatggagcccagcacctggcggaacaccggcagcaccttgaggatcatcaccagcacgatcaccaccagcatcgcgcccaaaatcatggggtacgccgccgcgctggcgacagcctcgcgcacgcgggcttcgcgctcgtaatacccgctcagtccctccatcacttcttccagccggcccgtgcgctcgccaaccgccgccatgtgcgccagataccgcggccagcaatcgtccgccccgagcgcctcgccaagcgaaccggttttggcaatgttctcgctcaaccgcgcgtacacttccgcctgcgggcccgcgggcgcgctttcgtggagcgccgctatgccgtcatacagcgccatgcccgagccgagcatcagcgccacctccgcgcaaaacccgctcagcaccgttgcgtccagctttttcgatcgtccagccatgccgtcaacccttcccttcaaaatccgcccagcgcgcgccggttgggattttcggtgttttcttcccctcaataaaaacgttctgtggtgtataccgctcccgcggcaatgccgttgacatccaccgtgggatcgtagagcacattgccttcttccagcagcacgacggtccacgcgtgatacacattgcccgcgtagccgacgacgaattccaccggcacgccctgcgagcgtagcatggccgccgccatcgccgccaaatcctggcaaatgcccatacgcgattccatgcagccttcaatatcgggcatttgcccgggcgtggtcgtgaccgccttgatgtaatcgtacaaataattttcctggatgtacgcgcgcaccgccgcgagcttctccgcgccggtttccagcccctggcacagttccgcggccaccgcgaccacctgcgattctggggtgaagttcacatattggttgggacagaggaacggcgcgttcacatcccccaattccacggagaacgacattcccccggcctgcgcgtaactgttgccggtaacgttttcgtatagcgtccagctgtattttccatcgcccaactgcaaggggaacacctcgtattcgccctcgccattcaaatcgtatgtcagcgtggtatcgcctttggaaacgcgcaatttgaggcgctttgaggaagaggcacgggccagcacatagccctggctggcgtgggaatagtccatcgtcaagctcccgtcggaagagacgcgatccccctcttccggccatatcacgccctccagcagcgcccacgcaccgcacgccaggcaaattcccaccaaaaccaggcccagcgcccgcacccaggaacggcgcgcgcgccggtacgcatacctgcgcaccggatacctatgcctcgggtacctatgcctcgggtacctacgcatcccgtcccctcccgatttttcttttgtatccactcaatggctttattttaccataaatgccaacgcgtgacaagtccctgcgcagccgtcgcgcgcacagccagttatatattttttgttttcgttttgcgtttgagcgcattttcccgttttttctcgaaaaagcggaaggaaaactccgtgcgcaagtcgaattgtattggcactcgctgattctattgcgcgcgccgcatggagaaaggagcgcaatcatgaattcctccccaccaaagcgatcgccgtttttgccatggatgctagtagccgcatgcctggtcgcattcggcctggcggcctatggcggatacaccgcccgcatgagcgattcttatctcccgccagccgcgcccgccacgctgaacgagggctggacggtcattaccgaggacggagcgcgcacgctcatcatcgaaaacacgctgcccgccatcgattgcagcgatacggtgctggccttccttacccgcagcgaagggatcattgcccgcgtgaacgaccaggaaatttaccgctatggcacagaaagcgaaaccgccctgggccgctattggggcagcgtatggtgcatggtgccgctggacgagagctacgcgggccagcgcgtttcgctggagttcatcgggcggtacagcaattctgccacggattccttcaccttttatctggatgagcgcagcgccgtcgtcttccacatcctcgtggcgaactttttcctgctgagcaattgcctgatctgcctgatgatcgccctatgcctgttggccagcgcggcccatcacgcgatattgcgccggacggacagcgccgcgcggctgtatttgggcacgctggtgttgctggcgagcgtttggggctttacggaaatgaacctttcgcaattggtgttccaccagaaagccgtcggctacctgctcaatttcgtatcgtttttcctcctcggcgcgccgttctcgctgctgctgggcgaactgctgccgcgctttgcccgccgcttccgcgcgtttgccatcgccttcatcgcgttctttctgataaccacagcgctgtacatggcgggaatcgcgagcccgacggatttgctgcccgtcgaacacattatggtggcgctggtgacgctggattccgtggccgtctatgtgcgccagttgcgcgataagcgcggcaatccggcgctgagtaccggcctggcggtctttgccgccctggcattcgccgtactggtctggcactatgtagcgccccgcgcgcggatatggatcctttcgttcaccgacctgattatgattggcgcggatatcctgattgtgctgttccacatggcgatcgcgcgacagggcgcgcgcgacgctggccgcgcgcaaatgttccaacgccaggcgtataccgatgccatgaccggcgcgggcaaccgcgccgcctttgaaatgcgcatggaaatggcggccaaccagccgcccgagcagcgcgcgctgttcatgctcgacctgaacaacctgaaaagcgtaaacgatacccttggccacgaaaccggcgaccaattgatccgctgcctggtggaagtgctgcgcgaggcctttggccgcgatggggaaatctaccgctatggcggggatgaattcgtggtggtgatggaaggcgcggaccaggcgcgcgcaacgcaggcgcggaacgccctggagcgcgcgatcgatagtcataaccggcgcggcggttgcgccatcgatacggccattggtctcgctgtggataccagcgccagcggcacgcccatccgcaagctgctgcacgaagccgacgcgaatatgtacgccgccaagcagcgccaaaagaaagcgaacgctctgcctcatatgccgccgcgcgcgctgcgcctgcaggtggatccattgacggggctgatgccgtttcccgccttccgccagcgcgtgttcgagcggctttcctctggtagcggcggggcttatgccattctcagttttgacgtcaaccatttcgacggctacaaccgtctgttcggttgggaagctggcgaccaactgctcaaacgaatggcggaactggcgctggcgctgtgcgcgccggacggattttgtgcccacggcgacgccgattccttctgggcctttgtgccgtttgacgagccagaggccgtgttccgctgcatccgcgaacaagcccaaaatttccacgcgccctgggaagaactccatttgtttttgagctttggcatctacgctgtggacgacgtccgcctcactgtcagcgaaatgtgccatcgcgccgatctggccaagcgctcgatcaaaggccggttcgatcagctatacgcgctgtacgacagcgcccagcacgagcggcaaacgctgaacgcccgcctgctcggctacatgcaatccgggctcgcgaaagaggagttcgcgccctattatcagccctggttcgcgccggatggcgtgcgaatcgtcggcgccgaggcgctggtgcgctggaagcatgacgacggcacccttacgccgcccaacgatttcatcgaactgtttgaaaagagcgggctgctgctctcgctggatttgtatatgttcgagcacgtgtgccgcgcgcagcgcaagcggctggaccgcggcctcgcctgcccgccggtttccgtcaacctgtcgcggttgcacgcctacacgcccggcggcgcggcggagttccgcgccatcctcgaccgctgccagcttccgccccaaatggtctgcatggaactcacggaaacggccttcatcagcgaaaccggacgcatggccacctttgtggaagaactgcgcgccgcgggcttccgcgtggcgatggacgatttcggttccggccaatcctcgctgagccaactcagccaactcaatgtggacatcatcaagttcgaccgcgcgttcttgctggaaagtttttccagcaagctgggccgcgtgctgatcgaaagcatgctgctcatctgtcagcgccacggcataaagaccgtcgccgagggcgtcgagcggcccgaccaactcgccttcctgcgcgaacacggctgcgacgccatccagggcgacctgctcgccccggcgatgcctgcggaagcttacgagcagctgctcgctcagcgcgaaacgtgacgcatttgcgtgaaaataatcggttttttggcttctggctcttgccctttcggggtttatcgtttataataaaatataatgagggagagttttactatcctgggaagagaggcggacggacatgtcgcaatgggatacgaaaggcctggccggacaggcggatgctttccggacgctgctgcggcgcttgccgggcgtgtacgcggccggccctcggtttgacgagaatggcacgctcagcgaaattcacgtgctcgcttcgcttgcccgcagccccaagcaggtagtgcgcgatgtacaatccgccatcttcgccgcctacggcatcgaagtggatcatcgcatcgtcagcgtggcgcagctgccggaaaacccgtttgccaacgacgaggacgggctctcggaagaagaacctcccgcggaagcgccggcggaaagcgtgcgcttggccgtggtgggcattgattcgcgtctttcgctgggcgaatatgccgcgaccgtgcgcctagcctataacggccagatttttgaaggcgtggcgcgttgccgcgacaccgccattcaacgcgatcgcgcccccgcgcaggccaccatcgacgctgtgaacgccttcctcggccacgaagcctacgcgctgctagaagtgaaacgcacgcatttgtggagcgagcccgtggcgttgacggcgctggagctgattgccgaccgcgaaccccgcgtgctcatcggcgcggcgctggaaggcgtgaatccaccgttgggcattgtacacagcgcgctcgacgcgctcaatcgttcgctcggccgcatgcgccgggtggaagagcaaaaagcttaaattcctttttcaggctcgccgcgcggtttttctggcatactctagcgaagcggaaaattgcgtgtctgctagcgaatgacacagcttcccaatgagaatggaggctgaaattcgtgaaaaaggctaagatcatggccgccctgatggcactggcttcctttgtgctttccgcgggcgcctacatcacctggaaaccctggtggggttaatggatgatctttggcggcgggcctgatgttttcccgcgttggccggcgcagcacgccgcgccagcaagggcaaccaaaaagcgttgtgcccaaagcgcgcctggaggcccgcgcagtcttcaggcatgctttgcggcggcgcaaaaaagcgagggtaccaaagtgaaaatacgcgcaaaggcttacgtcggcattatcagcgcgctgggggtgattggcaccctgtggtgtgtggccgcgtatttgcgccttttttttgccggcggctgggaggaacgcttgcccacactgctggtgatggtggtggtgtgcgccgtgtgccgttcgctgcccctgtatttccgccggggacaaacgctggatgtatcggtcatcagcgtgctggccatttatctcacacagggcgcctccgcggcggtaatggtctacaccctgagttctctgttcacctttgaattcaatccccacaccaaaaaatatgtgcattccttctccatcggcatggaaatcgtgctgttcaacaacgccacgattgtgctctccatcctggcgccagcggcgctgctgaccgcggcggattggtggcagccgggcacgctatccctaccaaatgcgctgggagcaacggcgctattttccctactgaccttcgccgtcaacggcctattgcagctcgcacggccctggctagacggacaggtgcacgcacgcgaagtgggcggcatgctgctaggactgctgcccaacgtgatcgccgcaatgcccgtgggctatattctggccattggctacagcacaccgaataacctgtggtttgtggtgctgatgatgctgccgctgctgctggcgcgatacgcctggaagctctatctcgattcacaaaacgcgcaatcccgcctgatcacagccttcatccacagcctagaagccaaagatcgttacacacagggccattccgcgcgcgtagcggactactgcgtggaaatcgcccagcaaatgcaattcccgccaggcaaattgcgcctgctccgccagggcgcgctgctgcacgacatcggcaaaatcggcgtggcagacaccatcctgaacaagcccgggaagctcaccaacgaagaattcgaggccattcaccagcatccgctcatcggcgtaaccattctgagcgatgtgggcctttcgccagaagtgctggaaatggtacgcagtcatcacgagcgatacgatggcaagggctatcccgatggggtgcgcagcagcgagctatcgttaatgacgcgcatcctctgcgtggccgacgcctacgacgccatgaccagcgaccgcccttaccgccaacgcttgccgcacgaagaagcgatacggcggctgcaggaaggcgctggaacccaattcgatcccgcggttgtggaggctatggtgaaggctgagcacgccaagaactgaccgcgcctgtgcaaaaaacgccatgcccaaggagggagtataccttgctgctggtttatggcattgtcgccgcgatcctcatcggctatctgatgggcggacgggcgcgcaactatctcgcgcaaccgctgcggggcgtgctgctgcccgcgctggcgctggccattgaggcgtgttttgggctgctcgccaagcgatgggagcccgctctgtggctcggctgggcaacttgcgcggaatacgcgctgctagccgcgtttgtggcgctcaacttccgccgccgcggcgcaaaattgctggcgctggcgacggcgctcaattttgccgtcatcgcgtgcaacggcttttccatgccggtcacgcccatcgtctacgactatcccgccctggccagtttgatcgaccggattgaagcgggcgcgttgcccgaatacgcgctggtcggctgggatgcgccgctgtggttcctgggggatacgattcctctgttcggcggcctggccagcgcaggcgatttgctgatggccgcggggatgttccttctgatattcgacctgttgcgccaaaaaccacccgcgcaaaatgggccgcctctttgaggagacggcccataaattgtttgcgccaaaatctttattgctctttgctcttgttgatcttcaccagcaccatacccgtgcggcagggagaataaatgttgaatcccacgcctttgcccggcacggtctgcgcgtgatacacggtttcgtggctgatgcggccctgcccgccaaagcaagcgtcgtcggtggagagcaccacctggtaatcgccctcgcccgtggtgttcgcgggcaggaagaaatccgtgggtgaatagctggggtggaaattgaaaagatagagcatgccgcctttggaataggcgagcagctttttgttttcatccatccacagattggccgcgtcctccttggaaaggatgcggtatttgcgcgcaaggcggatcatcgcctggtcgaaatccttcagccattcgtatttcagatagccgttgtcggccagcgaccactggcggcgggcgtatttgaagctccagccattgccttcgcgcgggaaatcgatccattccggatgaccgaactcattgcccataaagttcaaatagccgttgcaagcgagcgtcagcgtgaccaggcggatcatcttgtgcagcgcgatggcgcggtcgattaccagcgaatggtaggccttgtccatgccagtgtacatttccttatcggccagccagaagatcagcgttttatcgcccaccagcgcctggtcgtgcgattccgcgtagccgatcaccttttcctgcggacggcgggtggtgagttcataccacatgcggccgatgttccagtcctcatcgcgcttttgcacggtgctcacccagaaatccggcacgcccatggccagccggtaatcaaagccgatgccgccatagcgcgggctcaagcacatgcctggcatgccgctcatatcctcggcgatggtcacggcgaaggggttcacggcgtgtaccaattccgtggccagggtaagataggtcacggcctcggtgttggtgttcaggctgaaatatttgtggtagccatcgaaggtttcgcccagcccgtgatcgtgatacagcatggaggtgacgccatcgaagcggaaaccgtcgaaatggtattcctccagccagaatttcaggttggaaagcaggaagtgaatcacctcgtgcttgccatagtcaaacagcttggtgccccaggcgggatgcgtgccgcgcgtgtactggtggccgctcatatcgaaatccgcaatgccctcgcccgtgttgggcgccaggtgcgaatgcaccacatcgagcagcacatacatgttcatggagtgcgccttgtcgatcaggcgcttgagcccatccggatcgccataccagctggaggcggcgaagaaattcgtcacctgatagccaaaggacgcgtaataggggtgctcctggatggccatcaactgcacggcgttgtagcccgccgcggcgatgcggggcaggatcttttccgtgaactcatcgtacgtgccgattttttcttcttcctgcgccatgccgatgtggcattcgtaaatatacagcggattgattttgcgctttttgtagccgccatccgtccaggggaaaggcttggccggggcccagatctcgcccgcaaaggcgttggtcctttcatcctgcacagcgcggaaaatataggccgggatgcgctcggcgcgcttgccatcccgggtgaccaccacttttaccttttggccatgggccagcgcgtccgtacccgggagataaatttcccatacgccgccttccagccggtgcatgggatgggaatccggattccagccgttgaaatcccccatgaagtggagcgtgtccgcctccggggcccattcgcgataaacccacccgtccgccgtgcggtgaatgccatagtataagtacccattggcaaagctaggcaggtcgccatcttcgcccagcagctctttgagcgccttggtatggttgttcacacgcaacgcgatatcctggctgtagggcttcagccagtgatcgatggacaggattttgtatgtgcccgcccccgcacgctttttcacgcaatcacctcatcattttggtttgctattattataccgaaaaagcaacctgaaggcaattgagaaagtgcgtgttttcgtttataatttagaacaatcccgcgccgcgctgcctgaaaacgggaaatggcaagatttaccagcgcatgcgcggtgcgtgcgtgacaatttacgtacaaatctgttgcatatgctttgcgatattgcggaagtgtgctataatattggaatggagggatgggcatggaacggaaggttattttggcctcgtcgtcgccgcgacgcaaggagcttttatcgaaaatgggtgtgccctatgcctgtgtctcgccggatgtggacgaaagcttttccggcccaccctggaacgccgtggtggaaatcgcccggcgcaaagcgcgcgccgtggcggcaagcgcgccggaagcggttgtgatcggcgcggacacgctggtgtgcgtggacggcatggcgctgggcaagcccaaagaccaggcggatgccgcgcgcatgtgccacctgctctccggacgggagcacgatgtgtttacgggcgtgtgcatgatctgtggaaaaaaggaaatcgttcacttggaacgctcgggcgtggttttccgtccattggaagaagaggagatccaggcctatatcgcgacggacgaaccatacgacaaggcgggcggttacgccatccagggcacggcggcggcgtttatcgcgcgctacaacggttcttatgaaaacatcatgggctttccggtggacgcggtggccggcatgctcaaacagtttggttaaaaatcggttgggggttggaacatggcgattgcgggcttgaatcttggcatagacctgggctcggccaacacggcggtttgcctgccggggcagggcgtggccttgcgcgaggcgagctatgtgctcacgctggagcaaaacgaaaatgaagtgctcgccattggcgatgatgccaaggcattgctcggccgcaccgatgaggaggcggcgctgatcgcccccattctcgatggcgcggtggccgatatcgatctggcggccatgctggcgagcgcgctggcggaaaaggcgctaagccggcggcgcgcgctggaaaaggcgcgggccgccacggccatttcgccgggcgcgaccaaggtggaacgcgccgcgctgctgcgcgccatggcgctcacgggcgcgcggcgcacgctggtggtgaaatcgccagtggccgcggcggtgggcgcgggcgtggaattccacgaaccgcatggcgtgatgcagatcgtgctgggcggatccaccacggagatcagcgtgctttccctgaacggcatcgtggccgcgcgctccatgcgcacgggcggcaacgcgatggacgaggccgtggtgcgctatttgcgccgggaaaagggcatcgtcatcggcgtgcgcacggcggaagatctgaagatggacctgggcagcgccacggaacccgaggaagacaccaccgtgcgcgtgaagggccgcagcgtgcataccgggcggccggaaaccatcgaaatcaccaaccgtgacatttatctcgcgctgcgcgcgccggtggaattgctggtggacgcgattaaggacgcgctggccaataccccggcggagttggctggcgatctgatggataagggcatccatctttccggcggcggcgcgctgctttcagggctcaaccagcttttgcacgaggcaacgcagttgcccgtgatcaccagcgacctgccgcaggacgacgtggccatgggtctcgcgcgcatcagcgcggaagagcgcgtgatcgcgcgcctggccgccaccggcgcgctggtggaaggctagagcatcacatagaaaataaggggatttgtggcacatggctcgaaagaagcctcgttttaagcggcctggcagcgatttgccgcgcagccgtagcaagcggctgggccggtggatgatcggtctggccgtcaccatcggcgtggtgctggtggttttgttcatttcctcgcgcagcgcggggcaggtaaccgtggcggaaaacgcggcgggttcgctcctttcgccggtgcaaaacctgttcagcaatatcacgaaaggcgtgcgcgattggtttaccgaccggcagaccgtggccgatttgcaagtggccaaccaggaattgcaattgcaagtggataacctaaccatccaattgcaggccacggaagaagaacgccaggaaaacgaccgcctgcgcgcgctgttggaggcgggcgagcgctatgaggcgcaggatcccatctacgccgaagtgatcgccaaggatgtgggcgtgtggtttagcacgttcaccatcaaccgcggcacgttgcacggcgtgagcgtgaacaacgcggtgatcaccgcggacgggttggccgggcgcgtgtatgaagtgggcctgaactatgccaaggtacgctccatcatccattctaccagttcggtggcctgcctgatccagcgcacacgggacaatggcgttctcaccggccaggtggacgtcaccgagaccgacgaatgccaaatgaattacctgcccaatgtcagttccgtggtgccgggcgatacggtcgtcacttccggggtggatatgctcttccccaagggattgatggtgggcacggtgacggcggtgagccggcaaacggacaccacggacaaatccgtgctggtgcagcccgccgtggatttctatcatctggaagaagtgctggtgttgcgcgtggtgattcaaaatgacgaggcgctcgcgcccgtgcccacgccgtcgcccaagcccacggtcacgcccaaaattacgccggagcccacgctgcggccggggaccacgccggaacccacgccggacggcctgtggaactatcccacggccacgcccgcgccggaaacggtgcccacgcccgcgcccaccctgcccgaagaagcctgggcgaattcttagcggagggagggacgcgcgtgtttcgcaagctgtttccctggttcatcacgctattcatggcgctggtggatacttccgtggtgccgtttctcaccaatagcccgttcacgccgctgttttcgctgaccacgattgtggcgctgggcctgctgctgggccggcggcgcggcgcgctgctggggctgatggcgggcctggcggtggatatcctggtgaacgagccttatggcctgatgaccatcatcttcacgggcgcgggcttcgtttcgggctttgccggccgcaagttcatgaaccatatgtggacgaccgtgcttacgcccgtggcggtattcgccttgatggaagggattttgttcctgtatcaggcgttcgcgcgcgcggcggaagtccgcctgctggcctatggcgcggcgcgcgtgggcattcaaacggcgatggtgcaggtactctatttgctgtacaacgccattttgcgcccgcggctttcgcgctacggggcgcgctaaaaaaacaaaatgccattatttggaggtgaaattgctgtatgaaaccccaaatcagccgctgtgtgctgttttgtgtgctggtgctggccatattcggtgcgatgttcacgcgcctgggctccatgcagatccagcagcaggaggattatgtggcgcgcgcggaatcgcgctccacaaagaccatcatcgaaaccggcaagcgcggcaccatttacgacgccaacatgatcccgctcgcctatgaccgggaatgcttcgacgtgcagttttatcgcgacccgtcccgttcctcagcggcggaccgcgcggcgtacacgcaggccatcatctcggccatcgaactgatcgaggccaacggaaagaccaccatcaccgaattctggctcgcgcgggacgaagaaggaaactggcagttcgataccggctcttccaatccctccgtgcaggaaacgcgcatccgccagtggcgcagcaatttcatgctcaacaccgaaccggtggaggaactgttcgacacgctgtgcgaaaactacgccattccggacgatctggacgaagagatgcagatcaaggtgctggccatctggcaggcctcgcgcatgacgaacttcacctccagccccgtgaccatcgcctacgacgtggatttccagacggtttcggaaatcgaggcccgcgcggacgaactgatcggcttctccatcctggaaagctccacgcgcgtgtatccgcaaaaatcgctggccgcgcacgtggtgggctacaccagcaaaatcaattccgaaagcctggaggaataccaggccaagggctatcccaacgacgccatcgtgggcgcggcgggcatcgaatcctccatggaagatcagctctcgccctacatcgaataccggcaggggcaaaagtacgtggagatcgacacgcgcggcaaggcggtgcgcgagctttcctacaccgcccccacggacgggaactccatcgtgctcaccatcgattccaagctgcaggaggccgccgagcgctatctggagcgcatcatcgaaaccgtgcatgaagagcagctggaaatcatcgccgaccccagctggcagggcaccaaccgcgaaacgctcaaccgctatatcgccaacaacatcgaaatccagctggcgcagtccggcgccatcgtgtgcatggatccctattccggccgcatcctggccatggccagctatccggattacgacctgtccctcttcgagggcaccatcgatatgggcagctggacggagatcatctacgacgagcgcaaccccatgttcaaccgcgccatcggcgcgcgcgacacgcctggttccatttataagctggtcaccgcgctcggttcgctggtagagggcaccatcacgctggaaacgcgcatttccgacgaaggggcatttaccaagaccgacaccgtgcaccatccgcgctgctggatcaatcccagccgcatctcccagcacgccaaccagacgattgtggaagcgatctccaattcgtgcaactatttcttttatgcagtcggttataagctgggcatcacggacatcaccaagtgggccgcggcgctggggctgacctccaagaccaatgtcgagctgcccggcgaatccacctcgttcgtgggcaaccagcaaacgctctacgattcctcgcgcaccatcgccgagcaatacaccgataagccgcgcatcgcctacgagcgcatctacgcgcgcctggtggaggccggcacggcgcgcggcgtggaatacgacgaggaccagctcgaccgcgtaacccgcatgatcatggacgtggtggatctcgagggcaccaaagacgcggtttggcccccggccatccgcgaaattctgctgtatgaaatgggcctgccctcggaatacatcagccagaattacatggtcaatgacttctacagctatatcaacgacctcaagtggacgccgaacgaaaccatcatggtggccatcggccagtccatcacgcaggtcacgcccatcgccgtggcgcgctacgtttccgccattgtgaacggcggcaccgtgtacgatgcgcagatcatcgaccagatcatcgcggcggacggcaccgtggtgctcgataagcagcccgtggtcgccaaccagatcaacacggatccggcgtatttcgccgccatccgccagggcatggccaacgtgaccagcacggaaaacgatggtaccgcagccgccgcctatgagaacgccaagtatcccaccgcggccaagacgggcacctcccagcgcaccgagctggacgtggaaaacaacggctggcacgtggcctacgcgccggtagaagaccccaagctggtggtggtggtgtatgtgcaaaacggctattccggcgcgaaggtgaccaacgcggcgaaatacaccctgcaatactatctcgaccacctgcagcaggaagaaggcaaagcggttcaatcggaatattcaatggcggagtgatgcaatttggccacagcatatgcggtggtatccggcaagggcggggtgggcaaatccaccctcgccgccaacgtagcggccgcgctcgcccgcatgggcaaggccgtgtgcctggtggacgtggatatcggcctgcgctcgcaggacgtgttcttcggcctggaaaaccagatcgtgtacgacattgtggacgtgctggaagaggtgtgcgaactcaagcaggcgctgttgcgcgcgccgtgcggcgtggcgctgttgcccgcggcgcaaatgcgcgatgtctccgccgtatcctgcgcgggtatggaagcgctggtggggcagctcaagcaacagtttgattttgtgctgatcgacgcgcccgccggcattggccggggctaccggaatgcggtgtgcgccgcggacgcggccattctcgtgaccgtaccggaaaccgtttccctgcgcgacgcggagcgcgtgaaggggctgctcgaacgcgagggcgtggcgaagccttccttcgcgctcaaccgcgccacctggcgcaatggggcaaaggacgcgccggtgtccttcgcgcgctgcacagaggtgcttcaattgccgctcttaggcgtggtgccggaggatccgcgcgtgggcgcgctggcggccgcgggcaagctggccatcagcgaggaaacgcgggcaggggcggccttcctgcgcatcgcgcgccgcctcgcgggcgaaagcgtgcccgtggagtacccaaggaaacccggcttcttccagcggctttttttcagggagtgaatcatgcgaaatctgatagcgaaaatctgggattatatccgccacaacaaatttgaaacgcgcctgctcggctcggtggattggtacctggccattctggtgtgggcgatatcgctctttggcgtggtgtgcatcttcgccgccacggccagcgccaacgtgggcatgggcgatacgctgctggaaaccatcagcatgcatcccatcacctacgcgcgcctgcagctaatctggatctgcgtgggcgtggtggccatggcggtcatctgttatttcagctacacgctctatggcgacctggccaacctgatctactgggcgaacgtcatcatgctgctgttggtgctgctgatggcggaagtgggccgcggcggtatgaccgccttcttccagtggggtggcgaccgctccattcagccctcggagttcggcaaaatcgccatcatcatcgcgctggcaaagctgttcagcagccgcaaaaagcccatccagacctttggcgagttgttccccgtgctcatttacgtgggcttgccgctggtgctcatcgttttgcagccggacgtgggcacggcgctggtgtacatcgccgtgttcgcggtgctgatcttcgtttcgggcacgagttataagctcatcggcggcattctgctcgccatggtgctggtgctggtgcccctgtggtactttatgaacgcttcgggcgagagcttccgcctcacgcgcatcctcatctggctggatccggagagcgacccggacgcagccatgcaggtggtcaattcgcaaatcgcgctgggctcgggcggcctgttcggcaagggcctggtgagcgagggcagcttcgcctcgctgggctatatccccgacgaccatacggacatgatcttcgccatcgtgtgcgaggcgttcggctttgtgggcggcggttcgctgatcctggcctatcttttgctcatcttccgcctggtgcagcacgccattcgcgtgcaggacgcgtttggcagctacatcatcttcggcgtgacggccatgctgctcttccacatcgtggaaaacatctgcatggtcatcggtctgttgcccgtcacgggcatcccgctgccgttcgtgagctacggcggatcgagttaccttaccaacatcctgggcatcggcctggtgcaaaatgtggtgatgcgcgaaaagcgcaatcccgtgcccaacgcgccgctgcgcgcggtgcggatctagctccccgacggcaatgcgcagggaaaatcgggcaaagttccccgccttctgatacaatatgggcagacaaggaggggattgtacggactggaccaccggattgcagcgctccatcgactacatcgaggcgcaccttgcggagccgatcgattatgccgaggtcgcggcgcagagctatgcatcgagctaccattttcagcgcgtgttcagcatcctgtgcggatacacgcttggggagtacattcgcaaccgccggctgtcgcttgccggcgcggaactggccgccggcggcgcgaaggtgatcgacgtcgcgctgaaatatggctatgaaagcccggacagctttgcaaaggcattccagaaattccacggcatcctgccgtcgcaggcgcgcagcaacggcagtcgcctccgttctttctcccgcctggtcgtgaaattgtctctggaaggtggcagtatgatggaataccggatagaaaagcggccggaaatgacctttatcggctatcatcggcgcttcagcggcacgccggccgtgcgcacagagcaggcgcacgaattttacgtctccacgcgggctaaccagtaccttttgaagggcatcgagtactatacgcagggtgtggattgcgactgctccgtgcattacgacatcatccgcgcctgcggtgacgacggatacgattttgccattgcggtgccgctccgggaagacagctttcaagatctggaagaagacctgggcgaggccgcaaagcgctttgaaaagatcgtcgtcccggaaggcacgtatctgatctgcgaaaccgagcggacacagtatcccacggagtgcatcgaggacatgcgccggcgggccgtcagcgagtggctgccaacatccggctatgaactagcggacgcgcccgaaatcgccgtcacgcactggggctaccggcgaggcgatgcgcaggtgaacagcgcccgctatgccgagctatggctgcccatcgcaaagaaaaacgcataaatcgtgcgccccctgcccattgggcagggggcgcacagcattgacggaatgccttattccttgccgatgacggccttgatgcggcgcacgccggcggaggagctttcctccttgaggattttgaaggatttgaggtcgcccgtgttcttcgcgtgcgggccgccacagatttccttggagaactggcccatggtgtagaccttcacgcgctcgccgtatttggattcgaacaggccgatggcgccctgcgccttggcctcgtccacggtcatttcctcgcaggtgatgtccacgcccgcggcgatcgcctcgttcaccaggcgctcgacttccttcagctcgtcgggcgtgaccttgcgcgggaaggagaaatcgaagcgcaggcgttccgcggtgatgttcgagccgcgctgggccacttcggcctcgccgcccagcactttgcgcagcgccgcgtgcaaaaggtgcgtggcggtatgcagcttggcggtttcctcactggtatccgccaggccccccttgaagcgctgttccgcgcccgcctgggagagcttctgatgctcgcggaagcgctcgtggaagccttcttcgtccacggtgaagcccttttcgcgcgccatctccacagtgatctcgatggggaaaccataggtatcgtagagtttgaaggcgctgcggccgctgatcaccgtcgagcggccctgcatggccgtggtgaccttctcaaattcgcgcataccctgcttgagcgtgcgctggaagcgctgctcttccagcaggagctgctccaggatgaaggcttcgtgccgcgtgagctcgggatacacgtccttatactggttgatgatgaccttggcgatttcgccagtgaagttttccggcatgcccagctgcatgccgtgccgcacggcgcggcgaatcaggcggcgcagcacatagccctggtccacgttcgagggggttacgccgcggtcgtcgccgatgatgaaggtggcagtgcgcatgtggtcggccacgatgcgcatggagcgggtgacttcctcgctctcgccataggtcttgccggagatttcgccgattttggccaaaatgtcggcgaacaaatccgtttcgtacacgctcttggcgcccatgagcacgctgatggtgcgttccaggcccatgcccgtgtccacgttcttttgcttgagcggcaggaaggaaccgtccgcctgcttatcgtattgcatgaacacatcgttccagatttccagatagcggccacaatcgcaagcgggcgagcaatccgggccgcagggcggcttatcggtgatgatgaacatctcggtgtccgggccgcaggggccagtcatgccggcggggccccaccaattgttcttcttgggcaggaagaagatgtgatcctccttgacgccgcactcgcgccagtaattcgcggcttcgtcgtcgcgcgggcaatcctcgtcccccgcgaaaacggaaaacgccaagcggtctttatcgatgcccagccattcggggctggtcaagaattcccagctccagtggatggcttcctttttgaaataatcgcccaacgaccaattgcccagcatttcaaagaaggtgcaatggctggcatcgcccacctcgtcgatatccgcggtgcggatgcacttttgcacatccgtcaggcgcgtgcccatggggtgcttcgcgcccagcagatagggcaccagcgggtgcatgcccgcagtggtgaagagcacggtggggtcgttttccgggatcacggaagcgcccgggatcacggcgtggcccttggactgaaagaatttgagatacagcgcgcgcaactcgctcgaatgcttgatgttcatggcggtatgacttcctcttttttcttactttatagctcataaaagtttagcacaatccacggcgcgggtcaaattaagttttgggcgcaaaagcgcctggcgggcttcctcgcgcccaaacgaaaagcagcgctgggcgggcgcaattgttttcgaaacaaaatcgccatcaaaaagagcaatcctcgccaatccagcaattttttccgaaacatcgccgcattttagaaaatcgcttgactgaagcccttggagcgtgatataatgcaagcagaaaacgcatgcagtttcgaaactcaaaagaaatggaggcgcctttatgcatcaagcgttgcgcgtcggctggggacaggccgaaattacgccgcgaggcggcgcggtttctctatatggacaatgggagttgcgcatcacagaggaaatccgcgacccgctctacgcggtggcgatggtgatagaatcggccgcggaacgcaccatttgggtgggctgtgatttgctctatgtgtaccgcgagttgcgcgaggaggtttgccagcgcctgtcggaaagcttgccaggcttccaggagaagcaattgatcctctccgccacgcacattcatacggggcccaacaccagcctaaacgtttttttgcaactgctggacaaccagcaggacgatccgcgcgcgctcagcaccgattcctgccgcgcccaggtggccgcgggaattgtgaaggccatttcccaggccatagaatctttggaagagagccgctttgaagtgggcgtctcccgcgtgcagaccggcgtgtgccggcgcgcgctctacaaggacggcagcgcgcagatgtatggggacgtgcatcgggaagatttctgcggcatggaaagccgcgatggcggccccatgcaaatgctgtattgccgccggttgcgggatggaaagctcacgggaatcgcggccaacattccctgcaccgcgcagtgcgatgagatggctctgtatgtgacggcggattacatgggcgtggtgcgcgagcgcttgggcgaaacactgggcgcggacgttaaacttctgggcctgatccgctcggcaggagacctttcgccgcaccagatggtggacaggattccagggctgccgcgttgccacgggcatgaaggcgccgtcgaactgggcacaaggatcgcggaggccatcgtggacgcgctgcgcgctcccgcctatgccatcgcgccagacgcgccgcacacgcaaaccatggcgcgggtagaattgcccatctggacggtggacgaagcgcaataccaacaggccaaggaatatctcgcgcgcctagcggcaaaagaaatcccggatgacgccgtgacgcacgccacggcgctggccgcggtgaaacgctacgaatacggtcaggagacgtaccccgttccgctgcacgccgttcgcctgggcaatgtcgcgctcctctccaatccttttgaactctatcaagaatatgccgaccgcatgcggatggcgctcaaggatgtgcacgtgttcgatgtgcaactcgcggatgacgcgctgggctatctgcccacgcagaaggccgtcgatggcggcggttacagcgcgggtcttttcagttgcttgttcggccagcagggcggcgacgcattggtgcgccacagcgtagcgctggtagaatcgttattctagcgtgtacagacaaaggaattttccagaattggcacgcattggcgaagggagtgcgcgaatgatgcggattggctggggacaagcggagattacgcccagaggcggggcgatttctctctatggacaatgggacacgcgcatcacccgccaagtgaacgacccattacgagcggtggccatggccatcgctacggaagaaggggacgtggtttgggtgggctgcgacctatgctacatatcgcaaaatatgatgcgtgcagcgcacgacgaaattcgccggcagcgtccggattttccctttgcgcatttgattgtttccgccacccacattcacacgggcccatgcctggacaacgaccggtttgtcgcccggctggatggcgttcacgacgatgcgggcgctttaacgacccgcgaatgcatggagcaggtagcccgaggcgtggcgcgcgccgcgctaatggcgctcagctccatgcgcgaaagcatagtggaagtgggcgttgcgcgggaacaaaccggcgtgtgccggcgtgcgacctaccaggatggaagcgcacagatgtatggcgacgtgcaccgggaagatttctgcggcatggaagggcgcgacggcgggcccatgcaatttttgtatgtgtacgatgccgtcagatgcgatttgacaggagttgtagccaacattccctgtcctgcccagtgcgatgaacacgcttcctatgttacagcggactattttggcgtggtgcgcagccgcctccaagaggcgctgggcgaggcagtgtgcttgctccccctcgtacgcgcggctggcgatttgtctccgcatgatatggtggatcggatgccgggtatcgagcgttgcgagggccgttctggcgcacttcacatgggaaatcgcgtggcgtgcgcgctgctgcgcgaacgggaaagaccggtttccacactgaaaagcgcaacgcgtgtgcgccacgcgagcaaagacattcccttccccatctggagcgctacggaggaagaataccgcgaatccaaggcgtttttacaggcgcacagcgcgaacaatacgccgggcatgctgtattctacccactatacccgcgtgaaacggtatgaatctggacgcacgcactatgtggccccagtgcacgcgctgcggatgggcggcgtcgtgttgctgtccaatccatttgaactgtatattgcctacgcagaccgcatacgcatgcggcttgcgcaggcgcacgtatttgatgtgcagcttgcctgcgaaccattggcctaccttcccacgccgcaggcggttcgcggcgggcattacagcgcggtgaactttgtttgcgcgtgcggtccacaggccggggaactgcttgtggatgaaagcgtgcgcttggtagaaaaactgtatcagggcgcatgaattttcctttgcatgcggttgtcccggggcattttttcgctttgctccgggacttttccctattatacggccgtaccgcatagcggaacgccgcaacgcaatggatgaaagaaccatttccggtacttgaggtggccattgatgaaagagaattttttcaaaggaaattacggcgtgtttacccactacctgacggtggcagcaacgacctccgaggcgtggaacgcgcgcacagcgcagtatgatgcgaaagggctggcaaagcaactccatgaagcgggcgcaaaatggctgtttttcacgctgggccaggcttcgggccactttgcggcgccaaacagcacttatgaccgcatcgcaggcgagcatccatcgcgttgttccaagcgggatttggtggaggccctatatgaagcgcttgcgccttacggcatcaagctgtgcctatatatgcccagcgaagcgcccaattgccccaattttggctggcgttggggcaaaaacaaggaaactggcgagttgaccggcgatcgcttggcggagtttcagttgaaatgggaagcagttattgaagagtggtctttaagatggggacgaaaaatcgcggcttggtgggttgattcctgctatttcgcagaccaaatgtaccgctttgcggaccggcccaattttcacagctttgcggcggcgctgcgggcgggcaaccccgatgctctgctggcttttaacaacggcaagttgccgcccgaatccatgacggaggaagacgattatacggcaggcgaattgatcgccgcgcttccggtggcatttgaccgcttcccgctttgcgtgcacacgcgcgacggcgccgtgccgctggcaaaattgccctcaggccttcaatatcacctgctgtgttccctcgggcgggattgggggcatctggtcaaaaccagggaaccgcgctttccagacgcgttggtgcgcgggtacaatgaatatatcaccggcatgggcggcgccatgacgtgggaagttccggttgacgaatatggtttgattccggaagcgtttgtgcggcaattgcgcgtgctgcgaagctgaaaaatttgcgcggcgcgcccgatggcgttatgcattgcgaaaaagcggatgggttacgattattttgcacagaggcagtgaaaagcttttcaagcgcgcgattgtgcggtataatggacgtgccacaaaagaatggatggaggcgatggcatgaccacaaaggagcgatttttgcgcgcgttccggcacgaagaggcagatcgggtgccaatcaccgattccccgtggaacggcacgctcgcgcgctggcggcgggaaggcatgcccgcaaacgcggattggcgcgagtacttcggcgcggataaggtggaaaccatcggtgtggatatttccccgcgctatcccgaaaagattctcgaagaaaccgatcgctatgtcatttccacttccccctggggcgtgaccatgaaacagttcaagcacgaggattccacgcccgaattcctggattataaggtcaccacgcccgaagcgtgggcggaggccaaatcgcgcatgcagccggatcgctcgcgcatcccttgggaacagctacaaaaggaatatccgcgctggcaggcggagggccgctggatccaggcggggttctggtttggtttcgacgtgacgcattcctggatggcaggcacggaaaccatcctcatcgccatgatggaggagcccgagtgggtgcgcgatatgttcgatacgtatctggacatgtgcatcgcgcattttgatatgctgtgggacgcgggctacaccttcgatgcgatctattggccggacgatatgggctacaaaggcaccacgttcttttccccgcggctgtaccgcgaattgctgcaaccggtgcacgcgcgcgcggttcgctgggcgcaccagaagggcatctacgccaacctgcactcctgcggcgacgtgatgagcctgatggacgatatcctcgtgaccggcgtggacgcgctcaaccccctcgaggtgaaagcgggcatggattccttgctgctcaagcaaaagtatggcgatagactggtgctacagggcggcatcaacgcggtgctgtgggatcagaaggacgcgatcatcgcggaaatcgagcggctggtgcccgcgctcaagcagggcggcggatacattttttcctcagatcattccattcccaactcggtgagcgcggagaatttccgcgccattctggatacagtgaaacgggtggggcgctactaacgtgggaggtgcttttttccatgacattgcaaaatgccaacgaatatgtggcgcaaaacgccgccagggcgaacgaacagttccggcccctgtaccacgccagcgcgccggtgggctggatcaacgaccccaacgggtttatccattatcaggggcaatatcacctgtattgccagcaccatccctatgataccgtatggggccccatgcactgggggcactggacttcgaacgaccttttgcgctggcaatggcacggcgacgtgctagcgccggatgcgcctttcgacgcgctgggctgcttttccggcacggcgctcgagcaaaagggcaagctctatctgatgtacaccggcgtttcccgcgcggcggatggaaagagcgtgcagcagcagtgcatcgccgaaagcgacggtggcttcgccttgcgcaagtggccggaaaaccccgtgatccgctcgcgagatttgcccgagggcgcgtcttcggtggactttcgcgatcccaagctgtttgccgtgcccggcgggtatcgcgcggtgatggcttcgcgcggagaaaaaggcgggcagttgctggcctacgattcccccgacctgctccactggacgtttgcgggcaagccggtggaaggcgttggcgagatgctcgaatgcccggattgctttgcgctcgatggacatgaagtgtacatcgcctgcgcaatgggcctgccgatggacgggctgcgttttcccggcagccaaacggcggtgtggctagcagaggggcgcatggaggctcttgatttgggcctggacttctatgccccgcaaaccgcgctcgcgcccgatggccgccgcattctgatcgcctggatgcattcctgggaccacgaagcgcccacccaccgcctggggcatttgtgggcgaacacgatgaccctgccgcgcgagctatcttgggaaaatggcaagctgctttcgcgccccgcgcgcgaggtgcgttcgctgcgccgggatgcgcgcgcgttcgcaggggagttccatgccgcgtgccccaacgcgtgcgagttggaagtggaattcgcaccccaacaggacggcaggctggaaatccgcctgctcgatgggttcttgatcgaatacgacgccgcgagcgagatcctgcgcgtggaccgcagcgcctgcgcctattccatgggccccggcggcgcgaaagaaaaacagccctgggcggcggccaacgttccgctcagggacggcaagctgattttggatgtgtttgtggacgcgtgcagcgtggaagtattcgccaacgatggcgaagccgtgctatccagcgccgcgtatcccggagaggcacgcgttgcctccgtgcaaagcgcaaacggcgcgtgccgcggcacgctgtgggcgctcgcttttgcataggttttagcctttgatgccgctaggcgcgtaatccagcaccaatagcgtgccgctttgcacgcaaatttccaccggcgcgcccgtgtgcgcgttgctcacgcccagcgcatggaacgccgtgaggcgcgcgttgttcaaggggtatttcaggccgctgagggaaacgccctgcgcatcctcccccaggcaaaataccgagagcagcgtgcccttgggcgcgccgggcaagcggagcgtgtcg

SEQ ID NO: 2714 - DNA, 8430 bp, Unknown
  16S sequences of unknown bacteria
agctgcttcgcagcggagcaattcgtaggcatcagtttggacaaaaggtattttgacccgtgtgctctccgtcgttgtaatttgggacaaaacatgctatgctggatacaatcatctgtaattattcagcccatctaaaaaaccacagggatgagatttttcccgttattgcaaaatatattttcttgcttgtatggcggatattctgaataattacaataattttaaaaactgcagtgtaatccttgctgcagatgggaggactttatgaaaagagaaaatattttagccccgtcaatcctggccgccgattttacccgtctcggcgaggacatccagacggtcgccgctgccggtgcacagtacctgcacattgacatcatggacggtaccttcgtcccgagcatctcctttgggatgccggtcatctcatccatccggaaggtctcagacctgttctttgacgttcatctgatgatggaaaagccggagcgctacattcaggcctttgcagactgtggagccgacggcatcacggtacacgcagaggcttccacccacctgcaccgaacgatccagtccatccatgctgcaggtgccagagccggagtcgccctgaatccggcgactccgctctctgtgctcgattatgtgctcgaggacatcgacatggtgctgatcatgaccgtgaaccccggctttggcggtcagagctatattcctgcaatgaccggaaagatccgcacactgcgcgagcttgcctccaaaaagaatccggatctcctcattgaggtggacggcggcgtcaatacttccacgatccgcaccgtcttagaagccggtgcaaatgtctgtgtcgcaggctccgccgtattctccggcgaccggaccgaaaaggtgaaggggctgctggaggtgatgaaggagtatacggaattctaacagcttactattatacaaagaggagaaaaggcctgcaaaaagcccgcccgtgtaccatgtgactacacagtacacaggcgggcaaaaaaatacctgtacctaataattcatctcttccgcgcattcttcagctcttccgccagcatcacataattttcataccgtgacgccggtatcttaccttctgcgagcgcttcttttactgcacagtccggctcgctgatatgcatgcagccctgaaaacgacagtatggttcatatggaacaaactctggaaaataccgccagagatcctcctgcgcaatcccgttcagatacagggaactaaagcccggtgtgtcaaggaaatacgtgtgttccctcaggcagatcagctcggtatggcgcgtcgtatggcgcccacgctcgatcttgtggctgatgtcgccgacctccatctgcacatgcggctgcagtacgttcgtcagcgatgacttcccgacgccggacggaccggctacaaccgttgtcttgccatcaagcaatctctgtatgtcctcgatcccctcgccgtttgccgcactgatcagctgtaccggatagctgtgcacatacgtatcgcgcagcagctcctcctcttcggtactgatcaggtccgttttgttgaaacagatcacgaccggaatcctttgctgttccatcgagatcagaaaccggtcgagcagattcaggttcggcttcggacttgccgccgcaaagacgacaagcgcctgatctacattggccactgccgggcggatcagcacattcttccgcagaagaatcgcatcgacatttccggctggcttctcttcatcctgtaccggtgaaatctccacattatcacccggaagtggctttattttttcctttcggaagattcctttggcacggcactcatagacgacaccgtcctcagcgtgtacatagtaaaatcctccgatccctcttatgatttttccctgcatgtattcctcacatttcatgtaccgcattctttattcccgtgaggatcaaataccccactaattacagcgagatatttgtgagatcctgtcgttaaaatgccatacatcagctatttacctgcgaaaatacgattcccggatattcaatcttgctcgtcacattcccggaactatccagcagatagatgtacgccgtaccgcttgtcacgccggatgcgccctgaatctggagcttataagggaagctcgtctgtccctcgaaaatcgtactctccccgcttccgtcctgtacgagtgtgatccggacgttctgtccgctgtagccctccggctcgttcaggctcgcattgcatttccagaccgtaccgtccccattgtctgttgtaatcggatcagatgaagtcgttgtgtcctcgccgttcggaccgctgctgatcacgagcgtgaccgtcgaaccacgcgcgacgtccgtattcggatctgcactctggctgatgaccagtccttctgccacatcactgctcggctgatactcatagttcggtaccagctccagcatctccagtgcttccgttgcccggtcctttgtgtagccggtcagagaccagagctgtacataatcgaccggatcagtctctgactgtgcacctgcgctgacatataacaccaccgtgtcgcctgcctttaccttcgctccggctgccggcgtcgtggaaatgacgtgacccatctccacactgtcactcgttctggaattatcaacctcacacttaagtccctttgtcagaagaaatgcctgtgcctggctctgctcaatgttcgtcagatcatcgagcaccagctcatcgccttccggcaccagatcgtacgcaactgccgtaccacgtgcgaccatttcgcccttttccggtgactgtgtacacacctgcccggctgtatacttatcagaatctttctcgccctttttctcaccggtcaggccgtagctctttaagagctttcgggcatctgcctcagacagcccgagtatctccggaactgcgactgactttccgtttgtctcggattctgattcactttccgtctcctgctttacaggtgtgacagtatggttcttcttcccaaatttaaacagcccaaatgcattcgccaccagcgccagaaaaacacagccgatcacgactgccacaatgatgcctccgactgtcacgaccttttccagctttggattcaggccgacttccttatccggatcgcgatccttaaagtgtaagtgcctgcctcctgacgggcgattcagatgaaaggattcatcctcgatcttgtaatcggccggattatcgtaagcgtcataatatggatcgtatccgctctcctgttctccgtcctgtgtatgatcatcgccccagcgatccgcatgcgcttctccgccggacggggacacctcctgatagccgcttttctggtaatagctgcccggctggtatgcccggctctgctgattctgtgcactgcctgtcccatgaatatgagcggcagcgcctacgtcaagtgactcatcatacgacggcatactgcgctctgcctgctgagcagtcggcgtcgtgcctgactgctgatgctctgcattgatctgctgcagatcatttttggaaatgacaattgtctttgacatgtcatccggctgctgctgcgtcacaaaattgccgtccggattgacaagcgactccctcaggtcacggatgacctcagccatattcgcatatctccgatccggactcttctgcgtacatttgagcacaatcgcattcgtactgttcggaatctcagggatcagctcctttggccctttcagatcctcctgcaaatgcttcagtgcaaccgcaaccgcggtatctccgtcaaacggcacatgtccggtcagcatttcatacatcgtgattccaagtgaataaatatcacttttctgatcgctgtagccgccgcgcgactgctccggtgagctgtaatgcacggaacccattacgctggagttgatcgtattgcccgaagatgcccgcgcaattccaaaatccgccacctttacttttccgtctgtggaaataataatgttctgcggcttaatgtcccggtggataatgccgttgttgtgtgcagcctcaagtcccgctgatatctgcagcgcgatactcgtcgcctcacgcaccgacagccgtcctttcattttgatatattcctttaaggtaattccctctaccagctccattacgatatagtaaattccggcttcctcaccggtgtcataaatatttacaatattcgcatgcgccagcccggctgccgactgcgcctccacacggaatttagagatgaactcccggtcatcccgaaactccttcttgagcacctttaccgcgacgaaccggttcagcttgtgatccttcgccttatatacatccgccataccgccggagccgattttggatattatttcatatctgttctgtataaacattccgactttgagcatattcactccccatttattcgtattccgcaagtactacggatatattatcttttcccccgtttttgtttgcctcggtcacaagccgttctgcagcctcttttagtgaagcgctcttttttaccagctgtaaaatatcctcgtcctctaccatattcgtaagtccgtccgagcagagcagaagcttatctcccttttccagcttcacatcaaaaaaatcaacccgcaccggcacatgtacaccgactgctctcgtgatcacatttcgatccggatgactctttgcatccttgcgctgaatctcccccatccgaatcatttcttctacaagcgaatgatcccttgtgatctgttcgatcccctgatcgatcagatagagacggctgtcccccacatttgccacatagaggcagccatctgtcactgttgccgccacgatcgtcgttcccattccctcatattccttcgcagatctggccttctccatcaccagctcattcgcgtgatggattgccgaactcagaagagagaccggacgcttttcgtctttttcattcgttatgtactcgaccatgagctctaccgtatagcgtgatgcaagatctccggcattgtgtccgcccattccgtccgccactatcagcagattcttcagattgccgaccggctgctctgaggcatagacgtaatcctgattcatcgttcgccgcctgccgatatccgtaatgctatacgtcttcatatccttcttttcccttcttctaattttcatccatataactctttcttagctgtccacaggccccgttgatatcccggcccatttctcttctaatagtaacatttattcggtttttttcaagtttatttttgaacgcctcgatcactgcgtgatttgactgcacatagcttcgctccttgatcggattgaccgggatcagattcacatggcagttgatatcaccgacaagcgccgagagctcccttgcatcctcctcggtatcattgacgccgcctaccagactgtactcaaaggtaatacgccgtccggtctgcccgaaataataccgcgtagcatcgagcacctcatgaatgtcatatttatatgcgatcggcataagctccttacgcttctcctgattcgaagcgtgcaaagagatcgccagcgtgatctgcagcttctcatttgcaagcctccggatgttttctacaataccgcaggtagacacggtaatatttcgctgactgatattcagtccatgttcatcggtcagaagccggataaatttaagcagattgtcataattatccagcggctcaccggtacccatcaccacaatgtttgaaacgcgctcaccggatacctgctgaatccggtaaatctgatcgagcatctcagacggcttcagattccgcgtaagcccgccaagtgtcgaagcacagaaacgacaacccatccggcagccgacctgtgaagaaatgcagactgaattgccatgatgatagcgcatgagcacactttcgatcacgtttccgtctgaaaggcgaaacagatatttttcagtcccgtcgatgccggaaacaagccgttctacaacctccagcgacgtataatccgttgtctctttgagcttcttgcgcagccctttcgagagattcgtcatctcatccaggtcggcagccagtttttcatgcatccactcatagagctgctttgcccgaaacggcttttcaccaagagaagccatgaactgctgcagttcctcataatccagcgatttgatatccgtcttctccatattcctctccttgtacttcttctgtctcttccagcctgcgcagccttgcaatgaaaaatccgtctgattcgtggatacccggcagcagctgaatgtatccgcccttcgtcgtcttactctttaacgcatcgcagatataaggatcgatgctctccagacggaacggataattttccagaaaccacttcagattgtactgattctcatcagcgccaatcgtgcaggtgctgtaaatcagtacgccgcccggcttcacatagtcctgtacgacagagaggatcctgcgctgcagacggatgatatcctgctgccgctgagcagacatcttgtatttaatatcctgcttctttccgatgacgccaagaccggagcacggcacatccgcaagtacaatgtctgctttgcggatcgattcctcatccacgaccgttgcatccttcacggctgcacggatattgattgcatcggtacgctcgatgttttcctgcatgagctgtaccttatactcggaaatatcgcgggcttccacatatccgctgcccatcagcttttccgcaatgtggagcgcctttccacccggtgcagcacagacgtcgatgcaatactctccccagtttggcgcagcgatctctgccacgagcatggagctgatatcctgtacctgaatccagccattcttaaaagcagctatggcacgcatataattataatcggaaagaatcagcgcatagtcaagatacggatgctgccgcacactgatcccttcctgcgtcagagatgcgataatttcctccttggaggctttctgcaaattgcagcgcacgacggttcccttttccatatgggaatccaggcagattttctctgtcacctcgtaaccatactgcgtcacccatttttccagcatccagactggaaaagaatatttcactgacagatagtgcagcggctccttcgccggatctggataacgcacctggcttaagcggcgcgccgtactgcgcagcacgccgtttacaaaccccttgagattgtaaaagcccctgcgctgcgcgagcttcaccgcctcattgcaggccgctgaatccggcacgctgtccatatatttcagctgatagaccgacatccgcagaagattgcggatcagcggtttcatattgtagaccgggacattagaaaactgttcaatgatgtaatccagctgaatcatatgctccagcgttccttctacgacccgtgaaataaatgcgcggtcacgtttttccagatactggtatttctcgagtacctcccgcagcacgatatggctgtaggcctcctcctctgtgatctcctgaagaatctccagacaaatttctctgatatttaccggtttagtcacgatctcgtcttcctcctgccagaataatcaaacgcagcagctgtaaaatagacgatgccagcgccgccacatatgtcagtgccgcagcccgcagcaccttttttccgcctgcaagctcctccgttccgaggatcccgtccgcctccagtacctttaaggcacgcgaggatgcgttaaactccaccggaagcgtcacaagctgaaaaagtaccgctaaggaaaacagaatgatacctgccgtcagaagcggaggaattgaaaaaatgagccctgcaaaaaataccggccaggaaagtgaggagccaaaatttgccagcggcaccagggtactgcgcagaaccagcgggccgtactgcttttgatcctgaatcgcatggccgcactcatgtgccgccacgcagacagccgcgatcgacgctgtcccgtaagtactgtccgaaagacgtaacgtcttgctgcgcgggtcgtaatgatcggtcagattacccgctaccctctgaatggagacatcatagatgcccgcacggtgcagcacgcgctccgccgccattgctccggtcagattgctccggctgcggatctttgtgtaatggttaaatgtatttttcacatttgctgatgcaatcagggaaagtgccaggccgatcagtaccagaagataggtccagtcaaacatataatatccgctgccatagcctcttccgtaaaaggcgttcatatttgatgctagtatatacatagaatcactcctatcaagcggatattcgcaatccgcttcgctacttgctcataacc

SEQ ID NO: 2715 - DNA, 6304 bp, Unknown
  16S sequences of unknown bacteria
tcttccgatctagaggcgggcggaaaagggggattgcaagaaaaaaacaatatgaaaaaataaacaaaagctcttaaaaaattttgaatttcagcgatatatattgtaatcaggttgtcttgcggaaatccgcttgacaacctttttttattcgattattttataactgcccgaagcgtccgaggaaatcgggcgggaaaatatagagatgacggaggaaggaaaaaaatggatttgttcttaaaattgagaaaaacggtctgcctggctgtcgcgggactcgtggcctgcgcgggcgcctgcggcgaaaagggaatccctttggattcgcggcacggcatcgccgatcaatcgctgctttacggaatgtgctatttgatggaggagcggagcgccgaatcgctcgatattgaaaaggaagtggaactgatgaaaaatctcggcgtcaggacggtgcggcagtggatgcatttcacgcatttcatgagcagtcccgcaacgctgaaagagaataacgcggcgacggaaaatatgcacgccctcctcgcggaatgcgaaaaggcgggaatggtgaatatcggaatgaatcaccataatttttgtaccaccaagagcaagtcttcgacgacggcaaagcctttcgcccgcgacgtgtccgagggcagcgactatgtgcagtggctgaacgattattatacctcctggaaaacgctggtgggagagttccccgaagttttatattgggagatcgacaacgaagtgaacaaccccgacttcatgacagacggcggcgaaaagggatcgtccgcgtacagcgtcaggcagatggcggagattgcgacggatatgttctactacgccacccgcgccattcacgacgccaatcccgaggcgcagagcgtcatgggcggtctgaccgagccgacgggactgggaagaggaaacaccgcaagcttccttcaaatgctctacgacaatatcgcaagcggggagtacgggtatttttacggcaaggaggagccgtccgccgcctcgaaaaatgccgacgattattttgagatcgcctgctggcatccgtatatgagcaatttcaacaagcagaatttcatcgatatcaataacgaatattacgagatcatcctcaaaaacgagggaaaacataaaaaagttttctttacggagatcggctggaacgacgattccatcggcggcgaggagaaatcgatcgaatttatggaacagatgtacgacgccctcaaatccatgccctatgtggaaacggcaaatattttcaagctgtacgacacgggcaaaaagaacaactgggacggtcccaattatctttactttgggctggtccacgaccccgacccgacgcgcgcctataccccgtgcgacaagacttccgatccgctgaatatcgacgaaaagggctactgcatcaacggcgctcccaaaaataaggcgtattcctatcagaagatagcgggaggaagcggaagtcttagtgtgctcgtcgacgaaaaatgagtttccgccgaaaggcgtgaggaaaaagcgattttgaaaaacagagctgcaaaagagaaaacaggcgtttcgataaaatcaaggaataaagaaagggaaaaatggaggaaagcatgaaaaagagaaagtttgccgcgctgctgctggcgggcatcgcctttgcgctctgtgcctgcggcgctcccgagccccgcgattccgcgagcgaatcggggaaaaattctgcccattccgccgaggaaattccgctcgatacggaacacggaatcggggaccaaagctatctttacgggatgtgctatcttttggaagggcgcacctattggggctcgccgtttgaaaacggggatatagaagcggacatcgcgctgataaacaacctcgggtgcaaaacggtgcggcattggatgcactttaccgcgctgatgaaggacaaggatacgatgaacgaggaagagtgcgaaagaatgcacctcgccctcgaagagtgcctgaaatacgacatcgtcaatatcggcatgaatcatcataatttcaacggcggtctgtcgagcgtcggaaaagtaaagcgcaacatggtgaaaggcagcgattatattctgtggctggacgattattatacctcctggtacaatctcgtttcggagttccccgaagttctatattgggagatcgacaacgagctgaacaaccccgatttcatgtttaacgcttatgataaaacatattttaccgcgtcggaaatggcggagatcgcgacggatatgctctattacgccacccgcgccattcacgacgccaatcccgaagcgcagagcgtcatgggcggtctgaccgagccgctgggactgggaaacagcaacctggaaaacagccgaccctctaacgcctggtttttacaggcgatctacgacaatattttcagcggcgaattcgggtatttctattcctcggaaacgagcgataccgcttccctagatcccgacgattatttcgacattctctcctggcacccctacgtatggaacaaagaagctctggacgaggactttttcgtcgaggagaacaataagacctatcaggtggcgttggataacgagggcaagcacaaaaaggtctttatcacagaagtgggattcagcgatttttcacgcggggagaaggtcgtcgcggaatcgacgaagcgtatgtatcacgccatttccacacggatgccctatgtcgaaacgctgaacgtgtttaagatgtatgacagcgccgctccctcctttgacggaagcgcggcagacaacggctattcccgttacggcttcttttacgatcccgaccccgcgagagtctattataaactcgacggggaaaatcccgtgacggtgacggacgaattgtgtgttcccggcgcacccaaacccctcgcgtatgtctttcagaaaatggcgggcgggaaaggctctttggaactgatgaaaaattattacagaaataagggatagaaagagggggcgtttttagaataccttttgcgtttcggagggatccgtttgaaatttgggcgaaaatcgcccggaagcggacgcgcgttttctgaaattcgcggcggggacggaagtctttaaaattcgcgtcaggggaggcgggaagcgccgacgagatttgtttgaggcgtgcgcaccgggtcgctttgcgggggcggagaacggacgaatagagcgcggagggaaatttgcgggcgttcgaattggcgcgcgggagcgggcagggaagcgttgagctttgaatggcggaaacgcgcgcggagaatcgcttacgcccgaggacagccgcggagattcggacgggggcttttgcggcggggaaagagagaaaaaagagtgcaaacgcgcgccgactcgtccgaaaattatttcaaaaacgcggaaaaagagcgaaggcgaagcggagttaactttttccgcaaaaggaaacttccgcctttataaaattttgaatttcagttgtttatttccccgagcggtcagatttgaaaaatcctattgacagaaaaaagaatttatattataacaaaaaacgcaagagataaaaagtcgaaatagagagttttctgcgattttcggcgcgtttgaaaaaggcaatcaaccgcctaatagtcagtgatttttctatacaacaaaaactcttaaaagattttatctttcgagtctttttaaaaagttgtaaacggcaagtttttgcctctgttcttgtaaaaaacggagaaatttatttattcaaggagtggaaaaatgaaaagacacaacaaaaagacggcgttgcttcttgcttccctgctgtgcgtcggtatgatgggaacgggtgcggtgactgcgttcgcggaagaaacgggcgacgctccgacggagggggcggatctttcgtacgcttacaccgtcggcgatctgccctatcacacgggatacagcaaattcggctattacgcgacgggatatgcggattacgtgatgaaagcgggcgtcttcgactccgccgcggaaggctacggtctgactgcgttcgatacctgggaagaaggcagcaacaaaatcacctcgacaaaaaagagcggtctgaaaatcgaaaactggaaatggacgtttggagcaaataccagcgtcgtcatcgaagcgaaagccaaagtgacgggcactatgaaagtggatttcagcacctgcaccctcggcgggtggatggaaccttataacaccatttacaccgttcacaggctgaacgtcgaaaacaagaccttggataccctcgtcaattacagtcacggaacggactcggtcggcggcggtacgctggcagataatgcggcgtgtacttccgcggctacctataccctcaccgtggacgttaaagaaggggacgtgatctattacgaagtaggctcgcttgctgcggatagaaatctgcaaagcgtgacggacggaaagatcatcgttacgcctacggaaatgaacgaagcggtggtgacaaattacgtcaatcttctcgaagagcaggtgaaagcgctgacgcaggcgaattacgcggagtccgactggacgatcattcaaaattacgtaaagacttttaaagagggcacgtacgcgacggcggaagaactctatgccgcctataccgcctccaaagaaggcattgaggccgtaaagcccgatcccttgaaggacaagaggacggcgcttttgaagtcgttggaaacctattacaaatccttgaaggaaagcaattacacggcggaaaattggaccgttgtgaaaacggcttacgaggcgttcgtgtccggcgcggaagcttgcgaaacggaagaggctttgcaggcgctctacgacgaaaaatacgaggcgatggacgccgtgaaagcgtacaaacagacgcttgtctatctcgacctgccctcctctctgatcgccgcggaatacggctggatagagggcgacgtattcgacgtgacgatgtatacggggtccgtggaaaagggattggtggaatttgacaaatcgttggataaagacaccgtcatcaacgaaagcgtaggcgacatcaccaaggcgcaaaattggaaatggtttatttccagagataacggcgtcatcgtcgcctataaagcgaagacggactgcaaaatcacggtgacggacacccgtcttaaagacggcggcggcagcaacggttggacggacgattgcgtcttgacgagctatatcgtgcgcgacggcgtcgctaaaaagataaattccatcaacgcgccttcctcggacgccgatttcagcggcacctattatgcgaaggcgggggatatgatctatatcgagttcaataccttcaccgcggacgcgggatcacagagaaataccgaatctccctacgccacgacggcggaagcggacagcacggcgtttgacgaagaagcgtatgcgcagcagaatcacgatctgcccgcggaagtgacgagcgcgatagaagaaaagacgcaggcgctttgcacctattacgaaggtctgaaagaagaggactactccacgacaaactggctgaccctcgcgcagtacatcgaggactttgtcgcgaaatgcgaaacggatgtgaataccgtggacgacgtcaccaagctctacgacgagatccttgcggagatgaaagccattcctacgctcgcacaggctgccgcggaactgaaagccgcgctcgacggatacgcagcggatttgcaggcggaatacgacaaactcgtcgcggaaaacgactatacgacggagaataaagaggcgctggacaaagcgctggctgacggcaaagcggaaatacaagccgccaagagcaaagcggcgggcagcaccgcgctccgcaaagcgacaagcgctctgcaagcggtggaaaagacggcgaaaacttcgggcggcagcggcggctgcggcagcgtcgtgggaagcctgggaatgttgatcggcgcggcgactctcgccggcgcgggactccttctcggcagaaagaaaaaagattgaaaaaacgcggatagtgagagaaaaaatttctttttcgaatgaaaaaagattttttcggacgggaaacgagcgtttcggacgaagaatagaccctttcggacggaatcgtaaagatttcggacggaagaaaaataaaggctccgaagtttttgggagagaaagtaaaaatttcaggagaaacggaaattttttgagtgaaaaatagaaaatcgagatctatcggttttttcggg

SEQ ID NO: 2716 - DNA, 3810 bp, Unknown
  16S sequences of unknown bacteria
cggcaggggggcgcttcggccgatcttgcggcgggtgcaggagcagggcacgatccctgcggacgctctttaccgcatcagcatcggcaaaggctatgcgcgcgtcaccagcaagagcgtcatccggcagctcagcgaggcattcggccgtccctttggccatgtcagatgtcctgcctattatgacgaggaggaagatatgctgatcgcacggatcacggatgaaggaggggatgcgtcatgatctgggtatggaccgtcgtgttcgccgcggcgctcatcatcgagctggccacgccgagcgcgctcatcagcgtctggtttgccttgggcgcgctcgtctcgctgctgctggcgctggccgccgtcccgttgtggggacagcttgccgcattcgcgctggtctcattgattgcgctttgcgtcatccgtccgatcgccgcccgctcgctgcgcggcaatgtggtcgcgaccaatgccgaccggctgatcggcgccatggccgtcgtcgaaaaacgcatcagcgcccgagaatggggcagcgtgcgcatagaaggtaacgtctggagcgccatcgcgcaggatgggcgggacatcgagcccggcacggctgtccgcgtgaaggcgatcgaaggtgtcaagctcatcgttgtgcccgtgaacgggccgaaaggagaatagtatgctggattcgatctttcccatcatctttacgctcatcctcatcgcggtgcttattgcggtgctggtctatatcgtgcgcatcgtgccgcaggccaatgcgtatgtcatcgaacgcttaggcgcctatcattccacgtgggggaccgggatccatgtgcttctgcccttcatcgaccgggtggccaaccgcgtgacgctcaaagagatcgtcaaggacttcgcgcctcagccggtcatcaccaaggataacgtcacgatgcagatcgacacggtcgtttactttcagatcacggatcccaagctgtatacctatggggtcgtcggtccggtgacggccatcgagaacctgaccgcgaccacgctgcgcaatatcatcggcgagcttgagctggatcagacgctgaccagccgcgatgtgatcaatacgaagatgcgcgccatcctggatgaggccaccgacccctggggcatcaaggtcaaccgcgtcgaggtgaagaacatcctgcctccgcgcgatatccaggaggcgatggagaagcagatgcgcgcagagcgtgagcgccgtgaggccatcctgcgcgcagaaggagagaaacgcagcgcgatcctgagcgctgagggcgataaggaagcgatggtgctgcgcgccaacgccaagaaggaagccatgatcgccgaggcggaaggaaaagcgcaggcgacagagcgtctgtatgaagcgcaggcccgcggcatcgagatgatcaagaatgcggatccgaaccgggcgttcctgacgctgaagagcctggagacttatggccagatggcggatggcaaggcgaccaagatcatcgtgcccagccagctgcaggatgtggcgagcatgctcagcgcggccaaggaatttctgcgcgaccctgaatcatgaccgggcaagtcccggttttttagtgccttcgcatccttttccgtatgggggaagaggagggatcagatgagagaacggatcttgtgttatgcgctgcgctatcatggagaatggaacaagatcgccaaagcgatcggccgcgatgaggaatggtcgccgtgtgcctgcgcatatgattttgtgacgctgggcgagcctgggtatcctgaggcgttcgccgccctgcgctttccgccgtggatcgtgttctaccgcggcgatctgtctttgctggcgcgttcctgtgtcgcggtcgtcggttccagacgggccagcggcgaagggatccgtgcctgtgcgcgcaccgtggagatcttgtccagacgtcatgtcatcgtctccgggctcgcgaaagggatcgatgcctgcgcgcatcgctgtgcgctcgagcgggggaccatcggcgtgatcggctgcggcatcgatgtcgtctatcccaaagagaatgccgcgctgtatgcgcgcatggcgcgcgatcacctcatcgtaagcgaatatccgccgcagaccccgccgctggccgcgcattttccctggcgcaaccggctgatcgccgcagcgggaagcgcgctcgtcgtcatcgaggctgtgccgcgcagcggcacgatgcatacggtcagcgaagcgctggagctctcccgtccggtctattgcctgtcccgttcttttctcgagcggatctatacgggcaatgccctgctcatccagcagggcgctgtcatcgtgctggacgaagatgacgtgaaagaaatttaaaaagattgacaaacggtgaaaaagcgcaaataataagaagcaatgaattttaggaacggaggcagacagaatgaagaatctagtgatcgtggagtcaccttcaaaatcgaagacgatcgagaaataccttggcggcgactatcatgtcgtctccagcaagggacatatccgtgaccttgcgaccaccggcaagggcggtctgggcatcgatgtcgaaaacggctttattcccaattacaagatcagcgctgataaaaaagaggtcgtcaaggatctccagaagctggccaagaagagcgatcacgtctatctggcgagcgaccctgaccgggaaggagaggccatcgcatggcatctggcgaccgtgctggggctcgatatgaacgaagataaccgcatcgtgtttcatgagatcaccaagcaggcgatcctggaggcgatgaagcatccgcagaagatcgatcaggatctggtgaagtcgcaggagaccagaaggatgctggatcggatcatcggcttccgtctttccaagctgctgcagaacaagatccagtccaagtcggccggaagagtgcagtctgtcgcgctgcggctgatcgtggagcgggaaaatgagatccgcaagttcaagaaagaagaatactggacgctggatgcgctttgccataaggggaagagcagctttacggccgggctgcagagagtggatggcaagaaggccaagctgaagaacaaggaagagaccgacgcgatcatcgaacgctgcgcgcagggtcccttcatcgtgcagagcatcgagcggaaggtgaagaagaaagagccgaagatgccgttcatcacttccacgctgcagcaggaagccagcaccaagctgggcttcggcgccaaaaagacgatgcagatcgcgcagaagctgtatgaaggcatcgacctgggcggacgcagcgaaggtctcatcacctatatgcgaagcgattccacccgtctttccccggtgttcctcaatgacgcgttccactatatcgagaccatctatggaaaagcgtaccgcggacgtgcccgtcagaagaatgacgaaaacgcgcaggatgcgcatgaggccatccgcatgaccaatgtgatgaacacgccggaaagcgtgaagcagtatctgaccaatgatcagtataagctgtatcatctgatctactgccgcacgatggcatcgctcatggcggcggcgaagagcgacgctgtgagcgtgcagatcgacagctgcggctgtcagttcacggcgagtggctcgacgctgaccttcgacggttacctgaaggtctatggcaaatatgagcaggtcaaggacgatgtgctcccgcctttggaaaacgatgagacgctggagaaggtcaagctggagggcaagcagcatttcaccgagccgc

SEQ ID NO: 2717 - DNA, 32759 bp, Unknown
  16S sequences of unknown bacteria
aataccgagatctgcttcaagctctttaaatatatttacaagcgatggcggtttcggtactcctttttttaccgaaaagcaaagaccatgcgcctgtcccggctcatgatacggatcctgtcccagtatcacgactttcacattttcataaggcgtatatttaagcgcgttgaagatatcatgcatgtctggataaatcgtcgtcgtccgatattcactgacgagaaattttcttagttccttataatattccttgtcaaattctcctgtaagtatgctgtcccaatcgtttcctatatttaccatattgtcacccgtttttactgttttaattcgatattttaattcttgaggctttgcagcggcgccggtatgcggccgcctctttctatcataaccgcaggcgattttgtattcaccttcattatcggtccggaaccgagaagtcctccaaattcgagttcctcgctgtctttaagtcctattgcaggaatcacgcgcaccgccgtcgtttttgaatttaccattccgatggcggcttcatctgctataatcgcagaaatagtttcaggagacgaatctcccggtattactatcatatcaagcccgacagagcatactgctgtcatcgcttcgagtttttctattgtgagcacgccgcttctcgccgcgtctatcattcccgcgtcttccgtcaccggaataaatgctcccgaaaggccgccgacagcggatgacgccattacgccgcccttttttaccgcatcgttgagcattgccagtgccgcagtcgttcctgggcctccacactgctcaattcctatctcttcaagtatatgagcgaccgaatctccgactgccggagtcggcgccagcgacaaatctataattccaaaaggtactccgagcgccgcgctcgcttcactgcctactaactgccccatcctcgtaatcttaaacgctgtcttctttataacatcagcaacctcttcaagctttgcctctttcggcatcttcgccagcaccgcacgcacaacaccaggccccgaaacgcctacattgagcacacagtccggctctcccggtccgtgaaaagctcctgccataaacggattatcctcaggcgcattgcagaatacaacgagcttggccgcgcctatgcactgtctgtcctttgtaagctccgctgcatcgcgcaccacccttcccataagttttaccgcatccatatttatgccggctttagtgctgcctacatttactgatgaacatacaaactcggtctccgccagcgctctcggtatcgactctataagttctctgtcacccgcggaaaaccctttctgcacgagtgctgaatatccgcctatgaagtttacgccaacagcttttgctactttatcaagcgtcttggcatatttcaccggatcgccgccgctcgccgcaacaagcatcgcgatgggcgttaccgatattctcttgtttacaataggtataccgtattttttttcaatattttcccctgtctttacgagatcctttgccagcctgtatatcttattatatactttttcgcaagacttatcgatgtcgctgtccgcacagtcgagaagcgatattcccatagtaattgtgcgcacatcgagattctcgttctgtatcatatttatagtttccattatgtcgcttgtattaagcatatcctaattcctccgttccttgtcaatacttggtgctgttttccttttcacacctgcactacgctgcacagcctctatattctgtgcatagaattaaagatatcctcatgcattacatggattatcatatcaggcacgttatcagcaagtctctttttaagctcgtcaagttcacagttcatcttatccacttcaactatcattatcattgcaaaataatcttgaagtacgctctgtgtcacttcgattacattggcgttgctctctgcgcacgtagccgaaactctcgccagaatgcctaccatatcctttcctattactgtaattactgctttcatccttttatatctcctttcgtatttcacgattctttcatactctcttgtttatttaatttctgcagccgtcaattttctgcacttatttttctttcgcagcagctgttagcctttccaaatatttcgcttctgctactctgatttcaccatctgcaagcacattgtctctcttatattctatattaagccacggatatttatcagcaaactcttttttatttactcccttatggcctataatattggagaatgtcctgtcattggcgtatatctctactatcgggcatatgttgtctgcaaagtacccgtcatgcaccgctttggggaacagctcatttatcttagattctatatattccctcgcgattgcaccttcaacaagctgcctgaacgccgggtgatacgaattaccggcaacggcactctcgccgctgtcatttataagctcggtgcttttaagccctactcttatgacattgacgcctgctgctgtcaatatcttgtacatttccttgacagtctcaaccatttcctcatgattttcaggtctgtatgtgccgcgcacgtacatattgtaaagctctgtatcctttaatataaccgtcggataaagcctggcgatttccggatgtatttctgccgctcgccgtgcagattctatggaaatttgccgtgtatcgccgggcagccctatcataagctgtattccaaggacaaagccatactcgcgtatcattcggcacgctttatacaccgacttaatatcatgtccgcgctccgaaagccttagcacttcctcatcaaacgactgcacacctaactctatgacatccaccgaatactttttaaggttgtccagtataatttcatctatataatccggacgtgttgaaagatgtatcttatctatcctgccgctgtccttgtaacgcttcgcaatttttaaaaaagctgtctgatcgtcaagcggtatgcctgtaaaactgccgccgaaaaaagcaagttcaatttcctcaaggcctcttccttcaagtgtcggcaggtattcttctattatatttacaacatcctcaggtgtcacctccgcagtgcgcgccgttatcgcatgctggttgcagaaaacgcagttgtgcggacagccgagatgcggtatgaacaccggaataatagcgtgttttttcattatattttttcctctattatactgcctatatccgtaagcggataatcgaaatactttatatcgagaccgcattcttctataaagctgcggatttttgcataatcactgtgcttcgttacgtcgccgctgaatatcatttcgtttccgattcttcctgatgcgccgccgataaagccgtatgcaaatccgttaagtttcacctgctttggtgatataagtaaaaccttaatatcagttttctcagaaactgcacggaaaacaccctcatcttccgttattatatgactgccatccacgactgcaatattgcatttagtatagccctgcgccgtatgcacctttatcattgctcctgcgtcgcctttttcagcattgctttcgcttccactctctcttctgttttcggcttcatttatgctgcaattttcagctctgccgccgtatttctgctctatgtaatttcccgcggcttcgagaagtccggcatccgtgtatttcagattatgaataaagtatttgccgcagaccgccgcattgtatatgatattttgcggataacgaaatccgagcctttctttatcgcctttatatacgggggcttcaggttctgcgccaagtttgcacatatatatgtctggatgcgccgccaccgctccgtacacaaggtttgttgtttcaactttaattaccgtatggccgcacgacacgagatagtccgtaagcgcttcttccgcatcgcacgaaatgtatatattgctcacgtttctgcacctcctcgtttttctcgcaaaagcacattttcattaaaattaccttatctgtatagaataccatatttcaagcaaaaatccaatatctgcgcataaaaaagcctgctgcaatattctgctgagtgcagcaggcgtctttcttttaatttacataaaattgcagagtaaaaaaggcataaaaaccgcgggcagcatattcattacctttatattcgtaagtccaagcatattgagcccgattaacattatgagcaacgaaccagcacaggtcatttctgccaccatatagtcggagataaatcccgaaatatactgcgcaagcagcacaaatgcaccctcatacacgaacacgcataccgctgaaagcgccacgccgatacccatagctgaagcaaacgcgattgacgagataccatcaagcagtgcttttgtgtaaagcgtggtattatcgcccgtaagccctgcatcgaacgagcccattatcgccatagctccgatgcaaaacacaagtgtgcctgttacaaaaccgtctgtaaatttactctcgctatcccgcttctgaaacttgctgcctattttctccgccgccttattaaaatgaccatcgaggtcgagaagttcaccaagaagcgttcctattaccattgaaataacgagtacgagcgtattctggccttcaagcgctcccgaaattccgatatatataacacaaagcgaaagcgcagatataaccattttcgtaagacgctccggtattcctttttttaagagcgtacctactaacgcacctgaagctatcgccaaaaaattgactgttacacctatcatcttatcaaaaccctcttacttatttctaattcaaactactatccgtcattctatcgtatcaggttcgtccttgtcatttgcgatgccgagcttgtccactatataaaacgtaagtccgagcagcattcccactatcgcagataagctcattcccgtgagtctgatatttcctatctgtataaacgcgcccgaaagtcccgttacaaagatgagcgcagtcatcgccaggtttctcgccttaccataatttacttttttatcgactatcagtctaagacctgatgcagcaatcataccgtaaagaagaaagctgatgccgcccattacaggaccaggaatcgtgcttatcagcgccgatgccggagcaaagaacgcgagtattatcgaaaatatcgccgcaccaccaattacccatacgctgtaaactttagttacggccattacgccgatattttcaccatatgttgtcgtcggcaccgaaccgcagaagcccgacagcatcgttgagaatccatccgcaaatatcgacctgtgaaggcccggatccttaagcagatcgcgccccacaatttcgctggttaccacctgatgacctatgtgctcggaaattattacgagcgtcgccggtattactatgagaatcgcttcaatattaaatttaggaagcataaagttgggaactgcaaatacttcagactgagcgacaggcgcaaagtccacaagtccgagcgccattgaaaacgcgtagcctgtgataatggctatgagaatagcaagcgccgaagcaaatcctctgaagatcacctgtcctattacagcaacgataatcgtcactaagaacactgcaataaattttggatttatttctgtatatgtatcgctcaaaatgagtccgccgttctcagcggcggagcccgcaagctcaagtcctataagcgccactataggccccattgcagccgggggcaaaattgcatctatccactttgtacctacaaattttatgataagagctacaatacagaaaataaggcctgttactataaatccaccgagcgcgtattgatatccgtagtcaggattttcaagaagtatgaacgtcggcgaaagaaacgcaaagctcgatcctagatatgccggcgcttttccttttgtaataaggataaaaagcagcgttcctatgccgttcataagcagcactatggacgcgctcattccaaacagccacggcaccagcactgacgcactgaacattgcaaaagtgtgctgtatacttagcggaatgccctgcgcgagaggtactctttcttcaacctgaataatttttctttctttgctcatttttagtctcctatcttctgttttgtgacaattgattattttttctattcttcgtcaatgtacaaattgacgcatgtagttccgtcatagctttccacttttaccgagacgatttcgtttttcgatgtcggcacatttttgcccacatagtcagcccttatcggcagttccctatgccccctgtcgatgagtaccgcgagctgtatcgtcgcggctcttcccattttcgatacggcatcgagcgctgcgcgcaccgttcttcccgtaaaaagtacgtcgtccacaagaataacgtccttgcctgtaatttcaaactccactccaatgtcgtgcgttacaggcagatcttcagcactgccgttcatttttctgtcatctctgtaatatgtgatatcgagttcccccacgggcacttcaacactttctatcgcaagaatattctttgcgagcttttctgccagcggcactccgcgtcttcttattccgagcagcaccacgttttcacaaccgtggttgtgctccgcaatctcgtgagacattcgcttgagcgccctctgcatatcggcctcgttcatcagatttgcacgcagtttcataattttctcctcaaattttctgtttacaaatgaaaaaataagccctgcatacggcagggactgttaccaaattatctctgcgggagctgctttcacgctttatgccccgccggattatttatacaatcttgccggtatcgctgtactgacttaaagattttcttctttgtatattttactttatatcgattgttctgtcaatgcggcaaaacgagttttcatattgcacattgtattagaggatctgccgcttataagtttataatatgccgcaattttctcatcagcattatttcagaaagcattgaaagctaatcccccaattttaatatcccgataaataaaagagcctcggatttactctcagaggctctttctgtttagaattttactgccatcttgctaaaatgtaaactgtataatgacaggctacatatcaaattcaggatttattgcgtagaaattctttgaattgaggttatcctgcactactctcaatgcttcaccgaatctctggaaatgcactacttcccgttcgcggaggaaccttatcggttctattacatcaggatcatcaaccattctcaatatgttgtcgtaagttgttcgtgctttctgttccgcagccatgtcttctacaaggtctgttattgcatctcctttggatgcaaagcagagcgcatcaaacgggaacccagctgccgcctgaggataaagacctgtcgtatgatccacaaaatatgtgtcaaagcctgattcctttatctgttcaatagtaagattcctcgtcagctggtgcacgatagcgcatatcatttccatatgcgcaagctcttccgttccgatatccgaaagcgtggctatgcactgtttaaacggcatcgaatatctctgcgcaagataacgctgtgaagccgcaagctcaccgtccgggcctccgaactgtgtaataataaactttgccatagccgggtttggattctttatatttaccggaaactgcaattttttctcataagtccacatactgctttaaccctccatttcccacggccacggcttatcaatccagctccagccatcttctatattaactccggatgccgtcagtggtccgaaactttcttcaaactcagcaaccgcttgcttatgcagctcattatatttattgtaaaaattaagagcagcggtatcgtttggatgattatttaaaaataaatttacatccacaagcacaaattcgagcatctgcactcttctcagcatttcttctcttgtcatctcttagcacctccaagaaacggtaaattgaggctcggaaaaacagttccgttcataagtgcctcacccggctcataagtttcctcccatctctgcatcggcacatacgccatagcgagcggaagattgttaacacattctgcaattgaatcgcttccaggagtgcttccacctggcattgtatttcccggtcttgtacctcccggggttgtattttccggattgtttacatcaatatctccggaaataccatccataatatcgtcacagtcgtcaagatatataggcatacctatatacggctcaacatttgctgctgcagctctgtcaatatcattcaaagtaattatcccctttcattgctttataatatatattatgaaaaaatcctctgcgagttacaaaagaggttctgaaaagcagatattttccttgatttcaaaaaaatcatatgataacataacaaaagaaaatgtttttaattcaggaggtaattttattatggaacaggactctgacagtgaaagtgatattaacatcaattcagaaagcgcattgcagcaatcaagacttaaactcgaaaaacgcgcgctcgccatatctatgtacggaggtattttctttgttttcatagagtttgcgatggctgtgtttacaacatcacagtcaattcttatggactctgtttacgacgcagcagaacttattatggtcatcgcctcatttcgcattattccgcttctttacagaccgacaacggaaaagcaccctttcggatattctcaagtcgaaacaatatttgtgactataaaaggcgctatgctcacagccgttacagttggacttgttctcagcaatattcaaattatacgcgacggcggtcacatagtcccgttcgcaagcgttgcggcttttgaattctcggctgtatttatcagtttaattgtaattctcgtactaagaaaactatataaaaaaacaaattcgccactcgtaaaagtagaaatcgacggctggattatagactctgccgcaagtacaggcctcggaattgcctttatactgccaaaattgtttaactggaattggctcgtttacatttcaccgtatcttgaccagattatggctatcgtgctttcgttattcatactgccagttcccatcaaaaccgttatcgtcagtctgcgcgagcttttcttatttgctcccgacagcgaaacaattgaaaatatcaaggaaatttcatcgagtgttctctctaagtacaatattgatgtcgttatgtatgatatcataaaaacaggcagaaaactatggatcagcctctattttactgtacctggcgatacaatatcaatatctgcactcgcaaagatacaaaaagaacttgaaacggctttaatttacaaatatccagacctttatgtagaactcgtacctgaattcgatatttaatatatgccataaaactcataatcaaaagtgcgatttttaagctgctttacttattaaatcaaaaaagagtctcaaacttaagcctgagactcttttatcttatttaactcttatttaaccgctcttttggcagctgctcttctcacgagcactacaatctcgtgcagccatatcggagctgtcgaaatcgcagtcaagacaagccattcgcgcactgaaagctcagccgcattaaacaccgactcaaagaacggtatttcagtcacgccaatctgcaaaaggaaacctgcagcaacggcaatcaccatcatcttattattaaacggatttattgtaaataccgatctatctaaatttctcataccgatagcattgaaaagctgcgatattccgagcacagtaaacgcatatgtctgtgctttgagatatattagctcatttccaagcattgcatctatatttgcaagcgttacagccattccttgctccctaagttcgcatacaggaagcaatacaaaagcgataagcgtaatagctcctatcaaaaggccaaacaataccgttatagcatatccgccgtgcgcaaaaaggctctccttcggatcgcgcggcggctttttcatcgcgtccttatctcccgcatctactcccaatgcaagcgcaggaagagaatctgtgatgagatttacccaaagtatatgaatcgctttgagaggcgccgcaagcccgacgagtatagccgtaaacatagtcataatttcaccgaggttcgatgaaagcaggaaaagcaccgattttttaatattggcataaatatttcttccctcttcaatcgcgctctttatcgtggcaaaattatcatccatcagcaccatatcggcagcaccttttgcgacatccgttcccgtaattcccatcgccactccaatatccgcagatttaagcgaaggcgcgtcgtttacaccatctcctgtcatagatacgatatcaccatgcgaacggaaagcatttactatcatcaccttattttccggtgatactcttgcaaatacgcgcagttctccgactatgccgttgagttcatcctgtgtcatattattaagctcatcacctgtaatgcactgcgacatatcgctcgctattccgagttcctttgctattgcaaatgcagtatccttatgatcgcctgtaatcattaccgtcttaacagaagctccgtcaaacacctctatcgcgtcctttgcctctggccgcggcggatctatcatcccgacaagtcccataaatatcaggttttcttcgctggcgctgtcatcgtcgtattttacagcgagcgcaagtacacgaagcgcgtcctttgccatattgagcgctgcatcttctatctcctttatatcggcatccgtcatcggacgcacgcttgcggaaccgtcaggctccatcacagaactgcagtgcactatcattctgtctacagcaccttttgtataagaaacaactttgccgctttctgcatctttctgcacagtcgtcatcatcttgcgatcggaatcaaaagcctgctcgttgatacgcggagccttcgcaaggagttcattctttttaagaccaatattaagaccaagatctatgagcgcaagctcggtcggatctcctatacggctctcaccgtttatctctgcgtccgtacaatatataaatccctttatgagtgcactgtatttattctcaaattctacttttgcccctgtttcatctgcattatccaatatttctgtaagcgccttttcagaaacatccttcatctctcccggcacgtatagtctcacggctgtcattttgttttgtgtgagcgtacccgtcttatccgagcagacaacactgacagcgccgagcgtctcaacagccggcagcttcctcactatcgtgtttacctttaccatacgctgaactccgagcgcgagtactatcgtaaccactgccggcagtccctcaggaatagccgctacagccagcgaaattgctgtcagcatcatctctataacatttctgtcctgaataacggcaatcgcaaagagcgcagcacagagaagcaccgcaactataccgagcatctttccaaggtctgcaagtctcttctgaagaggagtcatctcgtctgccgtgttatttatcatacttgcgattttaccgatttcggtattcattcccgtagccgtgacaacaccctcgccgcgtccgtaagctacgcttgtcgacatatacgccatatttatcctgtctccaagcgctacatcgccttctgcaacaaaggtcgcatccttgtcaaccggtactgactctcccgtaagcgcagattcctctattttaagatttacagtctcgataagcctgagatctgccggcacaactcttcccgcttccagcacaactatatctcccggcacaatttccgctgcaggcacttcgatatttctgccatcgcgccttacaagtgcattcggacttgacattttcttaagcgcttcgagtgactgctctgctttagcttcctgcaccataccgattacagcgttgagaagtattaccgctactattattatagcatcgctgtattcgccgagaaatgccgaaatgagaacagccgcaaacaatatatatatcataggatctttaagctgcgacaaaaacatctgaattttcgtcttctttttgctctcttcaaattcattcctgccgtgcagctcaagtctctcagatacgtcatgtgaagaaagtccgtttacgctgtctactgcaagttccttaagtacaagctctctttctttttgctctaccaccttatcaatcctcctatttttgcccttttccactgtttcatttaattattcatgcgaataaaaaaggctttgtacataatattagcaatccgccaatgaattatgccaaagtcttgttacctgaaacgggacctgtctccagaccacaagcggtcggttgttgaagtacaggcttaaaactactccctttaagcaatttttattttacactatattatatatacatattctgccattgtcaatcagttaataaaattaaatacaaaaatatgtatcgcacctttaattttggcaaatattatgcttaacaaataaatcatataaaaggagcctttaaattttatgcgcaatatatccatttgggagaaaaacactgaaaaaagaacttatccgtcgctttcggaaaacataaatgcggaaattgcagtaataggcgcaggacttgctggtattctcactgcgcgcagactaaaagaaagcggatgcgatgtcgttgtcatcgaaaaagataatctcggcagtggccaaacaaaaaatactactgccaaaatcacattgcagcacggtttgttttacaatgaccttatcaaagacatcggtgaagagcacgcccgactttatgccgaggcaaatatgcgcgccattgaaatgtacgagaaaatgattaaaaatgaaaatatcgactgtgatttcgagaaagaaaacgcctatctctattccgtcatatccgatgaaaaaatacgcgaagaatacaatgccgcatatagtctcggtattccgtgcgaaatcacgagcgaaacatcacttccgtttaaaacagtatcagccttgcgctttccgaatcaggcacagttccatcccctgaaatttctttatgccgcggcaaacgggcttaaaatatatgagcatagcaaagttctgtctgtagatggctgcggcataaaagcgaacgaccttataaattcaagtgcagatgaaacttatgacagacatctgccaagaaaaagtgaacttatagttaaaagcgagcacggaacttttacagtactcgcagataaagtagtatttgcctgccactatccgtttatcaacattcccggctattatttcataagaatgcatcaggaacgaagctatgtacttgcacttgcaaatgtcgtttccgaaaacggcatatatttatctggggcaaacaaagatgcaaaatatgaaggtatgtattactgcgctgatgaagataaattttctttcagacgtgcaggctcgctgatgctctttggcggcggaagtcacagaacaggcgatgcctccgataacaaatacgaaatgctgcgcactgctgcacgccaatattttccgcaatctgaagaaacagcatgctggtcggcgcaggactgcatcacaggcgactatattccatttataggcacatactcaagcgatactccaaattggtatgtagaatcaggcttcaaaaaatggggaatgacctcatctatggtagcttccggtatcatagatgatttgataaatgggcgcgaaaatccttatatagaagtgttctcccctcagcgccataacctttcaggagatcttaaagaaatgctgtctgacagctataatgccgtcaaaggactttcaaaaagtgcagccgatgtgcttacaggaaacaaagatgaagattctgcgctcacgagcggagaaccgcttagatgcaggcatcttggttgtaagctcgcttataatccgggtgaagacagctatgactgtccctgccacggctcacgctttacaaaagacggcaggcttatagacggccccgcacaagaggatcttacgtaaacctgcacatcttttaaacagccaaatagtctatctaagcaagttccgttatcggcttaaatgtatatcccgcttcttcccatttagtaagaagttcgtcgaggatctctccatttgtctttgaagtactgtgaagaagcactactgcgcccgggtgtattctcggtatcagcttattgaacgcttcttgctttgtaggctgttttgattcgtaccagtccacataggctaagctccaaaataccgtcttatatcccatatcgcttgccattttgagattgctctcgctgtattttccctgcggaggacgatatattttcatcatatcctgtcccgtcacttctttgtacttttcttcaaggtcatttagctccgctttgaacgcttcttccgtacctattgccgacatatcaggatgatgcatcgtatggtttccgaccgtatgtccctcagctaccattctttttactatctcagggctcgtttctatgtagttgcctacaaggaaaaagcacgccggtgcattgtgttttttgagcgtatcgagtattttttccgtatttccattctcgtaacccgcgtcaaatgtaaggaatatagctttttcttctacagccttatcgcctcccacgaaatacgcattgtactttgcaagttcttcaggagtcgcgtttcccacaggcgccttgccatcgctctgaaagctaagcccccagttgccatctgctgctgcggacactgaagcttcagactctccaagatcagaagtacgattttcaagaaaatttacgcctcccgcagtagccagcgccgtaaacacaagcataagcgcaagcgtttttgcaaaccgcttgcttctcttcttaaagtttttcttattaataaataccgccataaaaaatcaccgccaaatacttttttatacaaatatacttagcggcattctattttatgattttatatgttttaatcttttttcacagcaagtaaaatttctaacttttactcagctttaacctttaaatctgtatccaactccccatacagtctcaatatactgtaaattatccatatcagtctctattttttcacgaattcttctcacatgcacggcgattgtagaaatatctccgaacgcatcaaacccccaaatcttatcaaaaagctgatcctttgagaaaactctgtttgggttttctgcaagaaaaagaagcaagtcgtactctttctgcggcatacttttctcttcgccattaacaaacacacgtctgctgtccttatctatttcaagtcctcttattttgagtatattcgatcccgcttcctcctttgtatgacccgtaagcctatcataccttgcgatgtggcttttaactcgtgccacaagctcattgggactgaacggtttagtcatatagtcgtctgcgccaaggccaagaccacgcaccttgtctatatcatctttctttgctgacagcataataagcggcatatctgtttcatttctgaggcgtgcgcacacctcaaaaccatccattccgggcagcattatatcaagtatggcaagcgcatattctcccctaagcgccatatcaagccccgtttttccgtcctccgctatatcgcatttatacccgtttatttcgagataatcgcgttcaagttcagctatacttttatcatcctctattatcaggattttttgcattatgctcaccaaccttaatattatcaaatttttcttctgagcggcaaataaacaaatatctgcgtaccctcgtctttctcgctcttgacccatatcttaccgtgatgattttctattatctgttttgatattgcgagcccaagaccattgccctttatattgctccgcgccgaatcaccgcgataaaaaccgtcaaatatacgcggcaaatcttctttttttatacctgttccattatcggatacggtaatcattacaccactgctgacagcttcctgagtcagcatcacattgccgccctctttattgtattttacagcatttcctataagattatcaagcacccttttgagcttatttttatctgcaagcacaatcatctctttgtccgcaagactgcaagtaaacgagagattatgagtttctatctctgttctatattcttcagcaagcttactgagatattccgttatatccacaaattcaaatgcgtactgcatacggccaagttcaagctccgagtactcagtcataccatcgagtaacctttctagcactatcgctttgctgtatatcgtatcgagatatttctgctgtttttcaggtgtatccgctataccgtcgatgatgccctctatatatccctttatagcagttacaggtgttctcatatcatgagaaagattagcaataagcatatttctttcttcctgctgctcaatctcccgagctgcattctctttaagccgccttcgtattttctctatcgaatcgcacaactctgcgagttcttctgcgtcttcactcgtaagtacatcaaaattcaattcaccttccgctatattttccgccgctgttttaagcctgtttatcggtgccagcactgtccgcgccagatttgttgaaagcgcaagacaggtaatcagcacgagcgttcccgtgagaaaagcccacgctataaaataataaattccgatatcgttgctgcgaatcgttcctgagaatacatcccttgccgtcattgtaagacgctttatcccgtctgggttgcttagagaaaatacaaaaattaaaataaaggacataacgattaccaacgccgccgatattactatcatcagtatattggttttcataaaatgtcctttaagtgatttcatcgtgctatacttcccgtctttcgtataaataatatcctatgcagccgaacactgtgccgtaacccgcaagcatacctatctttgaaagtattgcaaaaaacggaagcgtaacacctacccatacattgtgccactgcatataacctgtaaagagaaggctgccggcccgcggtacaacaagtcccgccacataaagtcctatatatattataatacatatcagcatagaaagtgaagtgcttcctgaaaattgatttatcataccggcaaatgctacgagaacgatcatcggaataatatcgagaaaatacgacataaacgctgtgaaaacacctgtcatatcgcgtgcacccatcgcctgcaccaccgttgtcatcacaaacagcaccacgagataaataatagccaccgctgtaaccgcagcaagcttagaaaaatactgctttgctctgcttataggcctcatatacgaggcgcgtattgtaccgtcatgaacttcaccggcaaacacatcacaagatgccataaatattataagcggtatatacacctgtataaaaaagccgagaacagtcatcggaagccccgaaagcaccacctctgcacctatcacgccgcgcgatgcgcgcgatataatcatacctataagcccccacataacgcaaatagctacttcgattatgagaaagacataatatttttttctcgctgcaagttttctgagctcattttgtaaatttgcaataaaaattttcacctgtcttcctcctttatattattattgaaccccttttgtccttaacctttgaaagaaagtagtcttcaagcgaaggattgagcctcagcgcctcttccatcgtctcgaaagaaagcatttctccttcgtgtatcactgctactttattgcaagttttttcaatttccggagctaaatggcttgcaattaaaaacgatgtccccttttccgacgcatatcttttaataatttcacggatttctacagtcccctctatatcgagtccgttcgtcggctcatcgagtaccacaagctcaggctccgaaagaagtgccattgctataccgagtctctgtttcataccgagcgaaaatcttgctactttttctttttgatatctcgcgattctcacaatttccattatcttgtctatcctggcatcatccacattgtcgtaataacgtgccatcattttaaggttttcccttgccgacaaatattcaaagagggcaggcctctcaatgagacctcccacctttgcaagtgctttttcaacatcttcttcaacatttactccaaacacttttacctctccgctgctggcgtggcaaagtcccattatggttttcattatggtagttttaccgctgccattcggaccgagaagaccgacaacatcgccccgttctatttcaaaacttatattctttacccctctgccgtttttatataactttgtaagattatcaactatcagaatcttttccatacattcttctccgtctttaataatcctttgaaaatttaatcattgttctccactttaccttccggatcaaatacatcggctgtggtgctgccgtagtctttagcgtttatcacaccgctaaatgttgctgtatgcttttctccgttcttatcaaatccggccagcgtaacttcaagagtattctcgaggagttctccgctcttgctcatcttagctgtcatcttcgcattttcgatatacgggtcatcaccgaacatcatataaatgtcgctatcatcataatttcctgtgctgtcaatatactcatcgtaagtcttgtaatattcgtagcttccatcagcttttacaagcaatacacctgtgctgtcataatcatcactgtaaatctgttcatatttatcccaaaatgcttctctcgcatcgtcgtatgcgtcccaatatgcttcttctgtatcatatcccgcaacttccggcaggaattcaccggttgtttcgctgtatacattttccgataagtcctttccgtactcttcatttgaaaatgcgctaaatgcgttggaataatcatcatacacaacaccttcgccgccatatgaatattcgttcatactgctgaaaagaagcgaaagtccggcatttattatttcaggcatctgattctttgaaacattcacctgatattcaagcgtattgtcatcttctccagtaagaactacattgtttttcaggtcgcctactaccatatctgctgcaacctcaaggaattttacgagtttctgattggtgttttcatccatatcgataccgagaaaattgccgtctataccggtatatgtcgaatcatatgaatagtaagtattatcctgcacgttgtacgaataatgcttcttaccgtctctgtactgacgatattcataaatgtctccgtccatatatgtctctttgctgtatgagctctccccattgtctccgattttaacgccgttttcactctttgttatcagctttccgtcaaggtagatttcgacatcagcatcaagcgtcacattatcagtctcaagaagcaaattcttaagcgcgctcttatagttgctgtaaccgcttgcattgtcatagtttgcatacaccgaagtcgtcagtaccataagtcccacgagcatacaaaccgccgtaatcatatggcgcttttgtttgaattgaaactttttcataacctcatcctcctgaatagtttttagtttttatcttacaatgtcattataactgtcctttattgatattatatcaaccgtttattaactaattattaacaaacacaaaataaattatttatctttttacccttgtaaaatcataaataaagcaataaccttctttgctcaagtttaattgcctaaaaatgctcatcaaaatattttacttgtccggcaaaattctatttggtaaaattattacaaataataattaaacgaaaatgtaagtgaggcttatttttatgctgtctttgattttaaatattttattcctgcttttatcatcaaactgctttatcctgctatggacgatacaaagctccgcaggagctgatattgtctgtgccgcattatttatatgcctatttttgctcgcaaacatctttaatctttttccgcataaaaaatatcaggatataagattaaaaatatgtcttcatggagttgtacgcctaaaagcagttttgacatccggcataatttcggcattttttcagattacgctgctcctgtttttcgatcttaaagtggttcttatttctatactcatatgctttctcgctcattttatagttttctggaacggtataatttcggtatattttacttccgtgcagctcggtataaaagagcgtattatcggtgtgctttgcggctggattccacttgtaaatatcatcgcgctcgcaagaataatattcactgtatccgaagaagttcgctttgaaaccgaaaagaatattttgaacgcgaagcgtgcatcttccaaagtatgcgctacaaaatatccgcttttacttgtacacggagtatttttccgtgattttaaatatctgaactactggggccgtattcctgacgaactcaaaaaaaacagcgccagaatttattacggtaatcatcagtcagcgctttctgttgccgaaagcgctgctgagctcacagcgcgtataaaagaaattgtctctgaaacaggctgcgaaaagctaaacatcatagcgcactctaaaggaggactggactgccgctatgctattgcgttcctcgatgcggcaccgtacattgcatcgctgactacaataaacacaccgcaccgtggctgcgaatttgccgattacctgctttccaaaatgccgaaaaaagcagttcttgatatcgcttcagcatataacgcggcattgaaacggcttggcgattcgtcgcccgattttcttgcagctgtaaacgacctcacttccgcaagctgcaaagcgcgggatattgcaatgcgcgaggcaggaaatacgtctgacatcttctgtcaaagcataggctcaaaattaaattgtgcagcgagcggcaaattcccgctcaactttacatataaactcgccgaatattttgagggtgcaaacgatggacttgtggccgaaccgtcatttccatggggcgaaaattaccaccttatcaccgtaaacggcagtcgcggagtttctcacggtgatgtcgtggatctcaaccgtgaaaacataagagaatttgatgtacgtgaattctacgtaaaacttgtttcaaatcttaaggccagaggactttaatctaaaatcatatatataatcgttataccgcaacaaatatgatatcaagacacaaaaagattcctaagctcctgcagggagtgacccaacaattcggtcggaatatcatgacaatattgttatctttagaaaagaataataagaaataacgacaataaatagtaaaatacaaaaacagcaaggccaataaaacagcgcaagacttgcataatacaagctcttgcgctgttttaatcttcatattacaaagtgctaagcttcggtatagttatcaaaatatccctgtatcaatactatcggcgttcctttgtctccggaacccgatgtcagatcgcagagtgagccaatgagatcagtgagccttctcggagtcgtaccctgagataccatcttgcccacaagatcgctgtctttcttctttatataatcagaaattgcctctttcagcgcctcgcccgaaaggtgcgcgaactcgttatccgcaagatactttagcttaacctcacttggctggccttcaagccccgctgtatatgcaggcgataccacagggtctgcaagttcccatatcttgcccacaggatccttgaacgctccgtctccgtaaatcattacttcgacattttttcccgtcttttcctttataatcttttgtataccatcgacaacagtctggcagtctctcggaaagagctttacactgtgctcggtcgccttgtttgatccgagaagaccatacttctcgttaaaaccgctgccatctacagaagccgtaagaatatcatcgagcccgtaaaccttttcagcaccggatgcacgaagcagcctcttgcttctttcacggctgtgaatatcgcagcaaagtacattctttgtatagtcgaggatactgcggcagtcatttgcaagaacgatttcgacctcgcagccggcgtcctcgataagttctttgtaatattccacataatcaaccccggtaaatggatgcttaacactgccgaaaagttctctgtaccttgcctccgaaagcacgtctttccaaggatctacacctttttcgtcgagcatgtcgagactgataagatgatttcccacttcatccgacgggtagctgagcatcagcactattttcttggcccccatagctattccgcgcaggcagatagcaaagcgattcctcgaaagtatcggaaaaattactcctactgtactatctccgaatttagcctttacatccgccgcaatctgccccacctcggcatagttaccctgtgttctcgctaccactgcttccgtcacggcaatcacatctctgtcaccgattgtaaaatcgccgttagcctgagctttaagaatgctgtcggctacaatttcaacaatattatctccttctctcacgattggagcgcgcacgcccctcgatactgtgcctataagtctttccatttccatcctccatttttatataaatttctcttctattttttcttctcgtctttccaacgatacgacgcttttttatccctcttcttcattgtatcttccaaccctcgcatcatatcagccggactactgccttttttcctcttcggcttaaacactttaaaaatttccatatcacatttgctccttcctcacaagcaggcaaacggcctcgacattccccgtgcgcggaaacatatcgacaggcgtcgcctccgcaagttcgtaatgacccgcaagcagttttatgtctcttgccagcgttgccggatcgcacgacacatagataagccgcatcggagcagccctcacaatcgtctcaatcagcctgatgtcgcatccgctccgcggcggatccactatcaccacatcaggctttctgccgcttacagcacgtccgcttttatccgtatatccgtttattatttcctctgttttttcctccgctttgccgcagataaattcagcatttacaattccgtttatcacagcgtttctattggcgtcaatcaccgcgcccttgacatattccacgccgtacacgcgacccatattatcataatcatcaaagccgtatttttcgcgcgtcagccttcgcattctgtcggcagcgataagccctattgtaccgacaccgcagtagaggtcaaacaccgtttcagagccgcgaagatttgcatactctataaccttgctgtagagacgctccgtctgcatagtattcacctgataaaacgctgccggtgatatttcaaaatcaagttccatacatcttgacattattgtcggtttccccgctatcgttatatactcatcacccgtaatgcgcgatgttttttccttatttacgtttataacaacgctttcgaggctgtatccctcttcatatatagcgtcgtcaagcattcctacgagtttctcggcattcggcacacctttgccgtttatcacgagaataaccattacttctcccgtactctcagcagtctttacgataagatgccgcatcagtccgcgctgccatttttcatcccacgctgtaatattatcttccttcataaactgtctcagcgcccgcagcgccgatatcgccgcccggctttgaatcaggcaatcatctatatcagtaagttcatgacttcctcgtgcataaaaccctattttcggctccccgagcgcgcgcacgataccacccttttcggtaataacgccgcccgtacttacaggaaactgcgctttattcctatacctcacatagcaagccgaatctccacacttgccatctatactttccattgcaattatcttcgctattttcggctcttctattccggcaatgcgcatgagcttatcacgcaactgtttttccttgattgcaagctcctcctcatacgaaatgccgcgcaaaagacatccgccgcagctcccaaaatactgacagtccggctgcaccctatgctgtgaaggctcgtccacagatatgaggcggcacaccgcataattcttcttcagttttaccacctcagcgctcacaatatcgcccggcacagctccatctacaaacacagccataccttcgtaccttccgatgccatctccgtcagaacttatatcttctatttttatgccggaaataatctgccctttttccatatcttctccaaaaatcttaaattcagtacatcatatcaatatttacggccaacgtaagagcaaatctaatctgcaaacacaaaatccgaaagctctttaaccgtcgcgaaataatgctcagaatgcgccctcataaattcagccacctcaggcagcagcccatgcgaccagcccgccgcagcaaaatcaactccgcacgcatgtgccatatcgtaaccgagtctgagatcatccaccattaggcagtccgcaggcgccagctcaagtttttctaaaatctgcttcatcggataaggagatggctttctctgctcactcggaagctcccacccatatacgagatcgagctcaacaccgttttcgcggtaatgccgttctatctcatcccgttcggaaagcgatactacgcacaaataaccaccagccgctttaaatcgctttaccatatctataaatccatcataaaaatcaggagttttatcttttatgtaatttttccagatttcatactctctgtccatttcctcgtcggtaaagccaagctcttccgtacagaacctttcaaaccccggatcatagcacttgcgcgtaaactcggcaaggtcgtattcccgtgcgtccggcctcagttctttcattataattttaaaagacggatagtgaagttccggcgtactttttacagctgtatcgtcgtgatcgagtaccaggcatttatatttcaatttaaactcctccaaattttactttttattttctaaatctaaaaacccaaaccccgggccgcgcttccctctgcgcttcatccgagtttatccgctatttcctctatttttttcagtctgttgttgagcccagattttttcatcggcggattcatcatatcagcaagctcctgcagcgtagcttcgggattgttctttctcagcaccgccgcatccaaaagcttatcaggaagtgatgataagcctttaactttatctatcttatctattgcctcaagctgccgccgagccgcgttcatcgtcttgtcgagattagcgctatcacagtttatcagcctgttagccttatttctcatttcttttgtcaggcgcacctccgcaaagtcaaagaactgctgatgtgctcccattatattcaaaatatcacctatctgctctgcttccttaatgtatactacatagctctttcttcgctgtaccgtatgtgcatttatacccacaaagctatttataagttttttaatgtcatttgcaagcgtttccgttgaacagacaagctctatatgataagatttttcaggatcgctcatcgtaccaatgccgagaaacgccccgcgcagatatgccttgcggcagcatttagtctttataagtccgtcataaatgccgtcgcttatataattcataccctcgcgtatcatcagtattcctgtctctcgcagtatcggttcagctttctgaccttccttatctgaaagtgaaagtatatattgtctgctttttttgatcgcgctgccctcacttattccgagtgttgcgtccacatcaaaatactcttttatgagctttttataatgtctcgctaccgccggattttctgtggcgactataagctccattttgccgccgcctgcaagcttcacgcttccgctcacgcgaataaaaccggcaatctctgccagcatacagcattttttctcaggctcgacacgcgcaagctctccttttgtatctgacgagaaactcataaacctaccctctctcaaattccgctcaaaacggcataaattacttatttattttatcatgagcttgttaaatagtctacaaaatgaaaattaaaaataacttaaaatatttggactaatacacgctttatgaaacttttacagcttttctattttttcgttatatgatatactcaagttatcagacaaacattatttattattgctcaaattcattttttaagaaagggtgaagtaaaatgaaatatgattttacatctatacttgacagacgcggctatgcctgggctgtcgatacacttaatgataatcctcgccctcctaaagaaggctggaatgtaattcctatgtgggtagccgatatgagcttccctacctgcccgactattccggaagcaatgattgcgcgcgcaaatcatcctaccttcggatatttcagtacttcacaggaatactggaactccatcatcgactggcagacaaagcgcaacggtgtaaaagatctcaagagaagggatataggctatgagaacggtgttctcggcggagttatcgccgcgctttctgttctctgttcaaaaggcgacaatgttctcgttcactctcctacttatataggctttaccgaatcactcgaaaataacggctacaatatcgtcctttcagagctcattcaggacgaaaacggtatttaccgtatggattatgacgatatggaaaagaaaatcaaaaagaacagaattcacgctacggtattctgttcaccgcacaatcctaccggccgcgtatgggaaaagtgggagctggaaaaggctatggccatattcgagaaatatgatgtatacgtagtttccgacgaaatctggtccgacctcattcgccccggttacaagcacatacctactcagtcggtaaacgaatgggcacgcatgcacactgtcgcgcaatatgccgtaactaagactttcaatcttgcaggacttatcggcagctaccacatcatttacaacacctggctccgccatagaatcgacaaggattcgtcactatgccattataacgatataaatgtattctcacaggaagctctcatagcagcatacaagccagaaggacacgaatggctcgacgaactcaatcaagtgcttgcgcaaaacgccgactatgtaaaaagcttccttgaaaaatacggcgttaagatgcctacgcctgagggtacttatcttctctttgcagatttcagcgaatactgcgagaaaacaggcaaaaccctcgatgaagttgaacaggctatgtgggatgtaggcgtatcggttcaggacggccgtgaattccacgggccttgtcacattcgtatcaacgtagcgcttcctttcgcgctcattcaggaagcatgcgagcgtatggaaaagtacgtatttaacgactgacactatagcttgtataaattttatataaaaaaggaacgattaatcgttcctttttgtatttttaaattatacgtcccaccgcatttccatcctttacggcgttcattatatttgacggtctctgtgcgtcgccgataagccatagaaaatgatattcttaattaagaaaggaaaataatatgaattcaaataaaaatctgatacgtaaaattacgaaacccagtttaaaaaacagagaaatcgaagataaaatccttagcgctgcaaaaaatctattcttatcaaagggatataataaaactacaattcgcgaaattgcttccgcagccggaataaatttcagccttgttaactatcattatcattcaaaagcgaatctcgcccaaattgtcggtaaagatattatggatgaaatgatttcgcgcataaatcgtgaaacggaaatgctaaatttcggcaatgccgaaaagctgtatatcgaaaacgtcctgacttggatatatacggcagaaaatcctgactatgaaaaattcttcatcgaatttctcatagacacttccgaatgtgacagtatgaccgtcaatttttacaatcggcttgtaaaagtgctggaagattacgatttaaaactgacagaagaagaaaaccgccttgcttggctcgtatttaaaggaagcgagaagcatttgataaaggagctgcgtacatgcgatgacaaaacttcctacttacagatattatccgtccttatgaccgactacttttttaacataggaataagccctgacgaaataaaacgcataaagcaaacctgcgaagaacacatttcctcgtgttacaagcctttataagaaaaaattcaggtcattccctgaacgacctgaattttcttaatagacaataaatgtttatccgcggctgtccgtcggatagtccttgatcacatggtcaagctgcctgtcagatcccatatcctcggatttttggtgagctgagcgtccagactttgctttggtcatactgagctcgttgaactgagctatgttcatcgcaaaatcatctgtaaatttatcgctatgcggatatatgatatttcccatttttcatccctcctcaaacttattttgcgcaaacaagccggctttatatagattaaaaactggaatacgcctgatcatcttttttcaaaaaatcaaaataaaggacatatcaaaagcaataaataaaaccacctaaaattatcttttaaaaaatctaataaaaagatactctatattgtctgttatgtccaaaaatcatatacaccagaaataaatttatcttaaaaatggaatttttaataaaaaaataattttttagttctttacataaaatcgagggcagatatctgccctcgattaataatcattctcgttttatgtttcaattaactcgcataatttgctttccgatttaaagacgctcaacatctatgcccgttttgtgtccgttaaggttatactcttcaagtccgcccttctcttctattgcgagcgccagcgtctctttcattatataatccttatattcggaaaccgccgcctttacttcgtcgtcggcatcaatataaatgttgatgttatccatcatctcaaagtcgtgttgcttgcggagctgctgcaccttagaaattaactctcttgccagtccttcttttacaagctcttctgtgagcgtagtatcgagtatcgtaaatagattattttccattgccacagcaaatccttctttagcgtcaattcttacgtcgataaaatcttttgtaatatcaaactcttcgccatcaacattcatcttcacggactctgcgttttcaaggcttgcaacaagctctttggcgtcaactgatgaaacagcagcgccaaacgccttgatcttagatccgagcactggacccgccactttgaaattaggtttgagcgtaaagttcatatattcatcgaggtcgttttcaaataccacctgctttacattcagctcttccataatcagcggtgtgaggtcggaaatgagactctcgtacttgccgtccacaagtatttctgaaagcggctgtcttaccttgatcttctccttttcgcgtgtgccgcgtccgagcgccacgagatcgcgcacaagatccattctctcttcaacgctcttgtttataagctcttccttcgctttcgggaagtatgcgaggtgcacggattcttctcccgtaagtttcgtgtacatttcatcggatatgaacggagcgataggagctatgagctttgcaacgcctacgagaacttcgtaagtcgtagcgtatacgctcttcttatcttccgtcatatcgggcgcatagaatctccttcttgcgcggcgaatataccagtttgaaaggtcttccgtcacaaaatccgtaatagctctcacaactctcatatgatcgtaatgttcaaatgaataagtcacatcggcaataagcccgttatattttgagagaatccatctgtcgagctcaggtctcttgtcataatcgacaaatactttatcgacatccacctcatcttgatttgaatagagaacaaagaagttatacacattcctgagcgtgccaaagaacttgctcactacatctatgagcccatcctcgtcaaacttcgtcggcgtccaagccggcgatactgacagcagataccatctcgtcgcatcggctccgtacttttcaaaaagcttaaacgggtctaccgtgtttcctctcgacttgctcatcttcttgccgtccttatcgagaataagatcgtttacgagtacattcttgtacggtgctctgcccttgataagcgtcgaaatcgccatcagcgaataaaaccagcctctcgtctgatcaataccctcgcagataaagtctgccgggaaaagttcctcgtcaaatctgtccgcattttcaaacggatagtgatgctgtgcaaacggcatcgcgcccgagtcaaaccagcagtccataacatccggaattcggctcataggcttgccgcattccggacaagtcagatgaacatcatccacatacggtctatgaagctcaatgctttcatctatattctctatagctttttcaacaagctctgccctcgagcctacgctctcgagatgcccgcactcgcagcgccagataggaataggcgtaccccagtatctcgatcttgaaattgcccagtcctttacatcggcaatccagttgccgaaacgcttttcaccgacaaaatctggataccagtttaccgtattgttgtttgccacaagctcgtccttgagcttgctcatctctatataccagctcggcttcgaatagtatatgagcggcgtgccgcatctccagcagaacggatagttatgaactatattttccttagaaaaaagcttgttttccgcagcaaggtactttacaatatcaacggcaaggtcgtcatccattacaaagcggccttcccacggtccttccgagtagcagcctctctcatcaacaggctggaaatacggaagtccataccttctccccgtctgataatcgtcctcaccgaaaacaggcgcggtgtgtactatacctgtaccgtctcctgtcgttacataatccgcgcaggtcacgaaatgcgactttttgttgagctcagctccaggtatcagtctttcgtattcgtcgaattcgagttcttttcccttcatctcagcaagcacttcgtaattttcctctccgagcaccctgtctgctgccgctgccgcaaggtaatatacttctccctcgttatttcctgcggtcattttaacttttacataatctatatcaggtcctactgtaagcgccacattagcaaacagcgtccaaggagtagtcgtccaggcgagataatattcgtccgccgcctttctcttaaatttgcaagtagctgtaagcaccttcacttccttgtaaccctgcgccacttcgtgcgaagcaagtcccgttccacagcgcggacagtacggaagaatttttgctccctcgtagatcagccctttcttgaataccgtatcgagtatccaccagcacgactctatatagttgttgtcaagagtgatatatgcgttgtcgaggtctgccatatacgccatatcctccgacatctcgcgccacgccttttcgtatgtaaatactgattcgcggcacttctcattaaattctttaatcccgtatttttcgatatcctgcttacccgtcatattcagctgcttttcaacttctatttccacaggcagtccgtgagtatcccagccggcttttctctttacctgaaatccctgcattgtcttgtaacggtttatcgaatcctttaatgttctcgccattacatggtgtatacccggtcttccgttggcagtaggaggtccttcataaaatataaacgacggacatccttctctctcacttacgcactttccgagcaaatcttcttctttccacttttctacctgctcgtgctgcacctcgcttacaggcttttcggataagtttttaaacatttttcttttcctttctcaaagcaaattttatgaaatcagcgccgggattttagaaaaaataaaaatccctaacgcttaaaaacattagggacgattataaaccgcggtaccaccctacttgcagccattggtcaaacaaccggctgcctctcgttaaggctgagctccagagtgatcttcacttgccgcatcaccattttcctctcagctcccgtacactgcgcttgcactctgcgcagcttctttatgtacaggcagaaaactctctgtaaggatattacgcggggctactgtctccttcattgctctttcattaaattttatttcagccatcctgaaaaattttcgtcatcaatcggctacatacgcattattgcataaaatcgaacgcttgtcaacacctgcgtgcataaagcggtacaagttttcgctccgcgcctgttttttactttttctttctatggcgtctcgccttttccgcttctatctcctcgggct

SEQ ID NO: 2718 - DNA, 11250 bp, Unknown
  16S sequences of unknown bacteria
cctccgcgacaatatattcacgaaaccgtgaatatatgaaaaaagcctccccggagggaggcagcccgcgaaaggcactcagatcatataaggtttgatctcggcgaacagctcgtcggtattgtcgctgtgagcggtgagcttgatcggcttaagcagatcgagcgagaagatgcccatgatggacttagcgtcaacgatgtagcgtccggacgaaaggtcgatgtcgatgtcgtacttggagacgatgtcgacgaacttgcggacgtcctcgatggaagagagcttgatatctactgttttcatattaacatactccttattttaatctttgcttattttattccggttatataaatatgatactctatttccgccggtttgtcaataggttttggaaattttccaatcatgtttattttttaacaaagtaaaacggatatgtgcagaatgaacaacccggtcgggcttttctgtcaggacagaccattatccgataattccgacctcgaccgagcgattgtcagccggataatacgccgagagcgagtctttcccaaacctgaaaacaaccccgtgcggcgtcgagacgaactggagcgcgactgatatcccgtcgtcatcgccataggaagccgcgatatccgcgcgaatcccgcacgcgagatgcccgacgaacccggtcggagccatcggacagctgtcgaagtgattgtactcccacttcccggcgccgcagacgacctcgatcttctgcccggacgccccgacgacagtcagtatcagctcagagccgaccttttcgtacccgaacgcggaaagcctgaattgattctccccgagcctgtacatgaccggcgcgatatcggaaccgcggatgaccggcggaacaagcaccggagcgcaggcggtatcgatgatgcaagaccgctccgggagcggacgatcgctcatcgacgcgtatatcgtttcccagaagatatcgagtatccgctgtgtcatcccggtctccgccgtgatgacggcgactgcgtccttttccggcataactatgctgaactgcccatacgcgccgtccgcgcggaaaccaccgtgccggcacccccagaactggtatccgtacccgagcttccagtccggggtctcgtatacgtcggaggtctccgcgacgaccgacgacgcgtcagcgacccagctctccggaagtatccttcgcccgcagaaaacgcccttgttcaggtaaagcacgccgagtttcagcatatcctccatcgaaacgtgaatcccccatccgccgtccgacacgccgtccggggattcctcccaccagacgccggagataccgagcggatcaaagagccgcgtcctcagataatcgaccagcttcatcccggtcagcttcgttattacagccgacagcatatatgtcgccgtggagttgtacgcaaagtgcgtccccggctcatgctcaacgtcaagcgacaggaatctgcgcgcccagccgggatcactcaacgcgacacgaccaagcgtatccgtgtcatgaccggtgttcatcgacagaatgtgcttcacacgcattcccgcgaggttcggcgacacgttctcgggcacaagctccgggaaaatatcgattattctgtcctcgaccgtaagaagcccctccgacacggcaatgccgatcgctgtcgacgtgaagctcttgctggccgagtagacgtgccgcttgtcgctcatgcggtacggcggcgcgactgacgacgcgacgagctttccgtgacggtacagcatatatccgtgacagagaataccctccgcgcgcagacgctcgttgaaatcacgtatcgacgccgggtctatgccgacggattccggcgacgatgtttcaaatacataagggataaatccgcttctcatattgcaatctcccgaagatcactttattctgcgcgcctcgatgtagaagcgcttgtcgtccgcctcgcccattgagaaggtcttgcgcggcagagcgccgtcagcgacgaccgtcgggaaaagctcggacttctccatcccgcggaacaggaatccgacggcgccgtctgttcccgcgagctttctcgccgaaccctcgccgtggatgtaatcgatcttcgctccgggatgcgccgcgatatacccgtcaaggaacttttgcagagttccgaccggaagaaaggacgtcggtgatccgaacactactttctcttccccggcggcgctgacacaggtgatctcctgtacgggtataccgctgtcaggcaggcttccggcaaaagcgtgaagctcagatatcagctccgccgcgtcgacgccgaacacaacccggtagataggctcgaactcaagcgcctcgtcgtggatgttcacaatctcgcagagcgcgtatctggcgggatggacagccctctccgcctcggtaagcgtcggcttcagcttctcccagcaggctttcgcggtcgcgagcgagtggtttccgtcgccgacggcaaacaggagcggggactccccgacagcgagagcgtcaagcgcttccatgacgcggttcttttcgtcgtccggaacgaaagcgcccttcacgtgcccgccgttcttcatgagatcgaaatcatacgcgatatcagtgcatacgccggaaagcggctcgatcaccgtgcgggcggggtcgtcgataaggatcattatatgcggaagctccacaggcgcagcctcacggattctgacgcgcggcgggatacgttcaagcacagtcccctcggtcgcgcggacgagcgacttcgcgccctttgtgtagtcgtaatgttcaaggtcgatttttccgatcagcccgcggcggacttttccgctcttaagcgtgcgctcgaggtaaatcatgctgtccttatgctcctcgaatacgccgccaagatacttttccatcgcggaatttatctgaggtactttttcgtcggtcttttcgaggtatatctcgggaagaatgagcctgagcgccgacggggcatcaccgacgatcctctccgcgtcctcccagtattccggttccgacgtgtactggtcacaggctatgcacgcccattttttcattgccgcgggatccttccggaactccggaagcagtatgtccgcgggatagaagcagtttttcattatatcattcctcacagatatttcgtcttgtctctcccgcgccagatgagcgcggcgatgaccatcgcgccgcagacgctcgagacgagcagaaccccgccaagccgtttctccgccgacacctctttgtcagtatccccgccgtcgactgccagagtctcgctcgcgggcggcgttgtcgtttccgcgctcccggtatcggcggataccggtgccgaaagaatcagcgcggcgaccagcgctgcaatgatctttttcattttgccgccttcacgagacgttcggtatcccgcgcgatgacgagctcctcgttcgtcgggatgacccagacggcgaccttcgaatccggcgcggagatgcggacattgtccgactggaggcgcgtcttcgcgttgatctccgggtcgagctttataccgagccagtcaagacccgcgcaggcggcggcgcgtatctcgtcgcggttctcaccgatgcccgcggtgaatacgacggcgtcgagaccgttcatcgcggcggcgtatccgcctatgtacttctttatctggtacgcgaggatatccacggcgagctttgcccgcttgttacccttcgcgacagcgtctccgaggtcgcggcagtccggagatagccccgaaacgccgagaagtccgcactttttgttcatgaactcgctcatctcgttcggcgtgaagccctcgtgctccatgatgaacgtgacaatcgcgggatcgatcgagccgcagcgcgttcccatctcgattccgtcaagcggagtgaagcccatcgacgtgtcgatcacctttccgtccttaacggcggaaatcgacgagccgttgccgaggtggcaggtgacgatcttcgtcccctcggtacgtccgagtacgcggcacatctcgcccgagacatagcggtgcgaggtcccgtgcgcgccgtagcgcctgatcgcgtacttttcgtacatttcgtacggtatcggatacatccacgcgtagtccggcatcgtctgatggaacgccgtatcgaaaacgagaacctgcggcgtccccggcatcgcgtcggtgattcccttcagacccataagatgtgccccagtgtggagcggcgcgaggtcgcggcagagcccgagcttcgagacgacctccggcgtaacgagcaccgactcggagaaatacgcccctccgtggacgatgcggtgtccgacagcctcgatttcgctcatgtcgcctatacagccgacctccggcgaggtgagcgtctttatcagaacgcgtgtcgcctcggtgtgatcgcgcatcggaatatccgccttataatccgggcggccgggcattttgtgggttatctttccgtcgatgccgatgcgctcacatattcccttcgcgtcgacacacatcgtcgacgtgtcgaagagctgatacttcagcgatgagcttccggcgtttactacgagtactttcatttacgggttctcctgttatttttgatataatttatcataccacacatccggagcattttcaagaggtttctgtaaattcggagaaaaaagagagcggcgcgcagcgcgtcagtctctgtggttatatgggttcagctcttataagcctcaattaccttttcaagtcccgcgatagacgcgaaacagacataaccgaagtttgtcgtcgcggacgcgttgataagatcgagcatctgagccgtctggtcgtcgcgcgaatacttgaccttcaacgctgtctcgcagtaagcggaaataacggtcttgtagctccggaaagccatagtctcgcagacagcgccgatcttgtcgctctaccgggatgtgatcgggggcacgaacacggtcgttccgtcatagactagtgtcatgtagtcactcgactcaagaaacttcggcatacagaccataccgtaatcattgtccatatcgcggaagatctcggtgtgtctgaaccatgtctgagcgaagagcatggtttcgtcggcgaacatctgcatccccttttttgaagtcgtcgccgccggcaatcctgaaaccgatattgtcgaagtacaggtcatgcaaagtctccgcgaaggcgaccgtcgtctcgttataaagcgtgagctccgggatgccctcgtcgttcttggcggtggaacggatgcccgcgccgcaggccgcgagcagaagcgcggctgtaattctcaggcttttcattttggtgtcctctttccttttttcttttatcggcgctgtcccgcgttaatacaacgccccggcggaacttaaccaatgtttattatagcgccatgaaacacatatatcaatattatatataattttccgacatatttttttatttccgcacaataagcggacatacgtcatatgccgaaaattcatcggaatcaaactgcggatcatctcttgacagatcgcgttttatgtagtataatattctatacgtatataaaatgtgtaaaatttaattccagataatttaccggattcggaaactaaaaaggagtccataaaaaatgctcagcaaatcctgtctctcaaccatccgccagacctaccctaccctgaccgccgtggagcgccgggtcgcggactatatactggaaaacggcgaggaggttgtcctcatgcctatcgcggatctcgcgaagaacgtcggggtcgcgaagtccgccgttgtccgctgcgcgaagagtctcggcttcgagggctacgccgagctgaagatcgcgctcacgtccgagctctcaaagaacaagcagctgaactacgccccgtatatcgacccggacgacacgccaaacgatatcctcgacaaaatcttcgccgcgaacataaagaccctccacgacaccgcggaaaagctcgaccgcgacatatacggcaagacggtcgacgcgctcgcctcggcggagcacatctatgtctacggcatcgggacctccgccgtcttcgctaatgaacttcaataccggctcatgagcctcggtatgtacgctctcgcagtcaccgatatcgcggcgatgaaggtgtcgacgctgaacatacgccccggtgacgtcgccgtcgggatatcgaactccggcagaacgaccgcgacgatcgacgccctctctctcgcgaagacacagggagccacgactgtcgcgataaccggcattccggacagccagatctgccgcgccgcggattatcctatagaattatggtcggacgagatacagtacccgatagaggcgatctcatcgcgaatagcgcacttgtcgatgatcgacgccctgaccgtctcgatatccgcgaaggattacaaaaaggcgctcggacgctacaagaagagccatgagctcattgagtcgacaatacgacgcgcgaaacggtaaaaacgaaaggagcggcatcccgcacagcgcggtgccaattatcttttaatgaaaatatcaaaccgtgtgaggagcgccgtctgcgttcttctctacatatcatacaccgcgatctatatggcgcggctgaacctctcgatgtcgtcagacgcgctgaccggcgccggaatcctcaccgacgtggagtacggcatactcggcggtgcttttctcgtcgtttacgcgctcgggcggctcttcaacggatggctcagcgacaggcttccgccgcggacgatgatctgcgccgggctgctgctgtccggcgcggcaaatattgtgttctcggctctgccgccgttttcggggatgctcgtatcatggagcctcaacgcctttgcgcagtcgatgctctggagcccgatactccgcgtcgtcgccgctatgtacgacgtggagcgcgccggaaagataacctcgctgatggtgacgtcggtcgcggcggggaacattgtcgggatcgttgtcaacacagctctgatcgtacactatggaacccgcttcgctttcatcatcccaggcgggataaacctgctgctcggcgcggcggtgctcatactgctcggccgcaccggtatcgggacaaccgaaacggataaaagcgcgcaacccgtgtcacaggctccgctcgtctctctgctgcgccgtccggatatgctcgccgcaatcgcctacgcgttcgcacacggaataatgaaggacaacatcaccgtgtggatgacaaaatatttcatcgcggcgtatgacattgacctcacgaaagcatcctatttcgtgatattcattccggctgtcggattcgtcgggcggatgctctacccgctcgtctacaggctcacaggacagaaagagcatatcgcgagccttttcgggttcgtgatatgcctcgcgtcttccgtaccgctgtgcttcggagtggcgtcgccggtcgcggctatggtttgcctcgggcttgtttacgcggcggtgtcggtcataaacacctctctgctgtcgatatacccgatacgcttcgtcccgcaggggagggtcgcgacggtcagcggaatgatggatttctcgacatatctcggggcggggatctcgtcctctgtctacggctttctcgtctcttccgccggatatccgccgatgtacggctcgtgggctgtcgtttcggcgctgtcggcactgtcaattctgctgtttctcgtcccgcggaagaaacgtgaaaacggtcggaaaggctcttgacccataaaacaaattatttcaataaacttttcccgcgccgtcatataaccgtcacattggtattttataatataaccgtaatcaagagaagagattacagggaaccggaaaacgaccggaacccaccccaaagatgatttcaaacggaggtttatatattatggataacaacaatctttataacaacggcgaaaacaccgaatcgaagaacgaagctcttaacactccggctgcgtcttccgaaaataccgcgccggtgagcgcggcacagaacgtccagccgaacgctgagcaatacgcaaatcagaacaccgcgaacgctgctccccagaacaacacccagtacacggctccgcagaatcaggcaccgcagtacggcgcgcagaacaacggacagtacaacgcacagcagcacagtggtcccgacttctcgagatacagcgacaccacgtcgaacttctcgagcatcccgaacggcggccagcccggacctaacaccgtttacatcgacaacaagcacggcaccggcagaaagaaggagaaggctccgaagggtcgtctcggagtcggcgcggtcgcggctcttgtcgcggtctgcatggtgttctccggcggcgcggctttcgctggtacttacgcggcgaaccatatgaccgcttcctcgactccgaccggtactaccggcggcacgacaggaacgagcaccggttcgacctcgtccggcagtccgtccgtgattttccagtcgtatgacaactcgaacaagaccgcgggcacctacaagcaggtagccgacgccgtgaccccgaccgtcgttgaaatcgtcaccgagtcggtatctaccgcaaccaccttctggggcggcaactacgtcacatccggcgcgggcagcggagtcatcatcagctccgacggactcatcatcacgaacaaccacgtcgtcagcggcgcgaacaccatcaaggtgacgctcaaggacggcactcagtacgacgcaaagcttatcggcaccgaccccgacagcgatatcgcggtcatcaaaatcgaggcaaccggtcttccgtgcgcactcgtcggcaacagcgacaagcttgaagtcggcgatgaagtggtggctgtaggcaacccgctcggtgagctcggcggcaccgtcacgaacggtatagtcagcgctctctcccgcgatgtcaatatagacggcaccgaaatgtctcttatccagaccaacgcggctgtcaaccccggcaactccggcggcggtctcttcaatatgtacggtgagctgatcggcattgtcaacgcaaagtccaccagcacctcttccggcacctccgtcgagggcatcggcttcgctatccctgtagccaccgcgaccaaggttgccgaggagctcgtcaactacggctatgtccgcggcaaggtaatgctcggcatcacctatgtcgacattgaggacgcctacaccgctatgcgctaccgtgtgaatgacctcggtctctacatcgtgtcgagcgagtacaccgatgatctcaaagcgggcgaccgtatcgtcgcgattgacgacacccagatcacctactcgagcgatataaagtccatcctcaagaagtactccgtcggcgacgagatcacagtcaaggtcgtccgcgacggtcagtacatcgacgtgaaggtaactctccacgagtatgtaccgagcaccactgccgaggatacaactaacagctccgctaactgataagcagacaatatcctttcactggatctccttaacagataacagcagaaaagccgtgctttgcgcggcttttctgctgttaatcatgtttcagttcgtttcctcaaggctcttgaaatcttttatgagcttgtcgagattcttctggtacttcgacttgtttgagtcatagaacgacatgaaatcgcgcttttccttgagcataaggtttctcggcgcctgcgcgaggtcgcctatgtacgagcagtatatccacgcggggtcgagcatatgcccgttgtggatgatatcaatcatctccgacgactcgctgtcgcggctgtacttcgacttgagcgccacctcatagtaggacggaacaaccgtcttcgagctctcggaggacatcgcctcaagcacggctcccgccatgtccttcttcgtcgacgtgaccggaatcgtgaacagacctatctggtcgtgctggaacgtgtagtagccgtcctgattctcgtcgtacttcgggtacgggattataccgtagtcggacttcatgtcgcgcagatacgacgtctcgctcgcgtagagccagttgtggatgaacacgagatggtcctgcgagaaatagttgcagaggtcggtcatctcattgttgtcgcttatctctttatacgcgtgaacaccgttcgtctgccagttgaggtcaaatatcttgtctaccgccgatgagaacttatcaaggtcgatgctgaaatacgggaagccgtcgtctccgacatccatcatgttcattttatacgcgctgcaatacgcgtcgacgattattacgttgctcgtgccgagaccgtacagatcctcgtcgtcctgctttccgtcgccgttcaggtcggagtagatatcagtcaccatggatgtcagcttgtcgtgtgtccactttccgtcacggacgagcgcgtacgggtcctcaagaccgtatgagtcgacgagcgtcttgttgaaatacatcgcgaacgaatacctgagaagcgacagcgagatatctcctgttatcgcgtagagatttccgcccatctgggactttgctatatagtcctgcgtgtagtaaggcttcgtagtgtcgatatattcaacgtcgaacaggttcgtgaatatgccgtttgctgcggccggagccacgtgatacatactcgccgtgaaaatgtcatacgtgtcgtcgccggcgagaatcatcttctgcatcttgtcgatggagccatgccccgcctccgggttatccttgaagttctcgatcttcacgccgagacgatcttctacggcgatctcgcggtcatatatcgcgtcgttgaccacgtcgccgttcgcctcgtcgaccgtgacctcgtcgttgaaccggaaatgcgcgcggctgaagacattgattgtctccccgccgaaattcagatctgccggaatatcgtcgtcataaccgaccttctcctcagcggtggtctcacccgacgtcgtatccgcgccggaggtcacaggggtatcaacgttaccgccgccgcaggacgccgaggcgagcagggacaggaatatcgtggtaagaagcatcgagcttatcgtttttttcatgaatgtcatcctttctgatgtttccaaattaaattcacgagttttcgtttgcacatccattataaaccttccagctgctggaaggtcaatac

SEQ ID NO: 2719 - DNA, 1591 bp, Unknown
  16S sequences of unknown bacteria
cccgcgggtattgagaacggggctgcagtgcacggagccttgacaggtgtggacagcctgttataatgacagccatacagcgcggcagtccttctgcggagcaatagtgtttgcccatcgggcgccggccgcgggtcgcggctggtctgcaaggatccaatcgaattcgcttcgctcaggcgagactgcttgcggtatccctgcacaccgccggtgtgcatgcaaaataccgctgcacagctcaccatgcacagtttgtatggtttcgcagaaggcaagaggggggagagcgctttgattgtttatcgggagctttcctccctggagcgcgatttggggattcgtgccagtactctgtacgctgtcagcaatacggtggagaggcattatcacccggtttccttgccgaagcgggacggcagctgtcggttgctttcggttccggatccgcagctgaaaaggattcaaaggcgcattgctcaggtcctgctggcccccatgccggtgtctccttacgctatggcttaccgctacggtgccagcgtggtgcgcaacgctgcgcagcatgtgggcaggcctgcggtgctgaaactggatatcaggcatttttttgatagcattctctacgcttcggtaaaagaagcggcgtttccggcggagatttatggggagcctctgcggattctgctgaccatcctctgctatcaccgggatggactgccgcagggagcgcccagctcgccggcaatcagcaacctggtactgcgtgcgtttgatgacgaaactgcggcctggtgccgggaccggaagatccggtatacccggtattgcgatgatctcacgttttccggctcctttgagccggaagcggtgatcgcctttgtgcgggaacagctgagaaaacggggattttttctcaatgagaaaaaaacggtgtttgttccggcggggcggcagcaggttgtgacggggatcgtggtcaacgaaacgcccaatgctcctgcggagtaccggcgccggctgcgccaggagctgcgtttttgccggaaattcggcgtgtcggaccatatggcgcggctgggaattccgggttcggaggaacactatctgcatcatctgctgggacgcgtcaactacgtgctgcaaattgcgcctgaaaaagcggagtttcttcaggcgcggtcttggctgctccagcagctttcctgcagcgggaaggacaagcgcttgtctgctgagaagttggaaagcggttaaaattcagctgcggtaacagagaaaaaggactcgccgtctattcagacggcgagtccttttttgcgcaatgactggcagagctgtgccgggatgtggcggtgaagaattggaacagcacgcggaacgcagctgcggcggcttactccgccggctcatccagatcgctgccgttgttttctccgcgaacgatttccagatatttgtataaggtgaacttggaaatatgcagatgatcgcagacccggtcgccggatttgctgatcaaaaaggcacctttcttgtccaaatagtccagaaatttcaatttgtcggctttcgtcagcttctctaccgg

SEQ ID NO: 2720 - DNA, 1729 bp, Unknown
  16S sequences of unknown bacteria
agcagacgccggtcacggtcatcgctcaggccaaggggcgcgatctgcaggaaaacatgaagcgcaacttcggcatgcctaatccggaaggctatcgcaaggcgcttcgcctggccaaggaagcggagaagttccaccgtccgatcatcacgttcgtggatacttccggcgcttatccgggcaagggcgcggaggagcgcggacaggccgaagcgatcgcgcagtgtctgtatacgttctctgacctgcagacgccgatcatctgcatcgtcctttccgaaggcggcagcggcggcgcattggcgctcagcgtaggcgaccgcttggtcatgctggagaatgcggtctactcgatcctttctccggaaggctttgccagcatcttgtggaaagacggcagccgggccaaggaagcggccgaggtcatgaagctgacagcgcatgatctgatggacaagggcatcctggatgcggtcatcgaggagccgctgggcggtgcgcagaatgatatcgaggcggtatgcgaacggctgcgcgcgtatatccatgcttcgctggaggagctgcagaagggaaagatgcctgctctgcttgcgcagcgctatgaaaaataccggaatatcggagtgatctgagatgagaaagatagaagtcatggggagcgggtatgcccgccctcaacacagaatagataatcaggatctggagacgatcctggacacgagcgatgaatggatcgtgcagcgcacggggatccacagccgttatgtgagcacggaggagaccaccagcatgctggcggcacgggcggcgcaggccgcgctggacaatgccggcgtggacaaggaagcgatcgcgctgctcatcgtagcgacgctcagcggtgatcagccgatgccctcgaccgcctgtctggtgcaggagcagctgggcatgatggatcaggacctcatggcttttgatctcaacgcggcatgcagcggcttcctctttgcgctgcagtgtgccagcgccatgctggaggatggacagtgcgcgctgatcatcggtgcggaaaacctgtccaaggtcatcgactggacggatcgcggaacgagcatcctgtttggcgatggcgccggcaccatgatcatccgcaagggcgctcaaggcaaggaaagctggcatttcgcccgcagcaaaggcgatcctaaccgtgtgctcgacatcccgggcaagacgctgagcgatgtgccctgccgcaatgtggcagagcattaccgctatctgagcatggatggccgcgaggtgttccgctttgcggtcggcgccatgcaggaagccatcgaggaagtgctcaagcgggccggaaagacgatcgatgaagcggatctgatcatcccgcatcaggccaatatccgcatcctggctgcagttgcccgccatatgggtctgccgatggagcgcttcttcgtcaatctggatgaatttggaaacacttcggctgccagcgtgccgatcgccttcgcacaggcgatggaacagggcaggctgagcaaaggaatgaatgtgatcctggtgggattcggcggaggtctgacttacggcgcatcctggctggaactgtaaggagagagaatatgctgttaaatcaaatgtttgagatcaagtatcctgtcattcagggcgcgatggccaacattgccaccgctgaatttgccgccagtgtatccaatgccggcggaatggg

SEQ ID NO: 2721 - DNA, 15946 bp, Unknown
  16S sequences of unknown bacteria
agcatttcccccatacagataatatccatgattaaacctccatttatttctttttgttcttgtttgctggatgtaattatattacaattgtacgatgaactcaaggttattttgtaatactctgtcggctgcaaggccggaaaggatttgtctatgaaaccagctctcccatcctccctgaaagaagaacgaacgcacggaagcgaactgttccactttggctattacaccgcagatgcttctgccgactccttttttgtcgctccgcactggcacgaagagatcgaaatcgtctattttcaggagggacatttcattctcgaagcaaatatggagcgctatccggtcgattcggaggccatctacttcatccgctccggagaactgcaccggatcttttccgcgaaccgttgtgcagagtccgcggttgtcttctctccgtacctgcttacatttctatccaatgatgccgcacagagacggctgctcggaccgcttgcagacgatacactgctgctgccgcgctgcatccattcaacagatccctgctttggacaggtgctttctgaataccagaaaatagtacggcagtgccacaaccaggacgggatcgatgtgatagaagcgacaccgcagctcttcatcaaagcagcgctcttaaatattctcggcatctgctccgagcacggcctgctcacatcaaagcagccgtcacgtgatcagaatatcgaggatctgaaacgaatcctttcttatatacatacacactatatggagcgtatctacgtccgcgacctcgccggtcttctcagcctgaacgaacaatacttctgccggatgtttaaaaaggccattggacagtcgccgatggcctatgtaaacgcatatcgtattcgccgggcctgtgccctgctccgtgacagtacgcaaccggtcacggacatctgtctggaatgtggattttccaactttggaaacttcctgagggagttccgcaagcagaccggactcacaccgctgaagtatcgccggaagtctcacggttaaattcaagaatgcctttcgtcctgaacacctgcatcatctccatcgtgaggctgacatcttcccactccggcacctctgcacgcggacaccaccttgcctctgcaagttcactctgatccagccggatctcatcgtctccgtccgcttcacagaaaaagcccatcagcagggtcgaagaggctgaccacggctggctcttataataatgaagattctttaccttcagtccgacctcctccatgacctcccggtgcacggtctcttcaatcgtctccccgacttctgcaaatccggcaatcaatgcatatttcttatagctgcgcctcgcatagcgagtcaggagaatctcatctccctttgtcacgccgacgatcactgccggacagatcttcgggtactccatcagtccacagctcgtgcagtgcatcatacgctcaatgtcatcgtgtaccatcctgtgcccgcactgcggacagtaacgccgcgtccggtaccattctgccagctgaaagcccgtcactgctgcaaatgcagcttcccgcggcctggccgtccgaaacagctccagcggctgccagccgacgccttccggaagcctttgtatcgcatctgccccaaaagcttccgcttcgggaaggaaataagcaaccccgtcaatggaaaataaataccggaaggtatcttccatttgaccgccagcttcctcatatgttagaaaagtaagctgaccagcctcatatctgcccagcacattccggttttgataacataaaatccggtctccgggctgcggagtacatgctctgtattcgttatggaatctcccggctcctatatcctgtatcatattatcccaccatgttccatgtaaatttcatcgcaatgtcctgcccggtctgtgacggtgtcttcttctgtgccgcctccagcgcatctgcctccgcctgatactcccgtacctcgacgcagaagcagcgacggtcccctacgacataataataaatatcctggtaatccacaccggaaggctccactgtcagcatatacaggtaatcctttgcatcggtatatgctgcgctcgtgctgatctgcgcatctgcattgctgtatactgcattattggtaagcatatcacgcagttgctcatactccagtaccgaatagtttgtatccagatagctgcagacaatcgtagacgtatcttcctccgcctctgctccgctctgcttgtaggtccagcgttcttcctcatcctctgcctttgtctgtacccacgcgctatccaccgaccagcttccggtcagttcctgtgcttctgtctgctcttccggctccccgccgatattcaccaccgctgcatccaatgacagctcctgtgcaaatgtcccgattggctggctaatacaaactgctgccagaactgctgccgtcagacgcgccgcacagagcatatcctgataatgtcgatttttcatacgaatcgtctcccaattgtaaaatctcttatcagtataagcataaaccggcgttttgtcacgaaaggatttcttaatttttacacttctctgtgtttcttcatatggctcacggtaaattctgtgtcatctatgtaagcttcttgtaagtttcttcttttgttttgtaatttttttaaattttctcgttttttttgcataaaaatatggaattttttcacaaataattgtataatataccttatagcacccatggcttatctcagaaatgtgtcagctgacgctgttccgaaccgtgcgccggatttcacatgtgttcgacttgattctgtggggttaagaaagagaaagagaggtctcatcatgaaacaagacactatgttagcaatgattctggccggcggacgcggcagccgactgcatgagctgaccagcaaagtagccaagccggcagtagcatacggcggcaaataccgcatcatcgattttcctctgagtaactgtgccaatagtggcattgatgtcgttggcgtcctgacacagtacgagtccgtgcttctgaacagctatgtatccgttggcggacgctggggactcgatgcgaaggacagcggtgtttacgtccttcccccgcgtgaaaaggcagacgcagagcttgatgtttaccggggtactgcagacgcgatttcccagaacattgattttatcgataaattcgctccggaatatcttctgattctctccggtgaccacatttacaaaatgaactacgcaaagatgcttgcattccacaaagagcacaaggcagatgctacgattgccgtgatcccggttccgctaaaagaggcaagccgcttcggcatcatgaacacaaatgaagacggcagcatttacgaatttgaggaaaagccggctgagccaaagagtaatctcgcatcgatgggcatctacatatttaactggaagactctgcgcaagctccttctggcagacatcaaggatccgaactcccaccacgatttcggaaaggatatcatcccgactcttttaaacgatggcaagagcctgtacgcatatcagttcaagggctactggaaagatgtcggaacgatcgattcgctctgggaagccaacatggacctgcttaacccgaagaatgagctggatctgaacgaccggagctggagaatttacacggaggatgtgaccgcgcttccgcagtacatcagcgcagatgccgaagtgaaaaacgcctatatcacacagggctgtgtcgtagcaggcagcgtacagaattccgtcctgttcacgaatgtcaaggtcggcgcaggcgccaaggtcatcgacagtgtgctgatgcccggtgcagtcgtagaggacggtgcagtcgtcacacgtgcacttgtggcagacggcgtacagatcggaaagcaggccgtagtcggcagtgcagacagcgagcacattgagctcgtggcaaaacgtgtaaagggggctgaataatatgtacgatgcatttggaattgtaaactccgcttcgcggaatatttacgtggagggcatgcaggattatcgtcctatcggcgccttttcctttctcggaagatatcgtgtcatcgattttccgatctcaaacatgagcaacagcggtattgaccgcatccaggtctatgtcaaccacaagccacgctctcttgtcgagcatgtcggtacaggccgccactacaacatcaactccaagagcggccgcctgcatctgctgttcagcgaggcacgcgcagtaaatgacctttacaatacggatatcgcttcctaccttgaaaatatggaatacatccgccgccttcgcaatccgtatgttgtgatcgcacctaattatatggtctacacgatcgactactcgtctctgattcagacgcatgtcgaatccggcgcagatatcactctgctctaccacgcagtagacaatgcaaaggacgcctatttaagctgcaacatcctgaacctgaacaagcaaaagggcgtactttcgatcgagccgaaccatggaaatgtaaagaaccgcaatattttcatggatacttatatcatgaagacagagctgttcatcgagcttgtctacaaggcaaaggaaatgtcttcgatgttcacactctccgatatcgtcaacgaagaatgtggcgagctcgatgtacggggcgttgcacaccgtggctattttgcatctatcacagatttcaagagctattatgaggccaatatggcgctgatcgattataaatccgcacagaacctcttccatgaggaatggccaatctacactcggacgaatgattcctgcccgacccattatttcgatacggcaagcatcaaaaattccgtcgtatccaacggctgcatgatacacggcacgattgaaaattccatcatcggccgcggctgtgtcatcaaaaagggcgccgtcatccgcaacagcatcgtactcggcggatgcgtgatcggtgagaatgtccacatcgaaaatcaggtcgtagacaagcaggccaaaatcacccgcggacgggaaattatctctcaggaaggcaatcctggatatattaagcggggagatatgctctaatccggacatatgccggtcaaatgctccactgacttgaggcttagtgctctgcacaaataaaaacctccgggaatcggaacctgctcatttcacttgagcatgctcaggattcccggagatttttcattctaaccaaatatccgttacagcccctttgcctttttcacacacgccttctgtgcttcgatcacagcactgcggaagcccttttcttcaagcacacgcacagcctctatcgtcgtccctgccggtgagcacaccatatccttcagctcccccggatgcttcccagtctccagcatcagcttcgcacttcccatcactgcctgagcagcaaattcatatgcctgcgcacgtggcattccatctgccacagccgcatctgccatcgcttccaggaataaaaatacataagccggagagcttccggaaacgccgacaaccacatcaatcagagcctccggtacgacctccgtccgtccaaaggtgttgcacagctcacagaccagtgtcgtctccgattctgtcacatgtgaatttacgcaaagcccggtcatccccgcgcctaccatcgccggtgtgttcggcatcgtccgtatgagctttgtctcacttccgagcctttgagatagccagtcaaatgtttttcccggtgctaatgaaacgaacacctggaacgggcgcaccgctcctctgatctcggtaagcaccgcttccagatactgcggtttgaccgccagaaacacgatatccgcaaattccagcacttccgtattggtttttgctgcccggattccgatctgactgctgatcgcttcccgcgtcttctcgcttttcgccgaggcgatcatctcctgcggctgcacctttttgcttccgagcattccgtgtatcatcgccttagccatgtttccacatccgataaatccaaccttcatatgcctgctcctcctctattttatactcatactgattctttcttatccctttttttcggatctgtcaagcactttcgatccgtcaatgcttttcttttctcgcaattacaaaccaggtgctcgccggattagactcctcatccagcagccgatccgtataccgaacctttgaaaaaccggcttccgtcagcatctgcaaaatccgctccgcatcatagattcgttcccggatcacctctgtatgtaccagctgtcttccctcaaacacctcaatttgcagactcacaagcccatccgccgttcgatgaatctgaaactgcagccgctttccatccaactcgcccagatcgaccggctcacattcttccgtctcctcccatttcagcaagtcaaacagaaaatatcctcccggtgccagatagctgtatacattccgcatcacctgctgcaaatctgccggttccagaatatgattcatcgcatcgcaggtgctcgtcacaagatcaaactgccggtcactttcataggtaaccatatttccctgctcaaataccagctccggatacttctccttcgccatcgcgatcattccctctgagagatccattccctgtgcatccatcccatacgcatgcatcctgctgcagagcacaccggttccgcagccgatatcgagcatcgactgcacacgaatctgatttttttccatccagcgctgcaaaagcactgcaaactcctccggataatagttccagccaaaggcgtcgtagacacggctgaataaatcactgtacatttatttcactcctcattttttctttcattataaatgatattggagtcaaaagatactttgatttcaacatatcattgcatttttcttccatatgcgctataatgtctggcaaaaggggagcttgccgtgagcaggctgagaacaggctgtatcgtctggacccaaaacctgatttggataatgccaacgtagggatatatcatacgcagcatatttttttgtgttgtctttttacggatatgttcggacggacatgtccgttttctttttcaggctttgtgcatggctgctcccccggcagatcgtgtatcacagagaatgcatcgctcatacgtgtctcttccagacatgcatgctatatttgtgattgcaatgttcggataccgatgactgttatcttatgtacgctcagaatctcaagtgtacaatcaaagaaaaggagcaaaaatcatgcttggaacctgtcttgatcaagtcagaacatttgtgccgctcgtgcacaacattaccaattacgtcaccgtcaacgacgtggcaaatattctgctcgcctgtggcggcagcccgatcatgtcggatgagccggaagatgtcgcggacatcacctcgatctgcggcggtctgaacctgaatatcggtacattgaaccagagaagtatcgagggaatgttccgcgccggacaccgcgcaaaggagcttcagcatccgatcctgctcgacccggtcggtgcaggcgcttccgcccttcggacgaacaccgcgcttcggatcatggacgagctgcagccgaccgtcatccgtggcaacatctctgaaatcaaaactctcgcatttggaagcggaacgacaaaaggcgttgatgccgatgtcgccgacgctgtaacggatgagacgcttgactctgccgttgcatttgtaaaagactttgcaaaaaagagccatgctatcatcgccatcaccggagcgattgacctcgtaagcgacggcgacaaatgctacgtcatccgcaacggtcgtccggagatgggtaaaatcaccggaaccggatgtcagctctccggcatgatgaccgcatttatcaccgcaaatccggacaatagactggaggccgcggcagcagccgtcgctgctatgggtcttgccggtgaaatcggctggagtcacatgcaggaatttgagggtaattctacctaccgcaaccgcatcatcgacgcgatctgcaacatgaccggcaacattctgaatcagggggctaaatatgaagtgcgataaaaacaatcttctgctctatgcagtcacggatcgctactggctgaacggacgcagcctgtgctcagtcgtaaaggagagcctggatggcggcgtcacctttgtacagttgcgggaaaaaaagctggatgaagcacattttcttgaggaggcaaaagaacttcagcagctgtgccgcagctatcacgttccgtttgtcatcaatgacaacgtggacatcgcacttgcaatggatgcagacggagtacacgtcggccagagcgatatggaagccctggatgtccgcgcaaaattagggccggacaagatcatcggcgtctctgcgcagaccgttgagcaggccatcttagccgagcggcacggagccgattatctgggcgtcggagctgtatttccgaccggatcaaaggatgatgcccaggaagtctcttacgacaccttaaaagcgatctgcgacgccgtctcgatcccggtcatcgcaatcggaggtatcaccaaagaaaatgtcggtaaactctccggcagcggcatctgcggaatcgcagtcatcagtgccatttatgcacaaaaggatattcagaaggcagcagcggatctgaagaccgcgacgaatgcaatgctcgcataattttaatatttctataccgctctgcggcagattgggggcaccaccttctgtcgcgttaaaaaacgtatgctgaacatcaggaaggagaatcattatgaaaagaaaaacagcattaacgatcgccggaagtgattccagcggaggcgccggtattcaggcagacatcaagacgatgctggcaaatggcgtctatgccatgagcgccatcaccgctctgaccgcccagaacacaaccggcgttacagccattttaaacagcaccccggagtttcttgcccagcagctcgacagcatttttacggatatttaccctgatgccgtcaagattggcatggtatccgacaaggagctgatccgggtcatcgcccggaagctgaagcagtatgaggccagacgcattgtcgtagatccggtcatggtcgccacaagcggcgcacggctgatcagtgaggatgcgatcgagactttaaagcaggaactgtttccgcttgccaccgtgctgacgccaaatattccggaggcagaagtactctccggacagtccatcaaaacggccgaggacatgatctcagccgctaaggtaatctctgattcctatcactgtgcggtactctgcaagggcggacatgatctcaatgacgccaacgatttgctttattatgaaggtatggcacgctggttccgcggaaaacgcatcaataatccgaacacacatggtaccggctgtaccctttcctccgcaatcgcgtccaaccttgcaaaaggctacgaccttccggcagctgtagaacaggcaaaagaatacatttccggtgcactcgccgcgatgctggatctcggagccagaagcggtccgatggatcacggctttgccattcacaacgctttcacaaacgagaaggaggtctgaatcatggaaaaacgaacttcccttctggataatgcgctcatctggttcggtgcaggcgtctctatcgcagaaattttaaccggaacttatttttcttctcttggctttggccgcggactcgccgctattttcgtcggacatgtcatcggctgtatcatgctctttctcgccggtgtcatcggcggaaccagtcggaaaagtgccatggaaacgacaaaatccagctttggcagcaagggcggactgctgttcgccatcctgaatgtcctgcagctcgtcggatggacctccatcatgatctatgacggtgcactcgccgcagacgggatcttctccgccggacgctgggtatggtgtctcattatcggacttctcatcattgtatggatccttattggcatcacaaacctcggcaaactcaatactgttgccatggtacttcttttcctgctgacgatcgtactttgccgcgtaatctttttcagcggaaatgtaatcaccacagttccggacgacagcctttcctttggcgctgctgttgaactggccgtcgccatgccgctctcgtggcttccactgatcagtgactacacccgcgaagcaaaggagccggtcaaagctactgccgtcagcgcggttgtctacggactggtcagctgctggatgtatatcatcggcatgggcgcttccctgttcaccggggagtccgatattgcgcagatactcttaaaagcaggcttaagtattgccgggctgctgatcatcgtattttcaaccgtcacgacaacgtttctggatgcctactctgccggaatctccagtgaatctatcctggcaaagctgaagggcaaccatgcggcaatcgcagtgaccattatcggaaccattgccgctattctgttcccgatggatgacatcaccgatttcctctatctgatcggctctgtcttcgcaccgatgatcgccgtacagatcgcagactttttcattctgcaccgggatcgtaaagaatccgactttgactggcgcagtctgatcctctggttcatcggttttgtgatttaccggatgctgatgaaggtcgatcttccggtcggcaatacactcccggatatggtaatcacagcagtgctgtgctgtctcataaaatgatgatgccagggtcaaaaggtcaaaaagccgttcatgcttgcatgataaggcttttaaacttgggacccgcaaaacactgagcggatttgaggtattttaggattgcgggagcatgaaatgcgaagcaatccgtgtatcatataggttaaaactggccgcgacattccatgatattttggaatgaagcggccattcatttctgtttttatgtaaagcggatattcgcaatccatccctgcagctctgctgacagggcctagcttcgctacttgctcatgaacgcagtcgcttcgcgatctgcgttcagatcgtctgaataaactgatcaatcagcgaaagcgctccgccggatgcacaggcctctgtcttgcatacgcacacagacagataatccacatcctcagaaaacggatcttccttgcgcatgagcgcctcgacctctcccatataggtatcgatatactgtcccagatatccgccgatcacgatccggcagtcgaagagcattcggaccgccgtgattgctgtcacgagataatgcagatactccttccacctggtctgtacacgctcttctcctttttccagctcttcaaaaaacagcgccaggtcacctttcgtcacggtcgcaagtacctttgtattacaataagcatccagacagccacgcttgccgcaataacactgcctgccgccgcgtatcagctggacgtgaccgatctcaccactgcgaaaattcataccccggtacggatgcgcatctaaaatcggtgcaccacagatactgtcactgatcatcatatagaaaaaatccgtctcgtcgtggttgtaccagctctctgcgtaggcagcggagcttgcatcatgaaaaaaacgggtctgatatgggatataggcagaaatttcctcgcatgtcatatccgtatccagccgaagcacccgactataataagtactttctccatccttcgtcagaagccccggaattaccaaccccactccaagaatctggtcatcctgaagccctgcttccagcacaactgtctgaaccgcagctccgagcttcttataataatcatcacatctggcaaacgcctgacggaatctggtgtgcgcgacaaccgtaccctgcaggtcaatcgcgaccgccgagatatgctgattcgtgatattcacaccgatcgccacgcgatagtctgccaccacctcatatagctttgaactgcgccctccggtatttttcttttcctcggaggaacgcaccagcccggcttcctccagatctgaaatattctttccgaccgtcggcagactcaaaccgagatccctggaaatatccagacaggaaaacgatccagcgtcccgcagccgattataaatgcggagccggttatttcgcttgatatcccgtctggttaacgtttgatccagcaccataattgttcactcatcctttgttgtaagttccctttctatcatcgtagtaaaagaaccctcttatgtcaagcgcttatatcaatcattttttatatctttttcacaaattcacattctcatatttagaataaaaatcaattgccaaatagttcccaaatcgctataattaattataaatttgtttataaattaattttaaaaactcattacatagcatagcaaagggaggaacctaaagtggcagtaagaggaacaattccaaaaacaatgaaagcactcgtagcatatggacgcggtgattatcgttttgagccggagtacccgacaccggagtgcggaccggatgacatcattattaaagtagaaggttgtggtgtatgcgcaggcgacttgaaatgccagcacggcgtcgcaatgttctggggtgacgagatgcagccgtcatgggtaaagccgccgtttattccgggacatgagttcttcggacgtgtcgtacagctcggtgaaaatgtgactgaatatgagctcggtgaccgcatcaccgcagaccagatcgtaccgtgcggcaaatgccgtttctgtaggaacggacattactggatgtgccagccgcatgacatgtacggctaccagtactacaacaatggtggtatggctgagtacgtacgttatgtcaagaacagcgttatcacccgcgtaccggaggagatgactgtggagcaggcgcttctgatcgagccgttcggctgctccaagcatgcagtagaccgcgcggagatcacaaacgaagatgtcgttgtcatctccggcgcaggcaccctcggccttggcatgatcacctacgcaagaatgaaaaacccgaagctccttatcgtactcgatatgcaggagaaccgtctggaaaaagcaaaggaattcggcgcagacctcgtattcaatccgggacagtgcgatattgataaagaaatcaaggctcttactgatggatatggctgtgacatttatattgaagcaaccggtaatccggcaagtgtacgtcagggtcttacggtcatccggaagctcggtaccttcgtagagttcagcgtattcggttccgagacaaccgtcgactggtccatcatcggagaccgcaaggagctcgacatcagaggttctcacctcagcccgtatgcatatccgttcgtaattgagaacatgatgaaggggaacattaagacaaatggcgtggtatctcgcatcttcaagcttgaggactgggagaaggcctttgaatatgctaccggaaaatatggtgacttcaaggttgcatttacatttgactaacttttacgcatatatgtttctgccgacgctgcccgcttttatgggcagcgtcagtttttatccgggtattgcagtatctcattgtaaaacagacatctgcatttttgatgcggttaaccgagatactgacagctgcttttttctccgatattccgtcggcgtcatttgataatgctttttaaataatttgcaaaaatattctacattttcaaatccgctgctttgggcaatcaccattatcttcttttccgttgtaataagcagctttgccgcttcctgcaggcgataccgcagtaaataatggatcggcgtatcatccagatagctccggaatagatttaatgcagtgcttttactgatcatcgcctgatccgcaatattctcaagaagaagctttctgtcatagttttcatgaatgtactgcatcatcatctgcagccgcgcctgctcagaagccgggttttcgtctttctgcgtcagatatttttcctctgtgttcagatatatcagatgccacagacgctgcatgagaaacgaggtcaccagctccacatccttttccgaatcctgcgccgccacgatatcccgcatgacagaaattgcttctgcctgccacgcaatgtcaggagaaaaaatgagtccatttaaggcagatttctgaatcggctgcacatattttttataaatcaggctctcaggagctgcaagaaaatccggatccactacacagttcggaaccactgcatgcccgtctgaataatagcgatgcaggattttggaattgataaatacgccatgccctttttccagcgtcacctgcttttctccaatcccgaatgtcaccgtccctgtctcgatcaggacaaactcaaatcccacatgccagtgccattcgacacagtgaaagtcaaacagcgcgaggtcatcatagtaaagcttaaacggatagcctctgtccccatgctgtatcatttccatcatattctcgtctgtcacaatcttattgtaggatgtattaaaatccatacgcgcttctccttatgcaaccaccctcgatctgtctgtcctgaatttttacctcttctgcgatattatacaataaaatgcggatatatgacaatgaaatctgcttccatttacgttattataccagataagcagttctgtaaagcaacacatgtttcgcagctgcgcaggcaataacactatatacaaatgaatcaggagacccgaaaatgaaaaacaagtacaaaaaaacactcatcgcctgttatcttggctttatcacacaggccatttccgcaaactttgcaccactgctgtttctcaccttccaccgaacctatcagatttcacttggaaggatcgcctttatttccacagccttttttttcacacagcttcttattgacctgttctgtgcaaaatacgtcgataaaatcggctatcgaagaagtgtcgttgcatctgaattgttctctgcggcaggattaatcggccttgctgttcttcctggtattatgccggatccctttgccggtattttaatcagcgtcattatctatgctatgggaagcggactgatcgaagtgctggtaagcccgatcgtcgaagcctgcccattcgagcataaggagagtgtcatgagcctgctgcattccttttactgctggggatctgtaggtgtcatcctgctttccactgcgtttttcgccatcttcggtatcgagcactggaaaatcctcgcctgcctctgggcactgcttccgctgtataatacgttcaactttcttacctgcccgatcgaatctctgacggaagaaggagaaggtctcaccatccatcagctgtgcggcattccggtcttctggatcgccctgatccttatgatatgcgccggtgcaagtgaaatatccatggcacagtgggcctctgcctatgcagaatctgcccttggcctttccaaaagtctcggagatatcgcaggtccatgcctttttgccgtcatgatgggaatttgccgctccttttacggcaagtatggggaaaaaattgacctttcaaagtttatgattgcttccggtacgctctgcctgatctgttatcttctggccgcactcgccccgaatccacttctgaacctcatcggctgtgtcgtatgtggattttccgtcggaatcatgtggcccggaacgatcagcattacctccggtaaaataccgcttggcggaacggcgatgttcgcattgctggcaatggccggagatctcggcggttccatcggaccgtacatcgtcggcaccgtcacacaaaattccggtgataatttaaaggccggtatgctggtc

SEQ ID NO: 2722 - DNA, 31971 bp, Unknown
  16S sequences of unknown bacteria
agcaatagttattgctggattcctgaatgctagtgtggttattcgggaatccaggatagacggagtaatatccaccacttgttgcgtcgtaatcatcccattaatcttagaagaccattcaagacctcctcataagtcagtccgttatcagcgccgttttctaaaaatggtgctgataacggaatccatattccgtcaccaacaccaataaaattaaagtcattattccatctcaatcgtccccggtggtttgctggtcaaatcatagaatacccggttcacgtgatccacctcgtttacgattcgggtcatcaccttctgcaggacattccacggaatttccacagcggttgcggtcatgaagtcggacgtctgaaccgcacggagtgccacagcgtaatcataagtacggaagtcacccataacgccgacggagcgcatgttggtcagcgccgcatagtactggctgatgcttccggccagtcccgcgttggcaatttcttcccggtagatggcatccgcatcctgaacgatcttcaccttctctgcgttaacctccccgataattcgaattcccagacccggacccgggaacggctgacggtctacaatgtaatccggcagtccgatttctctgcccagctgacgaacctcgtccttgaacaggctgcgcagcggctccacgatttctttgaagtccacgtaatccggcagtccgcccacgttgtggtgagacttaatgacagcggatttgcccaggccggattcgatcacatccggatagatggtgccctgtgccaggaaatccaccttgccgattttcttcgcttcctcttcgaatacgcggatgaactcctcaccgataatctttctcttctgctccggttcggttacgccggccagtttatcgtagtaacgctgtttcgcatccacgcaaatgaaattaaggtcgaacggtccttccggtccgaacacggcagcaacctcttccgcctcgttcttacggagcaggccgtgatccacgaaaacgcaggtcagctgtttgccgattgccttggacagaagtcccgcaacgacgctggagtccacgccgccggacagtgccagcagcacctttccgtcgccgatcttctcccgcagctcttcaatctgtttttctgcgaagaaattcatcttccaatcctggtcgcatttgcacacgtccagcacgaaatcccggatgaactccgcgccgtgtgcggtgtggtttacttccggatggaactgtacgccgtagaatcctctctttcggtcttccattcccgcaaccgggcagtgatccgtgtgtgcagtcaccacaaaaccttccggcggccggctgatgtagtccgtatggctcatccagcagacattcacatcgtcggcactcttcaggatgccgcccttatcgtcgattaccacgtccgcacgaccgtattcactggtcggagcggaatcgattttgccgcccagcatgtatgccatcagctgcgcaccgtagcagattcccataatcggaacgcccagctcgaacacgccggcatcgatgctcggtgcaccttcgtcgtatgcgctctgtggtccgccggtaaaaataataccctttggatcgaaggctttgatgtcttccagagtggtgctctcaaagccgcggacttccgaatacacattgcattcccgaacacgccgagcaatcagctggttgtactgaccgccgaagtccagaatcaaaattttgttctgtgccattttgatacctcttcccattcttttgcgattaatcttaaaagtgcatcagcgccaacacgctgatgcaccgttattatacattctgcgtctcgtttttcaactatcgtcttacggtagcaacgctgttgtccttcaggacaacgtcgtgagcgccgccctcaacgatactggttgcggataccagagtaagcttcgcttccgcctgcagctgcttaatgctcagcacgccgcagttgcacatggtggatttcaccttgtccagggacagctttacgttgtcgtgcagggagccggcatacggaacgtaggaatctacgccttcctcgaacttcagctttgcatcgccgcccaggtcgtatctctgccagtttctggctcttgcggaaccttcgccccagtactctttcatgtagtttccgttaaccatgattcttgcggatggggactcgtcgaaacgagcaaaatatcttcccagcatgatgaagtccgcacccattgccagagccagagtcatgtggtaatcgtgaacgataccgccgtcggagcagatcggaacgtagatgccggtcttctcatagtattcgtctcttgcttttgcaacttccagcacagcagaagcctggccacggccgatacccttctgctctctggtgatgcagatggagccgccgccgataccgatctttacgaaatccgcaccgtgctctaccaggaagtcaaaaccttctttatcgacaacgtttccggcacccaccttaacagtgtctccgtaattgtcgcgaatccacttgagggtgattgcctgccactcggagtaaccttcggaagagtcgatggtcatcacgtctacaccggcctctaccagtgcaggaactctttccttaaagtctctggtgttgattccggcaccaactacgtagctcttgttggcatccagcaattcgttcgggttggatttatgagaatcgtagtccttacggaataccagactcttgaggtgcatctcatcgtctacgatcggcagctggttcaccttgttgtcccagatgatgtcgttcgcctcggacagggtgatgccttcttttccgtataccagcttatccatcggtgtcatgaactctgaaatcttcgtgtccgcatccagacggctgactctgtagtccttgctggttacaatgcccatcagcttaccgttggcagtaccgtcctcggtaatcgcgatggtggaatgaccggttctttccttcaggtacagaacatccttcagggtctgatccggcttcaggttgcagtcgctggttacgaagcccgccttgtagctctttaccttgcgtaccatgtttgcctggctttcgatggactgggatccgtagataaacgcaacgccgccttcctttgccagagctacggccatatggtcgtcagataccgcctgcattactgcagataccagtggaatattcatggtaatcgccggctcctcacctttcttaaacttggtaatcggagtcttgagcgacacattttccggtcttgcttccgcgctggagtagcccggaatcagaagatattcactaaatgttctggatggttcctgaagaacaattgccattgtacacctctttctttctcacttcgcaacattattttaaatcataaattgtattctaatatagcacaaaaacgttgatttttaaaggtttttttgcactcttcttcactttgttaaattgcacaaccgcattatttgaccttgttgttatttaacaaatattgctttttattttcctcctaaaagcacttccgccgcggctttcagggttccgtcctcacccacatttcccgggaagatgacgtacggcgttcccgggaaacgactttccgctccggtctgccacaccggaattcccggctgaatctgtcccagcacgcgagctttttttaccgccagcgccttggtacccacatcgctggaagtaatgccgccttttgcgatgacgaaagccggtgtgaccgacagccgtcccaccagagactgcaccgcatcggaaatccgcacggaaaggcgcagctcgtcctcccggtcgccggtatccgccgtaatcaggcctcgggtggtgtagcagcacaccgtctgcccgttccggatgcagcgcccctcctctgccaggcagcgcgccacttcctgctcaaaggctccctcgtcccgaaccagcgtcgcatccaattcaataaacgcaatgtcctcccgctcctggagccggctcagctgccgggtggttttgtccgtgtgggaacccaccacgatgattccgccgttggcggtttccttctgtaccatatcctcccgggtcagaagcggccgttccgaaatgccgcccagcacccgcaccagggatgccgccgtccggaacaggaagttcttgccggcagccatggcccgaagcagcgccacgcagaacaccttcaggtccggataatccaccgcattcaccacgactttattgaaatccgacacctccatcagctgctgctgaatccggtcataattcatttcatgcaaatctttcaaggagatgcaggtcaccgcttcctttcggaactttccgccggtcttctcctccacgtactccggcagggtctccgacacgtatccgaaggtggggtccttggcgaactccgtttcattggccggcaccagctcttcgccgtatttcacatagtggatgttgtccagggtgaaccggcccccttccttgaaaaacgggcacagaatctccccgtccaccggaagtcccgtatgcttctcatactcttcccgcagaatctctgtctccagcggaaaatgtccccgcagggtactgtcgcttcggctcacgaaaagatattctttgccggccgcctttgccgccttgtcggtggcctccgcaatctcccggtatgcttttatcgtttccgcctccgtaaaacccctggaattggtcagcacgtagaacagattctcttcctcttgaaaacccgccgccaaatcctccggcgtccagtgggtatacaccgacacgtcgtgcaccgtctgcacccctgtcggatcgtcgtccagtaccaccagcttcttccgattccggcgaagctcctcctgcagcagcgcatccacgtgcgcttcatcgatttccgcatactgcgtcaaaatatctgcctgtttcttcatctctctctcctgtcccaatagcagaatcccctcggacttgctataatatttctgatttatattgtaatatatcggcggaaagatttccactcactatggcattaagaaaataaaacacttgacaacgggcatctcgccggttcccgcatacagaaaggatttttttatgaagattgtaatcgcgccggattccttcaagggatccctcaccgcatctcaggtctgtgacatcgcggcaaacgccgcccgggaggtattcccggatgctgccgttcagaagcttcccctggcggacggcggggaaggcaccgcggaagcgctgatgaacgtcctctccggtgaaatccgcaccctgcaggtccgcggccctttggggactccggtgaccgcccgctacggcatcgttccatccgcacccatcgcttctgcacgggaaacgccggagcatcccctcccaaaaacaaaaatcgccgtcatggatatggccggcgcgtccggcctgaccctggtgcccgaggcggagcgggatgtcttccattccaacaccttcggcaccggcgagatgattctggatgccatctctcagggctgccggcatatctacctgggcctgggcggcagcgcaaccagcgatggcgggatgggcatggccgccgcccttggcgcggcgttccgggacgaaaacggcatgtccctggatccggtgcccgcatccatgcatcgcatcgccaccgtggatgtctcccggctgggcccctccgtttcccggattcccatcaccgtcatgagcgacgtgaaaaaccctctcctggggccggaaggcgcggtgtacgtgtacggacctcagaaaggtattccggcagagcggttagccgacatggatcaagccatggcccactacattgactgtgtagagtccgccctcccaaaaaaattcatccgccacgcaccgggttccggggcggccgggggtctcggcgccggactgcttgcttttacccgcagcgaaatttcctccggcatcgagacggtattaaagcttctggaattcgataagcagctggaatccgcggacctggtcatcaccggggaggggcgcatggatttccagtcggcctacggcaaagtggtggccggcgtggcggcgcactgcaaaacccaccaaataccttgcttcgccttggcgggaagcatcgagaacggcgccgaggcgctgtatgatttcggaatttccgggatgatgcccctggtggaccgcattgaatccctggattcggccatccgcgatgcggagaagaattgcttccgcgcggcggtgcggctgctccgcatcgtgaaggccgggatggaagtgcgggggtagccgtacgcaaaccgtgccggcacccgggccgctttttctaatatttccggctcggagtttgcgtacgaaaaccgaattcattggctttccgggctgccgtacgcaaaccgtgccggctcccgggcacacagaaaagaggtgagccgaacagactcacctcttccatcatcctattccattttcaatacttgaaacgcctttgcggaaatcttcgaactgcccttattcaaaagttcattcacaaaatatccggcagcaacacataccgccagcgacacgacatacacgattatcagccgcattccatccaggctttcccggtatccgtacagcaacatgcacaccacattgtaggataccaaatgcaccagaaggcacggttaaatacaatgtgtttacgaacactcccattaaagcaaactgaatataccaattcagcgtatactttgcaagagatccttctttcgcccggacttttacgcaaagtaccgaacattatcgtaatagagtattcgctttttcatcttcattttctcccggagtctgttccactgtttcatccggtacctctgtcggcagcgcttcccggaattccacccggacgcggctggtcttacgaacattttttaccgtaaccgactcagcggaagggtcgaattcgatggctttgccgttcaccgtcgcaccggcgatttcatatccctcttccggcgtcacggcgaactccgcatccttgccccactttacccagcgggacccggcaatcgttccgcgcgctccgtgagatgtggtcactttaaatttctccgtatagttcaggcccttgatgcggagaatcatggccacgcgcggatttccgttgtactgaccgttcacggttcgcagcatgcgggacagcttcaggtaaccgtttttgtcgcaaatgctgccgttgttcaccatataccagagcattttgccggtgccttcttccttgccggcataaatctggatgtgatgcccttttccgttcttcttcaccacggaaaccaggtcgcccttcttgaggctcttggttccctttcgcttcaccaaagttgaggcatagatccctttcttggcaatcttaatctgctggaatttcttgttcttccgaactttcttcttatctttcccttcgatgctctgaccctgcacccagaatttctgacccaccggaagcaccttgtaccgttggagacaccaggatgcgtagtccgcacagttcagctgcactcttcggtgaattttcgtcagatgttttctattgaaattcttatcgtatttcttcgtcggtgaacccgggtctccgtggtatttagctttttcgttggaaaccttgatggccaccatccgacactgctccagccaatcgtttacgttcatggttcgggtgaacgcacgggcttgattttcccgcatcatgggatacacgccgcccatcatgctcaccatcattaccacaatcagcgtacgacaaattcctcttttgtattttcttttcgaattcatttctcccccctgataatttgaattacataattacacaagatacattgtgctacccccccatttttatgtcaagtaaccattagtttaatatcttgttatattatatatgttcgtcgcattctcttcttatgggaaaagggcagcccgggttgccggaggctcggcccggccaggttggcgtggcccgacgaagggttaaggctttgcgaggagggcgacgccaacagaggcgccggcggaccgggaaaatccgggcctggttggcgtggcccgacgaagagttaaggctttgcggggagggcgacgccaacaaaggcgccggcggaccggaaaaatccgggccagcttggcgtggcccgacgaagaattaaggctttgcgaggagggcgacgccaactgaggcgccggcggaccgggaaaatccgggcctggttggcgtggcccgacgaaaagttaaggtttttcggggagggcgacgccaactgaggcgccagtggaccgggataatccggacctggttggcgtggcccgacgaagagttaaggttttgcggggagggcgacgccaacaagggcgccggcggaccgggaaattccgggcctggttggcgtggcccgacgaagaattaaggctttgcggagagggcgacgccaacaaaggcgccggcggaccgagccgataggcgtggtgcttccggacgaaggaataaggatttgcgggcagtgaagcaccacggccgggtcgccggaggctcggaccggccgataggcgtggtgcttccggacgaaggaataaggatttgcgggcagtgaagcaccacggccgggtcgccggaggctcggaccggccgataggcgtggtgcttccggacgaagaattaaggctttgcggatggtgaagcaccacgtccgggtcgccggaggctcaatcggaccaggtggcgtggtgcttccgaacgaagaaataaggctttgcggatggtgaagcaccacggccgggtcgccggaggctcggaccggccgataggcgtggtgcttccggacgaaggaataaggatttgcgggcagtgaagcaccacggccgggtcgccggaggctcggaccggccgataggcgtggtgcttccggacgaagaattaaggctttgcggatggtgaagcaccacgtccgggtcgccggaggctcaatcggaccaggtgacgtggtgcttccggacgaagaaataaggctttgcgaggagggcgacgccaactgaggcgccggcggaccggattgggccggacagaaaagctttcttcatatggaaaggcactctccatggaattgaaaaacccaaaaacaagaatcgggccgccgcacagttgtgcggcgaccctttgccttcccccattgaagatgcgtgatatgctctacacctagctccacatctcacagagattgtatcattcttttctcggtatgaaaaggtcggcatagttcaatcgtccccaacgggaacttttttacccaatttttccgtcagaaagcctttttcccgccaaaaatgccgttttccgccgtgaaagcgcttcggcctctttataccatcggaatatctgcttttacggaagcgttgtcaatctcgacagaatattttttgtgaatcaagcagttcaccggatcttcggttccgatgaccactgccaggcggtgtcccgcttccacggtgtatctggccggattcaggtatacgttgtaggagtgcttttcccccggaaccagctcaatgctgttctcggaagtctccggtgcataaccggattccggattgcacaggtcgatgtacgcccgggtaatgacgcagtacttccggttcacggtttcgaaaacggactgatcgaaatccggcagatctccgccgttgtgaattccgcccttgtttcgaaccactaccggaatcacgtttcgttccggatcgacagtctgaatgctcgggaactcctcgtccgccacgtcgcacagcagcaccgtcagttttacatcatccatcttgccggaggcgctgcccagctcaaagctcaggcggtccgcatcgttgatgttctccggctcaaagttcttggatgcatcgccatccttcagcgcggcatcgaactttacgcagacggagccctgaatggtcagatcgtccgcggctttgtcgctgaagtagcgttggttcatgttggaatccagcaggctcattctttcgtcgaagttctccttgttgattccggctttttcccaatccgtatcgattaccgttgttccggtgaggctgctgcagaattcgtaatcgcattcggtctcccaggaatccacttcatcccactgatcctggtccacgttgttctgcaccagcaccgccggcatatcctctgcatcgttctccacatcgtacagatagtgggaaatccacttgttgacgatatcatcgtaattccggccgtttatggaaattccataccccttgttggccatggtcggcgtaatatgcgggccctggtgaaggattacttttaccgtccgatcggcttcctcgaaggagtggagcatcatctcgaactgcttggtggacacgttctcgtcgttcagaccgtgaatgataagtgcgctgcaacggataccgtccgccttcaaggtgtaatttccttccttccagaaatcgctgtagtcgaatccggttttcatctgttcataggaaaaatactgatggaaatccagaatcgcctgacgctgttcttccgtcagtgccggatcgttgtaacggctggcgcaaaagtatgccaggaagctcatgagcatttccgccggccagtaccgctgcgcaccttgctgattcaggaagctgtaccagtcactgattcccgctaccggcacgatggtctctagacctgcaactccggtagttgccacggcgaacggcatggttcccgcgtaagatcttccggtcattgccacctttccgttggaccagtctgcccgaatggcctcttcccggttccggtccgcataagcgattcggtcgccgtggagccattccacgatgcagcggaaagaatcccgttcgcagtcggatccggtatattcaaaaccgtcggaacccagcgtacccacgccggcactgagaaccaccgcgtaacctcttaccaggtaatagttataggcatcgatgttctcgtagcacattgcatcgccgtttccgtggtccgggaagtgccaatccgccgggtcggccttctccgccgcttccatcgtgctgatgtacttgctcggatttcccggttccggagaatagttgattttcatagaatccggtcccggacaagcgtttccttccacctctttcatgtggtcgtagccgtcggcatttacgccggcgcagtacggacgcgcctcgaacacggaagcggctttgtagttgccctccgccgcacttctcggaacctgaacgaacgccttaatcagatcgcccttgccatctccgttcgtatcgaaattcgcctccacatacacgcagaaccgaacgatatcggacgtcttcgcatcgtacgcgtctccggtctttccgtcagtaaaaggaaataccggctgtgccatgccgttctcgaacaccggcataagtttcttgctgttcatcgtcatatcatttcctcctatgattcatttcagctcctttgattatactatcccccgagcattaaaaaaagtctttccaccctacaactttttcccgctatagtttctttgtatttgtaaaaatccgcgctaccctctataatgtagtgtatattttcacaaacagggagaccccatatgcgaattgcactcatcggagccggacagcggggcagcatctacgccgcctacctccgggaaaaaggaattgaaatcagcgccgtcgtggaacccattgcgtcccggcgaaaccgcgccgtggaagattacgatattccacaggctttttcctgtctggaagattttctggcgcagggacgcatcgccgatgcggcggtagtggccaccatggaccgggatcactttcgctgcgccatgccccttttgaaggcgggctaccatctgctcctggagaaacccatctcaccggattccgaagaatgcctccgcattcaggaagccgccgatgcccgaggccttctggtcatggtgtgccacgtactgcgctacacggagttcttcacccgcatcaaggacatcatcgactccggcgaactgggccgaattcaaaccatcgaatacgcggagtacatgggcaacttccacatggcccattccttcgtgcggggaaaatggaaccgcacggacaccagcagtcccatcatcctgcagaaatcctgtcacgacatggacatcctcacctggctggtgggctgccgcgccgccaaagtctcctccttcgggaacctgtcctacttccgcccggaaaacgcgccggagggaagcgcccttcgctgcaaggactgcaccctgggagagcgctgccgcttcaacgcctaccgcacctacctgcctatgattggcaaatggcgcgccatggacgtcaccgacgatatgacggaggaaggcatacgccgcgccctggatgagggtccctacggccgctgcgttttccactgcgacaacgacgtgtgcgaccagcagaccaccgccatccagttcgaaaacggcgtgaccgcggctttccagatgagcgccttctccgaccacatgcatcgccggatcaaaatcatgtgtgaacacggctccatccgcggcgacgatgcggagaaccatctcaccatcacccgcttcggctccttcgccgatgtacccactccaccggaggaaatcgcgctccatccgtaccgaggcagacacggaggcggagacatcggattgatagacgccttcgtgcaggctctggcaaaaaaaacatcccagcggccgagagttgccggcacccccaacggggagattccatctggcgattccgagatctcccgctccatcgaaagccacctgattgccaatgcggcggaggaatcccgcctcaccggcgaaacggtatatatgaattcctataaagacgaaatccggacccactgctaatggcaggtccggattttctacttattcctcaatgcggcggtgttttccgtccaccgactcgaacatccggatttcacagttgtggggttttggccgccagcagatgccgttcttccggtccatcatatatccggtcagggctcggatgattcctccgtggcaggataccagcacgttctcgtaatccttttgctccagctcctgcagaaactctcggctgcgctgcaccatggatgccacggtttccaccgtaggcggtgcgggaaaaacctccggcagcgcccagtacagggacattctcggtcccaggccggagtatttgtgcagctcgtattttccgaaatccgtttcgataatccgctcgtcgataatcacctcgtcccgggaaacgccgccgatgatggcgccggtcacaatcgcacggtccaggggactggcgtacaccgcatcgaaatgcacgtcgccgatgcgctcccgtgccgcctttgcctgggcaatccccgtctcgtttaggggctcatccgtccggccctgcatcaatttcattttgttgtatttcgtctgcccgtgacgggtaatccagattttcatcgattcgttctcactttcttactatgttattcctcgtccccgattcccggaagcatggctatgctccgttttaggatgccccgcatgtacgcgatggcgatgccgtaattggtaaaaggaagaccgccggaaaccgcacgattcatccggctttgcatctctcttccgttcagcatacagccgccgcagtgaatcaccaggcggtagtcccacaagttctccggaaactcccggccggaagaggtttcgatgttcacgtcaaagcccagatgcttccgcaggagcttcggcagtttcaccgttccgatgtcctcgcactgacggtgatgggtacatccctcggaaatcaggatggtgtcccccggcttcacctcgtcgatggcaaaagccccctgcaccgcagtttccaggaagcccttgtaccgggccatcaggatggaaaaggaagtcagcggaatatcttccggaacgatttccaataccaaccggaatgcctggctgtcggtaatcaccagggccggtttgaatcccggttttgccaggaggcccgccagctcggtttccttgacgcacaccggcacggcgccggcctccagcaggtcccgaatcacctgctgctgcgggaggatcaggcggcccttcggcgcggaagcatcgattggaattaccagcaccaccgggtccagcggatgaatcaggtctgcggcaatcggtttttccttcggtccttccttctgcccgatatgggcaatgcgttccttcagctcccggatgccttcgccggtcacggcactggtgcgcacggaccgatcctctgccggaaggaaatctgtttttatcaaatcttttttattctccgcaatgacgtatggaatggccttttcccggaacagggccagcagcgcctcctcttccggctgacgctcccgagatccgtcggtgaccagcaccgccacatccgtacgggtcagcacttccttcgtcttccgaactcgcatctctcccaggtccccttcgtcgtcaatgcccggggtgtcgatgatgaccaccggtcccatgggcaggagctccatggatttatataccggatccgtggtggttccccgcacgtccgatacgatggccatgttctgcccggtcacggcgttcaccagactggactttcccgcatttctcaatccaaagaacgcaatgtgcatgcgttccgaggacggtgtgtcattcatccccatttgaatacctccctttttacgaatatttccttaccgctgttccatcatgcggtccacgtaggtgtttttctggaacaggtgaatctgcagctctctggaaagatattccagaatcggcccgccggccacgcaattccccttgtcatccagcgccggcccgtaaatgccgatgcccacgtgattatcggcaacggataccagtccgccgcccacgccactcttggtgggaagtcccaccttcaccgcaaaacgcccggagcggtcgtacatcccgcaggtcagcatgatggttttacagatttccatagtgcggccggtaaaaacagattcgccgtttcccaattttccgtccatggcgatggtcattcccatgctggccaaggataccgcggtaacctgcagggaacagagacgagtgtacagttccaatgtctcctccacccggtcgtccaaaatccctttgctctgaaggagataggcgatggcccggttccgggacaggttctgcatctccgaccgaaaaaccgtctcattgctctccatttccggatcctcgcagacctttcggaacacatcctgaatttcctcaaagctcattttgcccagcagcatgtttgccactgtgatggccccggagttgatcatggggttcatcgggtggttgctgattaagtccaggtcaatcagagaattgaacgcttctcccgatggctccatatccaccttctcgaacactttgtccattcccaacagttccagcgccagcgccagggagattactttagaaatactctggatggtgaagcggcggttcgtatctccgatgttgaaatgccatccgtctctcgcgcacaggctgattcccagcgctccgggatcggcctttcccagctccggaatgtacgtggccacctttccctgagggagcaccgcctttccccggcgataggcttcctccatgatgtcgcacaattgcttcgtcgatatttcttttccgtttgcgattcccatactcgtcctttctatttgctcattcccggtgcatcaccgaaccggtttccgaatacttccatccccgcttcatacggggtgttgtcctgcacgcagtcgtacagaatgttgattacttctatttcgcttttttcctgaaaatccgccaggggaaatgcttccccgaattgatcttcgtactgcatcagcaacatctccagcatcgccgctgcctccttttccgcaattaatccaccgtgccgtcggtgcgttcgccccgctcaatccgctccgccaattcgtgcagatattcccagcgctccatcttctcgtccaattccgcctccaaagcagttttctgctgcgacaaatccgccaacaggaaggagtcggtgccgttctgcatcatctccttctccagatttccgatcttctcttccagcgtttcgatgtcctcgtcgatggtgtcaaattccttctgttctttataggtaaaacgaagcttcggcgcccgctgatttcgtccgtcactgctgcgggaaacggccgccccgtcctcggcggaatttgtttttaccccggaaagcgcctcctcccgagcctccttctcgttcatgtacttgctgtagccgccggtgtactcccgaatctccccgccctcttcgaaggcgaaggtccgaatcaccagccgatccaggaagtaccggtcgtgggagacgatgagcaccgcccccggaaaatcgtccagataatcttccagcaccgtcagggtgtcgatgtccaggtcgttggtgggctcatccagaatcagcacattcggcgcccgcatcagcaccgccagcaggtacagtcggcgacgctcgccgccggaaagcttttcaatccgcacggaatgcatgtaggacgggaacaggaatttctccagcatctgagaggcggagaggtatccgtccttcgtcttcacgttccgggcgatttcctccacgtatttaatcacccgcaggttcgggtccatctcctccgactcctgagagaagtatccgattcgcaccgtctccccgatttccacggaaccggtgtccggcgttacctgccccatgataatccgaagcagggtggttttgccgcatccgttgttgcccacgatgccgattcggtcgttccgaagaatattgtagctgaaatcgtggatatactccacaccaccgtaggatttcccgatgtccttcagctcgatgatcttcttgcccagccgggagctgacagtgccgatttccatccgcgggtcgtcaaaggtttccttggccgcttcgatctcctgaaaacgctgtacccggctgcgggatttggtggttcgagccggcgcggtccagcgaatccatcgaagttccttccggtacaggttcgcccgcttccgctcgttggctttggcctgctccagccgctcctccttggcaatcaggtaggcttcgtaatttccttcataagaaaccagcgctcccttctcaatctcgcagatgtgattggtcactcgctccaggaaataccggtcgtgagtaatcatcagcacggaacccttgtaattctccagctgctcctccagccactcgatgatatcgttgtccatgtggttggtgggctcgtccagaatcagcaggttggtatcccggcacatcaccgccgccatggccacccgcttccgctgcccgccggacagttccttcatcttccggtcgaacatattcatccgaagcttggtaagcagggttttcaccacgtattccggcaccgccccttggacgtactccatggcctgctccagcaccgtggcctccggcccaaaatccggattctgaggcagatacccgatgcgaagctcattgctccgcagaatctctccggcatcctcttccatcgccccggcgataatctgaagaagggtggatttgccgctgccgttcacccccaccaggccgattttgtcccccaaatggatgctgaggttgatgtcctccagcagctgcttctccgaaaaacgcttctgtatgtgttttgctgtcagtaataccatgctctttccgctccaaaaataaaattcgttctgcaacggaatccggccattcccctagattccgtaaatcgcttcgatgcggcgcaggaattcgtccgtcagatacgcatccagcttaatgcgggtgctctcattggtcagccccttgtcattttgacggtattgcacccaggccatcgcgcaccatgtcagtccccgcaagcaggtgatgacgatgaattccctcgttcgcgctctgagtcctattgtatcatatctgttccccacagattcaatatatgtatcgataaatttctcaatcgtttcgttttcgaaaatcacgtcggtcttccagaaggtggtggtaggtgccaggaagtgtcccagatcctgggccgggtccgagtacaacggcttttcccaatccaccagccggaccgttccggtttcctcttccaccaggaagttggtgttgttcagctccgtgttcacgcagcacttatagccggtgtattccccaccgtcctgaatccgcttccgaccctcgtccagcagccggcgaatccggttctttacatccggcgcgcccagctccgaattccaataggtggcgaacatctcctcgcactcctccaaaatggcgcggatgggtgcctccggttcaattaatccgtcggtctcatccaccggaatgcagtgaatctctgccaggcatttcgccgcctcttccagctccgtttcccggctgtagtccagcgcccgtcccggcaggaaggacatcaccagcgccccccgggtcagctgttcatctccgggatagatgtatttcaaaaccggagttcgtccggagttctccagcagcttcagagcatttccttcatattcgatctgattctccagatgcatctggctctcggaattcacccgcagcaccagcttctctccggtcaccggatgccggaaccggaagttgatattgtactctccctgggccagcatttcatattcttccgccggttcctccggcagttttagcgcattacgataatccgggcttaacgtgagcgcacgcaagcccggaatcgtatcgatggtcatcgatctttttttatccattgtattactccgaaatcactttcttcaaaacctccaccacatcgcagcagattgccggacataggttgaacagcaggttctcttcattgatcttttttccgccttccgaggtggaaatgtccgcacccagcagctccttgcactggaagccctgggaatacttctcaccgaagagctcgttgaaccgcagcatcttctgaagcatctgtcccttctgcacatcgtccccctcttcgtcgtggccgtagatcagaccaatcacgttatatgccgccagcaccgcgccacaggtctcaccccgcatcattccggccgcatagcaggcgctcatcttccgcagctgggaaagggaatatccggtttcctcttcgaactgtccggccaccacctgtccgcaatcgattccgttcttgaaattctccgctactgtctctttggtcatcatctcattctcctcatttcgttgaacttatattattggaattatttcattttcatgtccgccatcattatatcattgggagatgtcgtctatcaacgctttcatccgctcaatgccccggcggaagtcaaactcttctttaagcttgtcctgattcttcatcacgttggcccgaagctcgtcgtaccgctcctccatctccttcatgcagtgaacgaattcttcctcgttccggtagaacagcaccatgtcgccgtagttccgctcaaaggactccgtccagtcgcagatcatgggagtcccgcagaggagcacttccgggaagcggttgttcatcatttccgattccagcatatccgcaaaatgatcgtttaacgagaatcgggcatttcggtacaattccggcaaatctttataatcaatccggccatgaaggtggacgaacatgctgtttgcatagaatttatcccagccttccccccatacatccacctcaatgccgttatcgttgcaccagcgaatgcagtcacgagggtacttgcgctgaataatgtttccgataaaaacacaattgtacttcggttgtgcgggagtgtcggatgggtagaatgaatccgtgtccgtcagcatcggcacaaacgctaccggaatatccgtcatctgctgcagcattttctggtgggtttccgatgtggtcattaccaaatcgtacaacgccagctcttctgctgttattttatccgggaaacaattaatccacatgacgaactttgtgttctcatctcgacgatccgggtggaaatatcggtagccatgaattaataccacgacgtccgcattgatgctgcaattccaattttcataacagtcaatgagaacgtaatatcccacttcctcgaaatatctctttagaacatcgcagtaggcataatcgacactctttgccccccgtctttccagagccggacatttgattacaaggatttcttttcctttcgccaaccgctgcacttccgctttcttacgttcccatatatctcttcttcgaaattccgcctttaattcatctctcaatcgattgatttctttggtgtttgctttcaggtcatttcttaattgctctatttctttggattgctgttcttctatgcttttcaaagaacgcacagaatttcgaagctgatccaaccgtatgttggacaatcccgctcgacttcgtatttcttcaatcttctttctgagtcccacactgttctcctatatatatttttcctgtttccacctctaccagattatgacccctttgttggtgcggcaagggttcttcttcataatcaccatactggtctcttagaaatatttccgggcggtggacaatccgagtttccacaccgtcgaacttcactcttcgagtcggaaaaatcgtatccagctccccaccgctatattgaggcacaaagcttgccacatactgcagattcaggcattctgccttatcattatattgttgaacgaatttatcaaactttcgttgcgttattcccagcggtgtgtgacaaaacagccatcttcgcagatttccgaatcgataattcgcttcatccctcattgtctccacatctccgatagtcggattcggttttgctctattggcaacatagttgtgctttttcgcccgtttctcgacctctaaacgatgctttcttcgatcctccagtgaattcggcacataatcaaatggaaaaatatcaattccaattcccttgtggaactctcttccatttgaccaggctgtttcatatactgtatcttttcgtcttaacttgatatataaatacggcatgtggggatcgttttccctggtctgaagaaagaacttttctttatccaagtattgatctgcacatcgtttgaatcgctcgtaatcacttcgcaacataccacagtcgatatcatcgtcccaaggaataaacccaccgtatcgctgatatcccagaagagatcccccgcacaggaagtactcaacattcatctttgtgcatactcgttccatttcttccagtatttccagttccaccggatgcaaggcttcactttctttcctgtactgttccatgtcaaggtctgtccacggcgtgacatcaaatggaatcggcatagatttctgtcctaggagtgtctcctgaagtggcaacagctgtatctcattgataatcttggttttctttcccactactcgctgataaaaaacactgtccgtgtggttgtacttctgcgccaactgattcaaacgcccatatgctttttctgaacttcgaaagccgtacagcagctgctttagtacaaatttaataaacgactttccattcaccgccacatattctttttgtccaacaatgcgcctcaagcaccgattttttctttctgtttttcgataaaaagcgattcttgtatctgccgccatcggaaccttatcaaaggggctcacacgaagtgaaatccaattctctagttccacattttctgccttaatgacgactttctgctcaatatagaaataaggagatctatgtttttttcgcttatccccaaccggtgttgttcgcacttgaaaattcaattcatccgcatatttctcagcatttcgaataaatctttcataatcctttcgaagcattccgacctcatacacatcatcccagcaataatccggcagagtatgatagtgaacaccatataccagcaaatcgccaaatgcaaaaaaatgcaaaccttcccgtcggcaaatggcctccatcacagataacagtttgccaatactttctgttatttgatttcctgaaatggttatgttcagattatccgatatatcatttctaaatgattccattctatacctttcttcgttatacttccttcaatgcttcgtatatccgctctcgttgatgattatccttatacataaaaaacccttgcattttttgcaaataacgaggattcattggtgcatccatcagttcaatcaattgattcaccgcatcctcttcgttctgaacgaatgggccgaacccctcttctaacggtaaatccaatctgcaatagccattcattccggatttaaacaaatcataatccggtacgaaatacatgatctttctgctcaagtacacaaagtcaaaaacaaatgatgagaaatccgtaatgaatatttcatagtctgtagcatttatatcatccgtaatcagattcactctcctcgattctgttcgtatggtgctgttgtatcctttaaaaataggatgcagctgtatgtctaaagtatacccatgtgcttccagtgctttgtccaatcgatcatcatttataaaccgcataatcgatttataaaaactcgaattcacaaatccgtccacatcactaacccaatcattttctttccgatctattaaatatcgtctccatgttggggcgtacagtatcttctttctaggtttttgactcacatcgatgcaatcatatctcggcattccggcctggatgagatgatttcgatcaaatccataattttcaatgaggttttcctcttcataataagtcgatatcacttccttatcgattttcaccctatccagagagtagtgccacggaagatgtgcatgtaatactccatgttggagataaacagtcttcggaaaattcaacacatagctatatttcttgaaagctttcatctccatcggtaaataagtatattcttctgcaaacgacataataatccattctgccattagaaacaaattcacatgttttcgggatccaaaacgaacaatatgcttttgaagtgccgccggaaactctttctttctctccttaaaatcatcgccatccagaatatagaaacgttgaattccatcatttttatatacatcgtgttcgaattgatagaagctattatcttttcgaacatttttacagtcatagtatagccaaatcggggaagttctcttctttttcgcttctaatcgatattgctttattgcggaaccgatatcttcgagtgcgattttttgaaatagccaaagttttctcttcgcagcatctgcggaattgagattaagatccctcacgataaatccattcgcacgaaaactgtatctgagttcttttttatctcttattagagaatcattgcgtctgcgtctgaagggcactcgattgctaaagtgcatatccgtctcatatcgttccccatttgctattacgacaaacctaaacttttttattacggtagtatcgatacttacttcgaaattatagaattgattggtgatttcatgcgtgtgaaaccggctcctggaacttggctttaaaggcaccggaatcattcgattgctcaagccgcataaaacctgtaatgaaacatcttccacgatactggaatataagggttttaacgttccgaaaagtttgatatcgtttccctccacgcgacactgttcaattgttaaatgcacgttcttttcagaaactactaaaccattattacaaaatacgtcgatgcgtttcttgccaaattctacatgacagttgttggatttctttttcgaaagccagtataagcgatgctcccgtagtacattcggatgattaataataatctcatcatcacatcgacgcagcaacttaacaattctattccacgcctcatgataccgtgcctcatcatagtgatatggcagcagtttattggccctcaacttccagttgagatcacttatatacaaagcttgaatatagtatggaacatgttctgaaaactcggaaaactccctctcccacaatttcatcgagtgctcaaaaagatagtatgaatacaacatcttatttgtagtgctgttgctgctttgcacataataatactccgcattatcacaatacccaatcttttgtttttccttcagcgtgtcaatattatatttctgatcttcgtggtaaaataaattttctgaaaaaagcacattcttctcaaatttattctttacgcaagtgttcatcgttgtatgacatatgaatgaattttccggttcggtcaagtcatacacgccctgggattttaacacttcatatcgaaaatgcaggtcttgttcctctccatccttgattggaataatcttatatgtgacaacatcaatctcatcatagtgccggtcgaaaaaattacatacgctttcaattgtattcttacctagataatcatccggatctaagtacattaagtattttccggttgcgtgtttgatgccgaaatttcttgcttgtgcgggtccaccgttctccttcgtataacacttaaaattgctgtatttctccgagtaccgcttcattatgtccaaagaattgtcttctgaaccatcgtcaatcatcagaacttccaccatctgtgggtcaatgctctgattcaaaatggaccggaagcaggtatccagccattctgccatattatatataggaatgattagcgatactctataatcacagttattggtgttttctatttctctccgcagatttgtcccgttcattgcactccatgtcatccatttattatcattacccggttcttcataactatgtaactcgttttacgatacataattcccaaacgtagctaattatacactataaattgtcttttcttatctttttcacgaacgtatagtttttttcaataattcactagtactcaattcggaaataatcgaggttcgccttatatcgatcctgcgctgtcaagcaggtatccgtcagatagccttgcagattatcccattctttgagtccacggtaataatacaatttcaaatcctcttcaatgatgaatggaactatgttgtatttcaggcattccttgaacatgattagacgtccgactcgcccatttccatcttgaaatgggtgaatccgttcgaaccgtacgtgaaaatccagaatatcctctaaagacttcatccttttgccgttatactcggatatcaattccttcatccgctctgcaacttcctccggcagagccgtatccatcccccctacttcattcggcaccttcttgtaatcgcccacgttaaaccactccattcgagaatcgctggtaccatttttcaacatccgatgcaagtccttgataaaccgttccgtcaaaggtgcttgtgcatggtcgataatcatatcaatgcagcgaaaatgatttgccgtttctattacatcgtctacgttcagtacttctttctctacgccaactgtattcgtttcaaaaatgtatcgggtctggtcatgagtgagacaactcccctccatatgattggagttatatgtcaagtcaatctgcgttttatggtagattccgccggaatattttcgtgctttttcgtttcgaagtatatctaacaaatcattcttctgtacagttttcttattggaacgctccggcttttctgcattttccggaatattccatgtctttccggagcgaaatgcacccgctacacgtcctttagcacagtaatttcgtacgctccgatcggacaccttccatttctctgcaatttccgaaaccgaaagatacttcattcgtccacctcctaccattttgcaacttaaatgggatgtggtttagtatatcatgcgttcggcaaaaaatccatccatagcggcaaccaagcaaatactttttgccgattaaatacaactgcatctaaaacaaacggagcccacaccccctcggtggactccgcattcatttaatttcttttacaataagattctcaatcgactatttttcaagcttgtaacccagcgcttcgttctcgtaatccccgcgctttctcttcagctccgcatagccgtcccagacgccttcctcgtcttcgatacccacagtcttgggatcgaaaatcggatccaaccccagatccttctgcttcttgaagtccttcacaatccgcagcaccattggcgtcatgcacagcaccgcaaaagtgttgatccaaagcatgcagcccacaccgatatcgcccatcggccaaatgatggttccgtcaatcagcacgccggacaggacgaacagcaggtagaggattcggatgaaggtaaccactcttttgtccgccttgaacaggtagcggcacaccgactccagctgcacgccgtaggacagcatggtggtgtagatgaataccgtaatcatgatggccaagatgatcacaccaaactgtccggcgatggtcttgatggcctcctgcatgtaggatacaccgtattccacgcccggggcgaaagatactaaagtctttgcggtggcgccgccgtcggcggaaacgttgtatgtgcccgcacagaggatggacagacccgtgcaggtgcacaccagaatggtatccacataaacggacagtccctgcaccagcccctgcttcaccggatgggaagtgttggtggtggaggaaatgatcggactcatgccgttgcccgcatcgttggagaagaagccgcgcttaatgccccaggatacgcaggcacccatgattccgccgtagatggaatgtcttccgaatgctccggtaaaaatatcggcgaacatccccggtatccggtccgcattcaatgccatgacggcgatagtaatcaataagtagatggcacacattgccggtgcgatcagctccgcaacctggcccacgcgctttacaccgcccatgatgacgattcccaccagaagcatcagtcccacaccggtgacgatggcaggaattccgaaggcgttgctcatagctgtcgccgccgtctgcgtctgcatggatggcagcaggaatcccggtccgataaataccgcaatacagaacagcaccgcgatgattttacccacttttttattcttaaaacccttttccatataatagtacggtccgccggtcagttctcccaggttcttggtcttgtaggcttgacccagaatgcactccaccattccggtggatgctcccagcagtgccgccatccacatccagaagagggctcccggtccccccatgaaaattgcggtggccgttccggcgatatttccggttcccactcgtcccccgacagtggtggccagcgcctggaatgcactcaatcctttggcttcgcccagctcatccgattccttttcgaacatatagtgaaacatggacggaagtccggtgaactgcaatcccttcaggcgaagggtaaaccagatggccgcgcctcccaggaaaaacagacacgccggatgccagacgatgtcattcacaacagttataatttttgtaaataattccataatttcgcattctcctttgttacatctgcactattttagcataagagagcggatagagaaaattaaaaaagaatatacgcagttataaggaaaacctataactgcgtatactctttttacaatcgtatttgcgtttcgtgttccgctgatttcgacctgcgctttattcgaatgacttgataaattaatatgccaaaaatagtcattaatgatgtcagtattccggcgcggagccacggtgtcgaatactttaattgaatgtgatgctttcccggggtcagcggaatcgccatatacattccgtttgcttttactattgaagttttctctccgtccactttcgcagaccatcccgttgaatacggaatcgaaaggaacagaacctcgttttcggaacattcaaccgatcctgaaacagtatcatttccgattgaaatgttcctgcatggtgtaagctttgaaatatcctccatgcatttcgcggtatcgttttcatatacaccgatgcttttgtacgtatattccgccggctttgcgaatacaattttagcggaatcgtatccttcctcactttttcccaaataacaggtcacgccatccatcggtgcataccagtaatgataggatgacaatgctgttgctgtcttttcataatccgaaacgcgaaaatctcccttcttttgtccgcgacaccaaatgtctgaactcgttccaaagataagcgaacacatggatttatcggcctctttaatcttcaacccattcatccacagatacaattcccctttcatcggctttttaaagtgcaatatcagtgcaccttcttctttcttcaccgatattctctttttcgttaagtccacatccttcgtttccactttatacggaagggcggtcaatcgtttctttggcgctattgttttaatgttcggtattgttgtatctgtcacgaccccttgcagcatcgcttcttggcgattcagcgggttcatctttagagcatctttcctcaatatgctattcttatataagaaagcactgcctaaataatgtgtattctcatacaatccctcttcgattttcttatatccgaccggcacaccttcgttatccggcgaattcgtcgtgtagtatttcacagctgctaggtccagcaatgctcgtcgtccatccaatccacgtaatccacaattcgcagccagtgtgttcaattgcaaatctgtgcaatagcgctggtagttcttatccatgatgctccaccaaaatgtggttcctcgcacttggttggcacactctacattcagattcgtttcccgtttctccacacgatagaaatctttccgattcgcagttccgcaagcctttgaaatagacggtgctgtaaaatatgcatttaaatcatctgcactcacgaattgcttcacaaagcgcccatatgcaggtgagaaaactacacaaataccaactatcacggacagaatcgttacttctccgagaatcaggtttccatgtgctttgaaaagcggtattgtatttaccgcccacaaaacaagcatcgttagaagaagcagtacgtcatacgaatacccgtcggatgaatttccacctatagaatgagcgatgcacatatagatggcgaccatcatcgtcaaaacaattaactgcttcttttctaacttacacagcttatctccaagtcccacatatatcatcgcaacagccagtgcaaatggataactccaccgatttgctgcatacccaaagccgtttaaaatacgcccacataatgggatgcacataatgagcaagctgctcacggtggcaattttcatagtcttccattgatttcccttctgcactagcaggaaaaacaagagtatcaaaccaagtggaatcccgcctattactgtatgataggcaaacattccatggaatctccccaaatgaacaaatagctgcttataaaaattcatcggatacagaaacggtgattcgatatatccggtggtcaatccgattctataattatttaaaaccgcatgtactgtcggaaacaggacaactccggataataatcctcccaccaaataggctgcacatacatttttgcagatttgaatgttctcacggaccgtacctttcttgcacagcaaccgaatacacaggtacaccatgcttagaatcacattgctgtaaaagaaataataatttgttaagaacgaatagaatgtaatcgcagccagcggtgctttccgattctccttcatcagtacctcaatcgaccatagtattaccggaaaaaggtaacacccatgaatgaaattcggaaagtagaaaaaatactcaatattaaaaaaggagtacagcaatccgcccatggcggttcgccaactatccgtcttcttcacataatttgaatacagacaaaaggcttccccggaaaggaaaacctttatccatatcatcagcttataacttcttgtcaatcgattgggaaacagagcgacggaaatccaactgatcggatccaagaaatcataggcattcaatgttgtcagcggatctgccccttgccccaaggtataacagaaatgaggtatctgaaatagcgtcccatttgcgatgccattcacgattttaagttggtaatcccgtatatattgcagtgcaacataatgctgcccccatccatccggattccatgcgtaggttattttcccactgctaaagtacgaatccatcacaaagattggaatgattaacagcactgcatacagaatgtacgatttgtatttctcccaccacgatgctcttatgttcaatgctcctctttccctttcactaattcaacataccgctcctgacagcgaatcaagtccttctcaaaatcctggcggtctttcttccgcaatgtatgtaatattattccggaaaaaaaagactgcagtcccgcaataaccgtaaatccacatacgattaaagtaggaaaattcggcacaagccccgtcttccggtaattaatgaatatcgggacaaaaaacacggccgccaacaaaaacaataccagcgcatttccgctaaaaaaggcgcgcggtttatacgtttcgaataggctcacaattgtccgaatcacctttgccccgtccgaaaaggtattcaatttcgatgaacttccatccggtcggtctcggtattccacgacaacgtttgccacgttcatattcttgtcaatcgcgtgaatactcatttccgtctcaatctcgaaccccttggataaaaccggaaatgtttttacgaactgataactgaacgcacgatatccggtcatgatatctcggatgttgcttttgaacagtttattgatgctttttcggaccaatgcatttccgaaattatggaaatgccgtttgttttcatcgaaataggtggatgaaagtcgatcccccaccaccatatcggcctgatcttccaatacccgcttcaccatttcaatggcagcctccgccggataggtatcatctccatccgccataatataacactctgcatccacttcccgaaacatccgacgaatcacatttcccttgccttgaagggtttccttacgcacaatggcaccggcatcacgagccactgctgccgtccgatcattcgaattattgtcgtatacatatactgctgcatccggcagcgttctcttgaaatccgttaccacctttccgatggttctttcttcattgaaacagggtatcagcaccgcaattcgatccatatatttactcctaatttagcttatccaatttattttaccccccccttattggaatttgtcaaggcactaattacatcccattaatataagttgaatattaagaaatcttaagactttttgcagcaaatctttggtacaatgcagatagagctaagcatcagcgtgaaatgaggtgatacccgatgcagaagttggattcaattcgttaaagcaacattttcaagaaaggaacaatgagatgtacacatatcgcaacggacttcgaacgctcaccggaatactctgcattgccgtgactatttttatattcacttcttttgcaaatgcggacgatgaggttcaatacaaatcctacgatttaaagggctactgagtattccaccagatcggagccactctgtccgttagagagagccacccattcc

SEQ ID NO: 2723 - DNA, 32759 bp, Unknown
  16S sequences of unknown bacteria
tgtactcgtctgaagtccaccatactgtgtccttagagttctcatccataacgatatatttgtctttcggggaacgtccagtatagataccggtcattacgttcacagcaccaagctcgctgacctgacctacttcaaatccttccagacccggtttggtctcttcctcgaacagaagctcataagacgggttgtgtacgatctcagttgttccagtaataccatacttagttaaatcaatttttcccatgttttactatacctctttcttttagtatatctttagacttacgctgaaaaaaatctctctttccgaccagactcagaagtatgaaattcttttctttgttgcgatgcaggaaatcaagcatttcctacctcgcatattatcccatctcgtcaaaaaaaagtcaatatcaaaaatacgtttagaaatattttttcgttgcatttctggtctgaattccataccagatcagggttccgatcaacgccaccatcataacccagtaaaggctcataatgctgaccacataagtattgatcaaagaaaccactccatagaggatcatcacacctgccagcgtggacagcttcggtgccatggatgctgcatatgctcccagatctttacaggtattcacatccgtctccttgaacacaagaaatgtcttgatgatcttcccctttgtcttcagcacataggctgcatacagtgcatatacgccacataccaggatcacaatatccataattgaccatgcatcattcattctgtgtcacccctattccacaccgagaaatgtctttactgtctgttccatatcagctgcatcgcagactgtcttatgacggaccggagcggtacggatctcttcaatggcattcggcacatccacaccggagatcttgttgagctcgtccaccagatcaaaatcagacatggagccatacttttctttgtcgatagcttccatcacacttctggtaaatttatacgggcttgcggtagatgcgatcaccgtcttagtctcatccttagtgtctgccacatatttttcataagcacaggaagctactgccgtatgcggatccagcacataaccggtatctccgtatacctttgcgatcttcttagcagtctcatcttcagatgcataatatccgcagaaatcatgaagctgtgcgcgcatcttatcagtgatctcatatttaccctgctcagataatgctttcatcagctcctgatccttggaagcgtctgctccggcaatccgatagatcagtctctccaggttgctggagatcagaatatccatagacggagatgtggtcaggataaatggtctgtttctgtcatactctccagtgcggaagaaatcatacagaaccttgttgtcattggaagcacagatcagctttccgatcggtattcccatctgctttgcataataagctgccagaatatttccaaaattaccggtggggacagtcacattgatggtctctccatctttgatctcaccgctctccagcagttttgcataagcatatacataataaacgatctgaggaaccagacgtccgatattgatggagttggcactggaaaactgatatcctgcctgatcaagttcctttgcaagctccttgtttccgaagattgccttgacgccgctctgggcatcatcaaagtttccatgaataccgactacaaatgtattatcccctttctgggtcaccatctgcttctcctggatcgggctgacaccattcttcgggtaaaatacgatgatctttgttcccggcacatctgcaaatcctgccagtgctgcctttcctgtgtccccggaagttgcagtcaggatcacaatatcatttttcacctgattcttcttcgctgcagtagtcatcagatacggcaaaatagaaagtgccatatccttgaatgcgatggtcgccccgtggaacagctccagatagtaagcatcctccacctttgccagcggtgcgatcacgtctgtatcgaactttttgtcgtatgcactgttaatacagtacttcaattcttcctcggtataatcggtgagaaagagcttcatcacctcatatgcggtctcttgataagtcattccggccaactgctccatggaacaggtaagcttcggaatcgaatccggaacaaacagtcctccatcttcagccaaaccctgaaggatcgctttagatgcagtcacaggttcttttgtgcctctggtacttctgtataacaattccatatctacattcctctttctgtgtttgctgttattattttgcagtttaccacaggaaagaaaaaaaagaaagaggctttccgcctctttcttcacttacatggtataaaatatatgatttccatgttccagcacacgggaaagcttctgatcaaaccatccgcttctgcttcttactgagcggaaaaacaaagctccctgagaaatatcttctccgttcatcactcttgccaccgcatcaatggtcccctgagatacattcactgtatcgatccgaccgtcggatacgggtgaaaactgcgctgttccatcctgtctctgatagacgacttccgtgaccgtgtttggaaaatttccatttctcacacggttcatcactacatttgcaaccagcatacggccctctgtgtcttcacatccagcctctgcttccacaatcttcagaagcacctgatactcctgatcttccagactaaaactatttcctgtcaaagcttccggtgtctcttccacgaccacctgctctgcagtttcctctgtgggtatttctgtttcgacgttgtcttccgtaacgacctcattctggatcgcttcaaccagctctccggaaaaagtgtcttctgcagcatacacagtcagtgtgccaataccgcaggaaccggtgggtgtcacacctgtcaggagtagtcctccaagaaccagtgctgtacccagatagcatctacgcatacatacactccttttctgttttcctttatccggcttctttaccggaaaccagacggacatttgtgttttgtgggttatcgtccgccgcgttacagtttggcattatagaccgggacaatctggaaagtcaatacaattattacaactttgttaactattatgaactaaatttttcatttttatgacaaatcgaataaaaaaagaacgcttttcacagaatttcatgaaaagcgttctcaaattttgtaaaaatattacttaacagaatgattaatcgctgttaataatgcatcaatggatgcacggataatatccgggtcaatggctgctccccagtggattttaccgttcggagtctcaattcctacatatgcgatcgcactggaactggaactcttggtaagtgcatgctcctgataagtaaccagtttgtagtcaaatccataggcttttttcagtgcattgctgactgcattcagacgtccgttaccggttgcactggtaacttttttctcgcccctgtaacatgtggtaacctcggtagtaataccgttttcctgtttgaaatgtacctctgtgatctgatatggctccttgattccgacaaatttatcgaggaatacgcgataaatttcttctggcataagctctttgttctccacatcagagactgctttggcagcatatcccatggcttcacgcatcttaggcggcattaccagaccatagttgcgttccagaatatagcctacgcctccctttccggactggctgttgatacggatcacgtctgcatcgtagcttcttccaacatcggtcggatcgatgggcagatacggtactgtccagtgatccggatgtttctcgtcgatccacttcattccctttgcgatcgcatcctgatgagaaccggagaatgcagcaaatacaagcgcaccgctgtacggatttctctcattgactttcatgccggtaaaatgctcatatccatcacagatcttggtcatatcggagaaatcaagctccggatccacaccctgtgcatacatattcatagccactgttacaatatccacattaccagtacgctcaccattgccgaacagagtaccttccacacggtctgcacctgccagaagtcccatctctgtgtcagctacaccgcatcctctgtcgttatgcggatgcagagataccagtacattttctctgtatttcagatgtttgcacatatattcaatctgctgtgcataaacatgcggcatggaatgctgtaccgttaccggcaggttgatgatcgcctttctgtctgcggtcggtttccatacttccagaacagcattacatacttccagtgcatattccggttccgttccggtaaagctctccgggctgtactcaaaacgataatcagcaccagcttcctccgtcagctgctgcagaagttttgctccttctacggcgatctgaagaatctcttcctttgatttgcggaacacctgctctctctgggaaagagacgtggaattatatacatgaacgattgcattcttcacacctttcagtgcttcaaaggtctttctgataatatgctcacgagcctgcgtcagtacctgcacagttacatcatccggaatcagattctgctcgatcaatgcccttaagaactcatattccgtctcagatgctgccgggaaaccaacctcgatctccttgaatccaatcttgaccagcatctggaaaaagtccagcttctgctgaagtgtcataggcacaaccaaagcctggttaccatctctcaaatctacactacaccataccggggcatgatctacatactccttgtctgcccagtccatgcatctttctggaggcataaaatactgtctggtatacttcttgtaattcatcattgtcttttctctccttttgtctcgtaaagtgtttggcagtcattcagaatcttatgaaacatgtacatggttctgaatcgttacattttcacgaaaaaaaacctccatctgtcgattccttttggaatcgagagacggaggatctactgtcctacgcggtaccactctcattttgtgatattcacacactcgccggatacggaatcatctgattcttatatcctcccctttgtaacggcagggattccgtctgcatctactctcttcttatcatatagaagatttgggacagccgctccgaggtgagttccagacattccctctgctgtctcacaccatccgacagctctctgaaatcaggtttgcatgtactattcctcatcaacgcatttttctatttcgttgctaattatgatagcaaactgtattataaatgtcaagacagatcattcactctttttgttattttcagatacagattctgttctttcctatataagagtgttttctcccagatcggtgcaaaccatttcatcaactgctgccggagcagttccagcaacgtacatgcaagatagacgattgctgccaccgccactgcataaatcattgcccaatgagtcttcgccaccttgctgacccggaacgtatcccacaccagatatcggatcagatagttgtcatggatcagatacaccccaaacgctgcgcctgctaccttcaagatcactccatccagcttcgactctttccacggcagattgcgtacgcagacaaacaacgccaatgttcccagcaatgccagcggagaattgtaattaaggaaatatccaatatcctcctgatgcgtcttcactgacagatagacactggccagcacagccagtgaacttaccacataacctgcaaatccataccacgcatagcgtcggtcttcttttgtatgaagcttcacatatccagccagcagcgtcagatagataaaccacggaagctctctcccggaaaaagtaccatacgtatccacccgaaatatcatatgattaacactcaggaacaaggtcagtgcccctagcagatactggtactgtctcctggtcatccttgccgccaccatactgacaaatggcatcagaacaagcaggcccatgtagacagatgcaaaccagtaggtctttgcagaaataggaaagattgcttttaccacatctgttcttgtcacaccaatagtcactgcgttcaatagacagatcagaatcgagtaaaatgccacctgtttccacagttttccaagtcttgatgcctgaaatactttgtcaatggcaaaatatccaccaatcatcacaaacgtatttacatgcaccacagaaaatgcctgcaccaggtaatccagaaaataattgaccgttccatatcccagtttagctgtcactcttccatgaaacagacagtgtccgatcacgatcatatacatgcagaggatccgcagtagttcaaatttcacttcccgctttttcatacaccggtgctcctgtcataaagaagattatccgtcatcagtttgtatcctttatcgccatcccggatcataatatgcacctcataccggtcatccagcggataactcaaattcggtatcataaagcggacacgatcagtcggttccagagaactgtcatacaagacagaatacagaccattcgcgtcctgctgctgccataccccctggaagatccgtcgcttaccgctctctttactctctgtccacagaaaaacactctttccttccagttcctccggtgtcatgttgacagacccttcaaacacatcataccgctcattttctgctgtataagttgtatccagtgctgctgtgtgagtctcatcatctttcacgccggaaatcttatagcttaatgcatacagattgaagttgccgaactggttaagtttggagtaggtaataaacaaaccgtcataaatactgtccagatgcagcataatatgttccagcatggaatccgagatcaatactgcccggtcactcttatacaaagaagtcagcagacttctttgatcgtaggcctccagattactgacgatctgcggagattctgtctcccatccacccaatgtgaaaatattggtcagataattatccggtagtttttcaaaaatggaatatccaagctccacaccagtattgctgatgggatcaaacgcataatatacgtccttatcctgactgatggcatcataaagattccggaatgccacactggcatccgactcctgcaacggctgttctgtaagtggcaggatcaacatccttaccagcagacatgaagtcaatactactgctcctgccccagtacctgccagacgctttccaaccagcttttctccccatctttcttcaagatcaggaagaactgcagaccacgcacagatcaaggttcccaacagacatgcagttactacaatgggaagtacccggtatatttttataaagtaaagatagattcccagcaatgcagcgtaaggccagaaaacagcgatccaatcccgtcttccaatcattttccagtcaggattcagactcacccaaaactttttcttttttataagaagcaacggaatcaaccacagcaatgtcgccagagctgatagaataaacagcggcttcagactcaagatcaccagatagtctttgagatattcccactggaacgggcggtcctgtcgaaatgccacaatagccttaaaggtatctgctgtataccggtcatagtcggcgatcagccagctctgaagattaagcacatctgtcttggtaagccccagttcttcatattccgcctgatactcatcccatcctggaacaccataatccagaagctgctgtcttgccttgtcatactctttataatgagcttctgcacttcccggtgtgtagaccagtacattttccagagcaatactttcgaacaccaatacaaatgccgacacgcagggcagacagtctctcacaaaaaatgtcttccagtctctgttcctccatgctttcactgccagtcccagccagaatccgaaagctacaatactgatcatgccaaatgcctggaaccggatccagctgcctaatactaacaaggcaatcccgccaaataaatgacgcttctttctctccgaacagaataccagaatgtaacctgccgccgtcaccagcgcagctgtcttggtatactgaaactccacatacataggactcaaagacgccagcaccagcagtactgccataataccgccgatccgctttgatcttcggatccaggtacagccaatggcggacagggatacaaaaataagcccgtacatcaccagcgtataccagttccacgccggatacaatgtatagaaaaaccggaggatccaggcaaaggcgctgtgcagataaataaaataccaggtataggatccataagcacccgatgcgatggccgccagagtaaattcatcgttggaaccataatagggatgcaggaacattactgcatacgctaccatgatcatatggaagaccaggaacaggatctgcacctgtcttacggaataatctctctttttcaacatataactcccagtttatttgatttcgtctttatataaaaactgccgcagcaaacatatgttgctgcggcagcttactcagatcttagttctcaagcagcttctgctctccgttccagctgtacagcttgcggatctcttttccgactttctctgacggatgctcgcttgccagttttctcatggctttgaagtgagcctgtccacctgccggagacatatccagaaggaagtcttttgcaaaagtaccatcctggatgtctttcagaatcttcttcattgctttcttggtatcctcagtaatgatcttcggaccagtgatataatcaccatactcagcagtattggagatagaatatctcattccctcaaaaccagactgatagatcagatctacgatcagtttcatctcatggatacactcgaaataagcatttctcggatcatatccagcctcaaccagagtttcgaaacctgcctgcatcagtgcacatacacctccgcaaagtactgcctgctcaccaaacaggtcagtctcagtctcagtacggaaggttgtctccagaatacctgctcttgcgccaccgattgcaagaccgtaagcaagtgctctctccagagcttttccggttgcatcctgatgtacagctaccagacacggagttccttttcctgcctgatactcgcttcttacagtatgacccggagctttcggtgcgatcatggtaacatctacgttcttcggcggaacaatctggttgaaatggatattaaatccatgagcaaacatcaacatgttgccctcttccagattcggctcgatatctttcttatacattgatgcctgaagctcatcattgatcagaaccatgatgatgtctgctttctttgctgcctctgctgcagtatatacttcaaatccctgctcctcagctctcttccaggatttgctgccctcataaagtccaatgatcacgtgacatccggactcttttgcgttcagtgcatgagcatgtccctggctgccgtaaccgatgattgcgatggtctgaccatccagaagtgaaagattacaatcttcctgatagaaaatttttgccatttttttctcctccgtttttgtaaaaatgtgtttgctttatgcttttgaaaaatcgttgtccatcagtctgccgtcttcatcatacatctttacatcaaaggtgccgcgggacaggccagtaagacctgtacgtgccagttccagaatctccacatccttcagcatacgaaggaaagcttccagcttgctctggcttcccaccagttcgattaccagtgactctatggatacatctacgatttttgccctaaaaatatctgcaatggatataatattctgccggttgctctcatcacagagcactttcaccagaatcagttcccgacatacagaattgtcaggctccagcttcttaatatccactacatcttccagcttgttcaactgtttttcgatctgatcaagaatcgtgttatctcctctggtcacgatcgttgcccttgaatatctgggatcagcagtcacaccaactgtcagactgtcaatgttataaccacggcggctgaaaagaccggcaatgcggctcagtacaccagaagtattatctacgagaattgaaaaaactactttttccatatatccccctgctttctattgttcatacttcgatattgtatcaacatggtctgtctttgtcaatattttatgtccatttcgttctatcacggtagcagtttactctgcaaaactttcccggacacgtcggatataatcaggcgtggttccacagcagccgccgatcacagatgcgccacactctttcaaatgctgcacgtttctcgcaaattcttcttcgcccatgctgtagactgcagcacccgtctctgtaatagtaggaagtcctgcatttggcttggcaacaatagggatgctgacagtctcagaaagctgtcggattacggcatccagctggtccggtcccacagaacagttcacacctactgcgtcagctcccatagcttccatcacagctgctgcttctgcaatagttcctccaaaatagagagttccatcgccttcgcaggtaaaagaaatgatcaacggcagcttgcagactgctctggctgcatcgcagatcacggttgcttcatctgcagacataagcgtctctgcaacaagcagttccaccccggcatcagccagcagcttgatctgttctttataattatccatcaatccttcataggtcatgggcccataaggttccatggcttttccggtagtagagatatctcctgccaccagcaccttgtctcctacattttccagcgtccgctttaccatggtctggttcagttccacaatcatatcagcgattcccatattttccagagagatacggtttgccgcaaatgtcggtgcatagatcacatcagaccctgcttgcgcatattgtctttgcagttcaccgatcacttccggatgttcgtatgcccatttttcagtactgacacccgccggcattcccatggtgcgcagaacagatcctgtaccgccatctaacagcagatatcctttttctgcaatttttgtacgaaattcttctcttgtcattctcttcagtcatccttttttcgctttttatccggatcatggcaaagcaccttcagtaccagtgctgcgcctccaaacatcaggatcagcatgatcagataattatacagactggtataacggaatcggaattccgttgccgcgatcacagaagcaactatgatcaccagtcctgcacccatcagcagttttgctccaaatgaatcggtattcacacagaaccagatcacaccagctataaacggaaccactaccagtcccccgttcatatagaagcctccaagacgcagtgtataaaatccagtcgatacactgacactgttcaagaaccagtaacctcctgctgccagcatagccagtccgatcaggaattctgccagtggatttctttttttcttcatactttcaggttcctctcttatcctatatcagttttttgccgcagttcgggcagaatttcatgccttctgtcttggttccacactccggacagaatttccagccgcctgcagatgcattctcagaagcaggagctgccgcctgagatgcctgtgcctgctgtccgtttccgaacatggtctggctcatctggcctgccatctgctgtcccatcatcatacccattgccatgcctgccatatcagaagctgcatgtccgcctccatttccatttgccatggcatttatcatcgccatctgctggtagcggcccatatcaccaaccacactctgagatgccgccttggtcaccatcttctggatctcttccggataagtaaagcttgcaatattaaaggtggtgatgctgatgccgatcttcatcatctccatatccaggtcttcctgaatgccttttccgatatcaaaggaatttgcctgaagattgaacatgtccttgccttccttcacgatccacttcatcagaagctgatccagcatggaaatgacacgttcctgcacatcatctacagtaaactgacgtttgatacctgccactttatcgatcaatgccgcatggtcactgatcttgcagcagaaagtaccaaatgcccggaccggcatacctgcaggaagtccctgtgccggaatattgataggattcttggttccccatttcacggtcacttctttggtattgataaataatacttccgcacggattccactgttaaatccaaatttaaatcctttcagtgtggacaggaatggaatgatctcagattcaatatcaaagcttccttcatccgtgaaaattccttctacttttccattatataagaaaattgcatcctgtcccggacggatgatcagacggcttcctttcttgatctcctggttgctccatttccagaacagaatatcatcccgatactcttcccactctactacatttgcaaactgattgccaaataaacccatggtgttatacctcctgtatcccgtcaatatccacggtcaatggttcatattctatgtattcttcctgtgccgtctctgccaccggtactcctttcgctccacacgcaaatgcatctgttgccatgaagaacagaccgatcagaatcagaattcctgcgatcatcagcaggatctttgccacgctcttcggatattcgccctgtacccggccagtctccccattgatcagtacatgatactgcttgtttttatactgatatgcggtggagtataccggaagcagtacatatttataggtttcatccctgtagttatcattcaatctcaggcctctgacctgatcatatcttctgagcacatcctgttctgccagtctgcgaagctccgttttcatctcttcttttgcttcccgatgtgcatcggacagattcaccgtatagatctctgcactgtatccagacagataattgggggaatatgccggtatatcttttgtatgaaagggttcgatctgccggagcagataagtgtccagcttgttggaagcccgcaccagcacatcgtcaaagaaattcgacacatttccactggtcggataccaggtcacttcagttcttgtatgccgttctcccttggaatcgcgatactcaacgatccggtttcttccgccttctgcatgatagaccgcatccgccttcgcatcaaaagtccagtacgggatgtagattccctgtagtttatcctgctgataaagatgctttagttcattgggagcgaaaaatctgcccttgatccatttatgaaaaacttctcccacttttttcttatcgatctggaacggaaccaccccgtccggcacgattacatctgtctgcttttctgccagcacaaatgcagttccacagtacggacagtctttggcagtgctgttaggctccacttccaccattgctccgcaggatgggcattgcatcgttgtggattttttatcctgtacacgcaccatctgtctggcttctgccgtcagcttatgttctctgactgctgaccggttggcatcgatcttctgctcttctccacagtgcggacatttcaatgactgggtcgctgcatcaaattccatgatgccgccacaatttttacagtaaaatatctcactcaaaacagttcctcctaggtaccctgtatatacaaaatgccgcaaagaatatgagatcctttgcggcacttatttctatattacttaccaagtttcgcttttaatgctgcaagctcatcatctacacccgtgttggaagaatcctcatcatattttgccgccagatcagccacatcatctttggttgtgttcagttcagacatagcatttgcctcgtccagcatacggtttgctttttcttccatgcggtcaaatgcagaaagattgttggaaacacctgcaacagaagaaccgactttattcagtctctcctgagtctttgccactgcaaccttcgcacggattgcatctcttcttgactgcagttctcccatatcggataccagcttgtcatgcatctctttcatcttcactgcattgccatgagccaggtcataggcctgctgcagagctgcctgtttggatacaagctgctgttttttctcaagaaactgacgggcatcattgtcattgcctgctacaattgctttttctgcatagcgctgcatcttttcaatatcagcattacactcatccagttccctcttgcattttgtctcttctgccatcacagaagctgtctctgcttttacttttccaagatcgctctccagattgcgaagatactgatcgatcatcttctccggatcttctgccttatcaagaagtgcgttcaggtttgctgacataatatcactaaatctcttaataattcccgccatctgctggtcctccttcttgggtacatctctgcaccacttgtaaccattataatatattcgacaaatattgtcacgaaaattatatttttttcattactttttccatggaagttccggatgttcgatcttcttgtcccgaagcatcagatctgccatggcttctcttgcagttttattctcaaagagcactttattgacttcattcacaatcggcatatcaatgccatatttttcagccaggattctggctgccctggcagaatagacaccttccaccaccatctgcacttcattcatggcctcctgcatagttcttccctgaccaataagatagcctgctttccggttccggctgtggcgggatgagcaggtcacgatcagatctccaataccggtgagaccgttaaaagtctcaatgtgaccacccatagccacacccagtcgactcatctctgcgattcctctggtgatcaatgctgccttcgtattgtctccgcagccaagaccatctgccacgcctgctgccagcgcaatgacatttttcagtgctccccccagctcaatacccaacatgtccggactggtatacacacggaaagattcactcatgaacagattctggatatattctgcagtctctctgtctgctgcacctgccactaccgtagtcggaatatctcttcccacttcctccgcatgactggggcctgacagtacggctgcatttacctgtggaagtacctggctgataatatctgtctggatcatcaatgtggactcttcgattcctttcgccacgctgacaatgatctgtccatctgtcacaaaaggcttcatctgctcggctgtgcttctggtgtataccgatggaactgccagcacacacagatcttttccaacgattgcctgctccagactggatgtatactgaatctcttccggcaagatcactcccggaagctttgaacggttctcatgctgttcccgcagttcccggactccttcttcccgatgggaccacacggtcacatcatgaccatttttgcaaagacgtcttgcaagagccaatccccagctgccggctccgatcacactgacatttgccatcttccgttcctcccaatagcttatttttctgcttttttctcaaaaatcctgctctctgtaccactcataagacgtctgatattggctctgtgacgatagatcgccatcaaagacaaggcggcgcagactgcataaaattcatacagatgcggctggctcattccataatatcccatctgtcctaatacggccagatcgattaccagctcgatcaccactatgatggagccaagcgatacgaatcttgtgatccctactaccaacagaaatgtagctgcttccagcaaagttacgatcgggcctaaggtcaccaccataccggctgtacatgcgattccttttccaccgcgaaaaccaagctgaaccggaaaattatgacccaggatcgtgcctgcggctgcatacattcccagcagcggcagcatatccggatatttacttccgaagatcaggcgtactgcgaggacagccaggacagtcttggccacatctccaagaaatacgatcaatccggcctttttaccaagcacacgcaaggtattggtcgcccctgcattgccgcttccgcactgacggatatcaattccatgcatctttccataaatataagccgtctgaaagattccaaatacatacccgatggcaagacaaaccaagcgttccattattccttttccttcctctctctgacaatgaatttcagcgaagttcccttgaatccgaaggattcgcggatcttattctccagatatctgacgtaggagaaatgcatcagttccttatcatttacaaaaataacaaatgtaggtggctttacagacacctgtgtcacatagtagatcttcagtctcttacctttatctgaaggtggctgctgcatggctaccgcttccgttacgatctcgttaaggacacccgtctgcacacgcagggtctgattctcgatgaccatatcaattgtctcgaacagtctggacagacgctgtccggtctgcgcagaaataaacaggatctctgcatatggcatgaaggacaggatctctcttacttttctggtgaactcatagatcgtcttatcgttcttctcgatggcatcccacttgttgacagctacgatgataccttttcctctgtcatgggcgattcccgcaatcttggcatcctgctccgtcacaccttcggttgcatcgatcacaacaacgaccacatctgcacgttccacagccgttactgtacggataatactgtagcgctccagttcctctttgatcttattcttccggcgcagtcctgccgtatcaataaatacatattcttttccattccatttgatgtctgtatcaatagcatctctggtggtgccagcaatattggatacgatcacacggttctcacccaccagcttattgataatagaagactttcctacattcggttttccaacgatagcaatcttcggacggtcatcctcttctgccttgctgtctgtctcaggaaaatgctttaccacttcatccagcatgtcgccaatgcccagacgggaagatgcagacaccggaaccggatcaccgattcccagattatagaactcatacacatctgccatgaatttctgaaaactatctactttgttaactaccaggatcaccggcttgtgggaacggcgcagcatatctgccaccttggaatctgcatcctgcagcccctgacgcacatccaccaggaaaatgatcacatctgcggtgtcgatagcgatctgtgcctgctctctcatctgagccagaataatatcattgctgtccggctcaataccgcctgtatcgatcaatgtaaaatcatgattgagccaggtgacatctgcatagattctgtccctggtcacacctggcgtatcttttacaatagaaatattctctcccgccagggaattaaacagtgtggatttgcccacattcggacgccccacaattgctactactggtctgctcatattttaaacctctttctcttaatcctcgattaaactgctgacaaaatcagcaccgcttgattctactatggaaactttgatttgtaaagcattttgcacatcatccacggttacatcatccaggaataccggttccccactcttcagcatatgattagtgagcagcagccgatctcccagatcttttcccttcaactgactgatcagatccgttccggtgatcagtcctgccaccgtaatctttccgccaaagaactcattttttattgcaagaacctgaatatctacattgggatatttcttccgcactgactccacatgcttccgcagaaacggtgccgccagttctcctgtggcaatggtgcgatggatcttccggtcatctccagtcataccagcaagggtctgtaccacttcttcttccagaagtctcaccattcccactccgttttccagctgtaaatatccatcgtaggtcttctcatccggaatcggccgctctgccagaatataccactcatcacccgcatggataaaatgattgccccactccttgtaaagcttttcctgccagccatggatcagatccagcacttcacaggcatcttcttttgtaaatggttccagtgggtacagaccgtcacgatagcgggtcagtccaaccggcaccacggatacactctcaagctgcggcatgtaggcggtcagttcccggatggagcgttccagttccgctccgtcattgactccacggcacagaacgatctgaccattcatgataatacctgcgtccttgagtctcttcaccttgtcaaaaatctctcctgcaaaccgattgtgcagcatcttgcagcgcagctctggattcatagtctggaatgaaatgttgatcggtgacaatttgtactgaatgatcctgtcaatatcatgttcactcatattggtcagtgtcagataatttccctgtaagaacgaaagtctggaatcatcatccttaaaatacagagtcgaacgcattcccttgggaagctgatcgataaaacagaaaatacatttgttacggcagcttctgtaatcatccatcagtccattttcaaattcgatccccagatcatcctcatattctttttcaatttccagctcccactcttctccatttaccttgcggatcagaaccagaatctcttcttcattcatcagataccggtagtcaaagacatcctccggtgattttccatttacctccaggagtctgtctcccggctctattcccatctcctgcgcaatacttcccggcgcaacagaacttataatatgttccatatctaaccttcctatctttttcattccttactatactaaatttaccacaaaaatgcaacgatacccgccaatttccatagataccggttgacggacactgacgcaaaatgttataaataaagaagcaagtatacacaggaggctatacccgtgaatttttcatacgaaagcattttaccgatcgctccattaaaaattgctgctttggagggctgtcgggaactggctgaaacaatggacaaatatctggtagaatttcgacagaaaagtaaccaggagtttcaggatcaacctaatttccatggatatcatgaagacacctacttgatcaaaactgcctgcccccggttcggtaccggagaagccaaaggcattatctatgaatctatccgcggtgcggatctgtttattctggcagatgtgaccaaccatagtctcacctattcggtcgcaggtcaggaaaatcacatgtcaccggacgaccactatcaggatctgaaacgcatcatctccgctgccaacggaaaggcgcgccggatcaatgtgatcatgccattcctatacgaaagccgtcagcacaaaagaagtcagcgagaatctctggactgtgcatttgcccttcaggagctgatcgatatgggtgtttctaacatcatcaccttcgatgctcatgatccgcgcgtttgtaatgccatcccgctctacggatttgacagctttaatccgccttatcagtttatcaaaggcctgttccgttcagtgccggatctgaagattgacaaagatcatctgatggtcatcagccctgatgaaggagctatgagtcgtgccgtatattttgccggtgtactgggtgtggaaatgggtatgttctacaagcgccgggattattctgttgtagttggcggcaagaacccgatcgttgctcacgaatttcttggagatgatctgcacggaaaagatgctatcatcattgatgatatgatctcctccggcgaaagcatgctggatgtggcacgtcagatcaaagaacgcggcgccaaacgtgtcttcgtatgtgtaaccttcggtctgttcaccgatggcttgaagaaatttgatgagtattatgaaaaaggatatattgataaagtggtgaccaccaatctgaattaccggacaccggagcttctgtccagaccctattatgtggaagcaaccatgaccaagttcctggctgccatcatcgactgtatcaaccacgatgtatccaccgagcacgtcaatgatccgacagagcgcatccatacgctgttggaaaaatacgaaaatcttgaaaataaagaaaaataaagaggtgtgccaacagcacacctcaagcaaaaacctctgtagctggcatctgccagtcacagaggttttttgtatatacaaaacatttacagccagttctttacagcatctttcccttcaggatcacctgctttgtactcagatccttctctttcagaagaaccatatttgcagtcttgcccggagtgatgcttccgtaccgatcatagattcctacggattttgcggagttcactgctgcacatttaacagcactttccagtggaatattcatcttctgtacaactactcttacgcaatccatcagattggttgcagaccctgcaatggttccgtcttccagagttgccagatgtccttttttaatgactttctgtccacccagtgcataatcgccgtccggcataccagtagcttccatcgaatcactgatcatgatgatccggtcatcaccgaacatcttgaaagtctgacgaacagttgccggatgaatatggacaccatcacagatcatctctgcttccacatgctcatcatctgctgctgcgcctaccacacctggttttctgtgagacagacctgccatggcattgtacagatgggtcacatgatgaactccatgctcaaatgcttcttttgcctgctcataatcagccatggtatgagctacagacagaacgacctcatctttcagctcttcgatgcactctttcgcaccttccacctcaggagcaattgccagaagttttacaataccaccggaagctttattcagttcccggaacatctctgcatccggtttgtgaacaaaatcaccattctgagcacctttacgctccatagcaataaacggtccctccatgttgattccacagaggatcgcacctttttcactcttgtaagaacctgctgcttcgcagatctttttcagtgtatctcttccaagtgtcatcgttgccggaacgatagtggtcacaccctgagatgcctcatagacagccatcgcttcaatggactcatgagttccatcacagaaatcatgtcccacacaaccatggaaatgaatgtcggtcagacctggaatcagataacatccctttgcatccagcacctgatcatccccgcttttttcagcgatcagttctccatctgtatagacatctttttcttcaaatatccctgcttctgtgtatacttttgcatttatgatcttcataaacggcctcctgtttacaggtcacatttggacagtgcagcttcgtcagctacgatcgttacatccggatgcatctgcagaatggatgccggaacctgcggagttaccggtccgaaaaatgcattttttacagtctcagccttatcttcaccgctgacaactaccaggatcttctttgccatcataatggtcttgatacccatggtatatgcctgtttcggaacatcgtcgatggatgcaaagaatctcttgttcgcctcgatggtacgctcagtcagatctacgcagtgagtctcagtctcaaaagcctcgcccggctcattaaatccaatatgtccgttatgtcccagtcccagaagctgcaggtctacaccgccagtagaacggatcacttcttcatatcgtttgcactctgcatctgcatccggattcataccgttgggcagatgggttctctctggattgacattgacataatcaaacagattatgattcataaaataaaaatagctctgatcattctctctcggaagacctctgtactcgtccagattcacagtcgtcacatcaccaaagtccagatctcctttttcataccattcgatcagctgcttataggttccaatcggagtagaaccagtagccagtccaagtacacaatccggtttcatgatcacctgtgcagaaatgatgtttgctgccttacggctcatgtcattgtaatcttttgctttgataattttcatgatgttttcctttccatcttataagattctatcatttactgaattttattgtaagatcaaaaaaatcttttgtctaggcagaatcttactgttcctatggacaattttaacttcttaagacaacagctgcagaaatgctccaagattccctctttttcctttgctggcccgatgggaaaataatacctgaggattacaacaggtacaaatatccgtcaccgcaattctgtcttttggtacacccgactccagcagtaccagctcattggccctccacagattcagctgatactttccgttttcctttctgtataagagcctgttatctgcccgtccttcaaaagcacttatgaactcctgtgccacatcctcgctgacctcataacaatcctggcagatcgatggtccgatcgcagtccacacatcagaaggccttgtgccaaacgcttctttcatccgctgcagagtcacttcgcccatgcggttcaccgttcctctccagccggaatgagacaatccgatggcacgatgcaccggatccacaaaatagagaggcacgcagtctgcatagaaagtcgccagcacaagaccaggtacattggtgataagcccatccacatccttataatcccggggtcttgtgaagcctttgccccggtcttcttcggtcacaagacgcacattggtagtgtgagtctgcagagacaataccagatccttgggatcaaatcccacagccgctccgaaccgctggaaattctcctttacattttccggatcatctcctctggtggagcttaagttcatggttgccagatctcctgtactgcagcctcccagacgggtagaaaatgcatggcgcaccagccctgtattctccagactggggaataccagatatggtacgccatatttttcctgcagttttaaggtctccgcacttgtttttcgtttcaaaagcatcatgcgcctctcctattctgcatattcaaatgcattttttatgtgatagatctctgatcccagaatactgactacgtcaaaccgacagggcatatcctccggaatccgcttctgtctcagataccagctggctgtctgacagatcttcttctgcttataccagttcactgcctctgatgggtctcctgctttttcatctgaccggtactttacctcgacaaagaccagataccgcccatccctggcaatcagatcgatctctccgattcggcaacggtaatttttttccagaatctcaaatccttttcctgtcagccaccgggccgccagttcttcatattcggttcctgtttttcgtttattcatccgattatctttcattcctcgactgtgcagtcactttctagccacagatattgcggataaaggttctccgatgtagcggacaggggccatactcccgaagtgctgccatatgggctgccgatccgtatcccttattggacgcaaatccatattgaggatatgcttcatccaatgcgatcatcatatgatctctggtcacttttgccaccacactggctgctgcaatggactgactcttggcatctcctttgataatcgggatctgtctctgagacagtcccggtatggtcacagcatcattgagcaggatctccggctgaggatccagtttcccgaccgcctcccgcatggcttcataggtcgcctgcagaatattgatctcatcaatccgctcctggctcacaactcccagtcctactgccactgctttttccatgatctcctcatagagaagctccctgcggcgctcggtcagcttcttagaatcattcagatacaggatctgacaatcctctggaaggatcactgctcctgccaccaccggacctgccagcggacctctgcccacttcatctattccacatacgactcccagtggacgatactctctctcataaaccagcattccctccaggcgttccagttctgcctgcagcttccgctgtcgttttaattcctgttcttcttttttcgtcattattgatgcctcaatattccaaacttggacaacggccagattctgacccatgctctaccaaccagttcactcttgtgcagcacaccgacgctgggatcacggctgtccatactatcatttcgattatctcccatcacaaagtactcatcctctcccaatgtgattggcgtctcagcgattcctccgctcttgagcacttcccgtccataggattcgtcgagcacttgcccgttaatatagatcttgccgtcagtcacctgaatagtctcacctggaagtcctatgattcgtttgataaaatatgtattttcctcatatttatatggaaatacaataatatcaaaccttttgggatctgagaaccgataggtcagcttatctacgatcagattatctccatcgctcaaagtattttccatggaacttccactcacataagtcctctgacccacaaaatgaatgattaaaaatgtaattccaactacaattgcaacatacagaaaaaagcttaacacttcccgtacgattccggtcttgccttccttactccccatgctgcacctctttttccggctccgggaattccagtgtgatccgtcccagacgaccactccgaaaatcatccagcagaagtcctgctgctctggcagtatctgcctcaccgccttttgccaggcatccacgttcctttgccaccagtgtcaagatttcttccttgcggcgtccctcttccgggacaatatgatatctctcttccatggcctttgggaaattcttttccagaaattctcccaattcacatgccagctcttccagattcaggatctcatcattgacagatcccagcatggcaagacgcagtcccacctgctgatcatcgaatttgggccacaaaattcccggtgtatccagaagctccacctgcttgttgaggcgaatccactgagcacctttggtcacccccggacggttaccagtcttggcacaggcacggccagcaaaactattgataaatgtggattttcccacattcggaataccaactaccatagcacggatcgggcggttgatgattcctcgccgtctgtcacgctccgtcttttctttacaggcttcctggatcacagcctgtacttccttcataccgcctctggctctggaatccagcttcaccacgaagaacccctgtgctttaaaagctgctgcccaggcatcgttccaacgctcgctggcaagatccgacttgttgagcagaatcaatcttgcttttccttttgccagatcatcaatgtccggattacggctggacataggtgctctggcatccaccagttcgataaccagatcgatcagttttatattttcctgcatcatccggcgtgcttttgtcatatgtcccggataccactgaatattcatctatacgctccttatctatttgacagatgtcacaaacccaaaattatcccatggataagcgacaaaccatgctttcccatatatatcacttttcttcacatttccaatatctgcgcttcgactgtcctcactcacattacggttgtccccaagcacaaaatattcatcagagcctaccttcagctcttcttccgccagaccggcataatccatctgctcattgccgatccccgtctcatacaaatctccattcacatagacaaatccatccttcacctgaatcttgtctccaggcacaccgattacccggcgcatgtagtaatgagcattcttgttgccatttggcttgaatacgatcacatcgccccgttttggtgtggtcatggcataactgaaccgattgaccagcacactattaccactgttgatggacggctccatggcctggcctacacaggtcagtctggacataaaataaaaaacaagaacgcatccaatggcaaatgccagaatacattctcccgcccagaacaatcctgcctgtatggcagatgtctcgatccgttttcttcttctggtaaaactcagtccctttctgcgtcctaacacaagtctcctcctcacttatcagtgaaaaaaagggacattatactttcgtacatgtccctctccattcagaattattttacaagctcttttacctttgcagcttttcctacgcggtctcttaagtagttcagctttgcacgtcttactttaccatgacgaactacctcaatcttatctacgttcggggagtgcagcggccaggtcttctcaacgccgattccgttggaattctttctaacggtgaaggtctcacggttgcttccaccctgtttcttcagaacagttccttcgaatacctgaattctttcacggtttccctctttgatcttagcgtataccttaacagtatctcctacgcaaaactccggtgcctctgcttttaactgagcagcttcaatgtttttaataatctcgttcattgtgttcctccttatatgcttcgatgttcttaatgccactatggcagcagaggaccatctccttttctcacaacgtgtttcattctatcataagttgcctgggtttgcaacaataaaattgaaaattattcgaatttgtcatgctcttccagcatccgcaggaatttcagatctgtcttggtcagattggcatcctccagaagatccggccgccgctgtctggtccgaagcagagactgttctcttctccatttttccacgttggcatgatgtccggacataaggatcggaggcaccgccttgcccctccatacttccggacggctgtactgcggatattccagcagattgtcatggaaagaatcaaattctgccgaatcttcattgtgaagcacacctcccaccagacgggatactgcatccataatgacaagtgccggaagctcaccgcctgtgagcacatagtctccaatagacacttcttcatccacgatttcttccagcacgcgctcatcaattccttcataatgaccgcacaggaagagcagatcctcttcttctgccagttcctgcgccatagtctggtcaaagacccggccctgaggactcatatagagtaccttcggcttacgcccaagcttctctactacagactcccatgccagatacaccggctccgcctgcatgaccataccggctccgccgccgtatggataatcatccacccggttatgcttattcactgaaaaatcccggatattcacagtctccaggctcaacagccctttctccaccgcacgtccggtaatacttgtctcaaatccgtcccggatcatctccggaaacagtgtcagtacatgaaaattcatcaatccagcagtccttccatcacatgtacggtcatccgtttttcgtccacatttacatccagaatacagtctctgatcgccggaagcaggatctcctttccttccggtgtcttcactgcatagacatcattggcaccagtctcaatcacatcggtcagcgttccaaggaccttgccttcatctgtcaccacttccatgtcgataaggtccgcaataaaattttcgttttctccaagctccactgcatgttctctgtccaccagcagatctttcttcagatatttctcgatatcgtttatattatcatatcccttgaacttcaggatcacctggttcttgaagaatttcacgccttcgatctcaagaatcttgtgttcccttcctgtatccagaattacttcatcaagatccagaaaacgttccggatcatcggtcgtgggatatacttttacttctccgcggattccatgggtactggaaatcacacctactcttaaaaactgttccatattttccatccttctattgacaacaacagcccgaagctccgggtggcattccttgcggttctccatccgggtgctccgggctgcacccttttgtgtatcgtcttactgtacgatctcaacaatcacttttttgtcatcccttgacgctgcagcttttacaaccgagcggatggcttttgcaatacggccctgtttgccgattaccttccccatgtctgtgggtgacacacgaagttcaacaaccgttgcattatctttttcagtctctgtaacggtcacttcctccggatgatccacaagtgcttttgcgatcacttccactaattccttcatccttccacctccaaggggctttaccgagaaagctcttatttggtaattcctgccagtttgaacagtttaccaaccatctcagtcggctgagcgccgttagcaagccactttttagctgcttcttcgttgatgttgaaagtactcggatcagtgctcggatcataagttccgatctcatcgatgaatcttccgtcacgcggagatctggaatctgctacgattactctgtaaaaaggagcctttttctgtcccattcttcttaatctgatttttactgccattgttgtttcctccattaaaataaatgttttttcttgttttctatgttgtaaacggaataccgtcggtgatggctttacacccctgccttaaaatggcagcttcccgaacattccttttttaccaaatcttcctttgcctttgccgcccatcatacctgacatctgcttcatcatcttacggctctgttcaaactgcttcaccagacgattcacctcgctgatgtccacacctgcgccattggcaattcttctctttctggatggattgagcacatccggattctgacgctccttcactgtcatggacaggatgattgcttcgatccgtgccatcttcttctcatccacagcatcttccagctgcttcatctgattgccgcccatacccggcatcatacttaaaagagcaccgataccacccatcttcttcatctgatgcatgctctccagataatcctcgaagtcgaactgattcttcttcatcttctggaccatcttcatagatgcttcttcgtcaatggactcctgtgccttctcgatcatggtcagaatatcacccatgccaaggattctggatgccatacgatccggataaaactgctccagatctgacagcttctcacccatacctacatagaggatcggctttccggtcactgcacggatagaaagtgccgcaccgcctcgggtgtcaccatccagcttcgtcaggatcacgccgtcgatgcctactttctctgagaaggttgttgccacattgactgcatcctgtccggtcatggagtctactaccagaatgctgtaatccacatgtacattcgccttgatgtcctgaagctcttccatcatagcctcatcaatatgaagccgtccggccgtatccaggatcaccacgctcatgccctgcttcttcgcatgctccattgccgctttcgcaatgtccaccggcttatgctggtctcccatggaaaatacttccacaccctgcttctcaccatttacctgtaactgcttgatcgcagcaggacgatatacatcgcaggcggtcagaagaaccttccggcctttgatcttgaactttccggcaagctttgcagctgttgtcgtcttaccagctccctgaagacctgtcatcatgatcactgtgatctcattggaaggacgaagtttaatctccgtggtctcgctgcccatcagattgaccatctcttcgttcacaatcttgatcaccatctgtcccggagtcaggctctccatcacatctgtacccacagctctcgcttctacagccttgataaactgttttacgactttgaagctgacgtctgcttccagaagtgcaagcttcacttcctttaaagctgcctttacatctgcctctgtcagtcttcctttgccgcgcagattcttaaatacattctgcaatttttccgataagctgtcaaatgccatctaaagctcctccagaatttccgatgcgatctcgtcgatcttcgccatctttggatcttgtgcctgttccttcgcaagtttatggatctctccaaccttttcacgcagactcacaaagcgttccatcagatgcagttttgcttcatattcctccagcagtctgctgctgcggcggaccatatcatgtacgccctgtcggctgatgccaagactggctgccacttcactgagcgaatagtcgttgaggatcacatcctcatatacctgcttctgatgttctgtcagcagttcgccataaaaatcatacagaagcgtctgcttcagaatctcttccattacaatcaccttgcctatcttacatgaaaaaaaagaggctgtcaagtattttttcttgacaacctgctttttattctttgcttcaaccagccttacgttcatatgcaccatggtttacagaagcctcatattctttcagcttctgtgatgcttccggattcagatatttcggtacctggatcttcacctctacatagagatcaccatgtaccgacggattcttcatggatatgatgcccttgcctttcagacggatcttgcttccgcactgacagcctgccgggatcttgcagatcacactgccattcagggtctgcactcttgtctcaccgccgaagactgctgtagtaaacggaatctccgcgctggtgtacacatccattcctttccgttcaaatccaggtcttgcgcctacatgaactttcaggaacagatctcctgcttctccgccgccaacgcccggcatacccttgcctttcagacggatgctctgaccatcatcaatacctgccggaacatgaacctgtaaagatgtcctcttaccggttccatcctggctggtcagatgaatcagcttctcacagccaaatgcagcatcatcaaagctcacattcacatctgcatgaaggtcttctcctttcatccgatagctttgctgatggaaaccgccggtactgccgccaaagccaccctgcccatgaaacatatttttgaacatgtctccaaaaatatctcccatatcgtctccaccttcaaaatggtattcctgataacctccattaccaaacccactgctgcggaatccgccggaaccaaagccagatccggctccgccctgcttgaatccgccctggtcaaatccaccctgaccgaatccttcctcaaatgctgcaaatccatactggtcatacaacttcttcttttcctgatcgctcagtacattatatgcttctgtaatttccttaaatttctgctctgcctgcttatcaccaggattcatatccggatgatatttctttgcaagttttcgataggcacgtttgatttctttttcatcagcacttctgttaatcccaagcacctcataataatctctcttactcatcctgcgtcacctccaggtgtctatgttataagtacaacttattcagagctacattcgcaaaatcacatgtgcataactctgaatagctcaaaatcccgacctttcggccgggacttactattttctttgttctatttgcaatataacacatatgttttaaattttcaacaaacatttaggaattcacagatttttcacatttttttcgcaactcacctgcggattttgcgaatggtgcgggtgaactgtacctcatcattcctgcagataccctctcatctttaactcctgttcgatcagatccagttgttcctctgaaccggccaccacagtatgataatggcaatcatcagtcagcagtttcagcggatgggcttcatgagcctccatctgctccacaaattgctttgcttccatacggttggcgatcatcaggtctgcccgtatctgtccgtacaggggatgctctacaaacacatccagaacctttccaccataatccacgatcagctgcagttcatccaaagtatgctccgtgtcatgatgtacccgaaagatccgcacatactgttcttttactgccgcatccagaaaatatcctttataagtggacagaatctgcatccgctgagcacgaagcagcgccatatcctgtacgatcacctgacggctcaccttcagaacttttgcaagttttgttcctgacaccggacttttactgtcctttaatatttttatgatctggcttcttcttttctcgccttctgtcacattcttttcctccctcaggactttgatttcttagtcttccggtttctgataaaagtggccggatagctgtgaggtcttgatcacattgataaatgcatgcttatccacctcccgcactgcttttaacacatgcttactctccgcacttgatacgacagaatagaccatgtggcgttcacagtgttcataggatccctctccattcaggattgttgccccatggtggcacgtgtttgagattgcatcacacacttcctgcggatgatcggtcacaacaaacaatgtctgctgctgatacttcttatataaagtgtgcaatacctgcgtggatgcatactggaaaataattgagtataatgccttgtcccatcca

SEQ ID NO: 2724 - DNA, 2267 bp, Unknown
  16S sequences of unknown bacteria
attgaagaccccgtttcccgccgctatttcaccgattttccctcaagcgacggaatgcttgtggtgaccgaagaatatgccgttttcggagttgacggccgctatatcgaggccgcgcggcagaaaatcgagggcataaacgttgtaggcgttggaaactattcggaatttttaaaggatattttaaaaaagctttcggtcaaaaccgtctgtctcgagggaaaaacctccgtttctcacttaaacgcccttaaaagactctgcgataatgtcgattttctttgcgaccccgcccttgacgagggcataaaaaagctccgtatgcgtaaggacggcggagaaatccgccgcattatcgaggctcagcgcctgaccgaccttgccttcacccacatctgtaattttataaagcccggtgtgaccgaacgcgacgtggctctcgagcttgagtttttcatgaaaagacagggtgccgagaaggagtcctttgataccattgccgtgtcgggaaagagaacctccatgccccacggcgtgcccacccaaaaggaaattgaaaagggcgatttcgtcaccatggacttcggagccgtggtcgacggctaccacagcgacatgacaagaaccgttgccgtgggctttgccgacgacggcatgaaagaggtctataacaccgtcctcaaaagccaaaaggcggggatcgccgcccttgcggtaggagttaaatgctccgacgccgacaaggtttgccgcgatattataaaaggcgcgggattcggcgaatatttcacccattccaccggccacggagtcggtctcgacattcacgaattccccaatctttcgcccctttctcccgataccctcgaaaagggcaacgtcgtcaccgtcgaacccggcatctacattcccgaaaaatacggcgtgagaattgaggatttcggctgcgttacctccgacgatttcatggatttcaccgaatctgaaaaagaacttataattttataatatctttccgcatttccttatatatataatgtaaggtgatgccatgaacaacaaggttttaaatgctcggcaaatcctgctttcgacggtgcttttttcgtcggcggcgggacttgtttttttcggaaacgcggctgtcgagggcgcaaaaaacggcatggttctctgcgccgatttgcttgttccgtcgattttcccctttatgtgcctttgctctctgatctgcgcaagcggcgggggagagcttgtttcaaaaatcacaagggtgcccttcggctttttctttcccggtctttcggatttttcctacatatatataatgtcgcttttgggcggctatccctttgcctcctcctgccttggtcctctttttgagtcgggaaaaataagcaaagcggccgcacaaaagctgttgctcttttgcttttgtcccacccccgcattttgcataatcgcggtggggcaggggatatacggctcctccgccgtcgggcttgtcgtttttctttcctgccttgtatcatcgtttgttttcggtgttgtaatctgccgcataaaaagagcgcggccgaccgtccccgttttttcaaaaaacgactgtcctttttccgccgcctttgttgccgcagttgcctcggcctccaaatcggtcataataatttgcgccgttgcggttttttgttccgcccttgtcggggcgctgtcggccgccgtcggttcgccgatttttacctcggtgctgacctgccttttcgaaacgacctccgccgtaaaatatctgtcggcaaacggttcggtttacgccgtcgccgcgatatgctctttcggcggcatctcggtgtttttgcagattgccgcccttgcaaaagagctttttccgaggctttggctttttgttctttgccgcgtgctttccgccgctctctgctgcggcctttgcgccgggctcatgaaaatgtttaaaatatccgttccgaccctttcaagtgccaaggagactgcttccgccgcattgcggtgcagccccgttcccgccgtctttttggtgctttgcgcccttgtgctcgttgtgtgggtcgaacgtgaagttaaaaaggagaaattatgaaaaacagcgaatacctttccgatgattatcccaaaaaatgcgaatgctgcgaaaagctcaaatcggccgagggggctaaaccccttgtctgtcggtataagggggaggcaaagccggatcaacgctatgatgccggatttcggtacggcaa

SEQ ID NO: 2725 - DNA, 3434 bp, Unknown
  16S sequences of unknown bacteria
cagcgcattttcctcattccagcataaagcgcccatgcgcacgccctgcgcgtacagccagtcgatgcgcgcttccggatcacggtcgatgccgcacatgccctctacgctgagcatggcatagatcttgtcatcgctccagtcgatcaaagaagcgtccatgaccagccgcacatcatcactgcgggcaatgtccgccttcagtgcatggatcatggcgcacatctgatcaaaatcctgcgtgccgtcgaaccagcatgccatgaagacggcattgatccctcccttgcgcagcgcatccgtgtaaaaggaagacaggatatccgtgtatcctgcctcatgtttctgccataccgcatagccgagatctgcatgcagatcaaacagtttcatccatctcctcctcatagatgatgtcaaagtgacgcatctctgcgccattgcccatccctgtatcatatgcgcggtcattcaggatgtccgtcagcgtgcagatgtccgcgccctcatcgatgcagcgccatgcggcttcgatgacctgcaccgcgacatcctgggcctctgtgaacagatccatgaaggtggcattgctcacgatctgatcatcgcagggatgcacccagaaccgccgttcatcgttcatgacatcatagcggggatcagcgctggccggcacgacattgccggagatgcgccattttgcgccgatcagcttctctgccccctgcagcaggcgatagcggcgtccgctgggatcatagagcagcttctgcacatcatgccatgactccagcgtctcgcgcagctcatgcaccttgacgtccacgccatagaccgccttggcgcagggcacatagatgcgggcgattgccttgagcatgtcctcatcgaacgtgcacagctcatagctgcgccactgagtgatatcctcatcgcgcatgcgcctgagcatgatcgcgtcgatcgtcgattccatacggtgatgataaccagcgctctttcctttgcagtccccggtccgatagaagatatacggatgcgtcaccatatccagcgcccagtggcacagatggccgaacagataggcgcacatatccttgcgcacatccgtgtgcgtctgccggcgcacacagcggacggcctctgcgtaaaaggcattgatgccctccgcatgcatcgctgagccaagatgattcagtttatgcgacttatatgcttcccatggcttggcatgagaaaaaaacagaaaatccggtccattggcaccgatgacatacagatgctctccccgctccatcagcgcggcgatgtcacggtccttctccttctgcgcgacctcctgtgcgaaaatggtatgtgtgatgatatttggcataacattacctccctagccgtttccctcattatatcatattttgcgcaaaatgcgctttatgcgcccgccgcttaggcgctcccccttttccctccttccccgcctcataacataaggcaggaggtgagaccatcgctaccggttatcttcagatcgaagtatcgatcgccgatgaggcatatgccctgagcaatgcgctcatccggatctacaaggtgaatcagggagagatcgtctatgagaacttctatatcagcgatgaagagggcaagacgccctccatcccgctctatgcgccggacatcgcgctttccctcgacgaagagagcgatgtgcgtccatatgagacctacagcgtggagatgcgcgcgagcggatttgaagtcatggagatccagaatgtgcaggtgtttgcggaagaatcctcttacctgcccgttcatccgattcccacgcggcggcaggtattcgaaggcagggacatcatcaacatccccgaccatcatccgctgaccaactacggcgggaacaaccagggacagacgccgcacaacaacggccggatcctctcgcagatcgtgatcccgacgttcatcaccgtgcacctgggccggccgcagagcaacgcagagaacgtcaccgtgcccttcctgtattacctgaagaatgtcgccagctcagagatctatccgacctggccttatgaagcgctcaaggccaacatctgggcacaggcctctttggccctcaaccgcgtctatactgaatggtatccgagccaaggctatgattttgacatcaccaattccacggccttcgaccaggcattcgtcaaggaccgcaacatctattcctcggtggccgagatcgttgatgaggtgttcaatcagtatatccagaaaaggaactatcaggagccttattacgcagaatactgcgatggcaagatcgcggactgtccaggcatgaagcagtggggcacgcttacgctggccaaccagggctacacggcattgcagatcctgcgctattattacggaaacggcatcgaaatcagagaaagcaacaacatccaggacatcaccgcttcttatccgggcgtgctgtcgcttggctcaaacggccaggaggtccgcgagctgcaggagtatctcaacgcgatcgccgtgaattatccagccatcccgatcatcctgccggtggacggcgtgttcgggccgcagaccgaagaagccgtacgcgtcttccagcagcagttcaacctcacggtggacggccgagtgggaaaagctacctggtataaggtcagctatatctacgccgccgtgcgcaagctcgccgagctgcagtcgatcggacgcatcgaggacctttacagcggcgaatggccgggcacggtgctgcaggaaggcagcaagggaccagaagtccagctgcttcagtattacctgagctccatcgccgtcttctatccgcagatccccgacgttgacatcgacggccgtttcgggcccggtctggaaaaagccgtgctcagcttccagcagacattcggcctgatccaggatggacaagtggggcgcgcgacctgggaccgcatctatgccgtatatgagacgctggcagacaagatcgtccctgacgagggcattcctgaataccccggtttcctgcttcagcaaggcagttcgggcgatgaggtgctgcgcgtgcagcaggcgctcaacaacgtctctcagcagtacccttccatcccggtcatcgttgaagacggcatttacggcagtgccaccacggccgctgtccgggccttccagcgccagttcggcctgaatgcggacggcatcgtcggaccgcagacatgggagcgcatcttcaccgtaagcacgcagatcgaccagggcgaagagccgggagaggacatgccgccttatccgggcacgctgcttcagatcggatcgcgcggggaagccgtgcgcttcatgcagaaccgcctgcgtgagatctccatctactacccatctatcccgctcatcgcagcagacggcatttacggcag

SEQ ID NO: 2726 - DNA, 4483 bp, Unknown
  16S sequences of unknown bacteria
ggtcgtatccccggcgaacggaatatgaactcctcgtcaagcccctcaaggtaatcctcgccaagccgcagctttacgccgtccctctcaagctcatccgcgagcgccccgaaattctcgcgcggctttatatcccgcgccgtgacctccgcgccatgctgcttcaaaaacttaataagcggtgtattcgacactccgatgccgatcacagtcgccttctttttccacaatctctcataaaaatcatcgagtctcatatcagaccgcctttctcccccatttcattcatcatgaagtcacttagtcatcctgtctatcgccgaattctcgccgagcagcgccacagtctcactcccggtgaacttccgcgccgcgtccggtgaaatattcatcccatgctccgggtcgctcacggcaagcaccgtcacccccgaacgctttctgacgtcaagctccgcaagcgacttcccgacccatctctccgggaccggtatctcgactatagagtgtttatccgaaaactcgatatactcaagcacgttgttccggtcaagtattccgacgagcttctcacccatatcctgctccggaaacacaaccatatcagcgccgatcttctcgagcacccgcctgtgctggtcgctcgaagcgcgcgcgacaacctgaccgatccccaaatccttcagattcatgactgtcagtatactgtcattgatattgctgcctgacgcgaccaccgcgcagtcatagctctgcacatcagcggcgcgcaggacgctctcactcgtgggatccccaacaacagcattagtcacaacatcactcaccgtattcacacaatcctcactctcgtcaatgacaagcacctgatgacccgtccgcgcgagattcacggcaagcgtctgtccaaatctgccaagccctattatgcagaaactccttcttttttgtttcatatatttgttagtttgcgggggagggaaaggactttgaaaagtcctttccctcccccgcccccctccttttctcaaactttatacaaaatcagcctataagaagatcagcgtccggataagatatacagctgtcgcggcgcgcctgactcaacattatcgaataagtcacggtcaggatgcccacgcgtccgaagaacatcagcagcatatccaccaccatagaaaacgccgacagatacggagacagcgaaagcgacagaccaaccgtcgatatcgccgagattgtctcatacatgcttgtcatcagcggcacgccctctcttgccgagatgagaagcccgccgaacaatccagccgacaggtttattgtcagcacagttatcgctcttactaccatatccgacggaattctccgcttcgagaaccgtatctcggatcttcccgccgccgagcacatcacagccatcacaatgaccccgagcgtaccgaccttcacgccgcccgcggtggagccggaagcgccgccgatcagcatcaggaacatacagatgagtttcgacgagtccgtaagcgccgtattgccgatcaggtcaattcccgccgtacgtgtcgtcaccgactggaacaagctctggaatatcttttcgcccgtgttcattccgccgatggtatccacgttgttccattcgaagaacgcgatgagcgccgttccggaaaggatcagcacagccgtcacacgcagaacaagcttcgtgtatacagacaggctcttgtgtctgagaacaagattcacaatatcgtcccatacgatgaatcctatcccgccaagcacgataagagcaataagcgtgcctccgacaagatgatcatgcctgaatccgtcgaacccgtcaagcaggtcgaaccccgcgttgcagaaagcggacaccgaatggaacacaccgtaccatattcccttggccggcccgaaaacaggcacgaatctcactgacaatataacggctccgacgccttctatcagcactgtaccccgcagtatccgttttacgagccggaccgtcccgcacgcggcgttcatcccgagcgcctgagacgcgacaagtctctccctcggggtaatctgccgtttaatgaagacggacagcatgacggcgagcgtcatgaacccgagcccgccgatctgtatcagcacgattatcacaatctgcccaaaaaggctccagtaagccccggtcggcagaacggtcagaccggtgacgcatgtcgcgctgacagacgtgaaaaacgccttgacaggcgaagtgaacaccctctcccgggaagccgccggaagcatcagaagcagtgcgccgacgacaatcagaagcgcgaagccgataattattatctcagctccggaaagcctccgtccggaggtcgtgcggagcttctttttgatattcacacgctttgccgcgagcatggaagcgaccttctcctcgtctggaagcgtccgttttttcattgttcggaatcctttcgatcatccgaggcgtcgggaaaatacccgcaccgcggaatgccatatatcattatacgcggcgccgcgcaatccgttcgtttcagtcgggtcagtcaagcgcgagccgcaccgagagcggatagtgatcggacggatactcgccgtcatacgacgtccgcacgatcttcgccgagatcagcgagaactccggcgtcgcgaagatataatctatccttctcgagcccatcccgcccttgtagaagtggaatgttccacctgcctcgccctcggctattccggtgagcttgacattgtcaaagccgtacccgtccgccagaagtctgagacttttcgccccgggcttcgtgttgaagtctcccataagaagcgtcgggagcggttccttcttctgtctctcggatatctgacggcagatgagccgcagttgtgcgcaccgtgccgtctcgctcgagacatcgaggtgagtgttgaacaccctgacgcgccgctcgccgaccttcacctcggcgaccgtgcatattcgcgggaatatccacgcaagcggtgacatcggcgaaaagagccgatgattcttctttgccagccagaacgtgccgtcgtatgaaaccgcgagcccgttcttcaccgcgatgtccgagtgctcgtcaagaaaaccgccgccccttccgagtccgacgagattatattcatgaagctcgttctcaaagtccctgcgcatcagcggagtcagctcctgcacgccgatgatgtccgagccgagctcccgcatcatccgaagaacgagcgcgcggcgtctcttccatttgtgtatacccatgccgaacagtgagctcttcaggttgaacgtcgcgatatctattatggttcccactttttgtacatcttgctttccgaaatgttctttttctattataccacaagggtgataattgttatatatttatatgtaaaattactgtgatattttgaacatgaaagaaattcagcgcgctaaaagacaatatgctcgcaaaacaccgcgtcggagcgcagaatttcagcgtgttatattcgcgattcgtcttgaaatacgacggaatttgtggtataattattttatcgggcattaaccgaactaaaacataaggaacgattgttatgataaatatcgcaatattcggtttcggcgtggtcggcggcggcaccgcggaggttctcaccgagaacgcctctctcatcgcgtcgcgcgtcggggaaccgatcaacatcaaatatattctcgatctgagggatttcccggacagccccttccgcgactgcgtcgttcacgacatagacgtcattctgaacgacccggaagtgaagatctgcgccgagctcatgggcggctcgcatccggcatatgagttctcggtccgcgccatgaaagcaggcaaaagtgtcgtcacctccaacaaggaagtcgtcgcgaacttcggaccggagctccttaagactgcggacgagtgcggcgtgcgttacctctttgaggcgagcgtcggcggcggcatacccgtcatccacccgataggaagctgtctcaccgcgaacgatatctccgaggtcgacggcatcctcaacggcaccacgaactatatcctcaccgagatgttctcgaaggggaaggattttgactcggctctgaaggaagctcaggaaaagggctatgctgaaagaaacccctccgccgacgtcgacggcatcgacgcctgccgcaagatctcaatcctctccgcgatagcgttcggaagtctcgtccagccggaggagatcagcaccgagggcatacgcaatgtgaccgccgcggacgtcgcgaacgcgaagaaaatcggcgccgcgataaagctcatcggcagagccgtaaaggtcggagacaaaatctccgcctgtgtcgcgcccatgttcgtccgtgagacgaacccgctcgccggtatcaccggggtctacaacggaatactcgtcaacggcaacgcaataggcgacgtga

SEQ ID NO: 2727 - DNA, 32759 bp, Unknown
  16S sequences of unknown bacteria
gagaagctctatggactattcaatttgcatgttcaacttaatattacaatcggcgtcttttatttttccaaatccttcccgcacatttttttcatcattctgtcgatatattacaacaggacgcttcttctccgaagtgggttctcctactgcaacataaaggcagtcatcgcttacctgttcccccaacacatacgttccggtatatatcgccctttcgtttcggtctgtgtacgaagcataaatctgtgcaactgcaaacagtcccgccacgcaaagcagaaccacaccggcaatcacgattttcttgcgtcttccacttgtcattttgcttcctcactactttccttttttgcaatggtgcgcaccattagggcatactctcttcgcataatactgacgcgcggtaacaccaaggtttataattgatcctaccataagaataattactaaacaagttgctcttctagtcattttaatttctttgtgcatgccgtcccccttaatctgttcgattgcactgagtaatccttatgggaaatccctcctattgtaaaacgatacaatagaaaactcggcaagccagacgcctgccgagttttttgcattattactttctatttcgccattttgtttcttgcatatacgattatgtacgagataatccaacagaccgcaattccaagcacgaaggtgctgctcttatatcctgcgattcggttaatcaacaagtccccatataaaaggaaggaaaaaatcaaattcacaagcaccccaccagacagcgcgtgttctttgcgtctgtaataagcaaacgcaatattcaagatattgtaaacaattacgattccgaataacaatttcatgattcaatctcctatacaataattcagccaggtcgcatgtactatacatcatacattcctgaatcaatctctccccatgtgatgaaccggccgagtcctaactgcattatccattatcctcggcacgcaatctcatattcctggaatttcgaggacgattcacgctgtttaacaaaaaaattcaaaatagcgtgaacgaaatccgccgactttatgaaattctaatttctgaccgatgacgccctgccttttgttcacgctaaaaagaattttccccttcaaaaagcgtgaactgttttttgaaatcatgttttcacgcagcgggctgctcggcgaaaccggatgaagcaagaaattcgttcacgctaatccgcccaaaatgtaaaaataacgtgaagtcatgtcaaaaatctaggcatatttaacctcttctattcaggttgctctaattgtcgagcagacactcggagggcactccgggaggcctccggcgagcattctcgttttcctgcaagatgccctcgcccccgccgccacaccacaaaagccgcccgacaggttcgaatcctgtcgggcggctttcactacacgcaattctcttcaattacttcagcaccactgcgatgaacttcttcttgcccttctgaatgatgatcttgtcatcattgaagtcctccagcgttacctggtgctttctgtccacaaccttctcgtcgttgattcggaagccgccctgctcaatcatgcggaatgcttcactgttactgcccaccagcttcaattcctttgccagagcagccaggccgatgccttcgccctcaaatacggaacgctccatctccacgctcggaatgttctctgccgcagcagcgtttccgctagtaaataccttgcgggatgcttccagcgcttcctgcgccgccttctcgccgtgaaccagcttggtcacctcgtagcccaggatttccttcgccttgttgatctcggaaccttccagtgcggacagtctgttcacttcttccatcggcaggaaggtcagcattctcaggcacttgttcacgtccgcatcgttcacgtttctccagtactggaagaactcgtacggagatactctgttctcatccagccagagcgcaccctttgcggtcttgcccatcttcttgccttcactattggtcagcagtccgaaggtcatgccgtatacttccttgtcacacgccttacgggtcagattcacgccggcgatgatgttggaccactggtcgtttccgccaaactgtgccttcaggtcaaaatctcttgccataaccatgaagtcgtatgcctgcaatgtcatgtagcagaactcgaagaaggacagaccctcgttccgatccattctgctcttgaagcactccgctctcagcatggtgtttacattgaactgcgtaccgatttctctggcgaattcggtgtacttcgctttccgaatccattccgcgttatttacgctgacagcctttccttccagcggctctctgttctgatgtcccggaacgtatacgccgccgttaccctcgtatttccactcatcgtcaaactcgaaaaatctttcgaacagcttcttgaacgctctgcagttatcgtcgatggtatcaatggtcatcacctgacgcatgtcgcttcgaccggaagggtcacccacttcaccggtaccgccgcccagcagaataaccggagtatggccgtatttctgcatgtacagcatgataataatctggatgaagtgtcccacatgcaagcaatccgcagtcggatcgaaaccgatgtagaacttaattttctcccggcccagcaggtctctcagtgcctccggattggtacactgttcaatcaatcctctttcctgaagtacgtcgaacacgttatcgtacttgctcacattgtctggaatctgaaacattttctctctccttctcaatctatcataataaaattatccttcgaaacgatgacattattctatcacattcccggggcaaaataaaaggctccgcagcattttgccgcgaagcctgaatacttcatttccggatttctgaacccacatcgcaacaaaatcacctcttcagttaggagaagaggtaataataggcctgcttgtgagatctgtttctaagaaatgtagtcattgttccatcctctttgtgttgtgatttattacaatatatcaccgcatttgtatgatgtcaacatatttttcggaagttttcgggtaaaagcacaattgtttttacccgaaggtttccgattagtcgtctccctgcgtccgaacttcttcttcgatacgagccacctcttcgcccaaatgctccaatcccggaagcatatccgcatatcgactttcggagcagcgaagaacgccggcttccttctcggacacacccagctgataatccgcgcggttcaacgccagtagggttccggccccgccgatacaacctcccgggcaggccattccttccagcagatatccgttcagctttccggcttttgcccgcatcagcattttacggcagttgtccaagccctcggcgcgctcgatcagaacttcccgatccggatccacttcttccaagcgcttcttcaccgcttccgctacgccgccgctgcgggcgaaaccgtagccgtcgctgctggcgcggcggagttcctctccttccggtattgcgccgaagtccacccctttcgcggcgaacattccggcaacctcttcataggtcaatacgaaatccacgtagctcttcacgctccggcggctggcttcctgtttcttcgacaggcacggtccgatgaatgccaccttgcactccggatgcagttttttcgccaggcgggcactcagtaccattggcgtcaacgccatggaaatgtttccggcaaattccgggaactgcttctttgccatgatggaccaagccgggcagcaactggtgcccatgaacggcagattttccggtacgtcatgcatgaaatgctccgcttcctggatggtgcacagatccgcacctacggcaacttccacgacatccgcaaatcccagcttgccgaaagcttctttcatcttggtatcggtcagttcttttccgaactgtccggcgatggacggtgccaccatagcgataaccggtgcatcgtcttgcattgctttgatggtttgatagatctgacccttatccacgatagcggcaaacggacaggagttcaggcacatgccgcaggaaacgcacttttcctggtcaatttccgcatgaccgtactcatccttgtggatggcgttgattccgcaggctttctcacaagggcgctcttgctttacgatggcgttgaacgggcacacctgaacgcagcggccgcacttgatgcacttgtccggatcgatgacggaccgtccgtccttctgaatggtgatggcatccttcgggcagacctccttgcacggatgttccaggcatccctgacatccgttggtcaccgtcacgccgtccggacagcaattgcaggcgaaccgaatgatatcgatgagcggcggttcatagtatttctcggcaatcatgctctcatccacgccctttgatgtgttggcatgctcgttgattttccggagcgacatccccatcgccacccgaaggcgttcgccgatgatggctctctccaggaaaatactgtcccggaaaggctcgttctctccggaaatgatcttgtacggcaggtcgtccagctgctccgggccgcctccttcgtaagccagccttgccacctcttcaaatacccttctgcgaagtttcgtcttgtctgtgatgtaccctttcatgttctcctccaattcatgaaatcgtgcaacagaaaacccggggcatccgccgatgctctgggttccctattattagttaaaagtaaaatgcgtgcttccctctacatttcaaataaccaatcatcacatattgaattttattttaatttccccgtaccgcccccgtccgacagtcccgagaaaatcatcgtcctctatattttttattccctacttcgttccgtacaggcgatctcccgcatcgcccaagcccggaagaatgtaagcgttttcgttcaggcactcatcctttgccgcaatgtagatgtccacatccggatgtgcggtgtggagcgcctcaattccctccggtgccgcaatcagacacatgaacttgatattggtagcgcctctcttcttgatgaagtcgatggctgcaatcgcgcttccgccggttgccagcatcggatccaccacgaagcattctctcttctcaatatccaccggcagcttacagtaatattccaccggcttgtgggtttccggatcccggtacagccccacatgaccgacctttgcgttcggcaccagtgccagcattccatccacaaaccccagtccggcccgcaggatcggaacgatggcgatatcttctcccttcagcatcttcaccttcgtggtgcacatcggggtttcgatttccacatcctccagcgccagatcccgagttgcctcaaaacccatcagcattgccacttcggttgccagctcccggaattcctttacggtcgtggatgtttttctcatcaacgaaaccttgtgctgaatcagcggatgatcgaatacataaacctttccttctcttgccattactttcctccgattaaatctcttccagcatattgattcggcgcaggtgctttccgccctcgaattccgtcttcatccatgtatcgatcatttcaaaagccagctcctgagagatcatccgagcacccatggcgattacgttggcattgttgtgtctccggcacatctccgccatctccacggaagtgcacagcgcacagcgaatgcccttcaccttgttgcaggcgatggaaattccaataccggacccgcaaattgcaactccccgctccgccttaccggaagccaccgcttctccaacggcttttccgtaaatcgggtagtccaccgactccgtagaattcgtgcccacatccagcacttcgtgaccttccgcaatcaacttctccttgaccgcttccttcaggggataacccgcgtggtcgcatccaatcgcaataatcattttttccacctcctacacatgtatcacgtcgtaccctgccgacttgagcatccggttcatcaccgagaaccccaactcttcttccggaagggcccgaactagaatcacatctacatcttcccgatccaattctctcagacgggcaaaaaaatccctcgccgcggccttactgtcccggccgtaattcagcgccaccgccttctgccgcgcgtacttgcacagccgcagctgctctttgatttcccgctccaccgcagcgtcatcgtcgccttcgataatcttcacttccgccttcggcgcatagtgacgatacttcattcccggtgccttcgggtggaactcttccccctcgctgcgatgcatcggatccacgaacagcgccgggtcgtatttcacttcgcttcccaaagtaaactccagcatttccttcgtgatatatcccggccgcagaatcatcggcacttccccggtaaggtccagcaccgtagattcaatgcccacctcgcagtcttctcccagaagaaccgcatcgattcggccgtccatatcctccagcacgtcttcgtatcgggtcgggctgggtctgccggaccggttggcgctgggcgccgcaatcggtctttctgccgcccgaatcaaatctctggccgcctcactgaggggcatgcgaattccaacggtatccaatcctccggtagtcaccatcggcacgccctcggcctttttcatgataaaggtaatcggtcccggccagtaagcctgaatcagcggcaccgccactgccggaatttccgacgccacatccgccagctgtcccatctccgcaatgtgaacgatcatgggattatcgctgggacggcctttggcttcatacaccgaccgaaccgcatccgcatccagcgcattggcccccaggccgtacaccgtctctgtgggaaacgctaccagtccgcctcgccggatgatctcgccggcatgagcgatatttttttctgtaatctcaagtctttcggtatccattagaagctcttcatcttctctgcctggtcatgggtgatcagagcgtcgataatttcgtccagatctccatccaggaagttttccaatttgtagattgtcaggttaattctgtgatcggttacacgaccctgcgggaagttgtacgtccggattcgctcggaacggtctccgcttcccacctggcttcggcgctctgccgaaatcttgtcgttctgctcctggagcatcaggtcgtacaggcgggccttcaataccttgaaagctttgtccttattcttaatctgggatttctcatcctggcaggttaccaccagtccggtcggaatatgggtcagacgaaccgctgagtccgtggtgttgacgcactgtccgccgttaccggaagcgcggtacacatccacccggacgtcgttcgggtcaatcttcacttccacgtcatctacttccggcagcaccgcgatggatgcggcagaagtgtgaatccgtccgctggactccgtctccggcacacgctgtacccggtgcacgccgctctcgaacttcagacgggagtatgcgcctttacccttgatcatgataaccgcttccttcacaccgccgattccggtatcgtttaagtcgatgatttccgtcttccatcttcttctctctgcatagcgcaggtacattctcatcaggtcgccgccgaacagcgccgcctcgtctccgccggtgccggcacgaacttccagaataacgttcttctcatcgttcgggtcctttggcagcagcagaatcttcagctcctcctgggatttctcgatgcccgcttccagttccttgatttcttcccgagccatctcccggagttcctcatcatcttccatctcgaagatttccttggaatcctccagctcctgcttcatatccttgtaatgcttgtattccttcacaatcggctccatttcgcccatttccttcatgtacttctgccatgtcggctggtcggaaatgatatccgggtcggaaactttttttgccagctcctcgtacttgtctacggtaaaatccaatttgtcaaacataatctttttcctctatattatatatgtaaaaaaacgataacatttcttccggttttccggcgcgtcatctgctgtcgttacaagaaaatcacgctctttgccattatatcacatcccacatccgtataaaatacagtcatgcgaaaaagggatgctgcagtctctcccacagcatcccccttactcgttcgttccctaaaggttgtacttgttcttgaacttttcgatacgtccgccacggtttgcaaacttctgctgaccggtgaagaacggatgacactcagagcaaatgtccactctcatctcggagttgttggacagtgtcataaatgtattaccacatgcgcaagtaactttacattccttataatcaggatggattccttccttcatgttgtctctcctctttctgtgaatgtccatccgggcacggcttagtccattacccaaatagctctataattatatcagcatgaaaccctgtgcgcaagggatttttgctttatttttcgggttttttgcccttttctttcgatttttcgtgaaggaagcgctttcaccccgtcaatttgtccattccctatcaatcattgcaccccgctcccccgatggttataatgtatttgtaaaaaaaggtttatttttcaacatattccggcagttcggattgcattcctctgccgaatcgattactgaaaggaaattcactatgctacagggaaaaaccgtgctgctgggcattaccggcggcatcgcagcatataagagtgccatgctggccagcgctttgaagaaacagcacgccgatgtgcacgtcatcatgaccgagaacgccactcggttcatcgcacccctcacctttgagaccctgaccaacaaccgggtttcggtggacacctttgaccggaatttcaaatacgatgtggaacacatctctttggcgaaagccgcagatttgatctgcgtggctccggccaccgccgacttcatggcaaaggcggctcacggcctggccgacgatatgctcaccaccgttcttctggcggcgaagtgtccgaagctggtggcgccggccatgaacactgccatgtatgaaaatccgattactcaagataatatggcgattctccggaaatacggattccacattatggatccggccaacggccacttggcctgcggcgattccggtccgggaaaaatgccggaaccggaggttctgctggaagaaattctgtaccgcctggcctgcgacaaggattttgccgggaaacgggttctggttaccgccggtccaacgcaggaatccatcgacccggtgcgatacatcaccaaccactccaccggaaagatgggatacgcgctggcacgggccgcatcattccgcggcgcggaagtcaccttgatttccggtcctactgcccttcagccgccggcacacgcagaattcattccggttaccgacgccgaggagatgcatgacgcggttctggaacaggtgccgaaagccgacttcgtatttaaagctgccgccgttgcggattacactccggcggtgacatacgatcagaaggtcaagaaaaaggacgaggacatgtccattccccttacccgaaccaaggatattctgaaggacgttgccggaattcgccgggcagaccaaatcctctgcgggttctctatggaaacggagaacctcattgaaaattcccggggaaaattagaacgaaaaggactggatatgattgccgccaacagcctgcggacggaaggggccggattcggcaccgacaccaacgtaattacggtaatcaccaaggatcaggtacgggaacttccgattcaatccaaattcgatgcggcgggtgaattgctcaccatggcgttggccatggcaaatcggaaataattttacttacttatatggttatttagaaaaacgcgccttctccgcggggaagggaggaggccgcaccgctcggtgatatcgagcagagagagggcttttatgttatttagtgaaaacaatgcagatattctgtacaacgagattaccggtgcttatctggatcgagggtacatgcatggcgagggtctgaccaaggatcaggtaaatcggtcacgagacctgttcaaggccatggcctacgacctaattgaccggggcgatgaaaccggacgaattcacacaccggagattctggccgtgtggaaaaaccacctccataccggcaattcggaaccggaggacggctggctgcagcattgctacatgttccttcggaatcagctgttcccccatcttccgggaccgacggatgccgacgctttccgccagcagcggaacaacctgctccagctgatgcgcggcgtattcatatacgaacagaaaacccttcctttcgatcccacaaaggatcttcgcctgctcagcgatgttcagattgcagccggccacttcaatccggaatacaccaagatgcacaagatgattcgcaacaagtacatctacgaattcatgcgcatcggcatcgatattacaccgtacaacaccctgggccatatcagcggtgtgcattacgttgccatgtatatggcatatcagctgcaccaggtagggatgccggtggatctgggcatcatctccggtgccgctgccatgcatgacatcggaaaatacggctgccgcccattcgaagaaaagcgggtaccgtatcttcattactactacaccaactactgtctcagccggaacgcccttcccaccattgcgcacatcgccgccaatcactccacctgggacctggaactggagaacctttccgtggaatccctgctgctcatctatgcggatttccgcgtaaagagcacccgagtgaaggaccgggaagtcattcacttctattccctcaaggaagcgttcgatgtcattctgaacaagctggacaacgtggatgccgccaagcgccatcgctacgaaaaagtctacgccaaactaaaggatttcgaagacctgatgattgagaacggagtttccgtggatattccgaaagatgccaccgcacatttcgatgagcagtgcattcagaaaccgattccactgcgcctccgcccggcgctgctccgaaacgatgaggtggtgcaggagctgaaattccgggccatcggccataacattcgggtgatgagccgattcagtaatccggaacagttcgccagcctgatcgaatccgctcgcagctgccagcgctggaaggatacccgtacctacatcactcttctgggagagtactccacctacatgtccgaggatcagaaaaacctgaccctgaattttctgtacgaaatgttggctcatcaggccagcgacattcgagagcaggcggcggtactcatgggccgcatcgtggcaaattaccgggaggagtacaaaaaagaactgccgaaggatgttccttcgcccaacatcacttccaccaacatctatcagtttgaatcctttctgataaaaatactgaacccggattacaaggtgaccgaccaccaccggaaatggattacttcctgtgcggacttctacgtagaatctgctctgaacaactgcaatccggcacgccggcacttctatttcgatgtgctggagaaatattacgattcggacgatgtattggaagcgcgaattgtggttttgatgattaccgcccttcgaatcaatccgtcctggtgcccggactcctttattcagaccatccgcttcttttccaagaatatgctgggttccttctcccaggatgtggacctgattaccttggacgtgatggatcactatttcggcgataccatggacaacttcacggatatccgccggagggatatcctggggctgtcgggaaaaacccttaccgacaaagagctgtccaccatgttcctggacaatctgaaaacccgcacttcctggaaccgaaagatggccaacatccgttatatgctggaatcggtacataccgaagtgggacaggcccgcatccttcagattgcgattcacctggccaacctgattaagaacagtgaaaccgtcactgttcgccgatatgcggctcaggttctgttccaaatcctgccggatctcacatcggatcaggccaacgagctgatgattgaaattttcaacggattagaaatcgaggattaccagttcagccggtccctgccgaaggtgctgggcatcatcaccctgtatcttccgccaaaggagctggatgaggtaatcgacgaactggagaaaatgctgaacaacggcgtggagcgttccgcctgtgcggctctccagaccatttccgttattctggaagaatgcagtatctataaattcaaagaaaaggatggcgtcatggaaacccggacctcccgactgctgggacttcttctgaagggttttgcctattaccgtgcgccaatctctcaggaagccttccgcatgattggcgaaagaatcttccatagtgagaagctcaccccggagcagaagcacgacctcgcggctcgctgtttcaagcgactggtaaccattatcccgttttccgccaaggaacgggaggatttgcagttctacaacaactctgccggactgctgaacatctatcgcttcatatcggaataccagacggaggtgggcgacttccatttcccggaaacgaagaagattgcgttcttcccgggaaccttcgacccgttcagtctggggcacaaggccattgccaccaccatccgaaacatggggtatcaggtatatctggccatcgacgaattctcctggtccaagaagaccctgccccacatgctgcgagaagaaattctcaccatgtccatcgccgatgaagagaacctctatgttttcccggatgacatttccgtcaacattgccaatccgaaggatctggcggaactgcgcagcctgtttccgaatcaggaggtctacattgcaatgggctccgatgtggtgaagaacgcttcttgctaccggctggaaccctgcgaaaactccatccattcttttaaccacatcgtcttcgcacgagatgccaagaatatggaggctgaaaccggggaagcctatccgattacgggagaggttattcacctgaagctgaagaaatactacgaagatatcagttccaccaaaattcgggacaacatcgatatgggacgggatatttccaacctgctggacccgattgtgcagaactatatctatgaccacaacctctattccagagagccggcgtacaaacacgtactgcaggcgcaggatttgaaaatcagcgattacaagcacgacaactacgcggccatcgccaatatgcgggaggagctgagcggtcggggctacgctttcgacgcactgtggaactacctctcccacgaagacacccagaccctctacgtggagagcggacataagaaccgaaaagtttctgcttttgcggcggcacgaagatttgagacccacgatttgctgacggaatttcaggatccgaagattaccgccaccattcgaaatcaggcacatggaggcattgcggttatcggtgcattctacgcgaacgccaaccgctccgtcagcaatctgaaccagattcttctgacggaactgctcaccggtctgctggccaaggactacgcctatgcggtctaccatccgattgacccaagcggttacagcggtgccaccatcgaggcgctgcgccgacagggttttgtaaatatttcggataccgccgctcatccggtgtatgcggtagacctcaccgacccgattgtcattttccgggatgtggagacggtcattaaagcaccgctgaacaagattccaaaagttcagaaggccatcgacgacgcccacaaccggctgttgaatacctttacccagatgttcccgggaaaactggtgatttcctttaataccagtgcggtgtacagcaagattgtggatctggtggcactggacaatggggtatccaccgttccggatccgacacagaaacgcggaccgtatctggcggtaccgttcggaaaagcactgtccgatgtggccgttcccaacacggtaacgaaagcgctgcacacagagaagtatttccgaaacgacctgtccggctttaccgtgggcgcatcagaaaattatccatctctaaagaatcaggcacggatgctaaaatcctttaaccggccggtgattctcatcgatgatttgctccacaagggacagcgcatgaacaacatcgatccgattcttcgggcacaaaatatcgacgttcataaaatcatcgtaggcctccttacggggaacgcccgggacaccatgagcgtgcgaggccgggaggtggaatcagcctacttcattccgaccatctccatgtggctcaacgagcgggactgctacccgttcatcggcggggacagcatcgaacggccggacggctccgcatcacgctccgttaattttatcctgccgtacaccagctttaacttcgtgggcggaaagaatctggagcacatttacaaatactccatgacctgcctggagaacgcccgggatatccttcaggtgctggagcaggagtatcaggccaccttcggcaagaagctgaccatccggcggctgggagccatcatcagcaatccgcggatgccggtgctgggggccgacctggaatacgatgagcacctttccccgtcccagtacgtggaaagcgatatccggaaggcgcagcgcctgagcctgtaccgaaaatgcgaattggaggaatagacaatgcatattcatgatctggtaaaagaaaccctctccctgcgaaagtgtccggtaaccccgggcaccaaagctcgggtgaatatcgtggcgctgggggatgtgggcaccaccatgctcatcggtctcaagcttctgggaagcgatgtaatcgagtctatcggcatctgtgatattcggaaagaaaacaccgcacggctggaaatggaaatgaatcagattggataccccttcgaagggcccgcgcttccgtccgtggaggtggtgccggaagacgagctctttgccggagatgtgctgattttctgcgccagccgagggattccgccggtggagcccggctccaaaacggacgtgcgcatggctcaattagatgccaaccgggatatcatccgccactatgccggactggcacgaaatgcccggtaccatgggctggtatgcgtggtcagcgatccggtggacaacctgtgcgcggcattcctggatgaatccgggctggagccatggcagattcagggatacggtcttggagtcatgcataaaagagcggaatactacgcctccaaggattcccgtttcgcctcctatctcacggaaggacgggccttcggtcctcacgggaaagacctggtgattgccaacagcattgaccgatacgacgatgccctttcccgggaattgacggaacaggcagttcgggccaacatcgctgtccgggacctgggtttcaaaccctacatcgcaccggccctttcctctgccgcactgtccatccttctcacactccgaggtgaatggcattacggctccctgtacctgggtacccgggagcggggtgcatttctgggaatgaaaaaccgccttacggaaggcggctgggaatgggaggatttggaccttccggaagagctttacgaaaggattcgaaacgcttatgacaacctctgcgaaatccgataatgagattcataataacaagccaaaagaacttctggtaattcgtcccatctgcgagatgttgggacgaatcggccggatggaacaggtgctgggagactgcctgacccgattggaagcggaaggcatccgggttaccctggtggaaaaagtctccgaactggaggatattcccatgcccggaaaaaaggtgattttcgccatctgcctctcggagtccggcgtcaacctggaatactaccgactgctggaagccttccggctccatccccactgtctggacggttccgtgggaggaattatcgtggacggcgccagcgacctgtacaccaaagcattggcccgccgcatggccttctccgccaacagttcgggctgcacctttcccggaaaacccctggtggaagccaccggcaccctggcgaacttccgggtcctgagccaaatcacgggaaagtcggtagaagaagtctacgcccttcaggtggaaaatctaatgcgaaaggtcctggacttcgatctgaccgatgccgggtggcgccatccggatgacgccccgtctgcggtcccgcttcacattgccgctatccattccggttcccgaaaaacctccaacacgcttcttctgtgggatatgattcggcgtaatctgccaaaggataccgtggtggaagaggtgtccctccggaacggctccattcaggattgccgcggctgcacattcgagacctgccgtcacttcggcgagaaggaagattgcttttacggcggaatcatgacggagaaggtttttcccgccatcctccgcagcgatgcggtcatgctgatttcaccgaattacaacgatgccctgagcgccaacctcaccgccatggtcaaccggctcactgcactgtttcgaacccatgattttagcaaaaaaaagatctacagtctggtggtttccggctacagcggcggcgatatcgtatcggagcagattctgggggccttctgctttaacaaaagcttcatcctgccggggcgatttgccatcgtggaaaccgccaacgaccccggtgccatccagaatgtgccggaaattgagaccaaggcgcgcacctttgcgagacatatgtggtgatgggttttggctgcgacttaaagcagatgctattatgcatttaatcaaataatgtgaattgcggtgtatctccgattatgcggaacacacctaagagaatcggatgcgtctgattctcttttttgtttttttcttttcttgcgattttcgtcgggttgcttcctcgagtttaaaaacaaggttgtatagtttttttatcggtggttccagtcctttttgttctaaacatattgtgattaaaactatttctgataggatggaaccatgaaatttcagaaacatacgcgcgcgcaccgttatttcgagcccaatatagtttcagtgtttgccattaagatttgacaggaactatatttgatttataataaagaaaagaggaatagatgagtacgagaaggaagtacaaaacctacaaagaattgtcgtttaccgatgattttctgttctgcaatattatgcagaacaatccggacatttgcaaagaattggtggaactgctgctggaccgaaaggttggcaaagtggcttatagtgaaactcagaaatccatcgatctcgcattggagcagaaaggggttcgcctggatgtctactttgaagacgatctcagcactgcatacaatatcgaaatgcagacctccaataccggaaatctgccgaaacgaagtcgctattaccaaggtaccgttgatttaaatatgattagctccggagcaggatacgatgagctgaagcagagctacatcatttttatcaacacctttgacttgttcggaaaaggctttccgaaatatacctttgagaacatctgtcaggaatcatcggatcttcatctggatgacggtacggttaaggtgttcatcaatgccaagagtacaattccgggcatgtccccggaactacaaagttttctccgctacctctgcggaggaaatccggatacgccgctcaccgatcggattcagaacgaggtcgttaaatcccgaaataatgtacgatgggagaggatttatatgttgctggaagaaaaatacaaagcttttttcgctgaggggcgtgctgaaggacgtgagcttggcctagaggaaggccgtgcggaaggccgcgaagaaggacgtgctgaaggtcgtgaagaaggccgcatagatactatccttgaaatgtttgaatccggataccttccggtggaagtagcactcaaggaaaccggtcttgattccgaagcagtactgcaagcttatattaaggagcgaaaggaatcaacaaagtaatcaaatacccgaaagagcggaatggaaatgggccgttccgctcttttttggtgttcccttttcgggattgtcgtttttattccaccttcggcagctgggctaggctcttagcgatgtcctcgtccgccggaatcgtatcgctcatggttccgtcattgaactactcgtaggccttcaggtcgaaatggacgaagggctattctccttcaaaaatgctcagatcgtcccaggaaagcaacttcgctttaatcgggaacaggttgatttcctccggatactcctcgctgatcagctccgcccccagatggcggtacatctgctccgcattgtcgtttcccttgaagacatctattaccatttgaccgtatccctggtttttcgcgcagcgacccatgtgctcaatcagtttccggcccagacctttaccccgagccgcttccgtcaggaacaacttttccagccagaaggcgcccaaaacctccggcgacggcaatccgctggtgaaccccaggaaggtgcgttctcccgcctccgacacttcctcggcaatccagaattcgccccccggctgcagccagtctccccgcatccgctgcacggtgtcctcctggttgatggacgtaatcagccgagaatccacgattccctgataaacggtgttatatatttccttgtacaaagcggcacaaagctccatatcggaggcttttgccggacgaatttctatactcataccttctctccgttctaattattctatactttctatacttccgtttctctcggcttccggtgctccgtccggtcgaaaaaagccttgagtgcactccggtattccgccgggttctcgtaataggataccgcatgctccgcgccgtcaatccacaggatatctttatccgccgcaccgcaagcctgatagttccgaatggcatgggacggcggcacgaatttgtctgcggtcccgtggatgaacagacttggaatccggcactttcgaagggcgtgttccgcatccgcttcctgcattccgaaatgcgctttccgctggcatcgccggtcaaagctctgcatgaacggaaatgccggcaggtgaaaccatttttttaggcaaagggtgcagatatccttcatggaagtgtatccgcagtccgcaatcatcccccgcacgttgggcggaagggtcagaccggaagcgcaggacacggtggccgcccccatcgacacgccgtacagatagaccggcaggccttttctgttatggctctcgacgaaatccaaccagtccaacacgtcgtacttctccctggcgccaaaggtgatgtattccccgccgcttttgccgcagccccgctgatcgattgtcagcaggtcgcaattgttctcgtgaagccagcgggcgactccggcaaaatccttcagggagttggttcggtatccgtgggcacaaagtataattcttttaggattctcgcatcggagatagcggccgaacagcggggtgtcgtccacggtggaacaaatctccaattcgtcctgttcccggttcttcaaccactcttgatcctgttccggaatccgtccgtaccgatccagcggcacggctttggcctttccatccttctttttctttccgccgtagctccacaggcttttccgcgccaccgtaaaatcaaaaagctgattgcaaacggcggtatatcccagtgcagccccggcagccgctgcagcaccgattatttttgtgcgattcttgttcttgcttcccatacgccctctcccttggttatcaatgcgttcatgcaggattttcgatactaaaattctaacacatccactgcccgccttcaatcgctgacggggtgtttagattccaatttcattggcaattattctttagatatgttattatgtattaactacagcgtaactctacaaaaaatgaggtgcttcatgcttgctttataccttcagatgctggactcgccggaagatcagtctgagtttgaaaaactataccgtacgcatcgtgatttaatgtatttcattgcatataatgttctccgcgatcaccagcgagcggaagatgccgtcagcgagacttttcttcgccttgcacaatgcttttcccgagttttggaaatcgggccggtagattccattcctgtgaaaagatacgttgccgtaagcgtgaaaaacctttcgctgaacatgatttcccacactaagagacacccggaaaccgaatttgacgattacaagcttccgctcattacagaagaatccatgaacgcactcctggaacaggaaacattggatacgaccttggccgcactgaacgaacttcccgaaaaatatcgagcggcactgcagttgtatgccgtatacgggcatgatatttccgaaatatcaaagttcctccagatttccgacggcgcggtatacaagcgaattcaacgcgctcgcaagatgcttattgacaaactcaaatgacgcccggtacccaaaccggacgccattattttgtttccgttatttctctgcagaacgcaatccacacacattcagcagcacctgcaccgctgcggcaattccacacggcgccactgccatccaatagcttgtcaggtattccgcctttccggcatcattcacgttgtaaattcctcctgcgcttcgaaccccggcatagaccagtacaattaccaggaacagatccagaatcgccaccaattgcagcattcgccggtcattaccgaataccccgtctttctttttggtcagaaacgaaagcaagagccccccgcaactgaacacggttagaactaacagcttttcgacaattgaatgaaacgtgtacgatggggtcgtgccaaatcggaacggttccgtcccgcggaagagaatcccttccccatacttgctgtccataagccataatgctgccgttaagcaaacagataataaaagggttgttcttttgatttttgtcatatttgatacctacctttcactcctttcatttcattcaaagtgagtaacacgcttctatatacataacaaatgcaccggagcattctggacaaaaatgcgctttcatattacaatttaatcatcgatgaccaatatccaagaaggagttctctgatgacttttcatgaattaattatccagtccatagattcagaaataacccaatatgaattagagaaagaacaatgcttggaacctatttattccgataaacatcgacgcataataaagaaggccaaaagaattgctgaaagcaatcttaacggttcatcaaaacgaatgagaagaattcacaagcgctatattctagtcgctgcactcatctctattcttcttatggcaatgatcatttcttcaattgctgaaaggaaaccgggatattccatgaatatcgaaaaacgcaaacatgaatggaacattacttttgaaaaagctcccggaaccataactaaacctttcacctatcaacggggtgatacccctacaggctaccgcgcaaaggaactttacagcgacgaagaaacgtacatttttgactatactaatgagaaaaatccagaaattgggttcaattacgaccagtcgaaaatttccgaaagcacatctttcggactcgattgcgaaaatgattatatgagatttgaaaaacttgatggagtcaaaaccattgtttcaaaaaaggggaacggctactccctgttctggatacagggaaacaacatgttttttatgtgcggaaattgcgatttaaaaactttaaaagaatataaaagcagcatccaccccatccaataagacacaattagaacattaaagaaaatgcttgctcgtaatccagaatagaaaccccacctgcgatagtcacacaggtgggtatacggaatcaatcgtgttaatttacttcaccatcctcaaacgtaaacgtgttaacatgctacttatattgtatagtacacccccccgttgtcaacgagttttattagatttggaacgccaagcatcactaggaatcccccttttggaatattgatgagatagttattaggaccaatcttagttgaactgcctcgaagaaacaatgcagagttggcgtttactttggataccgctctctcttagttaaagtgatgcaggatcctttatttttctatcccgtgcatcaacttaatttccaaagttgatgcacgagcacccgattttgcatctcatacatcaactccaatcattttgacgttgttcttcttctactttactttcgatttgcaaaaaaagtgatgcctaagcatctgttttctgctttcctacatcacagcctaccattaccctggacatcatccctttaatctacccagcggccgcgaataaaatgatgcaggatcctcttttttcaacggtcctgcatcatttttcaccgattccccgaaaacagctcaattagaagttcttcacttctctactgatcgcaaaccacacacattcaacagcacctgcaccgctgcggcaattccgcacggcgccactgccatccaatagcttgtcaggtattccgcctttccggcatcattcacgttgtaaattcctcctgcgcttcgaaccccggcatagaccagtacaattaccaggaacagatccagaatcgccaccaattgcagcattcgccggtcattaccgaataccccgtctttctttttggtcagaaacgaaagcaagagccccccgcaactgaacacggttagaactaacagcttttcgacaattgaatgaaacgtgtacgatggggtcgtgccaaatcggaacggttccgtcccgcggaagagaattccatccccatacttgctgtccatgagccataatgctgccagcatgcaaacagacagcaccagtgttgtgaatttgattttcttcgtgttggtcatgtttgtcacctacttcctaagcttactttttcaattcaggtacttcctaagtgatatgtcttgtttagatgattataacaatttagtcttttttcgcaacctctttccctatttatatttcctatatcggaggtcccttccggcgcggttcgcgctcgcctcccccgcaaacccattgattttggttttcaggcgcgaaccgccgccccgcaaatcagcagcagccggcccgggagacccggtccgtctgcaaaagaaagccccggcgggactgaaacgctcattcccgccggggttccatttattctcgtgtgtaaaagaaaagtctacagtgccttcttgatagcatccagcagttcgtcgaactcttcgtacgccggaacgtccggatactccgcctgaatggattccggactcttgaacaggaatcccgccttgctggcctgaatcattcccaggtcgttgaagctgtcacccgccgcgatggtctcgaaaccgatagactgcaggccccgtaccgtcgtcagcttggatttctcgcaacgcatccggaaatcatctatcattccgttttccccaatcaccagctcgttgcagaacagggttggatatcccagtttcttcatcaacggctgtgcaaactgcaggaaggtatcgctgagaatgattacctgtgtaatggaacgcagctcatccaagaattctttggcacccggcagcggatcgatttttccgatggttgcctgcacgtccttcagtcccagaccgtgctctctcagaatgtccagccggtaattcatcagcttgtcgtaatccggctcatctcttgtggttctcttcaattccgggattcccgcctcttccgcaaaagcaatccagatttccggtaccagaactccttccatatccaggcatacgatattcatacttttttctctcctttttattattttacaaaaaatcttgattaattatatcaataatcacaaatttttgcaagttaaaaagttgcctgctatcgtcctaatttctctcgagccagaatcgctgcgccgtaggcgccggcgtaccgaccgttctccatgggcagaacttcccggtgaagtttttccgacagaagttttgcgaagaacggattgtcgctgaggccgccggtaacgatgaccgtatccatcagctccttcctctgcatcagcgcaactacttttaccgccacggaattgattacccccgccgcgatttcatccttctccttgccctcgcccatgtagctgatgacttcggattccgcaaaaaccgtgcagatggagcttagcggcagtggctttcccttcgccgccagattgaacagctccccgatagtcactcccagccggttggccatcacctcgatgaacttcccggttccggccgcgcatttgtcgttcatcagaaaatccaccgctcggccgcgcttcacgttgatgaatttggtgtcctgcccgccgatatccacgatggagcagtcccgcccaatcatctcgtatccgccccggccgtggcacgaaatctccgtaatcaccttgtccgcgtagtccacggaaatccgcccatacccggtggccacaatccgacaatcctccacgcttcccagctcttccgtcagcccgtccagaataattccggacgtaatcttgctgttccagccggtgggcatcaccttgaattccggttccccgttctcccggagaatgcagatttttgacgccgtggagccaatgtcgattccaatgtagttcatagtttcctcgcctaaaaataaatttcttttcgtctaaccataccgatggcgccggttgttgaattcgttatccaagccttcgattccgatgtattccagctcctgttcctctgccagctttcggatggcatcgatatcctcttgatggattaatagagaaatgccgcagcataccgacagctcccggggagtcggactgatctgggcatacatgccggctccttttaccgcctgatacatggccagcccatctgtatgggtgttgaatagtatatagtagtgtttcatggttttattctaacatacagagactgcgtccgccagaaggggacgcagtccatgttcctgtgtaaggatgggggataggttattcgccgatgacttcgcagaacgcttcgattctggtcttcagctgctgtgcgtctgcatcggtgtagtcggtttcgatgcgcagtaccggaatgttctcctcctgcagtctcttctccagggtcgcaccttcgatgtcgtaggtctggcagaacttcagggtgacgtcgatgacgccgtccacgtcgtattcctttgccaggcgaactacgtcgtcgaatcttccggtattcggtgtgaagcatgcgcagttgatgcccatgtatctctcggcaatcttgtcgatcatctcgtctacggtcttgccgctttcgtctacattgttctcgaagtagcgggttccggtgcaggtctcttcgcagaccacggcagcgccggaggtttcaattaagttgtgcatcttccaattcggaattgccatcggtgttccggtgaccagaattctcttggtacctgccgggaatacgctgacgccgtccttcactctctgatccagctcatcgcacagggtatttaccatctgggtgaatctttccggatcgtcgtagtatgcaatctgagaaatcagcagggtgtcggttccgctgattggaatgttcttttcttttctcaaatcgtacagtcttttaagagcggatctcttggcattaattttcttgatattctctgccaggttctccggagtaacttcgtttccggtttccttctctaccagtgctttcagttcccggatttcctcggcccatttcttcacgtccttatctctcttcatctgcggaagatccattacgtgcatcggaacgtcggttcccaggatttcatatgctttcttcttgccgtcgcaagtggtctcaccgatatatacatctgccagacgatagaacggacatgttctgtcgaaccgtgcacccagcatcgccttaatcagcgggcaggtgttggccggcagatatttctcgccgcccggaacccagaactgagagccggcacagagaccggttgcaattccgcctgcagcgaaaatcacttcgtccggaacgtatgcgcagaaggtgccgaatacctttccgcctttttctctgaaatctaccagctctgccggacgaacgccgtgaacctctgccaatacgaaatcaaagtagtccatcttctccggtctgttttcctgggacagaaatacgtcgccgattgcacccggaagcacgttgcacaagacatcgtggttgtccacgtccattccgagatctttccacatctgatgataatctgccattcttatttcctcctgtatcaaaaatactttttccatatgcgtagtcgtatcaatacctcttcgccattagtgtaacatccgtttttatctacaggaaatagataacctccgcagttaaatatatttaatattcactttttctataggttgattgattaataattttaataggttttattaaatagtttagtttaacaaatcgattagccggtggtatattataggtgtcgaaggaattcggcagtgacaactaaatacaccatacaatataggaggtatcattatgagaaatatgtacaatgtgattggtatgattattctggtagttagcgcagctctcggaatcgtattcactgttgcaatggacgcggtctcagctggttccggtgcacagattgtgctgatgatcctcatactcgcatccatgggtgctttcgatgtaacatcctacgagatgctcaaataacatatagttgttcttcaatattattcggcatgcatcctcacgggggtgtgtgccctaccccaaagctatcaatacctattattaccaatacaaagtaaaaggaagcggcgagtccgcttccttttactttgcaatatattcttccagcatttcattcacacaacctcgaatcagatggattatcttcatacaatccgcttctttcatccccgcctttcggccgacagacagaagctccttttcccccggattttttccgtttccatccaccgttgtggtatgctcgccgtaataggtactgctataggtcaaatcatatgccggactgagatgccactgattctcctcctcatcatacagaaatgagaaattcttcgagtggtcatctctgttgtgcgcaaaaacattgaagcacataattcgaaacatcccttccatatccgacatgttgtttcccgtcagtatcttcgtaagcttcatcaagctgttgtaatcgagactcggttgtgtatagtccaactccagaagtgccgcggccgtcagcatgtgccgtttcttctttttactgtcttcatcgaaccgatcaaaccttgttactccaaaatatcctttgcaattttttgataaaaatagttttgtctccggcataaggattccgcacgctttcgcacagacggaataatcatactccatttttccggcatctttcgaatctacatgcgcgggaaattttataatccaatccgttccgtcaatttccgttaatattttggggcgagcaccaccgctagatccaccaagatagaataattcatccaatttgtcggagtattccgtgttcagaatgctccgacactgctccgccaattcgtccaaattatcctcatccgttttcggagcaatgctcatttccgggcgatactccaatgctcccattccggaagatcccacgatggccaaccgatccaacaccgtaattaaatccattgaaatatttcgttccttcaataatcgacttaacagcagcctgccccaattatccggcaagctatctgcaaaaacgccgaacagtccatcaaaacaactttccgatggtacgaaaaccttcttttccggaggaagggaaaaagggctaatcgaaaagccgtttcttaaccattcttcactatactggaatgcaaccttatgcgaatttgtcattgccagcgttcccacatgccgattgtcataaaacacattgagcgtatcatttgttttcatttatgacctcctgaatatcttgatagggaaccgcggtaaaaagatttcgcaattcgccggcaatgtccaatgccatcgcaattcgcgtcaatgataacagtgaaatctgtcccgtctgctcaaaccgcttaatggagccgtagctgacaccgcttatgtccgccagcttctgctgtgaaatagaccgtctacgacgaatattccgtactctgtccgccagtttttgattcaattcttctgccgtttcccataccaatgcactcattttcgccttctttctacagctaatatattgtctataatcgctcatttttgccatttatggataatatatgagctgtagttattatatcatattcttccggatttttgaataagcacaaaaaaaagcaacggccgaaaccgctgcccttccacaattcattacgctcttgccgcctcacaaaccgcttccacaaaagtcgggtgtgggtgaatggtgtttgccacttcttcaatggtcaatccattggcaattgctactgccagctctccgatgatatcggtggctctgccgcacatcagctgtgcacccagcagtgtgtgatcttccttgctggcaaccagcttgatgaatccgcgatccaactcctcgatgatggtcttgccgttagcagaagtcgggaacttcttggtaattacatcgatgcccgcttccttcgcttcgtcctgcgtcagtccaacggaagcgatttcaggagatgtgtagatgcatcctgcaaccacgttcatattgatttccggctctttgccgttcatgattgccaccgcatttcggccctctgccgttgcggtgtgggccagcatggttccgccgatagcatccccgattccgtagatggacggaatctccgtgcgatagcaatcgtcgacctgcaggaaacctcttgcgcccagcagcttctcctccagctcttcactgaagacacccttggttaccggacgtcttccggtgcaaaccaggatgtggtcggcttccacttcctgaactttgtccttctccttgtaaaagcataccagacggccgttgcgttcttcgatcttctctaccattgcgttggtatgcgtatcgatgcctctgttcttgaagttcatcttcaagctgcggcccagctccttgtccatgtttggaagaaggcgatccatggcttccacaacggtaacattcgttcccaggtcgctgtagatggttgcaaactcgataccgattacgccgccgccgatgattacgaaatccttcatgatttcgccccgaagctccagcaatccggtgctgtccagcacgcccggaaggtccgcacccggaatcggcggagttgccggttccgaacccgtggcaatcatgatgttggccgcaatcagttccgatacctcatcgtttccgctgatttcaacggtgtgtccgtccgtaacctttgcggttcccgctacgaaatccaccttctttttcttcagcaagaacatgattccgtctctcaacgtctcggaaacctcgcatttccggtcgatgatgcggttcaaatctgcttttacgccctcggcggaaacgccgatatttgcagactgggtggcaatccgatacgcatcggaagaatgcatcattgttttggttggcacgcagccccggttcaggcaggttccgcctaccagatccttttccaccagcgcaaccttcatgccgaaatctgccgcttcatacgctgcctcgtatccgcccggtccggctccgataatcaccagatcatactgaaattcgctcataatcctacctcctgctttactccatctgcagagtaatctgctcaatcacctttgctgcaattgcctgctcttcctctgtctcgaactgattcaagtttaatccactcaagattgcttttttgtatgctgcacccttcagcagttcctcgatttccgggaaaacgtcggtttccagagagtccgaatagattttcgcctcctgaatcacgcctcccactacgtgcagctgaatggttatgcttccgaaatccaaccgattgtcgatttccacatcgaacggaatgcggcggcccaggcgccactcgtccgagcgatagcgatcgtacaatgctcgaacatccggatcctcaatggatggcagcggctcttccaccggtgccccctgatatacctcaccgaacgcctgaatcaatgcatcctccacttccttcagggtcagatccggacgaaactccgtcaggttcgttacccgggaacgtaccgagtccacgcctttggacttcagcttcgccgtggaaacgttcagatagcgggaaagcacatcccggtttacgtccatcataatggttccgtggtgatagcaatactttccccgtttgaaatatgcatgaccggagaattttttcccgtcaatggtaaggtcgtttcgaccgtttttctccgcgtgaattcccagaatctgtaccgcccgaaggatgacttccgtctgctttgccacgtcgtacaagccttcctgtgcgataaatgtaaaattaagatttcccaggtcgtggtataccgcaccgccaccggaaactcgtctggctaaagtgcatccgccttccgtcatctcttccaggcggcattccttccatgggttctggtttcttccgattaccaccgtattggcattctgccacagatacatggttacctcgtccgggtctgcccggaatgtcaaatattcttccacggccaagttttttgccgggtcggtgcagtctgtgagtatgtattttaattttgtcatgattctcctgtggataaaggcgcgaaccttgcggcccgcgcctttactgcaatgcattttattcagctgtgtactttagaatcggatgtcttgccgcacgcacttcgtccagacgacgaaccggtgtggttacagggcaagccattacgctttccggtgactccatcatctgcttatgaattgcgataaatgcctcgatggcttcatccagcacttcctttgcctcggtttctgtcggctctaccatgagtgcttcgtccacgatcagcgggaagtacatcgttggcggatggattccgtaatccaggagtgcctttgctacgtccagtgcggatacgtggctttccttgtggaatttctccaggctcataacgaactcgtgcatgcaagtgtggtcatatgccattggatagtaatccttcagcttctccatcatgtagttggcattgagaaccgcattctttgccagttccggaacgccttccgcaccgatggtgagcaggtatgtcagcgccttcatgcaaaccaggaagttgccgtggaatccggtcatatctcccaggctcttctctgcacgaacgaagccgtcatccttggaataggttcccggcatgaactctgccaggaagtccttgcagcctaccggacctgcacccgggccgccaccgccgtgcggggtggagaaggtcttgtgcagattcaggtgaatgcagtcaaaaccaatgtctcccggacgaaccagaccgattaccgcgttcaggttcgcaccgtcgtagtagcacagaccgccggcctcgtgtaccattctggtgatttccataatattgtcgtcgaaaatacctaccgtattcgggttggtcagcatcaatcctgcagtcttctcgctgagatgtgccttcagatcgtccaggtcaatcattcccttttcgttggacttgatgacaacaaccttgaagccggccattgcagcgctggctgggttggttccgtgagcggagtccggaatgatgatttccttacgctgattctcgcctctggattcgtgataggacttaatcaggagaagtccggtgaattcaccctgtgcgccggcagccggctgcagagtgatgcggtccattccggtgatttcgcccagatcgtgttccagcatttccatcgccttgcacgcaccgtatacggaccactccggctgcagcggatggatgttggtaaatccaggcagtgcggccatcttctcgttgattctcgggttgtgcttcatggtgcaagaacccagcggatagaatccgtcatttacaccgcgagatgcttttgccagttcggtgtaatgtctgcccatttcattctcggaaatttccggcagcgctgcttctttctctctcagtgctgcctgtggcagtttaatttctacatcgcattccggaaagatgtcctggccacggcccggcatgcttctttcaaaaatcagtttcatgcgctgaacacctccttagcgatttctactacatcatccatatcttccttcgagttcagctcggtgcagcaccacagaatctcggtatcgctgagcttcagtccgcccaggatg

SEQ ID NO: 2728 - DNA, 6258 bp, Unknown
  16S sequences of unknown bacteria
ggtaaaattacagagcaaataacgcgcgaatttaatataaagcggctttatggtgcagacagcatcaaggcagctttgtttgtacataaatatcaatgcagtaaagagccagagggtttatgaaggctgttttgcgttttggcagtgcgctttacaaatgtggataagtttggtaaaataagtactgtatgagcaaattggcatatatagtttacagaaaattttgcaggctgcgttagcacaaagcagtctgcaaaagaaaagttctgggaaaagatgcgcccagaacaaagttgcagaaaaaaggaagaaagggagaaaggaaaatatggcaaaagcgaatgtttattttacaagcttcaaaacggcgggtcacgaaacactgctaagaaagcttcaccgtctgatgaagacggccggtatcgagaatatagactttgaggacaagtatgctgctatcaagattcattttggcgagtatggcaatctggcgtttttacgcccaaattacgcgaaagtagtcgctgattatgtcaaggagcttggcggcaaaccgtttttgacagactgcaatactctttatgtaggcagcagaaaaaacgcgctcgaccatctcgatacagcatatgtgaacgggttttcgccgttgcagacgggctgtcatgtacttatcgcggacggtcttaagggtacaaacgaaaccatcgtgcctatagacggcgaatatgtaaaggaagccaaggttggagccgcacttatggacgcggatattctcatttcacttactcattttaaaggacacgcagtggcaggatttggcggtgctatcaaaaatataggtatgggcggcggttcgagagccggcaagatggagcagcactgcgacggtaaaccgagtgtaaataaaaataaatgcgtgggctgcggagcctgcattaagatctgtgcgcacgatgcacctgtagtcaaggacggaaaagcgacgatagaccatgataagtgcgtaggctgcggcagatgtctggctgtctgcccgaaagatgcaattgctgccgactttgattcgtcagttgcgatgcttaactataagatggcagaatatgcatgggctatttgcaaggatcgtccgtgcttccatatagcgctcatctgtgatgtttcgccgagctgcgactgcgattctgttaacgatattcctatcattccggacgttggtatgctggcatcgtttgatcctgttgcactcgatcaggcgtgcgctgatctctgcaacaatatgaaaccggtagaaggaagcgttcttggtgacaagatgaaagaaagcgggtgcgaggggcacggctgcagcgggcagcatgaccatttccatatggtgcacccgaatactgagtggaaatcgtgtctggagcacgcggaaaaaattggacttggaatgagagagtatgaactgattacggtataatatttcataagaaataaaggtaggacgcgctcgcacggcggaactgctgcggcgcgtcctatatattacgcatttttacaatatattatatattttaaaaatgtaaagtacataattaagtattttagagagcaggtacaaaacgaaaatgggacttaatattaagggggagtttcataaatactttgtctaagaacaataaattgtgaattatgacagaaaacgctccggggcttaaattggggtgtttttcattttccgcatctttatttttgtcggtgattgtgatataatgcgtgataattattctaaaaaggaggcagcttgttatatggcgcttgatgttaaaaagattatcgcgtctgaatttctggaattgtgcgagcataaggacttgagaaaaattacaatcggagaaatacagaaaaaggtaggtttgagccgccagacattttacaagcattttcaggataaggacgatttgatacagtactgctatgatacgcaaattgtaccgaaatgggaaatgtcaaatgatgattttaaatcaccgcaggaggagtgggaatatacatataaatggacgctcgggtatattgggtcaataaaagagcacagaaaattcatgaaggcggcctgcgaaatgagcggccccaactgcctttggaaacatatgatagtgcataataaagagaatgaaataaaatggcgtaaaatgaacggtgagacagagattacggaggatatgaatgcagtgatcgaatatcatacaatggcatattacggtatgattttgaattggatatttgacgatatgcctatttcggaagaggaatttgtaaacagactgttacgcgtaaataaggttaaaatagatgatgtttttgggaatgataacggaggagattgtttttatgcggaaatatttaaaacaatgaagagttgaatataattttggcggcattattttaaaattgtaataataattgacaatattgattttttgtcaattgcgtgagtattaacaataatataatatgagagtgaaaaaaggcggttatgccttttttcgatgttacacgagctatcggccgatatgtgatgtgtgtgcagttatagtgttaatttttatttaggaggcactgttatgattaaaggaaacaatggatttctgaaattcatgagactgttctccctcggttacatgggaggaacaatctaccttctgatgtatgtgcgctatgtattctatgcgcaggtaatggatgcgctgcagtgcacgaacgcacagctcggatttttaaatacgatatgttcaatcgtaagtttcccgcttacacttatcggagcttactgggcagataagctcgatgcgaagaacgtaattctcttcacagtaagcgctattaccgtactttcgtttgtatgggcggcattcccgcacagctatactgttgcactgctcatcttcgtaggtcaggcgatagtaatgatggcgtactgggcttgtctcgttaagtacatcaacaacctcggcggtgaggatgaagcaggtaactcgttcggtatgtactacctcatcaacggactttcgggtgcgttcggcaatgcattcccgctctggcttgttacaaagtttgacctcggattacgcggcatacttgtaacttacggagttattacgctcgtagctacaatcctcgtatggctcttcctcgaggacgaaaagcagcttgcagagagaggaattcagctcaagggcgacgagcctatcagagttaagcatatcccgtatgtactcaaatggccggggacatatatcatctttatagcttactttacaacatatacgctctattctaatgtatcgtacttcaatccgttccttatcgatgtaatcggaatcgatccggatgcttcatcggtatactcggtaatcagatcgtacggagcaatggtagttgcaccgctcggcggaataatggcagacaaggtattcaagtcgacatcgacttggtacatcgtagcttttgcaatcgcaggcgtaatgtgggctattccgttcctcttcacaccggagtcgaacgtaacactcgtatgtatctactcgatactgccgtcgctcgtaatcttcgcactctactcagtaacttactcaattctgagagagctgcacattccggcaacggtagcgggtactgcaatcggtatcagttcgacatcaggaacctttgtagacggtgtatggccggtactcttcggcggctggatcgacaagcacggcaacgcaggttatacaatgatctttacaacgctcatcgttatctgcgtagtaggtattctcaacgcattctgggctaagagacttgacaagcagtgccgtgagggaaagaaaacattaaacctctcgggtatagagtaataacgaaaaagtatattgcattaacggagaacgcttcggcagcttgtgccggggcgtttttcctatataacggaaatgcgagaagcaaaaaaataaaatgacaatatgtgaaaagtgtcactaatttagacaaacagacttttttataagttgcggagtaaatatttaatttatagaattaaaatggaagcacgaagggcatggctttaagtgtctcctaaaaaacaaaatgaattatggcgtaaaatgctctcgcagtttaggcgagagcattttacttttcgtatttagtgaaagattcctgatacggcaattgacaatgttctattttttaaaaagccctcaaaccttttaaagcaggaaccgagaaaacctgctttgtacaatgctattgttgagtccatagcgggaggaagcccaaagataaatgaaattgcggctaaaacaggccgctcggcatcgctttgcagtaagtatataaaattgcttacgtaaatgtcgattataaaaaagcaaaaaatttctttttcaggggaaaatatatgctttttcaaaaagcggctttcccctccccgagtgtgaaaacaaatacggaagcagtgagactgtaacgctgattaaatttgacgatatgttgttttaacggcctgactattttaggaggccttcttcttcgagtatttctccaacccactttgcggccaaagcaacaactcgggtgcagccgtcaggaccgtgacctccggcttcaagaaaagcggccttttcctcgggaacatacatcttgtagcttttgccgagaagcttttcctgaatttcggagcatttaaaagagccgaattcgttttcaaagcgttcaagaatttttctcgataccatagtcatttcgtttttaacatcatttccttcagatgttgaaaagttttcccaatcgcggcctttaaaagctccaagagctaaaattgcgcccgtacaggcaccgcaggtgtttcctgatgccgcaacgcctccggccattgcggtagctgcctgaaataaattatcgcttatattgccgaggtttgtttttacggaaccaagaacgcactgacagcagccgccgttattttcttcatatttaaaagctgtgtcatagagtttctgagatatggttgacatttttattccctccaagtaattttacattttatttatgctttgaataaattagattatagcagataaatctgctttatgctacaaatcttacgcaaaagattaaataatatgaatattagatgtttgtccactattcaaacgacaattttctttctgccctgcaaaaaatagcttatttagttaacgctgcactctcgatacgtacatataatattcttttgctcattcttttaagaaatggaaagcaactaatattcttataatttgatctaaaggcaagatagttatatatcatttttgccttggatgacagattcatgttaaatgtattttgcaccgctgttacagtagtcattttttattaggcactgacacaagattagatgtatttgcctaacaataagtgcaataaaaatgtttattaacaaaaaaattatttttcgcagtaagtaaatatagcattatgaatgcgtctccttctttcaactttattttctgtttctgctacaattctgtaaagtttatccacaatttctttatctttttttctctcttctgggtgtaaataatagcgtttttcgttaagcccatgagctattgcaaacggcatactgtcaaggacgcttagttttccgtctctgtatccttttttaataaaaataatgtcgtcatgcgaatcgtatactgcgcactcaccatctggaatgtcattatctattagtatggcgttaggtatagtaactctgattaaagcgcataaagtttttgaaaattgaaatacctctttgggaactgtttcatatattttattctttctcattaaaatttcctttctccaatataaccttttttcttatagattaaactatttcacggagcatttcaatgaaaaatcaactttaagtgtaataaatttcaccatacgagaaagcaaagttgatacactttctgtgaaagcaggtgatactattggtgaatatgggtgaaaagcttaaaacacttagaacggaaatggggttaactcagacacaggtagctaacagagttggcgttgtcgtaagtgcgatatctgcttatgaatctggaatgcgttacccttcatataaggttttgattaggctggcagcattgtatcatgtttcgacagatttccttctgggtgtttcaaacacacgcagcattgatgtttcgggattatccgaggaagatatagctg

SEQ ID NO: 2729 - DNA, 32759 bp, Unknown
  16S sequences of unknown bacteria
cttctcttcgttccagtctattgcctggtgcgctgcatcgtagcatgatacatagtatctgccgcagccaacgcagtagtggttgaagcaggaagctccgacttctataagtcggagtagttcacaagctctttaacaaggtttatcgttctttcaagaattatattgctcataactatttaatctgcgcctttattctttcccttgtcagttcctcgcccataatctgctgaatttcccagatgtcaggggactgcgctctgccggttaaagcaattcgtataactgttgaaacatggcctacgtgacccttgtaatcctcagggtgttttttgaaatccttaggttttacggcatagcctaagtctgcggttatgcctctgattttttcaaaccatccgctctggtcatcgctgtgatcatagctgtcaagatatcttgtcagtatttcgtttgcatctgccgcagcttctgcaggaaattcgtcctgcttagtatattcaaagaaatatttgaaatactcgataatctgtgaagccttgataaggtcttttctaggcttttcgccggttctgtcaagatccagcactttcagccagtaagctctgtcctcaagtacaggcagcatatctgttctgaattcctccgcccattctttaataaaatcatagagagtggctgatggtatttttacaagcacgtcttttgatacgtcctcaagcttgttaaggtcaaacagcgcgccgccgccgttcattttctctactgtgaagtcaaattccgaaacaggcgcgtcagggtttgcaattctccattcttcaaagttggagtttaatatggtcagcagatattctctgactgcgtcaggatgatagccttcatttctgtagtagtcaagtgacagctcagggtcctttctctttgaaagctttctcttattgccctcttcatctattttcataagctgtcctgtatgacagaatatcggcatttcaaagcccagcttagtgaaaagctctacatgtataggaagtgacggtatccactccgcgcctcttactacatgagttgttctcatgaaatggtcgtctataacgtgggcgaagtgataggtaggtataccgttggttttgaggataactgtatcctgagtgttttcaggcattgaaagctcgcctctgatgccatcctcaacagatatatgagcaggctcgtctgtattgccgtctgatttaagtcttactacataaggaattcctgcatctatctttgactgtatttcctctaaggacatatctctgcattttgcaaactgtccgtatattcccgggttcagcttgtttgcctcctgataggctctgatttcgtttatctcatcttctgtcaggaagcaggggtacgcctgtccttttttaaccatttccttggcaaagcactggtaaatctcgcctcgtctgctctggtaatacgggccgtagctgccggtttctccgtcaagcagcgcgccctcgtcaaaattaattccgaagaaatccagcgactttataatcgtttcgactgcgccctcaacatatctcttgtcgtcggtatcttctattcggagataaaaaactccgccgctctggtgcgcaagtctttcatcggcaaatgcgccgtacaggttgcctagatgtatgaagcctgtaggcgaaggtccaagtcttgttaccttggcgccttcggggagaactctctttggaaaatgctcctcgtaatattcgggtgtcttatcaatgtgcggaaacagaagctccgcaagcttgttatagtccatatcttaaacctccagtggtattgtgatttgatttaccataccattatacattgtagaaaccttttaatgcaatggatattttaccattgacgtactttggtgaaacaaggtacaatatatctgtataaacttatttagaatcaggggaatttcagcaatatgactatcaggaactatggaaaaagatttttaagcgcacttctgtgcttgtgtatgttatttactatgtcgggacttgaggcgagagccgcttcatattccattacggtcagcaatctgaccgcgccggagactataacggcaggcgacagctttgacatcaagggtacaatcagaagcacgtatactatcaaaagtgcaaaaatagggatttgcgacagtgacggcaaatggatttcagggcattacactacgaagaagcccgcaaagaaaatctacggtctttcaaaagcaaacgacaaactccatatagatactctgtcaaagggcacctactatctcaaggtatatgtgacggattccaagaaccacaaaaaaaccgcggttaagcaggaattcaaaatcaaagcggcatcagctttttcaataaaggatttaagcgtacccgaaaaactgacagagggcgatactttcagtgtaaaggggacagttaagagtgaatataatataacgagtattaaaatcggtgtatgcgatacagagggcaactggctttcgggacattatacaaccagaaaaccggcaaagaaaacctacagtctggcaaatgcaggcagccgtatgaaattcagcacgctgacaccgggcaaatactgttttacagttcaggctacagacagcaacaagacaacagaaactatacttaagaatgaatttacggttgtcaagaaaccatcaaagattactgtttcaggatatacctaccctgtttccctgaaagaaagcagttcgttcaccctcaaaggtaccgtcaaatccgtttatgatatcaaaagggtgagagtaggtatctggaacaacgataaaggcaaatggtattcaggaatgatggcggagttcaaaccgggctccaggacttttgatatatcacaggcggataaggaaatcagattttctgatcttacagaaggtacctactattacaaggtttatgtgacagatacagaaggctacagcaaatcggtaattaaaaagaaatttaacgtatcaaagattgcatcgaagtttacggtttcgtcaaatgtatcctatccgtcaattatgacaaggggaagctctttttcccttgtgggtactgtaaattccgctgttgagcttgactctgttacaatcggcatatgtgacagtgaaggtaagagaatttcgggtttcaacaaaacagttaaaaatataaaagagaagaagttttacatatataccgtagatgaatatataccttttggaaagctcgaaccggggcagtacatatacagaatttatgccaaggaccttaacggtacaggcaagactgtgctcaataaaaagttcactgtaatgtcaaagttcactatggatacaacgactacgggaagcaccctgtcgcaggaaatgtatgatgcaataaatgcagaagatatattctttgcccaggagtggggaaaaggcggctgtacagtggttgcagcaggaatgatggcaagaagaaaagccgtaatgagcggagtttccaaatccaaatggagcctgcttacagaggatagcctgagagctgacagaagcatctgggtttacggtgcgggccttttcagagatttttcaattcttgatatgaatataacccaggtgaatttcgagaccaaggctacgactgcttcaaagaaaaagaagctcatatcaatgattgagcagcatccggagggcgttgccatatattccaagtacggcggcaaggcgcatgcagtgcttcttacagattatacagacggcgtattctatgtggttgaccctgtatacggcaaaaaggttacaatggcggagagcacgctttacagcaagagcgcaacccagaccagcagactggcggcgctgcactcctactggtatataaaacattagggaagatgataaaatgagtgataattacaaatttgtaaatcacagtaaatgtgagttttttccttgtcataagacagataagcctgaagaatttaattgtttgttctgttattgcccgctttatgctctgggtgatttatgcggcggtaattttaaatataccgaaggcggtatcaaggactgcagtgaatgcatgatccctcacagcaaaggcggatatgaatatataagccgtaactttgacaggataatggaaatggtgaaaaaggaaaatggaaacgaataataagagcagagcccttatgggcacattgtgtatgctggcttctacgatatgctacggatttatatccaccatatcaatcaaggcgcttaatgccggggccgcaaccgagacgatactgtttgacaagtttctgtatgccgcaatacttatatgggcgtacatattcattaagaagataccatttaaaatcgaaaaaaatcagatactgatgcttattgttgtgattgtatcctacaatatgctggcgctgtgtctgtatgaggctttcaattacattccgggaaatctgactattgtacttaactttacctacccggcaatgataattgtttttgaggcgctgaccggcagagcgaggttttcgattatacgggcaggctcaattctgttttcggtaatcggatttgtgctgattgtctgtgaggagtccataactctaagtgtcatagggatagcttttgccataggtgcggcggtttcacaggcctgctacgttatagccctaggctctgacagagtcaagaggcttcaccctattgccgcggcaggatatgttacggcgggggcgactgtttttaatcttgtgagaaccgcattttcgggagagcctgtgtttacttcgggcggagagcagtttgcatggacgctggtgctttcgttcttctgcgcgtttcttgcaattctgctgttttgcataggcgttaatatgataggctcgggaaaagctgcggtaataaatacactggagcctgtggtggcatgtgttgcaggatatgtgttcctgagcgaaaccatgacatttacaatggctttaggctgcgtggcaatagtgatagcagtatttataataaattttgacggaagaaaaccaaagcatgaataaaacaacaaaactgataattaagtatgtctgtcttgcggcaggcatatatataatgacgctcggcggcacgctggcaatgacaggagccataggggtatgtcctcttgatgcagcaatcattacgggcgccaatattacaggcctcagcataggcagctttaacataatagtcaatcttgtgtttttctttgcacagattgcaatactcaaaaaagaatatcagccgctgcagcttttgcagtttcccatatcgtttctgttcggctggtttgttgactttaacctcaaatacatatgggcggcagccggtgcggatatatacatagtcagcatactgtttgtggttttcggtatggcaattgaagccataggaataaatattgtgcttcaggcagatgttgttatgacgcctgttgacggattttactatgtgctttcaaagaagctgggcaaaagcataggaactatgaggctggctcttgacggagcgctgctgattttaaacctggcggcaatacttgcggtaagccatatatggacgatacgtgagggcacggttattgcgtttttcgtgctgggaccatgcatagaccttttcagaaaaccggttgcaaaggttatgagcaggctggactgattagctttggaggcggacaaatgaatgatatacaactgaaactgtgtgatatacagggcaggctgcttgagctgtcgggcagaaacggctttgagagcagcccttgttaaaaacggcaacatctttacagaaaaccagctttactggattgactatctgtacagatactggcactactataccggtgaaagcagcagagaaatatacgggcaagcgcctgtctgtacaatgaaacgcaattatacgatgtttcatacgatggatcctgcgctggcggtagaggagctaaaagagatatacaatcagaagattgcagataaacaggattaaaactttgtaatgaagcagtgtttgtgatataattactgctaatattatttatttttggcgggagaagaagatatgattaaatatgaaagtacaagaggaagcaagaacacattaaacgctgcggcagcagtaattcaggggatagcagaggacaagggtctttacgttcccgatcatattcctgcacttccttttgaaataaaggatatgcagggcaagtcctacaaggagattgcaaaagcggtaataggagcgttctttacagattatacatcagaagaaatgcagtactgcatagacggagcatatacaggtaagtttgaggcagaggaaatagtaccgctggtaaaggcgggagatgcatattttcttgagctttatcacggcagaactgcagcatttaaggatatggcgctgtcaattctgccttatctgcttactacagcgatgaaaaaagaaaacgaggacaaaaaggtctgcatacttacggcaacatcaggagatacaggcaaagcggctcttgaagcctttgcagatgttccgggcacagaaattatagtgttcttccctgacagcggagtaagccaggtgcaggaaagacagatgattacccaggagggagcaaacactcacgtatttgcaatcaagggaaactttgacgatgcgcagacaggagtcaagaagattttcaatgacgatgcctttgccgcaaagctggcgggctacggctgcaagctttcatctgcaaactcaatcaatataggcagacttattcctcaggtggcatactatgtatacgcatacatcaaaatggttgaaacaggagcagtcaaagacggcgagaagattaacatcgtagttcctacaggaaacttcggaaatatacttgcagcttactacgcatcaaagatgggtattcctgttaataaattcatatgcgcttcgaacaagaacaaagtgcttacagacttcataaacacaggcacatacagcactgacagagagttctatctgacaaactcaccgtcaatggatatccttatatcctcaaacctcgaaagacttctttatcacctgtgcggcggcaatggtgaggaagtaaaggcgatgatggaaagtcttgataagaacaagcagtatacagtaagcgatcagataaaagaaggcatgaaagaattctacggcggctcatgcagcgttgagcagaccaatgaagccatcggtaaaatgtatgcggacaacgattacctgatggatacgcatacagcagttgcctacaaggtatacgaggactataaggcggcgacgggagatgatactccggctgtaatagcatcaactgcaagcgcatacaaatttgcagaaagcgttgcaaattcaataggcatagatggtgatatgaacggctttgaatacatagatgccgtaaacgaaaaaacaggtgtgagagtgcctaagggacttaaaaacctggacaaaaaagaaatcagacacaaaggcgtcatagaaacagatgatatgatgaaagtagttgagcaatcagtaaaataggagaatgttattatgactaccacaaccttatttataatacttgcggtatttacagttgtatatcttgtcggaaccgtaaaggtgagaagagcagagaatgcaaaggaatacaagctgtattcaacactcagatggataggtcttgtagccctcgttgccattgcaattctggctatggtgctggattagcaggttcaaaaaaggtgaattatgcttagagagcagattgaaaaatatataccctttaacgagcaggaaatgcgggacaggcagataatgctgcatattatagacagctgtgacgattatctgctgagatcaaatgaaactgcgcattttactgcatctgcgtgggttgtaaatcatgacagaagcaaggttctgcttattcatcacaatatatacaatgcatggacatggacaggcggacatgcagacggagaagacaacctgcttcagacggctttgagagaagtacgggaagaaacgggtttaaacaatataaagcctgtgagcaagggaattttttcaatagagataatacccgtcagcggacatattaaatccggcagttatgtttcatcacatttgcaccttaatgtcacataccttgttcaggctgatgagaatgaaataccaaggataaaggaagacgagaacagtgatataggctggtttgagccccaaaagctggactcgctttcagacgagaagtggatgaaagaggttgtgtacgccaagctgcaaagcaagctaaaaggagaataaaatgcttaaatacatacttacagcagttataataatatgccttgttatatatttctacgctgtatcaagaagcagtacaattaaaaagacaggagatttaagaccgagcgatgccgaaaaaaacagggcaatgctggataagcttaacaaaatcaaactggtagcattaatcgtgctgattctgacagctatagttaccatgattttataaattgtttcaaaaacccaatttgaaaaagaaattttgttaaaaaaacacaaaaatatgttgacaaacgaaaaatgatgatatagaattaagaaaaccgatgaggaagaggagtagtttttattcagctgttacagagagccgcaggcggtgagaggcggtacagatgatagatgcgaatggacttccgagggcaaacccaaagcggcaggcaagtaggggcgacggagaaccctccgttatcaaaggtaaccatatgtcagtatggtaagcgggtgcaacaatgcaccaagccgggtggcaccgcaggagattattatatcctgtcccagcattaaagtatgcagggacaggatttttttatgacctaacccaatttgtgaaacaaattgttggtaggtcaaacgtcagaacttcccaagagtgcgaagcgtgattggcagaagtttacggcgaaagaacctaacccgatttgtgaggttagggcgaaaattaaaacctaaaagggagaaacaggaggaaattaatatgacagacagaacaataccttacaaaatatatttagatgaaaacgagatgcctaagtactggtacaatgttcgcgcagatatggtgaacaaacctgcgccgctgcttaatccgggaacaggcaagccaatgacagcagaggaactgggcggagtattctgcgatgaactcgttaagcaggagcttgacaacgacaccagatactaccctataccgcaggaaatccttgatttctacaagatgtacagaccgtcacctctgacaagagcgtattgcttagagaaaaagcttgatacaccggcaaagatttactataaatttgagggtaacaacacaagcggaagccataagttgaactcagccatagctcaggcatattatgcaaaacagcagggactaaaaggtgttacaacagaaacaggcgcaggacagtggggtactgctctgtcaatggcatgcgcatatcttgaccttgactgtgatgtatatatggttaaggtttcatatgaacagaagccgttcagaagagaggttatgagaacctacggcgcaaaggttacaccgtcaccgtcaatgaataccaatatcggaagaaaaataaacgaggaatttccgggaacaacaggaagccttggctgcgcaatctcagaggcagtagaagcagctacaagcagagagggctacagatatgttctgggcagcgttcttaatcaggtgcttctgcatcagtccgtaataggcgttgaggcaaagctggcaatggacaagttcggtatcaagcctgatgttatcataggctgcgcaggcggcggctccaatctcggcggccttatttcaccgtttatgggcgagaagctcagaggcgaagcagattatcagttcatagctgtagagcctgcatcatgcccaagccttacaagaggaactttcggatatgacttttgcgatacaggtaaggtttgcccactggctaagatgtatacgctgggaagcggatttattccgtcggcaaatcatgcaggcggtcttagataccatggcatgagccctacgctctcacagctttaccatgacggatatatggaagcaagagcagttgaacagacaagcatatttgaagcagcggagctgtttgcaagaaccgaagggacacttcctgcacctgaaagcagccacgcaatcaaggttgcaatagacgaagcaattaaatgcaaggaaacaggcgaagaaaaaacaatactcttcggacttacaggtacaggctacttcgacatgtacgcatacgaaaaattccacaatggcgaaatgtcagactacatacctacagacgaggagcttgaagcaagcttcgcaacaatgccaaaggtagattaatacagaacaagtacaagatagacatataaacataaagccgcttcggaactgctccgaagcggtatttctatgaggttatggcatcgtcaatgtctccgtcgcggccgttttctctgacattgccgtcatctgtaacagtaagatcaaagattacggtatatattacgtcgtcaccgctgcggtatttcatagtaagaagcacatcgcccgcagatatgccctcgacggtataatgctgccatttgacagcatcggggtcaggctctgtcgtgactttaagctttatttttccgccacctttcatatcatactcccatttgtagttttcagacctgtcggcgagtctgaaagaagtgaaatcgtcttctgatatatagttggcaaagctcaggcttttgccgttgtgtgagagttttatgcggcccggtgtgactgcttcaaattccagtgtgtctttttcttcaatatcccagcaggcaggagggtcaaaatcatcgcttccgcagtttatcttaacagttccggtaagtgcatctgccgaccctttcatagtaccggatatgccgggatttcctgcttctgcatcataaagactgaaatgtccgttttcttcaattctgagcgccagatagccgtagcctgcttcacagccgtaggaactgtcctgacattcccattctcctgtaagcgcctttggaacctctgcagcgcaggaacacagcggaaatacaaagaacagagtgactgcaagagtcagtaaaagttttttcatttttatgttactccttttgatacatatgctgttttacaggcatgggctgatcagttgtccagaagagtccattcatcatcaacagcatcatagatatatacaatattgtctgaaacggcaaacagttcttcccgtacaaaatgatcagagtgatctgtccccatagcaaacagcatacagtcaacaccgtttatttcctgtttttcgtcaagatagagcagtttcatgccctgttcaagcccctgctttactttggctctttcgcggagcagttctgaggcaatttcagtatcactttgtccggaggtggcagggagtgtaaaatcataataaccgtcctccatggcaacagtgctgtcatttaaggaaactccgggatggaatgtgtatttgtcagagccgtcggttacatatattacagtatttgaatatatatcactgaaattgcagcgtagaagaactgcttctcccggtctgccttcgaagattacattatcaggttcatctatgtattcacatgtttccgtaagagtagtgccgcatatgagtattgaacaggtatcgtctgccggcacaagagcataaagctcatcgccctcatatgaaacaaagctgcaggcctgcttctgacataaaaacggatatttatctgcataggcgctgctgtctaaaaaggacataacatcttcatctgtttctttgtcggcgatatatccgataaaagctgcgccgagaatgctgccgctgtctctgatttcttcctgaagaatatcaagcgctgattctttttcgggttcagggggcccggccggagcgtcattgcaggctgcggcagggataagacataaaacaaccagtattaccaataaaaaagattttaatttcatttcagagcacctccgtttacgaagtcacagatttatttgttattgtaccactaaacagagaagcttacaataagagggggataaacaataatattaatatcatcattaatgtgctatactatctatgtaaaaaacacaaaggaataatgtatgaaaaatcttattaaatatcttaaaccatatacaaaagaaagcatactggcgccgctgttcaagctgcttgaggtggcctttgaccttatggtgcctgttgttgttgccaaaatgatagatacaggagtggcgcagcaggattacacctttatattcaggtgcgccgcaattctgcttgctatggcgctgctggggcttttgtgcagcgttacggcacagttttttgcagccagagcttctgcaggcttcggagcatctctcagacagacaatgtttgatcatatccagaaattttctttttccatgcttgacagggcaggcagcgacactctgattacaaggataaacgacgacgtaaatcaggtgcagagcggtgtcaatatgtgtctgaggctgattcttcgaagtccgtttattgtgcttggagcaactgctgtggcgtttaccgttaatgttaaatgcgccgttatatttgcagtcacagtaccggtgctgtttgcagtgatttttgccattatgcttgtcagcataccgcttttcaaaaaagtgcaggcggggcttgacaggataacagagcttacaagagaaaaccttacaggagttcgtgtgataagggcattctgccgcgagaaatatgcagcgggagagtttgaggacagcaacagggagcttacaaggctcaatgaatttgtgggaaaaatctccgcagtgcttaatcctcttacttatgccatgataaatatagcggcggtaattctgattgacaaagcagcgatagaggtcaatctggggaatctgcagcagggagagactgtcgcactgtataactatatgatgcagattattgttgagctcatcaagctggcagcgctgattataacgctgaacaaatcggtggcatgcgcagggcgcatatcagaagttcttgatatgaagccggatatggaatatcccgaagcggatactgtttcgtacgaagcaggaaatcctgctgttgagtttgctgatgtgactttcagttatgagaatgccgcagctccgagtcttaaaaacatatcctttgcagttgagaacggtcagaccgcaggaattatagggggtacgggaagcggcaaaaccacactggtaaatctgattgccagattttatgatgccacagagggcaaagtccttatagacggtactgatattaagaattattcaaaggaaacccttgaaaaaaggtgcggaattgtacagcagaaaacagtcctgtttaaaggcagcatcagggataatctcagatggggaaatgaaaaagccgatgatgagaaactatggaaagcacttgaaacagcgcaggcaaaagatgttgcggcaggtaaacccgggcagcttgatttcgagcttgagcgaagcggcggcaacctttcgggaggtcagagacagcgtatttccattgcaagaactctcgtcaaagagccggaaatactgatttttgatgacagcttcagcgcactggattttgctacagaggcggcgctcaggaaggctctgcataatatggagcgtcaggccgctgtgtttattgtttcacagaggatttcggccatcaggaactccgacattataatagtgctggataacggcgttatggcaggcaaaggcagtcatgaggaacttatgaatagctgtgaaacttatcgtgaaatctattactcgcagttcccggaagaaaggtgtgcagaatgagcagtaaggataagaaaaaaggcgaaagccgcaaaaccctgcgcaaactgatgaagtttattgcaggctataaatggctgctggtgctgagcctacttcttgcggcggcttcagttatattgcagctttatgttccggtgcttttcggtaatgccatagatgaaatcatatcggagcacaatgtgttctttgataatatgtgggtgtacctgcggcagataatcatagttgcagcgggagccgctgtgcttctttggattatgaaccttatcaacaaccgcatgacctacagggttgtgcaggatatacggtcaaaggcgataaatcatatacagaagctgccgctgtcgtatcttgacaggcatgcttcgggggatattgtcagccgcattattgcagatgccgatattctttcggacggtctgctgctgggatttacgcagctttttgtcagtgtcgttacagttatagccacgcttgtgtttatgtttatgcagaatgtatggattacgttgctggtaatactgctgacgccgctgagctttctgattgcaaaattcatagcctcccgctcatttaatatgttcagaaaacaaagtgaggcaagaggcgtgcagacggcgctggcggaggaaatgataagcggacagaaaacggtaagggcttttggatatgaaaaaagagcctcgggacagttcaggcaaatcaatgaggagctaaaggagtacagccagaaagctgtattctacagcagccttacaaacccatgtaccagatttgtgaataatataatatacgcgggagttgcgcttgtcggagtgctgattattccaggcggggcgcttaccgtaggcggacttacgattatgctgttttatgcaaatcagtatatgaagccctttaatgatataagctcggttgttaccgaaatgcagaatgcccttgcctgcgcggcgagaatttttgagctgcttgagcagccggaggaggagccgggcagtgagaatgtattgcaggacataaagggcgaggttgatattgacgatgtgaatttcagctatgtcaaggacagtccgctcatagaggatttcagcctcaatgtaactccgggaatgagagttgcaatagtaggacctacgggctgcggcaaaaccacccttataaatctgctcatgagattttatgatgcagacagaggcagtatcagaattgacggaactccgataactgatatttcaagacattcactaagggaaagcttcggaatggtactgcaggatacatggattaaacacgatactgtcagagcaaacatagcctttggaaaacctgaggcttctgaggatgagataataaaggctgcaaaggaggctcacagctgggagttcatagagaaactgcctgacggtcttgacactgttttaaatgaggacagtctgagtcagggacagaaacagctgctgtgcatcacaagagtaatgcttatttcaccgcctatgctgatacttgatgaggcaacctccaatatagatacgaggacagagcttcagatacaggaggcctttgacagacttatggagggcaggaccagcttcattgttgctcacaggctttcgactataagaaatgcttcccttattattgttatgcgtgacggaaaaatcgcagagcagggcagacacgaggaactgcttgaacaaggtgggctttacagcgagatttacaacagtcagtttcaggaaacataaggattaaacctgtgatgtgtgttcatttgctgaggcggatggtattgttttttcagagggaggtagagtatggaccagagagatataggaaaattcattgcttcatgcagaaaaaacaaggaaatgactcagagcgagcttgcagagaagctgggagtaagcatcaacgccgtcagcaagtgggagcgtggcatcaatctgccagactattcaaacctgcaggagctgtgcagtgttttggggatatcgctgaatgaattctttgcaggcaggcaccttgaggacagtgagattgagagacagtcggaggagaatcttcttagtgttgtgaagcagtctgaactggacagacaaaggaaaaaatgggatagagcgttcaagctggtggttcttgctatagtgatttttgcagcaggaagatttgtgcttgcaatgaacggatatgttccggcgctggatcgtatgtatataaaggaatacggaacgggtactgtaggcgatgtggacacagattactttcttgaaaaaagccctgactttgaaatcggagccaatatatacgggtatgctgtatttaagaaacctgcaaaggctatgaagaggctcaaacaggactatgccgaaggcattgcgctgatacagcaggaatttgatttaaggcctctcaactgtcatacatatcacttttacagcaattacggctggcagattacaggcggcagcgaagaagccagaagacaggcagactttgtaaccggctttgttgacatatatgaaaactgctttagataaataatttgtgaaaaaacacaaaaaagtttttaaaaaatagttgacagcacaaaaaatgagtggtaatatatgaccataccaaataaataagaacaaaccgaagacgaggaagtaaaactgaggtacggtttcccagagagtccggggcggtgtgatccggataaatgcagtttcagtaaatgggcctccgagggcgaggtgaacggtatttgccaagtagccaagacgtgatgccggcgtgacgggcagggagtgtgacggcactctgcagagagaacggattttccgttaaacaaggtggtaccgcaggcatacgcttgtccttgagtgaggacaggcgttttttattttacagcctgcgacagtttgcagagactcctgacatcttagacacacaaaaaagaaaggagagttctgtacgaggagatacaggacaacaaaacaaatgaaaaagaaactgatggcaattacccttatagcacttatggtgataacagcgatgtttacaggctgcggacagcagagcagcttatcggacgacggtgaaacattcaaaatcggtcttgtgcagcttatggagcacacatctttagaccagatcagagagtcaatcatagcagagcttgaagcagagggctatgtagacggcgaaaacataacaatagattatcagaatgcacagggcgagcagtcaaaccttaagactatatgccagggctttgttgcggacaaggttgatgtgattgtagcaataacaactcctgctgcacaggttgccatgggcgaaacaaaagatattccaatcatattctcagcagttactgaccctgtagcggcagaggttgtttcagaccttgaaaatccgggaggaaacattacaggaacatcagatgcaattgacgtgggtcagataatagaccttgccaaagagctgacaccgggatttaaaactataggcgcgctttacaactcaagtgaaacaaattcagttgcaacagttgagagccttaaagagtatgcagatgccaacggttttgaagtaatcgaaacagctattacaagcgccaacgaaattcagacagcggcacagagccttgcaaagaaatgcgacatcgtattctcacctacagacaatactgttgcaacatcaatagctactgcaaatgaagtgttcacaaaggcaaaaataccgttttatgtaggcgcggactcaatggtaaaggacggagcatttgcaacatcaggtgttgactatgaatacctaggacagcagacagcaaatatggttgttgaggttcttaacggagctgacacagcaactatgcctgtaagaacaatggacgaaacaggtatctacattaacagcgagacagcggcagctatcggagttgaaattcctgaatcaatattaagtaaagcaacagatcttgcaaaagaggatttataaaggacagtacaaatgctaatcattatcttattggaatcattggaactagggctgatatattcaatattggcccttggagtatttttatcattcagaacacttaatacacctgatcttacggttgacggaagcatagttacgggcgctgcaatatcggcggtaatatgcactgccgcggcagatatgagcccgcatatgcaggcgcttatgtgcatactggcgctggcggcttcatttgtgctgggtatgggagcgggagctattacagcgctgcttaataccaagctcaagatacagcctttgcttgcgggtatacttgtaatgctgggaatttactcaattaatttaagaatacagggcaaggccaacgttaatctcaacaacgtacctaccatatacagaaaagcgggagatttattcggcggctttgaatacagctcgataattataggggcgattattgcagccgttataattgctctcatgtacggatttttaaatacgcgcaagggctttgcactccgcgctacaggcgacaacgaggaaatggtcagagcctacggtatcagcagtgataatatgaagcttctgggacttgccgtatcaaacggccttgtaggtcttgcaggcggcatgctggcgcagtatcagggatattcagatgtcggtatgggcgtcggaatggttgttatagggctggcgtcggtaatcatcggcgaggttatattcggaacacgcagccttatcaggaggctcattgcggtggctctgggagcagtgctttacagaatggtaatagcgattgcgctttacataggtatgccaccgacagatctgaagctggtatcggcgataatcgttacaatcgctctttctatgggacttctgggtgagaacttctccctgtttagaaaaaaggataaagggggcagaaaaaatgcttaaaatagaaaaccttgtgaaaactttcggaaaaggtacaataaatgagcttagggcccttgacggtatcgactttcacggcagagagggggatttcattacaataataggcagtaacggcgcaggcaaatccacgcttatgaactctattgcgggagtatttccgtcagacagcggaagcattatgcttgacggtatagagctttcaaagctccctgaacacaaaagagcaagatatatagggcgtgtttttcaggaccctctaaagggtactgcctttgatatgactatcgaggaaaacctgtctattgcatataacaagacaagaagcagaggcctgcaggcaggcataaacaaagcggacagagagcttttcagagagaagctttctatgctgggaatgggtcttgaagacagaatgaaagaaaaggcaagacttctttccggcggacagagacaggcgcttacactgtttatggcagtgatttcaaagcctaagctgctgcttttagatgagcatactgcggctcttgacccgtctgctgcaaagaaagtccttgagcttacggataagtttgcaggcgagggcggaatgtgtacaatgatgataactcacaatatgaaagctgcccttgaacacggcaacagaacaattctgatgcaggcgggcaggatagttatggatatctcagggcaggaccgtgatgaaatgactgtcgaaaagcttgtggaaaaattcgaaatagataatgacagaatgctgctttaactgaaaaacagagccttgcaactgatgcagggctctattcttcgtatgatataattcacgaaatgttaagggaggatgttgacagctcccgcattgcagtatatcaggcggaagccatcatatctatatatatattaggaaacggcggtagatatccgcttcctaagtattaaagctgtatttttcgtacctttgtaacagatacataggattctttaacaggcataaactccttcatatgaagtgtctgcatatgtgctttctggcaggcttcagactcccattcctcaagtagcagtattgtgtcggaatcgtctgcatcaaggtaatagctgtaggaaatacagccgtcctcctgatggatttttttaagaatatctgaagcatatattttatttaaaaattcttctctgactcccggtctggttttgtatgtcaccagtattaaaaaagtgttcatatgataacctccttgaaaacaagtctctatttagctgctgctctcagcagccgttctgcctgctccggcagatatgctctgaatgtaaatcttttgtccatctgagtaccgaatatgtcgataatctttcccatattaagagccgcaagtacagtgcctatgccaagtcccgatatatggcccggggcaaagtaggtcattgcggcggttgccgtaatgcagagcgcatcaaagcctatctttatttttgaatagccaagtgatgtaatgactgtaagctccctcggaaacagatcggtaggagtgatgggaagcccgcagcggttgcacagcgcaattcctatgcatatcattacataacttattacaaaatatgctatgcgccatggaagcgaatcgggaagtgcgtcaacccacagtgaatgtaaatccagcagcttgccgaagataaagcctatgacgaagttgaacatatatgagggaatgaattttcgcctcataatcataaggcttaatacaagtactccctgaaacagatatgtccatgtgccaagcgtgaatacaggaaaaactctggaaaaagcgtagggaacactggaaatggcggatatccccgagccggagtaaagcatcagtatcacgcccaatgtgtttataacgagggcaataccgagagccgcctctccgggaattacaggccggtcgtccaatgtttctttgcgtttcataaataaagtcctttcccgctgcttattgcaactgatttaactgtatcacaaaaaacacattaaaacaaattgatagttttgattaaactatagtttgtatctatggattatagtataatgaaaaaaggagggagacctatatgaatttagactatatcagatattttgttaagcttgcggaggtgcagcattatacaaaggcggcggaaattctgtgtatttcacagcccagcttaagccacgccatgcgtcagatggaaaaagaactgggcgtacagctctttgagaagaaaggcaggaatacagttctgacgagatttggcgaggaatttctcgatacggctaaaagaactcttgctacacttgatgagggagttgcttccatgaagaaaagcgccagaggagagggactcataagacttggatttctgcgggttctcggaattgattttataccgcagcttgcggcggaatttatcagagaaaaccccggaaaaaacattcagtttactttccatacagagaggacggagcctctgattaagggactttcggacagagcttttgaccttgtgttcagctctgcgccaaagccggagctgaatatgacagcaatccctgtacacgaacagaagcttgttgttatagtgccaaaaggacaccctcttgcagagcgcaaggctgtgagccttgaggaaaccctgccttatcctcagatatattttgcaaaaggctcaggaatacgaaacgtggtagacagactgtttgaagatatagaggcaaagccgcagatttcgtgcgaaaacgaggaggatcaggttattgcgggtctggtggcaggaggatttggaattgccgtggttccttacatggatatgcttatgaagcttgatatatcaattctagagattgaatatccgccgtacaggcgggaattttttatggtacagaacaacgatgcctatttatctcccgcagcggcagcctttagagatttcgtggcagacagaaaataggagacgcagcttgcatttgcagactgcgcctttattatttctattttaaaattagatctctgaaatcttccggaagtgtttcctttgaataggacatagaataatagtatgtcgttgaagatccctttcgcttcagatcgagggacagttcatagtatgcgcctgcctcctcggctacgcaggggtaaagcttccgaatttctttaagcgtttttccttttaacctctttgaaatatcaagggtactgtcattggaattattaaacagcgatgcgctttttacaatatattctgaggggtcaatctctgaataatagctgtgctttttaagccagcgtattgtgtttgtatcactgtcaagcacaggaattctgttacagctgccataatctccgtctttgtcaggaccggacagagaaatctctatagctccgagagctttgtttgcatcaagttcctcttcaaaggttctgcccttaaaatctttttcaatagcggcaatcagtccgtcaatttctgcagtttttatctctgctgagtaatattcatcggatgtatatgacaccagcgatactgaaacattgctcaaatcattgaggaaatcattgttatacagcgagtatatatccttgtattcgtcagactcgtagattgctttgattgccctgctgttttttatgaagtcaaaagatgcatcatagcttctctttaaagtatggctgtttttgagcgtgtagctgcagcttctctccgaatccccaaggaaagaatccagacttccggagattactgcgccggatttccgcaggagaaactccctgtggagatttctgatattctctatgttctcctttgaagtgaattcagcacggtttgctttccggtcagtctgtatataccgggaaagtatatcggttgatactgatttgatgtccgcttgttttggtattctgttctcataacctgtgacatcaaaggcaaatatacttatgaataacgctattattaccgcatatacaccaaaggctttgaacgtgtttctgttaaaaactcttgttgtcttgagcgccagcatacggctcagtatataaaacacagcggtgcctgcgataaaccatatgaaaaatctgctttcttcgcctgcgaacagaccgataagcgttgccgcaaagaaagttatgagaccgcatactacaggtaccatgattttgaaagcaagcggttctgccgcattttcaagctttctctgtctgtagaggaagtatcctgcagcgacaatcacagccgctatgagaatatatacaattacaggcagaatatttatgctgtccgaattcggaaaggctctggctctcatagacgatatgctaagtacaggcgtggacagtttgattgtgtggcgcattgccgatgatgtcgaaaacccgtaaaggaaaagctgcgcatattcacagacaaaggcaagcagtgcgggcgccagaacattaagaccgacagcaccgatgatgtgcattacggaggtgccgcagagcatacccgcaaataccgatatcacatatacaaacagcataatcaggagcagaagaagcattgtgacaagaacggcctttaccgtaaacatatctctgcctcttatagcttctgtggcggaactgtagtacatattctcgtcataatatacaggttttgacagtatcataagtattgcactgtttactataacaggtgcagctgcaagaacatatccggaaatcagatgccctatgtacagctgacctctggttacaggcaggctgtgacatacggcggcagcatttacaaggtgcatatatctgaaaaccacaatcgctgcaatcattgtaaatatgtagaccgagcctgtcataaacacgttggacatatccatagttgactgtatgtacattgctatggactgaagattcgagtaatttataattactgctgcggtggtggcaagaaaaagcaccagaaattcagccagtgataaaacccagaatctcctgaaatcattcagtattattgttctgattggcttagagcaggatgctgctgtattcattcttttcacctcccagttcataaatgaaaatctcttcaagtgtaagcggaagcatatccaggatcagcggactgtatgggttgagcgcgtcttctatttcctctgcgctgtttctgacaatcagcatatctacgctgccgctggtgtttcggctgagaatgttaagtgcgctgtaaacgtctggctgcggctttgcaaaggcaacctgtactttgtgtatattcgatttgagatcgtcaagctctctttcaagcaccagttctcctgccgagagtattcccaccgtatcgcagatgccctctatctccttgagattgtgtgatgatatcaggactgtcatttctctttcagcaacatcatttactatgatatcccatactgttcttcttactataggatcaagtccgtcaacaggctcgtcgagaataagggcatcgggcattgccgatatggcaagtgtgaaagccgcctgtttctgcataccctttgaaaaccttattatctttttgctgcggtcaaggccgaaagcgtttacaagagcatcaaacctctgaccgttccacttctgatacatgccggcatagagcctgcgcatatcgttaagattgtagtttccgaagaagaataaatcatctggtacaaagcatatgcgctgctttgcggaagtgttctcgtagatagctcttccgtctaaagtgatgctgcccgaatcaggccttataattcctgtaatgtgctttaaaattgtggttttgccgctgccgttggtgccgacaagaccatatatagaaccccttctgatgcacattgaaacacttttgagcgcgtgaacattttcaaaatgcttatcgacctttgaaactttaatcaagatgctcacccctttcctttataatttcgcctacagctctgagtatatcctcatctgtaagcccgatatagtaaagctcctctatatagaatctgatatgctctataatgtccttgtatttctgcatatccagtacatttgtgtcgatttcggatacaaatgtgccaagtcctgcagacgtatagatatacccctgccgttcaagctctttgtatgccttctgcacagtgttcgggtttatcagaagctgctttgaaagctcgcgcacagagggaagcttgctctgaggcggcagtacatttcgcataataagctctttgatattgtctatcacctgttcgtaaatggatttacgactctttgaatctatctgaaacatttcagcctcctttcttttgtgtcttgagtgtactataacagacagtacactgtcaaggcaaaataaaatttttttgaataaattttaaaaactgtcctttttcgtgcaacatttttgccgttttttgcactatatatatagaacttctcaggaaaggaacgaagaacaatgaaaaaaagagaaatgcctttaattctgccgtttgtaatcgcgctggctgcggcagcagcagtatatgagcttcagaagataataggaacggcgctgtttcctgtgtttgacggaggaaaaacaagcgattggagcaatactacatatatactgatggatattgcaatgattattctgtttatcccctcctacatactcctgttcagacccgaaagaggcagcgagagaataaggctcagggataccggcggcatggggcttttgtgcacggcggcgggagctgttattacctctgttgcaataggacttgccataaagcttgcggctatatggggagcattccctgtctttgacaatgtggaaataatattaaaagacggaaacctgctgctgtcggtgctttcgatagtaatatgcgcgcctcttatggaggagcttgtattcagaggacttgtatttaaaagcttcaggagcataagcggcttctggttttcggcaatcttgtcctctgcggtatgggccgtgatacatcttaatcttgtgcagggcatacgcgctgtgggagtggggctgtttctggcctttgtgtacgaaacctatcagaaactgtgggtgccggtatttgcccacatgagtataaatgcgattgcaacggcttctgattacagcggagtgctgagagggcttcaccttgaaagctgctggtatttaattatggccgctctgctgtttgcagcgctttatccgatatgcaggattatagctaaaagcgggaagcgcctgtaaaaaaataggccgtgcggggaattttaagtgtctatggaattgccatagacactgttttgtagtataatctaaagtaatattcagaattttagacagaccttagagttacgatatagacagcaagacggagggaaataatgtattgtagaaattgcggcaaagagcttcttgataatgataatttctgccctgtatgcgggacaaaagttgaaaaaaagacacaggaaccggagaacagagaaatagtctttgacccgaatactgtacctgagactaaagagaactttgactttaaatgggatctgggtgatttcaacaggcagcagagaaaaacagaagacgctgcaagctttgactggggagatcttctcggagtcaaaaaagaaagaacagtaaacgacagaatttcagaggcttcacgtctgccgggcagaaactatgagcctgtaagcgattttgtatttgacccgtcaggcgctgtacagcctgcggagcgcaagtccgcagataaattcggcagcagagaggacgacttctatactttcagcaaaaagaacgctgagttccaggagcttttgaacaaggagcacgaaagagtcagaaaagccaaggaagaaagagagcttcgtcttgaggcgtataaccttgacaacgtaaataaagaaatcgtacttgacgaggaccctgaggagcaggagcagcctcaggcagaggaaacaggacttgcgagaagacgcaggaagcgcaaagaggccgaaaagacagagtacataccggtagctccgaaaacagaaatccctctcaaagtagacgaagatgatatttcgggtcagtggcctcctgaacctgcacaggaagcagaggcggagaagcagcctgaggagcaggcgcccgaaaataagcaggagcagacaatggaatctgcacctgagacagagcagcctgtaaatcagatagaggaaatggcaagagcaagagagcttctgtttaacagtgacaatctggagcagcagcttgaagaggatgcggcacagtcgcagtcacccgaaaaggtaagagttgccacacagcagataagcagagatcagtttgccgagttcctcaaaaaagcagaggagcagtttggaatagatgctctcgacaaaaaaatagaagaagactacaaaaacgtagaggaaatagtggaagagcttcctgatacagaagatgtttcagaggagtctgcagaggtacaggctgccaaaacaaacgagccggagtctgcaccggaggaagtaaaagaaacagcagagcaggagctgccaaaggtgcaggatatttccgaagaggagcagccggaggaaccgcaggagcagcaggaaactgcggcagccgaagatgcaccaaagaaaaaacgcggccgcagagtcaaagagcagacaggggagtttcatctgggagatttcaaggacgacaacttctggagcagcgagcctgaggaaaccgatgaatacgaagaagatgagccggtttctgcaggaggcagagcggcaaccgttgtaatagttatactggctgtaatacttgcatttatgattgcgatgatgattataaggttccagttccctgagtccgcagcggcgcagttcatagaaccgaaacttacagttatagaaaactggattagaggtatcttttcctgagttttaatcaataatattttttaggaggaaagattttggaaaaaaagaaaagaggatcaaaagccagatggatagttttggcggtaattgcatttctgcttctggtatttgccttagtgggatttatcacagactttctctggttcaaagaactgggatatgtgagcgtattctttactaagcttttaactcagataaaaatcggagttccggtctttatcgtagtgggatttctggtatatatttacctgaagctgctcaaaaagggatattacaaaaaagttgaatccttagatgcgcctaatgagaaagctatgaacataataagctgggtgctggcaggaattttctcctgtgttgcaacctacttctgcgtgtcaaacctgtggtacaaatggctgaactttgcaaagagcactgatttcgatatttcagacccgttgtataataacgatatttcgctttatgtatttaaactgccgtttatcaaagaggtcaacggcataatcatagctctgtcagtagcatttataataatcacccttatttattatgcgatgctgctgtcaatgagaaaaccaaccgtatttgaagatgcaggagaagacagttttgatgatgaatcgtcgcagcagggttcaggttttgcaggctttgacaatgctggcggtcttggcgatatgtttggcaagtttgcagagtcgtttggcggcagaggtcctgtgcacagacctgcaagaaagaaaaaacagtttgacagcgacaacttcaaccagcttctgcacatcgcatcgaagcagcttatagttgtaggcgttatattcttcgtaatgctggcagtggactttttcctcaagcagtacgacctgctttacaaccatacgggtgcggtatacggagcaggctatacagacgtgacggttactctgtggatgtacagagtccttgcaggcctttcgcttttgggagcggcaggcttcataatcggaataagcaaaaagaaggtcaagacaatagcaatcgtccctataattatgatacttgtgggacttgtgggagcaggcggagcggtactggttcagaactatgttgtatcacctgacgaattaaacaaggaaagcaaataccttgagagaaatatagagtatacacagtacgcatacggtgttgacaatgttacaaccaaatcatttgctgcaagcaagaaccttgacagcactgatatcaacaacaaccctgaaaccataacaaacatcagaataaatgactattcacctgcaaacaaattctacaatcagacgcaggctatcagaacatactataacttcaatgacgtatttgtagacagatactatgtgaacggtgaatatacacagacattccttgcggcaagagaggttgacatcgacggaagcaagataagcgatacgtggcttaacagacacatcaaatatactcacggctacggcgtgacattatcaagagttgacaaggttacatcgagcggacagccggatgtgcttgtcggagatattccgcctcagtcatcggttgatgaaatccagattgacaaccctgcaatatacttcggtcagcttacaaacgactatatccttgtaggcaccgatgaagaagagtttgactatccgggagatgaggcaaaccagtacaccaagtactcaggtacagcgggtatcaggatgaactttgcaaacagatgtctgttctcaatcagagaaagatcactcaagctgctggtttcatcaaatataaccagcgactcaaagattgttatcaacagaaacatcacatcaagagtcaagaagataatgccttatctgacatatgacaaaaatccgtatatggttactgcaaacggcggactgtactggatatatgacgcatatacaacaacatcaagctatccgtactcggagccgtacagccagcagagcagcacaaactatatcagaaactctgtaaaggtagttatagacgcatataacggcgacaccagctactatgtggttgatgacagcgaccctatagcaaagacactgcagaagatatatcctaagctgttcaagaactttgatgaaatggacgaagcggttaaggctcatgtcagatatccgaacacaatgtttgatatacaggctacaatctacgaaagatatcatatgaatgatgtcaatgctttctatcagaacgaggatatatggtcaatagcaaatgagatatacggcaaggacgaaaaagaaatgactcctaactactatatactcaagcttccgggcgaaaaagacgctgagtttgtaaactctataccatatactcctaagggcaagagaaatatgacctcgcttctcattgcaagaaacgacggcgacaactacggtcagatagttctctacacattccctaagagcaaggctgtttacggccctatgcagatagaggctctgatagaccagaaccctgagatttccaaggaatttgcactgtggagctcggcgggaacatcatacagcagaggcaacctgtttgtaatccctatagaggactcgctactgtatgttgaaccggtttatcttgaagcaaacaaagaaagtataccggaggtcaagagagtaatcgttgctttcaatgaccagattgcatacaagccgacacttgccgaggcgttggaatctctgtttggagaaaccgacataagcagcggcagtgacaattcttcatcacagaccgccgatgacggtcagatgtcacaggcagagcttatcaaggctgcagcagaggcgtatgacagcgcgcagtcagctttgaaaaacggcgactgggagggctacggcaaatatcttgatcagctggaaaaatacttgaatgaattacagaaataataaagcgggacattccggaaaacaccggaatgtccattgcaatttaatttgattggaggaatacatgctggattttgattttgacaaaatgctttttactatcgggccggaagaccattcggcagatagaattaaaacaatattaaacgaacatccggaagttcagtttgtatctttagtgggtattgatataggcggacacggaacagacgaaaagatacctgtcagagcctttataaaagacattgacaagtttcttacagagggcgtgcagactgacggctcatcagtagtgcttcctaaaattgcagaccttaacaacgctaaggttgatataataccggatcttgatgtgaactggtatgttgactataattttgaccatgtgccgcagagcatcggacttcctgtgggaagcctcagaataccgtcatatctgcgccacaacgatacatttgaagtaggctcaagagtagtgcttcgcgatgctgtggcagacttcaaaaaagaactgatggagcttcttaaggctaatccgtatgtttttgaatatatggatttagacagcgccgatgagattgaggagctaatagtaacctctgcgacagagctggaattctgggttaaaacaccggatgagcagtctgacagagagcagcttaccacagcgcaggagctcaaggagcagtactggaagaggacagtggggccggttcgtacagctctcgaaagaacacttaacattcttgaccgctacggtcttgaaatggaaatgggtcacaaggaggtcggcggcgtcaaggccaagatgggacactccggacattacgatcacataatggagcagcttgaagtcgactggaaatattcagatgccctgcaggctgcggacaacgaaaaacaggtaaaatatatagtaagagatatattcagactgcacggtcttgacgttacatttatggcaaagcctatggagggcgttgcaggaagcggtgagcatacccaccttggtcttgcggcaaagcttaaggacggcagagtcgtaagcatgttctcatcaaaggacggcaaggacttcctcaatgtaatcggctatggcgcgcttatgggtattctcaacaactatgaggttataaatccgtttataagtgcaaccaacgatgcttttaacagacttaaaccgggatttgaggctcctgtatgcacagtaacttctatgggacacagcgttgaggcaccgtcaagaaacagaacggtacttgcgggacttatcagagaagcaggcaatccgcttgccacaagatttgagcttcgttccccgaaccctaacagcaatacataccttgtaattgcggcttcatatatggcaatgcttgacggtatcagagctgcggtaactgcgggcaagacacctgctgagcttgagaagtcaatttccaagaagaaaggtgaagaggatttctatcttgaaaccggcagagagtacagaagtgaaaaagacgtatttgcacactatactccggaggaaagagatgatatattcggcagaccgcctgaaacagtatgggagaatataagtgcgtttgataaataccccgacaagctcgaaatattcaagagcggcggcgtaatgaccgacatagttcttgagtcctacagggaagccatagtaaaccagtgggctacagagctttacaacagaataattcctaatgcaatggatacggtcagaagctgcagaaagcttcacaacgaaagcgctacagactatgatataggtatgtgggcaaagatttccgcacagagagataagattgccaagaataccatgaataaattctgcatactcaagaagataagcgatgcgctggataaggcagattacaatctggcatcacggctgcagcttgaagcacagcgggagattcgtaaactgattgatatgtatagttcatataaaagaaatctattat

SEQ ID NO: 2730 - DNA, 3183 bp, Unknown
  16S sequences of unknown bacteria
ggcgctgtccagctggcgcacgctgcctgccgccgcattgcgcggattggcaaacagctcttcattggccgcctcccgctcgctgttgagccgtaaaaagctcgccttgggcatgaacacctcgccgcggatctccacctcgccggacagatcgatatgcatcgggatgctggggatggtgcggatgttggcgctgacatcctcgccgacattgccgtcccctctggtcaccgcctgcacgaagcggccgtcgcggtaaatgagcgacatcgccagcccgtcgatcttcagctcgaccacatagcgcacattcggctcgctggcgcgcacccgctcatcgaacgcacgcagctcctccaggttgaacacattgcccagcgagagcatcatgcgccggtgctcgaccttttcgaatccctcaagcacgccgcccccgactcgctggctcggcgaattgggatcggccatttccggatgcttctcttccagagcgatgagctcctgcatgagccggtcatattcctgatcgctgcggctgggcttatcctgcacgtaatactcatacgacagcttttccagctccgcgcgtagcgcgtttatcctgttgatctcatccatcgcgcgtcctcctgtcatttgcgggaaagcgaagggtgatccgccatgatcttacggacaccgtaacgctgttcaaaggcaatggtcgccagattgtctttcacgctgatgacgatgccttccccaaaggatgtatgctgcaccagatcgcccttctgcagctttcctcttcgcttcttgcgcacaggcgcagacgatgcggaagacacaggggcagggcgggatatggaagaagacccgccttccgaaaagacatccacatcatctccaaagcggctgcgcggctttgcccccacatcctccatcaatgtccgcgggatctccttgacgaagcgtgaaggcatcttgatgcggtccagcacatagctgtatcccatggaatccgaaaggaacagctgcttgcgggcacgggtcatggcgacataagccagacggcgctcctcttccagcgctgcgcccccgccctcgctgatgctgcgctcgctggggaagatcccctcgcacaggctgtagatgaacacacagtcgaactccaggcccttggaggcgtgcacgctcatcagctgcaccacttctccgccggcatcattctcattatccgtatataacgcgatctcctgcagataatcatccaaggtcgcttccgggtcattctcgacatattcctccatgtcgttgagcagttccttgatgttctccaggcgttcgttttcattgtcgtcctgcagcatctgcagatagccgctgcgctcaagcaccttcttcatgagcatgtcgatgctcagcgaagcggcggcctcacggcattcctcgatgacacggacgaattcctcgatcccgcggcaggcctttgctcccttgatgcagggatgcttcagcacctcatataaattggtgtcttcgctgcgcgcctgctcctcgagctgttccaggctcctggcgcctatgccgcgcttaggcgcattgatcaccctgcgcaccgccagatccttccacagctcgcgatcatccgtttcgtgcttcggcgcaagcaggcgcagatagctcagcgcgtccttgatctcggcgcgctcataaaagcggatgccgccgtagatgcggtaagggacatgcgcttccagcagcgctttttccagaccgcgggagagatagttggagcggtagagcaccgcgatctcccggtagggcacgccgctatgatgcagcgaagcgatgcgcgctgccacccagaccggctcattgcgatcatccgccgctgaaaaatgcacgatcttctcatcgctgtgctgtctggtgaacagatccttcttgatgcggttgcggttgttgcggatcaaggcgttcgccccctcgaggatatgcgccttgctgcggtaattctcatcgaggatgaccgtcttacagccttcgaaatcgcgctcaaagttcatgatgatatccacatcggcgccccgccatgtatagatggtctggtcaggatcgcccaccacgcacaacttcgtctgcggcgcgcagagcagcttgacgatgtcatactgcagctcgtcgacatcctggaactcatccacatggatgtaatcaaagcggcgctgccacttctcgcggacatcctctcttcccttcaggatctcatgcgccttgatgagcagatcgtcaaagtcaagcgcgaacatgtcgcgcagacgctgttcataagacgcgtagacattggccttcacgcgctggctctcgctctgcgccagctgcagcgcgcgctggggatcgacgaacgccgtcttgcacgaagagatatacgccagcacggctccataggcataagacttggcgtcgatctccttttctttatatatttctttcaggatgctcttttgatcctcgctgtccaggatggtgaagctgcgcggatagccgatctcctggatatcctcacgcagcagccgcacacaaaaagagtggatcgtggagatccgcacgcttgcggccagcggccccagcatcgattccacccgctctttcatctcccgcgcggccttattggtaaacgtgatggccaggatccggttggggtagacatgacactcatcgatcagatacgcgatccgcaccgtgaccacgcgtgtcttgccgctgcccgcaccggcgatgatgcgcacatggctgtccgtgcatgacgcggcttcccgctgtctgttgttcagctgttccagaatcgacacgttatcacctctggactattatacacttatcccgtctgtcaaatcaacgacgttttattgaggttgatgtggcggcgatgaatgccccgcaccctggcgtataacgatgcgcaatgcgggaaacatcatgatgtcccgcatgaccgcagaacggctcagatgaaaattatcatggtttttccgtatctcctatattataatggtaaacgaggtgagcaaatgaaaaagaaaaaacgcaattacacccgaacgatcgatctgctgtttctgctggtcctgctcatcgccatcctctatgcgttcaacaatatcatctcatcgcagcttctgccccagcgctggctcctgc

SEQ ID NO: 2731 - DNA, 25241 bp, Unknown
  16S sequences of unknown bacteria
cacatgggcgaagcctccggggattgcgtggactggatggtggactacatctgccagcaccgcgagccggtcaagctgctgctctgccgggcggaggggacttcctacgagcattttgcccacaatatggtggagatcgaagtggagtataccctcaaatacatggaggtgcttcgccgcttggggaaggacatccccgacttgagcccctcgctctgccatatcatcgccagcgggatgttcaacggactgtttgaaatcgtggcgcatgacatgccccgcgaacaggcgcgcctgtatgtcacgcagttccgcgcgttctatacggccggttggctgaaattgatgggacagtagtcctgtcttttttgcacataagttagttttatctaactatcaaggagggaacgtttgaatgaaacaacggaaaaaaagcgacgtagcggttttgctggattacgcggggagccgaaagcgcctgacctttctgggacttggcctgtcggcggtgtccatgctgatgagcctcgcgccgtacatctgtatctggctggcggcgcgcgaccttatcgccgtggcgccggactggatggcggcgcaaagcgtcggccgctatggctggctggcctttgcctttgcggtgggcggcatcgccgtctattttgcggggctgatgtgtacgcatctggcggcgttccgtacggcggccaacatccgcaagcggggcgtggcgcacatgatgaaagcgccgctggggtatttcgactcgaacgcctccggcctcatccgcgggcggctggacgcggcggcggccgataccgaaacgctgctggcgcacaacctggccgacatcgtgggcaccattgtgctcttcatcgccatgctggtgctgatgtttgtgtttgactggcggatgggcgcggcctgcgtgctggcggcggtgatctcggtgatcgccatgttctccatgatgggcggcaagaacgcgaagatcatggccgagtatcaggcggcgctggaccgcatcagcaaggcgggcacggagtacgtgcgcggcattcccgtggtgaagatcttccagcagacagtgtattccttcaaggccttcaaggaagccatcgaggagtacagcgccaaggcggaatactggcagtcggacgtctgccgcgtgccgcagtccgtcaacctgacgtttaccgagggcgcgttcatctttctggttcctgcggcgctgttcctcgcgcccggggcgctggcgggtgggagctttgccggtttcgtgaccaacttcgccttttacgcggtgttctccgccatcatctccacggcattggcacgcatcatgttcgccacctccggcatgatgctggcgcacacggcgctggggcgcatcggccaggtgatgaacgccccgacgctgcaagcgcccgcccgtccgcagacgccgcgcggcaacaaagtggcgttcaaggacgtgagctttgcctacgacggcgcggacgttcccgccctctcgcacgtctccttcaccgtcgaaccggggcagacggtggcgctggtcggcccctcaggcggcggcaagaccacggccgccagcctcatcccccgcttctgggacgccacttccggcacggtggaggtcggcggtgtggacgtaaagcagatcgacccccatgtgctgatggaacaggtggccttcgtgttccagaacagccgcctgttcaaggcctccatactggaaaacgtccgcgccgcgcgcccggaggccacgcgcgagcaggtgctggcggcgctgaaggccgcccagtgtcaggacatcctggacaagctgccgcagggcgtcgatacgcggctcggcgcggagggaacgtacctctccggcggcgaacagcagcgcgtggcgctggcgcgggccatcctcaaggacgcgcccatcgtggtgctggacgaggctactgcgttcgccgacccggaaaacgaggcgctcatccagaaagccttcgccgcgctgacgaagggccgcacggtcgtcatgatcgcccaccggctctcgaccgtggtgggcgcggacaaaatcgtcgtgctgcaggagggacacgccgtggagcagggcacgcacgaacagctcgtggcggcaaacggcctctacgcccgcatgtgggccgactacaaccgggcggtacagtggaagatcagcagcgagaaggaggcggagtaaatgttcggcaagaagtttcagcgcaagtatgccctgaccgatcagggcgtgcaaaataccaaaaaaggcgctttctggacggtgatcgtcaacctggtggtcatgggcggcgtcagcgtgctgtacctgatgatgtccggctttatggatacgctgacagacggcagccccctgcccggcgcgtggctgcccatcgcccttacggtgctgttcgccgttttatcctttgtcacgcatttgcagcagtaccgggcgacctatggccttgtgtacggggaagtcaaggttacgcgcctgcggctggcggagcggctgcgcaaactgccgctgggctacttcggcaagcgcgacctcgccgacctcaccgagacgctcatgggcgatgtcaaccgcatggagcacgtctggagccacgtgctgggctacctctacggcgcgtatatctctacggccatcatcgccgtctgcctgcttctctacgactggcggctggccatcgcctgcctgtggggcgtgccggtggccttcggcctgctctttggcagccgcaggttcgccagccgcgccgccgagcgcaccaaggcggccggcatccgcgtctccgacggcatccaggaggcgctggaaaacgtgcgcgagatccgcgccaccaatcaggaggagcggtacctcgccgggttgaaccagaagatcgacgagcacgagaagatcatgatccgcggtgagctgggcacgggcgtgttcgtcaacgccgccagcgtcatcatgcggctgggcgtggcgactaccatcctcgtgggcgcgcagtccatcctcgccgggcgcatcgacttcatgctgctgttcctcttcctgctggtcatcacccgcgtctacgcgccctttgaccagagccttgccctcatcgccgagatgtttgtctcgcaggtctccgccgaccgcatgaacgaaatctacgaaacgcccatcgcggagggatcggagacctttgcgcccaaggggcacgacatcgtcttcgaccatgtgagctttgcctacgaccaaaaggacgtgctgcgcgacgtgagcttcaccgccaaagagggcgaggtgacggcgctggtcggcccttctggctcaggcaagagcacctgcgcgcggctggccgcccggctgtgggacgtgaccaagggttcgatcagggtcggcggcgtggatatcgccaccgtcgacccggaggtgttgctgcgcgactattcgatggtctttcaggacgtggtgctctttgacgacacggtgatggagaacatccgcctcggcaagcgcggggcgagcgacgaggaagtgcgcgccgccgcccaggccgccaactgcgaggaattcgtgcgcaggctgcccaagggctacgacacgcccatcggcgaaaacggcgcgcgcctttccggcggcgagcgccagcgcatctccatcgcccgcgcgctacttaaggacgcgcccatcgtgctgctggacgaggccaccgcttccctggatgtggaaaacgaaaccaaggtgcaggaagcgctctcgcgcctgctcgcgggcaagacggtgctggtcatcgcccaccgcatgcgcaccgtggaggcggcggacaaaatcgtcgtcctcgccgatggcaaagtggcggagcagggttccccgtccgaactgatggccaagcgcggcttgttttaccgcatggtggaattgcagcggcagagcgccggctggaagctgggggaagggggcctttgagctttttttcctgatcaatcaggggctgcgaaagaacagcaaaagttctttcgcagccccgaaaacacgcggattcgcgctcattgcggcagaatccaggtatgaatcgcctgcatcagttcttccacccagatccagttttgtgaaaaggttccccggctgaggggcgtttccacgccgcactgtgtgccgttgcacaaatagagcaccgcattgccactttcgcgatccagataccagccgctgaataggccataggcgttgccggtgtggccggaatagggaagcgcgcgatccttcagcagcgaatcgccgcccgaattggtcaaaatgtgtacgcccaggccatagctcctatcgaacccgccgtccgtaaagccattggagccgtcgtatgtccacacgggggtgaacatttccgccacgctttcgggcgaaagaatgccgtcgccgccgcgcaggaaggtgcggatcagcgccgtgagctcgcgcacgctgatgcgcaggccgccctgcgggctgtatagcgtgccgttcacgccgggggccacggcttcgcgcgccggattgcgcggcaccacctggccgcggtagtcgtccagcgccgcttcccagccgcccttgccgtcgccgttgtagatgggggctagcttattgatttcctgcgcgtcgaaatcgcatacgtcgaacgaggccttgatgcccatgggcgcaaacacgtgccggttcatatagtggttgaacttttcgccgctcagcttttcgatgatggcacccagcaggccgaaattcaggttgcaatagcaataatagcccggcgcttcctcagcgtaatagcgcgcgtcgcggaagaaatcgctcgtggtcgcgccgatgggcagccagtaatcgtcgttgtcgcgcagggaactggtgtgcgaaagcagcatgcgcgtggtgatcggggtctgcgggtagcgcggattgcgcagcgcaaagcccagatattcgcccgcgtccgcgtcgaggtctagcttgcccgcgtccttgagctgcatggcggcgatggtggcaaacgtcttggaaactgaggcgatgcgcgcgcgcgaatccagccggaggggtaggttgcgcgcaaaatcttgcgtgcctaccgcgttttcataggcgatttcgccgccgcgcatcacaatggtggctagccccgccagcgcgcggccatcctcgcggtagacaatgcgctccatggcgcgattcatttcgttgatgttggtatgcatggggatcttctcctgtctgttggttgtttaaaggggcggcagcgtgatgacccctcagtcagcttcgctgacagctccccttttttgaaggggagccttttggcgcggcgcgctccttaccactcctggaacacaaagcgaccgttttcccacacccacacgccgtcaaagcccgcgcgctttaatgcttccacggcccaatcgaagtgcagggccacgttttccacgcggtgcgcgtccgcattgatggtcattttgccgcccgcgcggcgaatgtattctaagagccggggcgcgggatagcacgcgccgcgcttgggccagccgttggtattcagctcgatcaccgcgcccgtggcgcacacgcggtcgatggccgcgaaggccgcgtccagataccaggcggcgttttcatcgaaaaagcgcatatcgcggttgctcttgcccaccacatcgaggtgaccggcgatatccggacggtatgtttcgcaattgtccgccaccagcgcgtaatacgcctccaccattttgcgcgcgtcgccgccaaagaggacgtcgcggcaatccgccaccgtttccgggctgccgtccaccgcccaatagcggccggaggcctcgtcccgccagtaatgcacggaaccgatgatgtagtcgtacgcctcgcgccgctgcgtgggcgcgaaatagtcctgctccaggccacaatacaggcgaatgcggcccgcgtattccttttgcagggcgcggatttcgcgaatgtagcccgcctcgtccttcagcgaataccaaatgtcgaacggcgtatgcccgtgcccggaaaagccaaaatcggtgaagccggcggcaatggccgcctcggccatttcgcgggccgaatttttgccgtcgcacatcgtcgtgtggttgtgcaatcccgcgcgaatctgcgtcatttcatcgtctcctgtttcactttatggtcgatcacgtggcgcgaagccagttccgcgcggatatcctccggcgaaatgccctcctccaccatcagcaccagcgcgtggtagcacaaatcggccagctcataaatggtctcctcgcggctgcccttcatcgcgccgatgatcacttcggtgcattcctcgcccaccttcttgagaatcttttccttgcccttctcgaagagataggtggtgtagctgttggcggggcgctcgcggttgcgcgaaaccagcagatcatacaggccgccgatggaaaattccgcattctccgcttcttcgccctgcgcggtgaacagccggttttcaaagcaactgtccgtgcccaggtggcaggcgggcccggctttgtgcacgcgcaccaccagcgcgtccgcgtcgcaatccgcggtgatgtccaccactcgctgcacgttgccgctggtttcgcccttgcgccagagcttcttgcggctgcgcgaccagaagcaggtgtagccttccgacagggtgatttccaggctttcgcggttcatgtaggccagcgtgagcacgcgcccgctctccgcgtcttgtacgatggccggaatcaagccgttttcgtcaaatttcagggaatccaggttcataaaacgatcctcctatttgtgtttggagcattgggaaagcgacccctcagtcagcttcgctgacagcattccacagtgcggcatagtcgcctcgcgtcgctcgcagggctcgcttgcgacgctccttgccttactgggcttacttcgcgctgcttcgcgcacagcgcgcgcgcttcgtgcgccccttttggaaaaggggagccttttgggcattgggcatcgccgcggcggagggaagattcctcacatccgcacattcacgccgcagccggccagatagcgcttgagatccataatctcgatctcccgaaagtggaaaatgctggcggccaggcccgcgtccacgccttcgagcgcgaacaattccttgaaatcctccatgcggcccgcgccgccggaggcgatgatgggaatcttcacgcgcgcggctacggcggcgagcatttccaaatcgaagccgcgcttcacgccatcggtatcgatgctgttgagcaccagttcccccgcgccgcgcgcctcgccctgcgcggcccattccagcgcgtccatgccggtatccacgcggccgcccttggcgaacacgcggtattgcccatccacgcgcttggcgtcgatggaaagcaccacgcactggttgccgtatttcttcgccgcctcgtcgatcagttccggatgggcgatggcgccggaattcacgctcaccttgtccgcgcccgccttgagcacgcggtcgaaatccgccacggaattgatgctgccgcccaccgtgagcggaatgaaaatgcgctgggccacgcgcgtgagcacatcggtgaacagggggcgcttttccacgctggcggtgatgtcgtaaaacaccagctcgtccgcgccgctctcgttgtaaaactgcgccagcgcgaccgggtcttccacgctcttcacgttttcgaaattcacgcccttcaccacgcggccatcgcggatgtccaggcagggaatgattcgcttggtgatcatgcgccctcttccgcctccttcagcacgtccgccaggttcagcgcgcccgaatacagcgccttgcccacaatggccgccggaacgcccatttcgcgcagggcgcgcacgtcctcgagggtagaaacgccgcccgaggccacgatttccagcccctcaatgcccaatagcgtgcgatagatttctagatttacgccgcgcatcgcgccgtcgcgggcgatgtctgtgtagatcacggtcgccacgcccatatcgcgcaggcgctggcagaattccacgccgtccagcgccgtgaccgtctgccagccgtccacggccacgcgcccgtcgcgcgcgtccacgcccacggccacgcgcgctccataggccttcaccgcctcttcgagaaacgcgcggtcgttcaccgcggcggtgcccaaaatcacgcgcgacgcgcccgcggccaaatacgcctcaatgcgcgcccggtcgcgaatgccgccgcccacctcggcaaacaggcggccgtcgcgcagcacgcgcgccaccgtggccaggttcgcggtggttccgtccttcgcgccgtccaaatccacgatgtgtacgtacttcgcgcccgcttccacgaacgagcgcgcggcctcttccggctccacggcgtattgggtcacgcggccataatcgccctgcgtgagccgcaccacccggccgcccttcaaatcaatcgcgggaaaaatcttcataccggcacctcacaaaacgcgcgcaggatgttgagccccacgccgccgctcttttcgggatggaactggcagccgtacacgttgtcgcgcgccaccgcgcccggcacggtcacgccatagtccgaggacgcgacgatatagcgcgcgtccgtcttggcgtaatacgaatgtacgtagtacacaaaatcccccggctttgtgtacttcatcagcgggttttcctgctggcgcacgtccaggctgttccagcccatctgcggcaccttgtagtccagccccatggcgcgcagatccggttccatgggatagacgccgccaggaatccagcccagcccggcatgccgcccgtattcctggctttcctcaaacaacagttgcatgcccaggcaaatgcccaaaatcggcttgcccgaggccacttccgcctccagcacgggcaccagccccgtcgcgcgcaggcgcgccaccgcgtcgccaaacgcgcccacgcccggcagaatgatccgctccgccgcgcgcaactccgccgcctccgccgtgattttcgccggaaagcccaggtattccagggaacaggaaaggctgaacaaattgcccacgccataatccacaatcgctatcatagcatccatccttatcgtgtcgtttcaatatgggggtgaggggaggcgactccctcagtcggctagcgccgccagcgcgacaacccctcagtcagcttcgctgacacagagtattgacaaagtctcggaagaacgaggctctaatcagaaatgacggcgtgtacgtcatttctggcattttttgcagagcaaacgcttgcgtttgcggtaaaaatgcattcccgtcccgaccgctggccgcaaatcgttagatttgcaagcggtcgggcagattcgttggcaaaccagaggtttgtcaacgatcagagtcagcttcgctgacagctccctttggccccaaagggaggtggcgcggcgcagccgcgacggagggattgacacccctcagtcagcttcgctgacagctccccttgattccaaggggagccttttggatagtggtacaaccgtatgaagtagcactaacccagaacctccctttggaatcaaaggggtgcacgaaggccgccgcctgtggcggaaccaggcggcggcgaagctccgtccatctcgctctctccccctggtttttttgacagcctgacaattttcttgccaaacgccccggcatatgctatgatgatgccaacaagctggcgaggagcgtttgagcgatgcggattccgatcatcacacagtacctttccgttttgtccgtccacgacgagacggggcatatcctggacatgcgagaccgctactgcgccaccctgatctttcccctgaaagggcgaatccggttttccgcgggcgagcgcgtgactctggcagatggcgcgcacccgatttacctttcccggggcgcctgctaccgcaacgaatgcctggaagaggcgcacagcatcatgttcaatttccaggatgatattgcacccggcacgatagaatccctgccgcccgcgccggccggcgcggttgccgaagcgtattggagcatacaaaaagcgcagggcgacgcctgcgcccttgcgctcattttgtcctgcctctaccggctgctgcaccaggtgctgagcaacgcatcgcgcgaaagcggcgatctcctcgcgccggccctggagatgatgcgctgccgcttctgcgaaagcggcctgacgctggatgacctcgccagcgccgcgcacatcagcaaagtgtatttgggaaagtgctttgtcgcccgctatgggcaaagtcccatgcgctatctgcgcgaaatccgcatgcggcacgccgcggattacctgcgcgagcggcggcccgtgggagaagtggcgcaccttgtgggctatgcggacatttttcagttcagccgcgcgttcaagcagcatttcggcgcgccgccttcgcgctttggcgcggattgaaggccgagcaagctggtggacggggaagtaagctatccacaattcgcgcggcttccccttaccgcgcggcttccaaaatcagcacccaatcctcgcctttgccgcgcgaaggcggcacgaacagattttctcccgctaccggatacacgccaaacatcttttcctcgcccgtgcgcggatccatccaataggctttgagcacgttgccgggcgcggcaatggccgcaagccgcaccgtgaagggcatacccagcggcgtgtacacatagcaatatccttcgccgcgcgccgccgccaaatgtccctcgcccgcgtattgctccaccagcacttccggcgccgggcggaacgacgcgtaatccccgcgcaggcgcaactgcttcacccagcgcatctgtcccgccgccgggtggtcgagcgcctcttgccaacggtggggataataggcgttcgggtttgcgttgcagcaccatatattgtggttgccaaaggtatgcccgcacgcgcccgcgaacacgtcccaatacgcgttttggcgcacgtcggcggcctgccaatagtaccccagcttctcattgaaacaagccggatggtcctcgtatcggggttcggaatccatatagggctttgcgctggccaaggacatggcccgcatttccgcgtcgctgggatagcatttggcgacgtcgtggcccgtttgcgccgtgtggaaatcgatataggccgcgtcgttgaggtattcggtggaattgtggcttcccgggggatggaacgtcatcaaatgcgcgccgtccgcttcccggatgccctccgccatgcggtcgatgatggggcgcgtcgtctcgttcagcgcgcggtcgccgccgagcatccagaggatgttccagcgcgaagcgtagcgcgcgcccagccacttgccgtattggtaggcgttctccggcgtgaaaacgcacggccccttgccccacagggaacaaaacttgtcgccccacgtgggcagcagcgcgatcaccaggccgtgttccgccgccgtttccaccgcgtaatccacgtgatcccaatagctgtaatcgcccgccacatcgggccgggtcggatccggctgcccgttttccccgtccaggagcggtttccggccatacgcgttcggcacgcgcaggccgtccagttccgccagagcaacggtttgcacaacggtgaagccctgctgcgcgcgcagcgccatataccgcgcgatctcttcgcggttgagctgatgcagcagttcccaggcggtatcgcccaaatagaaaaatggctcgccatcttcccaatagaaatatcgctctcgcaccaaaagccttttcatgccctgtcctcctatcttttgcgcggcatccagccgttcagatttccagttcgcaatgcgcgctttgccaaccgtccgcctgtgccatcacgcgcagcgtcccatgttgcgcgcccaggcgaacggccaccgccgcccggcccgcgcgcatatgcaccgccggatcgctcaagcgcttgtgctccgaaacatccgagcccgcgcccacgatccgccccaaaggcgaggaaaaaaacgtgaccgtcgcgctggcgtccggcacttccctgccctgcgcgtcgattgccaggcaggtgaaaaccgcgatgtcctgcccattggccgccgcccgcgtatcctccgcgaccaatttgagccccacggcggggccgctggtgcgcaccgtttcccgcgcgcgctccacgccgcccacatagcccacggccatcacttcgcctggctcgtaagccacctgccattcgccgtgcccaaagcgctcaatccgccgcctgccctggctgcggccattgagccacaactccacttcctcgcaatttgtatacgcccacaccgcgatgggctccccctcgcgccccgcgtgattccagtgcggcaggaggtgcaccatgggcgcgcccgtccaatgcgattggttctgataaaacgcgtctttgttttgcatgaacaaatcgatcgcgccggattgcgaacacagccggggccaagcggcctccccgcggtgctcaaaagcgatccattgatacgcgcccaacagccacggccgcgccataacggccttccacgtcttttcccggcccaggaaggattcgtttgtgtcgcggtcgtaggcgctcaaataggcgtgctctgcgctatcgggcccgtaccatcctcgcgtggttcccgtggcgcagcactcgctgataaaaaccggcgttcgcggccacttttcatggatgggatcccagagcggcaaattgtagttcacgccgatggcgtcgagatcgccgcctatcgtcgcgcggtcgggctgcacggaaatggccgcggtgaccaggcgcgtatcgtccagcttgcgaatttccgccgccatggcgcggtggatgttgcgcccaatggcgctcacgtgcaaatcttcctcgttgctcgtggaccagaacagcaccgaaggccggttgcggtcgcgccgcacgagcgtgcgcaactgttccagcccatcttcgctggattcgaaccagcgcgtttcgtccatcacgagaaagcccatttcatccagcgcgtccatggtcgcctcggcgtgcggatagtgcgacgcgcggtagccgttcgcgcccatctcgcggatgcggcggattttccagcgcaggatgttgtccggcacggccttgcccgaaaggccgaaatccgcgtgcgcgcaaacgccctgaatcttcacgggcttcccattgaggaaaagcccgttttgcggatccgcgcaaaccgtgcggaacccaaagcgggtttcgtattgatcgcgcaattcgcccgccacatacacgcagaccaccgccttgtacaaatggggcgcgtccacatcccacaagcgcggcgcgcacacctgggtttcgcacaaaagcgccgtttttgcgcgcgcggggagcgcccccgcgacgcgcgcgcttgccgcgacagcgcctgtttcctccacgagcgccacccgcgcttccgcctcgcacgcctcataggcatcgttgcgcagggtaatttctatgggcacgcgccacagttcttccccgattttccgcggcgcgacatagacgccatacaaatccaccgccacccggtcggttttcaccagatacacattgcggtagaggccgccgccatcgtaccaccagccctcgctctcgccggtttccacgtgcacggcgagcacgttgtccgtcccaaactccgccaaatccgtgatgtccacttcaaacggcgtatagccgcaaaaattccgcttgagcaggcacccgttcaaatagacggtcgcccacgtggcgacgccctcaaaatacagcgcgagccgcctacccgcgtcagagggcggcagggtgaaatgcttgcggtaccatccatcccgataggcgaaaaagccccgcgcgttgttgccgcgttcctcgggcacgccctctatcacaaaatcgtgcggcaggcagactttgctccaacgttcggcggaatactccacgccatcgcgataatcgtccaccgcgtcgttgtgcatgcgcgcggccgggccgctgcgcgcgcgctctgtcttggcctgcttgtacaaagggcctttcaccgaaaacgcgcgcgcgggcaagggttcggcgcaaaagagccaatcctcattccaaagaattttctcgcgcaagaaaaacgcctccatctttcaatttcccatggctttgcggaactggctgggcggcacgcccatatgccgccggaacaagcggctgaaatacagcggattgggatagcccacggcggcggcaatttcggatatgttcagcgtggtggaaaccatcagatccttggccttttccagccgcaggcgcgtgagataggcgtagggcgcttcgcccgtgtactcgtgaaacaggtgaataaaatggtgttcgctcaaatcgcacatgcgggcaaaatcgcttacagacaggctctgctggcaattggcgtgcatgtgagcgatcacggcggccagccgccggtatttttgcgcgaactgcgcgctttcccgctgctgccggccgcgcgaaagcgtagctagcagcagcaaaatctgggcctggcagaacatttcatattgccgctggcggaattgcaattcgtggatgaggcggcgcagcagctcgcgcgcttccggaacgcagcccacgggcgtgatccgcgcgagaaatcccgccttttgcaggagttcctccgcgcccgtgccggaaaaatgcagccagtacgcctgcgtgcgctcctgcgccacatgcgtgtagtgctggcactccccgggccggtaaaccaccacgctgcccgcactcgcgggcaagcgccgccccgcttcctgcacctgcaactgtcccgcccacacatagagcagcagataatccgaccgcccgcgcgggcgcagcgtggtgctgtccgcctgcccggcgatggtgagcccgcaattgttgatcgcgatgtactcgccgctcacgcgatcgctgttatacagatttccgccgccaatggtgatcacgcgcacccctcccctctgccatgataccgtttttttccggccgcgtcaagagcaaatcgcaagaatgtgcatggaatcgcacatttacccattggagaaacggcgcgcgcgcgatataataccggtagacaacgcattgcaaaggagccaaaggatatgggcaaaaaatttgttctcatcggcgcgggcagttatgtattcacccgcaacctggtgcgcgacatcctcacctttcccgcctttcaggacgcgaccatcgcgctggtggacatcaaccccgaaaacctggaaaacgcccgccaggcggtcgagcgcatcatcgaagcgggccgctacccggccaaagtgatcgctaccacggatcgcgcggaagcgctgcccggcgcggacggcgtgctcagcatgctgatggcgcagccgctggaagtattcaaaaacgatttgctcatctgcgagcgctatggcgtgaaaacctgcgtgggcgacacgcgcggcgcggcgggcattttccgctttttgcgcaccgtgccggtgatgctggacatcctatcggacatccagcgctattgcccgggcgccgtgttcctcaattacaccaaccccatggccatgctctgccgcgccatgcaggaggccgcgccggaggtgaccatcaccgggctttgccacagcgtgcaaggcggcatctacaaattcgcgcagattctgggcgttcccgcggaagaaatcacctacctgtgcgcgggcatcaaccacatggcgtattatctcaagctggaacacaacgggcgcgacctctaccccgagttgcgccgccgcaccctggaggacaaagaggtgtacgaaagcgacatcgtgcgcaacgaagtgttcctcgcgctgggctattatgtcaccgaatccagcgggcatttttcggaatattcgccctggttccgcaagcgggaagacctgctccaggaatattgctaccgcggcaccagttggaacacgggccgcaccaatttcaccatagaaacgcgcgaggagcgggcgcggaatttcccggaagagctgcgcaaattcctcaccgaaccgatcgatcttgcgcgcggaaacgaatacgcctcgcacattttcaacgccatgctgggcgatggcacgctctataagttcaatggcaacgtgcgcaactttggcctggtggacaacctgccctatggcgcttgcgtggaagtgcccgtggtggcgggaaaggatgggctgatgcccgtacacgtgggcaagattcccgacgaggtgctgccgctgatgtcgctgagcagccaaatcgaagaaatggccgtgcgcgccagcttcgaaggcgatccggatctcgtgtacaaggccatttgctacgacccgctcaccagcgcggttttgagcctgcgggaaatccgccaaatggtggacgagctgttcgccttcagcaagccgtggctcaagcagttcaagcatttgaaataatgctctccggagccggttctgttacgcgagctgttctatgcagaatgcacgcagttcgtcgatcactgccgtggacgattcccaagcaatttcaaagtctatgcgcccgtaatggtgcgcataagtgtcgcgagcacgtgctgctccccgccaatcaatctggggatgtgtggcggtaaaatctggggaaagatgctttaccagttcgccaatctgcagaatgcacatgccaattgcgttttggtaagtgcgcgtactgataaaacgttctttatgaataaccaaattccaaatgcgttacggcgatgtcattgcagtaatccaatatgtgggacaggatatttctgtctcgagcgtcggtatcaactttgggcatacaacaatacctcctcatcgcggatgctgttcaggaattccggcgagagcatctgcgtcgtcaacacatcggcattcttttgaaagccatcttcaaggtcgcaaaggaggctgctcaactgaaaaagcgtgcgaatttgccccttttcaatccgaaaatcaagatcactttcggaagtggcatcgccacgcgcgtaggagccgaacaggtatagtgccgctacgccatgtgatttggcgatgggcgatgcaatggctcgaatttcatcgatcgtgtaaattttatcacacaaagcgtccacccccttaccccctattatacccaaagaatggagagaaatcaaccgcaacgatcagagggctggaagcaacttcctacggtaatgccactaaccaaaaggctcccctgtgtaaggggagctgtcggcgtcagccgactgaggggttgcgcgcgggaaacacttcggtatgctcctgcccgtcgtcgatgagttccaccgcgctgcgctccggcgcgccgcgccgggagatcagcgtatacgcgctcgcgcccacgcgcactttcaggcgcacttcctgccactgcggcggcaggagcgcgcgcagcgaagcgaaattgccctttctttcgtagcccaacaggcgcaggccaaattgcgccagccaaccggccgcgccggtgtaccacgtccagccgccccggcccgtgtgtggcggcgtgccatacacatcgcccgccaccacatagggttccacgatatagcggcgcgcgtcttcgctcgtttgcgcgtgcgtatagggcatcagcgcgtagagggcgcgccaggcgtcctccacctggcccagttccgccaaggcgatccccgtccagcaagccgcgtgcgtgtattgcccgccgttttcgcgcacgccgggcacgtagccggcgatatagccgacggtatccgcctcgccgtcgaacggcggcgcgagcaggcgcaaaacgcccgcgtcccagtcgatcagccgctccttcacggattgcatggcgctctcgcagcgctcgctttgcagcccggcgaacaccgcccaactctgcgccagcgcgtcgatccgctcgccgccgcacacggggttgcccgcgtcgtcgtacgcgcgcaaataccagcggccatcccaggcgcactgttcgagcacgcggttgagcttttcggcaagcgagagcagctcgctttcgcccgtgaggcggccaaagcggcgcgccaccacggaaaggaactgcgtgagccacacgctttcgccgcggccgcgcgcgccgatccggttcatgccgtcgttccaatcgccgctgcccatcaaaatcaggccgtgttcgcccggcaggctcgcgcggcgaatggcgcgcaggcagtgttcctgtagcgtttcttccttttcggaaacctgcgcctcgccataccaatcctcccgcccctcgggaatttccacgtttttgagataggccacgcgctcctgcaaaatgtcccggtcgcccgtatactccacataggccgccgtgacatagggcaaaaacaacatatcgtccgaaatgcgcgtgcgcacgcccaagcgctccgggtgccaccagtgcatcacgtcgccatcctcaaactggtgcgccgcgcagagcaaaatgtgctcccgggccaattccggctcgtacagcatggcgatcagcatatcctgcaattggtcgcggaacccataggccccgcccgcctgatacagccccgtccgcccccagatgcgccccgcgaacgcctgatagggcaaaaaccgcgtgagcatggcgttgagggtttcgtccggcgtgacgatttccagccgcgaaagccgctcctgccaggcgcggcaaacgctcgatagccgctcttccgcccgcgcggcgcgcacctcttccagcagcgcgtccgcgcccgccagatcgtccgcgcagccaatggcgcaggccagcgaaacccgcgcgcccgcgggcacggtgagcggcgcggccagcacatccccgcccgccgagtgggcgaggagaccatccgggcaaatcagcccgccgctgccgagaaaatcgcgcaggttgcccaccgccgccgcgccatccgccaaaatggcggcaaaggccacgccttccatcgcgccgctggcaaagagcgcgccagctcgcgcctcgctgcgcagcacgcggccatccgccgcgttcacgcccatcagccaatcgacggccaagcgaacttccagccgcttttccgcgcccgttcggttttccagcgcgagcagcagccatttcacgggccatttttcgtccacaaacaccgtcaggcgcgcatggagcgcttccgtgccggtttcaaacgcgctgtagccctgcgcgtgcagcgcgcgataggcgcggccgggccgcggaccgggcagcgccaggaaatattcctcgccttccagcacatagagcatttcgccccagccttcccgcaagggatcgttgtcaaagggcgtgaggcggccaaagcggctgtttttgtaccaggtgaagccgccgccgcgctccgtgaccagcgcgccaaaatgcggattggccaggatattggcccagggcgcgggcgtagccgcgccgggaaacacatccacgcaatagccgtccggcacaaatccgccatagccgttgaacagcccgcgcgcaagcatgggcggcacatagccgtccgccggggccggcacgccgcgcgcgctgggcgcgacccgcaggcgctgccagcgcgcgcgcatctgccgggttagggagccttcgccgcccgtaaattccagcgccgcaaaggcggaaatccgctcgcgcgcgcggccgtccaattgcgcgccttccagcaggtagacgccgccgggcttgccctgccattcgcgcagcgtgctcgcggaaacgatctcgcccagcgcgtcgcgcacgggctgttcatagtcgttgccatattcgttgatcaaaagcagatccgcccacaggcccatggcgtggtaaaactcgtgcgcccgcacggcctcgcgcgccaaatcgagctgtgctttttcggaaatgtgtacggccaggatgggcaaatcgcccgatacgcccagcgcccacaaatcgcgcaccggcgtgggctccaggcgcttcccggccccggaaagccgccaatccaccaaaaacgccgtcgcgcgctgcaaggtgtggtgcaaagcgtcgccaatgccggtgtgttccagcgccgccacggcctgggtttgcgcgagttggcgcgcgcgcagggccgcgccagcgccctggtgccggttgagccaatccgcttcccgctccggctcgcacaggccgatataaaaacagatcgaggtcttttctccgggcaagagttgaaattccatccgcagggcgctgcacgggttgagcacgctgcccaccgtgcccgagagcgattgcgcaaggccgccggggcggcccagcgcgccatcccggcccacgaggcgcgccaaatccgtttcgtacgaaaggcgcgcgttgcccgccgccgcgtgcaacaggacggggaacgcttccccgggtgcgcggggacggcgcgtgaagcgcagcgccccttcgcgcgcgagcgcgctttgcacaaacagcgcgtaaaacgccaggtgcgcggccagttccgcaccgtccatcagcgcgacggaaaacgcgctggtggcgcgcaggcgcacgggcgcgctggaggtgttttccacctctagccactgcacatacgcgccgtcctcgggcgaaacgcagacttccaggcggcaggaaaacgcgcccgcgcggctcatccactgcgcgcggcctgcctcaaatgaaaccgtttgccgcagccaatccgggcattcctgctggccgctggccaaaaacgtgcgcgtgccgcccacttcttccacgtggacatacagcccttccggccggcggagcatatcgcccgtccagcggttggcaaacacgcccccggcgcgcagaaagccctgcccgagcgtggaaaccagcgccgtggcgttccggccatacagcgcgtgcatatccggccaaaattcccgcgtgccccggcgcgcggtatggcgctgtgccgcctccacgcggcccagcgcggccgtagcccggcgcgcgcgcaggcgcacgggcgcggcgggtttttcttccagcaaaagggacagcgcctgcgcccgcggctgggcgaaaaacagccgcaccagcgcgtcagcgcacaaggcgttggtcagcgccgccagaatcatgccctggtgatgcgtcatgtgcgaatagaccaccgcgcattccgcgccctccggcaggcggcctttccggaaatccacggcctcgtacaggccgcatgcgccgcgccagcccaaatgggacatgcgccgcagattttcgcaggcggccgatagatccaagggcagcgccagcgccgcagcgtagggcgcgaccacgtccgcctgcgcgctggccgacatggcgagctgcgcatagccaaacgcgcggtattggtaattcaaatcccggtcgaaggcgtaatagcccgattccgaaacgccccacgcgcgccccaggcgctcgccctcgaccttttgcagccgtaccaccgcgcggttggattgctccagcagcgagccgcgcggcgcgcgcaggaacaactccggcatcagatattcaaacatggtgccgctccaggagagcagcgcgctgccctggcgcgtgaccgccaggccgcgcgccaggcgggcaaagtgcttcaccggcgcgccgccgcacaaaatggccgcgaagctcaaaatgcgcgattcgctggccagcaagtcgtaatgggcattggagggtttttcgcgctccacgtccacgccaatcacaaacaactcccgctttttgtcgtacagcgcgcggaaatccatctccttcgccagcgcgcgcatgcgctccgccagcgctccgcccaccgcctgcgcgcacagcaatagacaggcgagcaaattgccgctatccacgctggaaacgtatttggggcgcagcggctgcagcgtttgcgtatcgcaccaattgtagggatgccccttccacttgggcatggcttccagcgcgcgcacggtcttttccatgcgcgcgcgcatttctgcctcgtcgataaagccgttcaggcgggcgcacaggcaggcgagcagatatagccccgtgttggtgggcgaagtgcgccgcgccgggggaacgggcggatccagttgcacgttgtccggcggcaaggcgccttgcacataggtttcaaaatagcgccaggtgtcccgcgcgagttctcgtagaaattccgcctgcgccgcgtccggcgtgggcggcgcatccggcttttccatgccgcgcagccaggagggcgcgaggagaaacagcgcgcccagcgccagggcgaacagggccagcggcaaattcgccagccccggcagcagcaaaatggcgccaatccgcgaagccatggccttggacccgccttccgcgtccgcactgggcacccattcgagcatatgcgcgtgcgtgaaaaagctgcggcgcagcgcgcggacaatcgccgccagttgcgcgcccgcctccatgggcagcagcgccaggtgggcaaacgcccgcttccagccccgtttccccgcgcgcagcggatgcagcagcgccggcaaaaacggcagcagcaagcccatcgccagggcgctgcgcgcgtccagccacagccccagggcgatcagcgcgaaggccgccggggcggccaggctgcggcgcaggttgtcgatcatcttatagcggtcgagcgccgtgaacgcgcggcggcccaaaaagcgcagcaattgccaatcgccccgcgtccagcgttccagccgcttgaaatacccgcccagcgtgctggggaatccgtcgtacagcgtgatgtccgaggcaaagccgcaaccggcgtacaatccctcgagcaaatcgtggctcaaaatcgcgttgtcgggcaattggccctccacggcctccacaaaggcgcgcacgtccacaatgcccttgccgccaaagatgccctggccggtaacgtcctgataggcgtcggaaacgctcacgggatagctatccacgccgccctccccggccatcaggcggatgaattcgctgcttgccgcgcgcagggaaagctccatgcgcggctggatgagggcatagccccgccgcttgccgttttcctcgcgcgcccggttcaccggatgcgcgatcgtgccgatcagccgccgcgccgtgcccgggagcatgcgcgtgtccgcgtcgagcgtgagcacatagggatagcgcccggcgagcttgggcgcgcacgcgccttcggccgaaaaggcgttctcccccgtcaaaagcaggcgatacaaatccatcagcgcgccgcgcttgcgctcgcgccccatccacgcgccgtccgcggggttgtgcgcgcgttcccggtgcagaaaaaaatatttctcccgcccggcccgctcgttcatcgcccgaatctgcgcgcgcacggtggccaggatggtttcgtcctccggcaggctctgccgctcagcgtcgcgaaaatcgcccagcagcaaaaagccgatgttttcctcctcttccatgcagccgagcacttccagttgccgcgccagttcctgcgcgcgcgcgggcgaagagagcagcgcgggaatggtgaccagcgtggccatctcgcgcggaatgtgttccagttccagctttaataagcgcgccgggggtaccagcctgggcaaaatcgcctgcaccacggccgcgcccgccgcccacgcaacgggaatggccagcaggctgagccccaccgagcggctgcaccaggcaaacgccagccagaccaccagcgcggcggccagcacgcagcccatgtatccatacccttccggatccggcgacagcgcgcgcacgcgcacatcgctcgctccgatctggcttttgaattccgcgcagcccgcgtcgtcgcacagccaccagcacgcgcagccgcgcgcgccttcttccttttgcgccgccgccaccgcctggcgggccaccgtggcttcgcccagttccagccggttggccagcatccgcacgcgttcgcgcacctgcgccttggaggcttcctccatccgcaggtacgcgccggaaggatcccggttcaattcctgttccgcccggctcacgcgtccaaacacttccagccaatccagggaatccaccagttgcttcgccgcgaacaaattttccatgcgcatgcgctccatggcctgccgctcatgcgccagggcgatcacgcgctccgcgctggcgtcgtgttgcaccaagtggcgctcgatcgcctggcgggcgtccgccatttccagttcgctgaccagttgcagggcgcgcgcgaaaaacgcgctgccgcgcgccttgccgcccagttcccccttgggcgcgccagcgtccacccatcgctgcgcggccagccgttcttcctcgcccgcgagcgcctcgcgcgccacgccgatgaagcaatggcacaactcgatgcgcagcgccgccgccatggcccacagttccgccatggtgagcgcttgcacatcgtcaaaggccaacagcgcgccttccagccccgcctgggtgagcgtcgcgccgccgccttccaagagcgagcgagcgagcaaggcgacgcgcggcaatccctgcacggcgggcagccgtccgccccgctccgcacgcgcctgttggcaataggcttccatgcgcctcgcgttgtcgttgagccattccatggcgggcgcgagcgagcggcattctccgctgagcgcctgcgcgcggcgcgcgagcgcgcggagcaggcggatttcccggcgcggaaaatacagccgcgcgcgcgaatccacgcgcaagcccatggccaaagcgcgcatccgtttttccgccacgggctcgccgcccgccgcgggccggttccattcccggtatttgcgcgaaacgatgttcataaatcgattgcctcccaagcagcacattggtctgctcagtatgtgcatttttgggagaatcatgccgccgcccttgcggatgaaacaaaaaaatggtatgatattggcagcttgtcaaaaaccctaggagagcgcgagagggacggagcttcgccgccgccagtggcggaaacaggcgaattgtggaacgaagccctttcgcggtacaatcgtccccggcggcgtgtacggcggggacg

SEQ ID NO: 2732 - DNA, 9113 bp, Unknown
  16S sequences of unknown bacteria
cgttagttcgtttccccttcctttcttcctttgttcggttttcaatgggcgtttgattaaagagcttgtaaatcaagctctttttttgtttttttgaaaaaattctgattttttcccaaccttttcagattcccgtgtctatatatacgaaagctttcagtgaggtacaaacaagtgaaaagacaagaagccgagattattataggcgggaatcttaagaagattttcgggttcgcgctcaagcgctgccggactcttcaggacgcggaggacctctctcaggagatcgccgccagatcctttgccgcgctgttgaagagagacgatatctcagatcccgacagcttcatccgcgccgtcgcgcacaacgcgctcagcaattactatcgagacagcgcaaacttcatggtcggggttccgctcgacgaggttgccgaacttgttgaggacccggacgcggagataaacattgaggacgacaccggaatattgaaaaaacttcgccgcgagatcgcctatctgtcaaaaactcagcgtcagatcgtcatcgcgtactacttcgagaaccgcaggcaggcggacatcgcgaaagccctcggtatcccgctcggaactgtcaaatggcacttgtttgaggcaaaaaaagaacttaaacgaggtatcggaaagatgagaaacacaagcgaactcgggttcaacccgatcagattcagcgcctacggaataaacggctccaccggaacgaagaacaccgaagacatgttcagatccgtactcactcagaatatctgctactgcgtcaggaataccgcgcggtcggttaatgaaatcgcagacgccctcggggtttcgccggtctatatcgagagcgaggcggcactgcttgaggaaaacgggtatctgcgcgagaggaacggaaaatacgagactactttcattatctcggagccttcaacagagttgttgaaaattcagaacgatatgtacaggcacgctgcgggaatattcgcgaacgagctttttgacgagctgacgaaatccggcatacttgatgccccggacattgtctgccggcagactgacgagccgatctctcttgaaacttcgccgtcggcggacaggaatttccttctctggacgctcatcccgtatatagccgcctgttccggcgagaacgagagaaagagtgcgagcatatcctttgacgaggtggcgactatccgcccggacggcggaaaaaatatattcaaggcagacgtcatatccacggataccgtctatccggacaatttcgtttacatgaataactggtgcggcccgatgtggaacagcagcggaagaaacatactctggcagatcaacagcgagtggaccgatcacgccataaccgtcggctcgcgttatgccgaggattccatgcgcgtcctgtcactctatgaacgcgaggaggacggacctctgtcgaaggacgaatatgcgtggctcgcggaaagagggtttatcaagactaatggtgattatgacgggaatttcaagtcctcatggcaggttgtacttctcacgacaaaggagatcaacgaacgactcgtcgctttcggcgaccagataaaggcaagacaccgggacgagttcgacctgatgaaaaagcagtactccgatgcggttctcgccggggttcctgagagactgaggaagattgcggagtatgagcttcagtatgtgttcaactgtgacgggtggttccttctccactgtatcaccgctcttcttgagaacggcaagctgaaaccgccgaccgagggacagaaaaaatccctcatgacactgatcatatccgaaaagtaaacgcaaggaggcgccgcggcgtctcctgtttttttctctacaaaaagactcgctgattcacagaaaattcatatatacattctaaacgaacacataacatgaccgaaagctcgttagtttctggtattgaaaaaactgtcggaacgtgatataatatagttacggaaagcggtatggaaacatcatactttattctcggcaaaataacatttatatttataatgcgaggtaagataaacaatgtttgatccatcggcagtacttgtcataagtaacggaaataatccggcggtcttcggtatggttaccgaagtcatgaagttctctcccgacgtcataagctgtgatgacgggaagatcgcggaaaggctcgcggcgggaaatatcgcttgcatcatatgcttcgcgcgggagtgcaccgacagtatgcagcagctcatttaccggtatgtctgcggtaagagtgacgccgtgtgcgtctgcttcaccgagagtgataacgacgagaagatgtttacgacttctgttttcggagaggaatgcaagctcgttatcggtacaaagctgatgctgatacctatcgataccgatgtggcgacactgcgggatatgatgctcctcgttcttggtgaatatgccgaaaaaactgataataaagcgatgacagaggcttattggagggtgatccgcacgctcgccgccggggtggtccggaaatatgactgctgcggcaggaagaagtacggctgtgtctatctgaccatcgccctgatgatagtgtctgatgatccggacagacttgaccttgtcacaaaaacgctgtatcctgatatcgctgaaaagacgaaaacgagcgcggctaatgttgatcgctcgatgaggcacgctctttatggcggatggaagcggtctggcggcagattttcagtcaggtaccgagacatttgctcggtggatttcgatttgcagccgcggaaccgtgaatttatcggcgaggtctcaatgtatcttgctgtccgctatcgttatatatacgacgcgggaaagcgtctcgcggcgcaggcggtggaggttccggcttgagcttatgtaaaatgctgattttttataccctgatgcaggtatttgggattgacattcggggattattgtattataatcattattaagaggcataccagcctgtcatgacaggcaaaggtatgcgtgaaaggaatgttatgatatgataatgaaaaacgcttttccgcagccggatatgcgccgctccgagtggctgaacctcaacggcgagtgggatttctcgcttgactcccctgtttatgacaagaagatcaacgtcccctatccgtggggctctccgctttcggggatcgaggacgacaaggacggtaccggctattaccgccgggtcgtaagatggtcgccgaagggcgggcacgtcttcctcatcttcggcgcggttgattatgactgcgtcgtcagggtgaacgggaaggagctcggctctcaccgcggcggctacgcgcgtttcgagttcgacgttaccgacatctgggaccgctccggcgacaacacgatcgaggtcgaggcgaccgatatctccgcgagatcgcagacctacggcaagcagggatacggcaacgcgcgcggcatctggcagactgtatggctcgaggcgagacccgaggcttggatcgactccttcttcattaaaacgagtcttgacggtgaaatcacgatctcggcggagcttgccgggaaatgtgacggatgcgtcgtcgactccgacttcggcggggtgactgcctcggctgaggtgaaggacggcagtgcggagcttgttttcagaatagacgagcccgcgctctggtcgcccgaggagccgaacctctatgaaggaattatcgctctcagggtcggcgacacggctgacgttgtctccacctatttcggcatccgcgagatcgggaccggcgtattcggtgagcacggacatcgttatatcactctcaacggcaagccgtatttcattaacggcgtgctcgaccagtcgttcaacccgaagggatttttcactctcccgtccgacgacgactgccgcgaggagatacttcgcctgaagcgcatcggaatcaacatggcgcgcatacatatcaaggctgaggagccgatgaagctctattatgccgataagctcggacttctcatcatggaggacattccgtgcttctggggtgagccgacgcccgaggcgcgcgttcagttcgagcgcgagatggagtggcagatcaagcgcgaccgtagtcacccgtcgatattctattgggtcgtcttcaacgagacatgggggctcatctccaatcttaagaacgaggacgggaccgagaagcgcgagtacaccgccgagaccgcggagtgggttgtcgactgcttccacaaggcgaaggcgcttgacccgacgagactcatcgaggacaactccgtctgcaatcaggaccacaccgtgacggacgtcaacacatggcatttctactcgaacggttatgagaacgtgaaaaacgttgtccgcagcttctgcgagggcgctcacgtcggctccgaaaagaactacaagagcggctacacgatggcggacgtcccctgcatgaacagcgagtgcggaaacgtctggggcgtcgacggaaacgcgggagacagtgatatctcctggcagtaccgctatatgataaacgagttcagactccacgacaagctctgcggcttcgtcttcaccgagttccatgacgtcgtcaatgagttcaacggatattacaagatagacaacagcgataaggatttcggctacgacgagtatggcacgggtcttcgcgacctgcattcccaggattacctcggcgcggatttcgctccgatgactactgtcagacccggggatctgatctcggtcccgatgttcggctcgagcttcaccgacctcagacacggtaaggcgctcgatatctcgtggcagctcaggctctgcgacccggtcgacggagactcgatcgctgacgccggcgagtattcgatcatatggaagggctacggcgagttcgacgctggcgtcatccgcacagtcatgccggatcacgacggagtggcggttctcatgtggacgctcttcgacggcagcgaggctgtcatgtcgaacgctgtgctgttcgatgtcgacggcgagcgcgaggacgtttacacggctgagccctcggcgctgactggaagcggcttcggaagaatcattccggcaattcagggcgcgaaggtaagcggtctcggctccggcgagttcactcttgacgtcaataccgacgagataccgggctttgacggcgcggacgatctcgagctcatcttcgaggcgtcgacgcgcacgatgatgtcgcacgactacccggataagtttgccgcgaaccgcgtcgatctcaactatatgctcggctaccgctgtgaccccggcgctaaccgcaactccttccagcagaccgacgagaacaaggcccccggaaagctcgcgatctcctgcgacggagaaaagttcgctgagatcgtacttcctgactgcccggcggattcgcgcggctcgctgtcgcatcactatcagccggcagtgagacagctcgacgaggcgggaagctatggaacgctcgtctctgtgaagatcccgtcgaggattctcctgaagatagcggacaagccgtcgttcacactcaccttccgcatggaggacgacgccggactctcggtattcggacgcaggagcggacgctacggcatcggcatcattctgaaagctgaataaacctggtagaaatcaagacctccgcgccccggcgcggaggtcttttcacgctttacggaataatttcccgtgtaaataaaaaatttaacgtaaatttattatgaggctatggacattcgcgcgaaaaggtgctataataagatactatggaatattattgcgtgtcgtcgggaaaggcggtgatgatcatgaacggcaatgggaatactgaaaacacagagagagatggtgagggcggaaataagactttccgcctgccgacggtcattgtcttcatggtcatcggacttgccgcgggcatcatttcggcgcttgatccgataggagccggaggcgctccgttttcggtgatcggggcggcaatgatctgttctctcgcgcttgcctccggggaaaagcgcgagagggcggcgctcgtcttctcgtgcggagcggcggcgtttcttgtgtcgcttatagtcctcgcggcgggcggcagggagttcgtgtccgctatggcgtcggcgcttttcgctcttcttccgaccgccttggcgctcccgatatatctgacggtcagaggaaagagcggccgcgcggtgtcgatcggcgccgccgccgttgcctcgacgcttctgctcatagttgtcttttctctgaggatatacgctctgcgcggcgcttttgatattcagacgataaaaaacgtcatcgacgagtgctttgagccgttcagaaaaacgctgtcggaactcagcttcacgacggtcggcggcggacaggcgatattctctgagagcgatatcgaaaagatgatatacagtgtggaggtgctccttccaggtactctcgcggcgatgatgatcgtcatgtcgtatctcacgacggtcggtatgcgccttatcgcgaaaacgttcgatgtcgatcttggtctgccggtcacgcactgccttgtcgtgcggcgtctgccggtcatgtccggggaaaagacggggaatgctcctcagaatgagcgtccggaagacgcggatgacgacagaaacgaaaaaaagtccgggattcccgagatcggggtcaggaccgagatatcctaccgcaccgtcagatggcggatagagctcgacagcgtgtctgctgtgattttcattgtcgcgtatttcttcgcggtgctgttcgggtcttcagacggggagacgacgcttccgctcacggcggcggctcagaatctcattgtcattctgactccgggatttgtctacgccgggatacgcgaggtgttcagaccttcatcgctcggcgctaaagggtgtttgttcggggcgcttgcgcttgtgctcacctttgtgaatccgatgtcggtcgcgctgctgttctcagtggtcggcgtgacgacggtgctccgcgagaaccacacgagaaaaatgatcaggaataacaacagaaaggactgagtccggattgaacaacaagcatggcaagaaagtctataagatatcctggcggctcgtgaccgccgtggcggtcgcggtgttcttctttatactctacgcggttataacatctgtctcgtctctcgatccttttgtgaccggggcggtcatgacggcgtgccttgttctcgctgagttcttcgcgtcgaggctttacggattcttcagcttccgcgtggcgggaccggacgacgagaagctctcgccggtgctcgggagcatcactctcgatttcatactgaagctgtatatgcctgtcgtcatctgcgacgagtccggacggataatatggtacaacagcgcgtttactaagatagcgaatccgcgcgaggtgctgtacgcgaaatatatcgacagcgtctgcgacgtgacgatcgataagatactcgccgacacgatgtcgatccccgagagcctcggcgatcaggacgcgtccgataacgaggacggtgtgacggctctggcttatgaccgcgtcttccgtataaaaggctacaatataacctcacagggcaagaagtatataatcaccgtctggaacgagcgcacagaactccagaggctcgcggcgcgtctcgcggatgaggagacgatcatcgcttatgtgatgatagacaacctcgacgagctgatgcagttcgtgcaggaaaagtaccgcgcggcgtccgcggaggttgaggcgatactcaagcagtgggcggattctgtcggcggaatactcaaggagtacgagagggataagttcattttcctttttgaagcgaggtatctcgatgaattcatcgagagaaagttcgatattctcgaccgcatccgcgaggtgcgtatcggcgagggaagtatgccggtgacagtgtctatcggaatatcgcgggtccgcggaactctcgcggacaaggatcatgacgcgcacgcgtcgctcgatctcgctcttcagcgcggcggcgatcaggttgtcgtcaagaacgcgcataacacagagttctatggcggtcgtacaaaaaccgttcagaagcgcacgaaggtcagggcgagggttatcgcgagcgagctgactctgcatatggcgaaggcgcgcaatgtgctcattatggggcaccggaacccggattacgattcgataggagcctgtgtcggcgtcgcgagactcgcgatgttctgcggcgttaagtgcaatatcgtcgtcaaccgcggggacacgaatatacggagcgcgattcagcgggtggagactctgccggagtacgcggatatgtttgtcgacaatttcgtcggacaggatatgattcatccggatactctgcttgtcattgttgacgtcaataatcctgcgcagttcgcggcgccggatatcgcggcgaatgtcgatactatcgtgatcattgaccaccaccgcaagaccggggattataagcgtcagccggctataacttatattgagccgtcggcgtcttcggcctgtgagcttaccgctgagatacttgagcaggcgctgcctatgggcgggctgcatcgtgaggaggcggatgtgctttacgctggaatgctgcttgatacgaagcagttttcgcggaatactggggtgcgtactttcagtgcggcgctttatctgcgctcggagggggcgagcccggcggaggtgcagtatttctttaagtcggatcttgacgatttcatgcgcgaggcgaagttctcgatgaatgttgtgacttatcgtcagatattcgcgatatccatgagcgacggggacggaactccgcaggacaggatcgcggcggcgaaggcggcggacaagctgcttggagtgagcggcgttatggcgtcgtttgcgctggtccatatagacgacagtgttcatatatcagcgagatcggcgggaaatgtcaatgttcagctgatacttgagaagatgggcggcggcggctactacgaggcggctggcgcactgcttaagaatg

SEQ ID NO: 2733 - DNA, 6398 bp, Unknown
  16S sequences of unknown bacteria
gaaaggcgaggtaagagctcaccggagctcgggagaccgagctgccatgtaaaccctatccggagcaacatcgacaggaactatacgcttgtccggcgtgttccgaaggatggcttgagcggcgggagcaatcccccgtcgagatagatgactgctttcaacagaactcggcttacaggtccggtcggttttttaaaaacagcgccgatatgcggcgttatgaaaacacagtgcttttgcattgtgttttttcatttttaaggaatattttcgcgtgctttgatatattattccgaatgggaataacagagtcgaaaaattcaaaaaatcggtaaaaaactggaaaaataagtaatttcccattgacaaaaaagtcgggggaggggttataatgtatgcacaaattgtaaacggattttcttgtttgtaaaattatgagaggagaaattttatgaacagcaaaaacacaaaaagagcgcttttgccaagcgttctcgccatgcttgtttgcgtggctttgcttatcggcaccaccttcgcatggttcaccgacacggcctccaccgccgtaaacaaaatccggtcgggcacccttgacgtggttctcgaaatgaaaaacggcgagggcaattgggtttccgccgagggcgagaccctgacattcaaaaccgccgacaacagagcggccgacaaaatcctttgggagccgggctgcacctatgagctgcccgaactcagaatcagaaataacggaaacctcgcccttaaatataaggtgaacatcaccggcatcaagggctcggccaagcttaacgaggtcattgaatggacaatcggcgacgttgctctcggaaccgaacagcaccttgcggtgggcggtgaaaatgagttcaccgtaaagggacatatgcttgaatcggcgggcaacgattatatgaacctcaccattgacggtatcgggatcaccgtcgttgcaactcaggacacggtggaaagcgacagcttcggcaaaacctatgacgccgacgcggtttatcccatagacagcgccgactccctcaagaaatctcttgacgaggtcaatgcgtctgaaaccgttgacgacgccgttttcaccatgggcggaaattttgaatattccgacgaaacctttgaggtcgctcccggcaaaaacgtcaccatcgaccttgcgggcaaaaatctcacactcaccaacaagcttaccgacgcctttgccgtcaccgacggcagtctcacccttgcaaactccggaaacggcggaaagttcgttttcaactgcaacgcaagaaacagcgacggaattttcgtttcaaacaccgaggaaggcaaaacaacgaccgtcaacatcgagagtgacgttgaatttaacgttgacccctcggcaaactccggaattcacgcctatgcccccgttggcaaggccgttataaacatgaaaaatgcaagcgttaaggtttcggcaagcgcccaaatcacgggagtcgttgccgatcagaattccgagcttaacgttgaggattcggtgtttgacgtaaaggccgattttgacagctacagcgacggaaacgacgttgtgggaattctcctttggggacagaacggcaaacaggaaaatatttctgtcaatgtaaagggcaacagcgtcataaaggtgggcggaaagaacgcctttgcacagggaattcagcttggaatgaaaaacggttattccgaaaaccttctcgtcacggtggacggcggcaaattcattctcgaccccaccgaaaacggaaagggctatgcctttaccacctataaggacatttacggaaagtttgtcatgaacggcggagaggtcagcggaaatgtcaccgaattggctcttgcctatatcggaaatgtcgatttgaccgtcaacggcggaaactttgccgtcgacccgagcgcatatctcgccgagggccacaccgcaaccaaaaacggcagcctttggacggtaaagtaaatttatcctttgaaaattgtttttaaagcaatcgctttaaaataaacgcaaaaaaacaaaacgcaaaacccgccgaagtctttaaggctttcggcgggttttgcattatagggaggagacggccgggaaaatcggccggtgagtttttctcagaatttttcggcaaaggcgcggagctcgtcggccgacatacggttgacaagcttgccttcaacaagggtcgcacccttaaaggagggagcaagctcggcgttggtgttgcccattccgctgccgcccgaggtggcgaagggcacgatttttttgcccgaaaaatcatagctttcgccaaaggtgttgattatggtcggcgctacataccaccaaatggggaagccaacgaaaaccgtgtcatactccgaaaggtcgagaggcgttttttccatttcggggcggaaggacttgtttttcatttcaaccgagctgcggcttttggaatttgtccaatcaaggtcggccttggaatagggaacggcgggccttatttcaaaaagatcggcgccgatttcctttgcaaggttttttgccgccttttcggtgactccgcttgccgaaaaatatgctacgagttttttaattttaaagactccttttaaaaaatattattgatttatccatgctttgagctgttcgtcggttgcttcgtttgcgcggatgccgtccttgacgtcggatttggggcaagcgttttttataaaatcggccgccttttcaacaccgctgccgcccgaggtgcagaagggaaaaacctccttgcccgcaaggttgcaggaagcgataaaggtgtttatgattttgggattggttccccaccaaatgggaaatccgagatagactcggtcatattccgaaaggtcgggcaaatatccggcaatttcgggacgcgcgtcggggtcgttttgttcgacgtttgcgcggcagtcggagttgttatagttaaggtcgtcggaggtgtatggctcggccggctcaatcttgtaaatgtcggaggatgaaagctcggcgatttttttggcggcctgctcggtggttccggtgcaggagaaatatatcactatcgagcttgtcttttgcgccttggaagtctcttcggtttgctgctgccgcgagcaggagcaaagaaccgacaaaagcgacagggcgagaatgacggataaaattttcttcatataataatctcctttccgagcttattatacaccaaaggcgggaaatgcccaatacctataagtaatcttcaggtatgcctttttggaattatgcgaaaaagttggcgggaacggtgaagtcataatccttgctttgcgccgctccgagggcggcacaggccaccgacgccaccgtggcggtgcggaattcgggatttttatattctcccgcgttaagcccatctcccgcggcaatgtaagaattgagcatttcgaagtcgtcgtttcctccgtgaccgtgaccgacgccgccgtggtcggtgacgatgagaatgagtgtgtcatcaagtcctccggtcttttcggccgcctcgaaaattcttctgcagcgctcgtccataagctttatggtgtcaaggtgctcggccgagccgtagccgccgtgatgacccgcctcgtcggctccgtcaaaggcgatgaaggtgaagagcggacggctgttttcaagggttttaacgattttatcgcaaagaggggcgtcgtcgtcgcggattttttccacgccgatgttgttttcaatcgcgcccgagtttatgggcagccagttgacgaaggaacaaagctttgcaaagggatatttatcccgcagaaatttgaacaccgacggataatcgcttttgtcgggggcgggaatgtcggtcagcttttggttgtcatagccgtgcttttcgggacccacccctttgagcatggcgcaccagttttcggccgaaatggagggaaaaaccgaaagggctcggtcggtgaaaagagccttgccgctgcttctcagctcgtcaaaaaacggggtgtcggtttttcggtcgtaatttcccatgccgtctatgccgatgactatcatgcggttgtattttctttttatatcgccgtcgcggaccgacagaagatttgccgcgtcgtcaagatttatccacagctcgtcgagggtttcgtcggtcatgctttcggcttttgtgattaccgacatggcgcggttgtaggcgtttgtgaagtttttggccgactgttcgtcaaatccgcacagccccatatttatgatttcctcgccccttgaaagggcggccttgtatttttcaagagatgtcatagctttttgctccttttttgacgggaaagcccccgatattgttgccacaacattttaccacaaaatcaaacattgtgcaacaaaaaaggcgaaagtcaaaaactttcgccgaaaaaattaaaaggtttttacaagctccttgagataggccttgaaatcttcgccgatttcgggatgatttaaggcgacctcgcagccggcctgcattatgccgagcttgttgcccatgtcatagcgcttgccggtgaattccacggcaatcatggatttctcccttgcggtggttttcatggcgtcggttagctgaagctctccgcccgcgccgaggggtgtgcgctcgagaacgtcgaaaatttccggctcgagaacgcagcggccgagaatggaataaagagaaagaaccttgtcaggtgttggcttttcaaccatgtcggtcaccttgaaaattctgtcctcgatggggtcgaccttaagagaactgtattttccgatggcctcgggagaaaccttgttgactcccacgacgcccttgccgtatttgtcatatgcgcggcagagctgagcaatggcggggtcctcgccgataatgacgtcgtcgccgtagagcacggcaaaggggtcgttaccgataaaggaacgggcctgaagcacggcgtgaccgagaccttttgtgaccttttggcggaggaagaagatgtttgccatggaggcgatgtcgccgagttcctttaacatctcctcgcggccgcccttggctttgagggctgcctcaagttcgacggcgtggtcgaagtgatcctcgattatgcccttgccgcggttggtgattatgagaatgtcggtgattcccgctctgacagcctcttccacaatatactgaatggcgggcttgtcaacaatgttaagcatttccttggggcaggccttggaggcgggaagaacgcgggttccgagccccgccgcgggtataacagctttttttaccattttcaaaactcctctatataagcgttgcaagaaggtcggttaaaaattgcaggccgcacatcagcgccaccggagcaaaaatattaacaccgccctttttgcggattacgagtggaaaattctccgcgtcggcagatcttgcgtcctttaccgccgaaaggcatttccgtttgtagatatagtctccgaaaagcccgaagaaaacgcgggaaataaagagcacggccatgccgaccatcgcgagaatcaaaaactttctcggggcggcggctgccagcttttcgccgatttcatagtaggaaaatgtcctcgccgaggaggaaatttttactatggtgtcgtttaaaagggaaaccatgagattgcatataaggcctatggtggcggcaatggttcccgcgccgaagcatttgcggtagaagaaccaatagggtccgaggaaaaaggccgcccagttccagcttgccgttcccttgccggattttttgagggaggcaaagcggggaatatatctttgggtgtttaccgcaacggccgcggcgagggtctcggcgctttcgccgtcgatgtcggccttggggtcgacgccgccgtaggggtcaaagcggttgtagccgttaaaggtgccctgaccgaaggggtcgaatttttgggcgcctccgccgtaaggcgaaccgtagacgggaggaaacacatatccgcattcgggacaggtgttgttgaccggggtgacgacgtttccgcacctcgggcaaattcttccgaggttcactccgccgtttcgataatttccgtaggggttctgcccatagggattttgattgtacggattctgattataggggttttggccgtagggggcgccgtagggattttgcccgcctgccgaaaagggagggaagccctgctccggctcgtccggctgtttcgggggttcggcgtttcggggatctcgccactggctttcggtgccgtgaaactgctcgtaagcgcagcggccggtttgattgtaacaggagcggtggtggggagctccgcacacggggcagaccacaatgtcgtcgtcatcctt

SEQ ID NO: 2734 - DNA, 6852 bp, Unknown
  16S sequences of unknown bacteria
gcgcctgcgggcgcaaactctgcgaggcttttttgacagtctgaaaacccgctcacccaagctgggtgagcgggttttgtaactgtcattcacagtgcaagcggttccgagcggatgagccagcaggcgccttggcggagggtaatcgcagcactggcggcgatgacctcattggagacagtcaggctgtcgccgcggcgggccatagcattttccaaagggtatttggccccggtgattgtcagcccctccagagtcttcgtgatgggcaggagagaaaaataccggtagccgcctcgggggacctggcgggtcccggcggagaaataggtgatctcattccacgggtccaggatcacagctcggacgccgcgctttgcaagggtctccagcagctgtagattggccaggtgatggtcctgccgcccgccggtgcaggccgtcaggatcaaatttgacgcaccttggtcgatggccgcttcgcaggcggcctgcaggtctgtcaggtccttttccgccgggagcaggatggcgggcaggccctgggcgctgccgccggagtcgccgtcgccgatgtaaaaatccggagcaaagcccgccagggcagcgcagcggatgccgccgtcggcgcagaggacggtcaaattctgcccctgcagcggggcaaggaagcgccagtccggataggcgacggagccaaaaatcagcgcagttttgtctcccataggcggatctcctttgctttgtcatagaggcgggcgtagctgtcgtaccggctgggactgatggccccggcctcgaccgccgcgcggacggcacagccgggctctgcccggtgagcgcagtcgtggaattggcatttgcccaggtacggggcaaaatccgggaaggcgtattgcagattctcctttaagatcaagtccatctgatccgtatcaaaggaggaaaaaccgggggtatcggcgacgtaggtcccgccgcccagagaaaatagctccacatgccgcgtcgtatgccgaccgcggcccagcttctccgagacctccccgacagccagccccagccccggggccaggcagttgagcaggctgctcttgccgacgccggagttgccggtgaaggcgacggtcttgccccggaggaaggaggcaacctccgctatcccctgccccgtcttagcgctgacctgccaggtgggaaagcccgcccggcggtaaatatccgccagatgcgcgccggggtcaaggtcgcatttgttgatgcagatcgccacggggacgttctggttccccgcgatggcggcgacccggtccagcaggaacgggtccgtcaccgggttcacgttggcggccaggagcacgaggcagtcgatattcgcgacggcaggacgcacaaagctgttgcgccggggcgccaggcgttcgaccatgccggtcttccccgtgacggagatctccgccacgtcgccgaccaggggcgtacagtgctccttgcggaagtgcccccgggccttgcattcgaccaggcccgccggggtgctgacggtgtaaaagccgctcagggcgcggataatccttccggtttgccaatcagccatcaaaattcaccgtaatatctgtatacatggtgttatcaacatagacatagtagacgacggtgccgctgccctggagatagacgctggcagtgttcgtcccgggctgcacctgcaggccggtgacgacggtctcgccggtcgtcgagttgacgacggagacgttcagtgtcgtcgtatggtcctcaaaggtcagggtcacgggcttgctgaccgtcgagggcttcgggtcgggcgtcggcgtcggttctgggtctggttcaggcgtttccgccgggccgagggagatcgtcagggtgatcttcgtgccctcgtccactttttccccggcgtcgacgctctgaccgatgaccttcccggcctcggcatcgtcgttcttccgctcgatggaataatccagcttggcgtcattcagcgccgcgatggccaccttttctgtcataccgatgaggttcgggaccttgacgggcttctcctccgggcccttactgatgtagacggtgacggactggccgtcctccagggtcgcgccctcgtccgggtcggtccgggtgacgcggccttcttcaatatcatcggagtactcctcatcaaagaggatcgtcaggttgaggtccagtagcttcaaaagcttttcggcgttggatttaagctggcccttgagcttcggcatctcgtccgtcttggggccgaggctgacggtcagggcgatctcagtgccctccttgacctggtcgccgctctccggtgactggcgtatgaccttaccctcttcgatctcgtcgtcaaagacgctctctttcagcgtgatcttaaaatccgggtatgccgccgggtcgatttcatcatagaccgcgccgaaaaaattcggcacctcaaccatcttggcactgccgccagagcaggaggagacaacaagaattagaaccaacgcgatcagcaccaccgccgcgatgcctaggccaatggccgtattgcggcgctttttccgctcagcagcctcctcctgctgctggcggcggcgctcttcggccttgcgggcctgctgctggcggctaggtggcgtctgggggcggcgggcaggctggccggcgtaggcctctgccgtcgtccgcgggcgcgggttcaccggccgcgcgtgggagacctgatccagcccgaagctgaagaccatctgggggttcttccggaattcctccagatcgtagagcatcgccgtggccgattcatagcgctggtccagatccgcgcacatggcgtgcatcgtaatctgctccaggccccgggggatggccgggttgatggaggtcggcatcggcgcggcggcgttgatatgctggatggccacggagacgggggtctcgccgtcatagggcgggcggcccgtcagcatttcgtacatgacgacgcccagggagtagatatccgtccggttatcgacccggccgcccttggcctgctccggggagatatagtggaccgagcctagggcctcccgggtcagcgtgctctgggaggagacgacccgggcgatgccgaagtccgtcaccttgacacttccatttttcaggaccatgatattatggggcttgatatcccggtgaataatgccgcggctatgggcgtgctccaaggccttggcgatctgcatggagaagtgcagcgtctcccgccaattgaggacacccttcttctccatatactgccgcagcgtgatgccgtcgatcagctccatgacaatgtagtcgatgtcgccggaggaggagacgtcgtacacgctgacgatattcggatgcgagagcatcgcgacggactgggactccgcctggaagcggcggcggaattcctcgtccttggaaaattcgtcctttaatattttgatcgccaccaggcggttcaagcgatgacattttgctttgtagacaacggccatgccgccggtcccaatgacctcgagaatctcatagcggttgtccagcagcctgcctatgtatttatccataagaagctcctttcgagtaaatacccttccaccctgttgccggccgggggacgccggaatggtttttgcacggcggtgcgctagatcagcatcaaaacagcggtgatgttgtccggcgcgccccggtctttggcgatttcgatgaggtgctggcagcattgctccttgtgcaccgcgtggacgacttcaaacaatagctcctggtccgtcagcaggttggaaagcccatcggagcagagcaggatggcgtcgcccggggcgacacggagggtgaagacgtcgcagctgacgcggggttccgtccccacggcgcgggtgatgaggttcttgccgggataggtcctggcctcttcctcggtgatctccccccgccggaccatgagctggacaacggagtggtcctccgtaatccgggtcacgccctgctcccggaggagatacgcccggctgtcgccgacgttgacggcgatggccaggtctgttttgacaaaggcggcgacgagggtcgtccccatgccggaaaagtcctcgctgagctgggcgtgctcatagacggcccggttggcaagctccacggcgtcgacgagcatccgacgcagggcatcgtcgtccaaggatgcgttccaggtgcgcttgacctcccggatgaagacatccgttgctaggcggctggcgacattgccggattttgcgccgcccatcccgtcgcagacgacggccagggcgtgctccggcgagaagcggacaatggtgaaatagtcctggttctgggcgcggacattgccgcgatcggtcagtccccattggttcattgcggtactcctttccccagtttttcgtgcttgcgccgcagctgaccgcaactggcgtcgatatccccgcccagggtgcggcggaccgtcgccgggatcccggcgtgctccagctgcgcctggaaggccgcaacagcagcacgggtgctgggctggagcgggctctcctcgacatggttcagggggatgagattgacatgggcggccaggccgtggagcaggcgaatcagatgcgccgccatctccggcgtgtcattcacgccgcggatcatggcgtattcaaagctgatgcggcggcccgtttttgcgtaatagtcccggcaggcagccagcagcgcggcgatgggataccggcggttgaccggcatgatcgtgctgcggacctcgtccagcggcgcgtgcagggagacggaaagcgtcagctgcaggttctcctcggccagacgccggatctccggcaccaggccgcaggttgaaaggctgatatgccgcatcccgatgttcagcccgtcggggtcgttgaccaggtgcagaaattgcagcacattctcataattattcagcggctccccgatgcccatcaggacgatattagaaatgggaacgccggaatccagctgggtaaagagcacctggtccagcatctccgccggctctaagcggcggacgaggccgccgagggtcgaggcacagaaggcgcagcccatggggcagccgacctccgtggagatgcagacggtattgccgtgatgatagcgcatcaggacggtctcgacacagttgccgtctcgcaggcgccagaggtatttgaccgtcccatcccgggctgagacctgccgccgctcgacggcagggacggtcaggtcatactgcccggccagctgcgcccgcagggccttgggcagatccgtcatctcgtcgaagctgcggacgccccggtgcagccaggtgaagacctgcttggcccggaagcccggctgccccatggcctgcagcgcctgcttcagctgcggctgggtgagtgatttgatcgtttctttcacagtgctctcctgagtttacagatataaaagccatcggtcccgtgcttatggggcagcagcgtgaccatcccgggcgcgtcctcggcgatgccagcgggcagcgccaggggctcagggaaaaattccgggtgatccgccaaaaacgccgccatcaccccggcattctcccgggggaggatcgtacacgtgctgtagagcagcacgccgccggggcggacgtagggggcctgattttccaagatcgcccgctgcagcaggggcaggcgcaccgtctgcgccaggtccttatagcggatatccggctttttgcggatgacgcccaggccggagcagggcacatcgcacaggacggcgtccatctgcccaatccaatccggctggggcgcgcgggcgtccagcgcccgggcggagatggcggaaaggcccatccgggccgcaccctgggtgatgcggtttgcttttttctcgtgaatatcgcagcttgtgatgctgccggtattttccatcgcgatggcggcggcgaagctcttaccgccgggggcggcgcagcagtctaaaacgcgcatcccgggccggagcccggcgcacaggacggcaagctttgccgccgggtcctgcatgtagaagaggcccgcctggtaagacgccagggcggcaagatcgcctgcgccggtgaccgtcaggcagtccggcagccacgggtgcgcctggcaggcgatgccggcttcctccagctgcgcctgcagggcctgcgccgtcgtgcggacggtgttgcattgcagatataaaggcgccggggtattgtcgcaggcaagtagggcttcaagctctgcgtcactgttacatgcctcccgcagcagcgcgatcaggggggccgggtgggaatagcggatggaaaggtcctccggctccggcaacggcagggcccgcagcagattgcgcagcacgccgttgaccaggcctgctgcgccggggtttgcatagcgcttggcctgcttgacggcttcattgaccgccgcggagggcggaattttatccagcagtaaaagctggcaggcggccagacgcaggatctctaagatcaccggctgcagccggtcgagctttgtgaaccgggcaaggtgccaatccagcagcagctcattttgcaggacgctgtagcacaggcggctggccagggcggcgtcccgccggtcgagcccggcccggggcagcaggctttggagcatgctgtccgaccacgcgccctgccggtggcaggcgatgagggcctgcagggcaacggcgcgggcgtccatcttcggggccgccgtcacgcgtcgctcccggtctggggtgggagggtgatggggtggccccggaaatagtccggcgcggccatccgcttgccgccctcggcct

SEQ ID NO: 2735 - DNA, 29246 bp, Unknown
  16S sequences of unknown bacteria
tatatccgtaactctcatagaaatactccgcagacgagcttgtttcaggcttcaatccctctttcgtcacccgtcctaattcgtcgtatttcaacgtcagcgtatctaccgcgcttgttccctctgctctgtcatacattcggatttccttgattcggttatccggtatcacctctccctctccgttcttttcatattcgtattggtaagagtgattcaggctgagtcccgacaatgtatatttctcttttattacacgcccgccttcgtccagttcacttctgtattccactcctccctctgacgacgataacgtactataatcaaattccccgttctctttataattatatcggtggtaataccatttttttgcgtccgtcggcgttccaagatctatcgccggcatcttatctatcgtttgatctatctcctcaagctcttccccgtgttcgtccgttttatagtacacgcgatagctttccacttcttctccgtataccgcctcgccgttcaacgttcccgtctgcgtctttatcttccggcagatcaacccgcctttcttattgtagatctccttgattgccgttccgttccccaagaccacctcttcataatcatacgtgctttcgtccgtcgagctatatgtgctgtccttatagctcttcaccgctaccacttcttctccgttcacatacgtcttgatggcgttcccgaatccgtcgtacgcgtattcgtaattcaccccgttcgctcccgtatcgatactcgtcagatagccgaggttgtacgagtaattcactcccaccgtctgcgtccgcaccgagcccccaggcgtgctccttaccgacactgacgtggtgatccccagaagatacgtattcgtcttatcgtagctgtactgcaccgtttgtccgttcggcaattttaccgaacttaaattttcgctcgacgaattataattcgtcgtcgtatacagctcgcttccgtcttcgtcatatcctctctcgtcatacgtattcctgatatactcgtcgtttgtatagctttgtctatgaatgagcgttttattgacgccgttcgcataatgcgttttttctttcgtcacgttattatatttactcgcgttcgagtatgtatattcttttacaacgcctctaaagtccgtttctttgataagccgtccgctagcgtcgtattcgctttccatcgcgaaactcgctttgtcatcggagataaactccgtcctttccacattgtcgtcgcgcctcttatagagctttatcgttcccgatttattgacgatttccgtgattcccgacgccgcgtattcgatgtcgaacagactgtatttcttttccgactctccttcttttttaaacgtcagcatcgttcttttaggctctgcgcctccgtcgtgcacttccccgtctatgattatcaaatccgggttttgctgcatggcaagaatgtccagatagtttttctttctgtccttcaccgatacgctttcatatttatggaaaatatgatcgttatctttatactctattcccaccagttcgctgatatcatacgttttcatatcccgattggtataaaatctcggcagtcctttcgtgtataccgcgtttccctttgtcaaagaaattctgtcgaaatatgccgctccgttattataactgtaatcgatatacacctctatccgctgcaatttggaagggtcgtttaccacaatgcccttcaccgcgaactgccaatccgtcttgaacgggtcgaaatttacttcggtcgtttcggaagtcccatccgtataaattaatttcgcaagcagactaaacgtagaatatttatcttgggtcgtgccgttcgaggtattcgccccgctagtcggcagagaatccgccttcgcatagccgctgagcagcagtccctcgcctttgcttaatttcaactgcgaggcgtataccgtctgacacagctgacgcttctgcgtataggaactttggattcttaaagaataattgccgtccaccgacacgccgtaatagcgattggcgctcgtttcgtctacgggtacccattccaggcagtcggaaagtccttcgaaacttccgtttttgagaaaattctttgcgagggccaaaggccgcacttcataggtatcgaacaaattgaaatttttatatttggaaacgtccgtcacgtatttcttatttgccgaagcgttcagctcgtttttggtttgatagatacattcgcaaaatccggaatcgctccattgataattgtccgcatacccgttttccgtgatcaccttcgtcgtgttattttcgtattttataacgatttccttgccctctttctcgtaaaccacgcctttatacgtcgaataggaagaaacgccgccgtcgcctgccgtatacgccgtgactcccgccgccgaaatttccttattggaagcgaaatctttaagggaagtcgcctttccgttcgtatagccgattttcaatctataccccgaacagtcgcgcacagacgtcagagaatagctatcggcgccttccccgtaatgaaactccgattcgctgccgtcgggatagccgattttcgtcaagcgaccgaaagaatcataggtataagaaaatacctttccgtcggaaaacgtgattttattaagacagcaaagagaattgtacgcaaacgtcgcccaatgtcccgtcgaatcgctgactttactgatttttccgtcgcacgcgcctttttcgagaagaatatagtccccgttgcgatcgattattttataaagttcgttatttctgaaatagagagtggtttctttgtcgtccttgattctcaattccccgtccgtttcaaagcagcgcagctttttcccctgttcgtcgagatactcggtggcgtaaactacgtccgtgacgtttcccgctccgtcgtataccgccttccattttttgctttccgaaaagacgatttcgtccccgttttgatcgatatacaaaaagcctatcgagtccgtatagccgttcgcagcggtattgattttaaataagaattgctgtaaatttaatttccagcccctgcccactcctaagtcgggcgtataattatttctgctggtttttatataggaggcggctttgtcgagaatattatagacgtgggaaacgctcaaagaaaggcgttcgttgtcctcaaagcccgcgtcttcgtggaccaatctgtttcgtcccgtccacagatccaccatatgcgttccggcgcgttttatgttattcacctgatattcgtcgctgaccctacatctgttttccacatagtttattgtaagttgcgggatttcggaatcgtcttctgctgtcttttcattatgaaagctaaaaaagtcacagtattgctgttcaaaagaatccttcatcattaaaccgtaatttggattgttttcccattctttcgccaatttcgtaatatctattttcaaggtattatactttttggtggaatatcttacacggctatatattttgttgtcaaaactgggacaattatcccatttaaacgtcgtattttcattccaatttgaagtaactttatgtatatcgaaatatcccggattatttacatttccatcaaaaccaatttggtaaagggataaagtcgcctccaaaatttttcgtccctcaaaattaggcaatttaaattttaaataagacctgaacattccataaccatcatctccaacacaattatatccgctgtcgtctattatatattctcccttattattcttttggttcgttacttttctcgacaaacaaaagtttgaatcccacttctgctttgtttcgatcacggggtcgatcgtcacgggaaaagctcttccttcggcgttgatccaattctcgtccgcaatcacgctgaaaataaatttatttccgctcagcctttccaattcgtacgtcacttcgccgctctttttcccgtcggcgtcgaacatatagggcatcggaatggtgaaaatagtttctttcccaagagcgccgctctcttcgtctatcttttggataaacagttccaaacgctgtccgtcctccgacaattccacgttgagatttttcagtttcagttcgaatttatattcgtaagaatcctgacgttctctgacgataatgttttccttgatcctcttcggagagagaatatattgcagatccgtccccggcgcgatatcgttatatcgtatctcgtcggagagcttcgtttccgcgctcctctgcttcccgttcggcaaaaacgcgcaggagtcgttcaaggcgtcgcaaagaagccgcttatcccgtttgccgagcagcttccattccaccttatatccgtctttttccagcgtaaacagctttccgttcgtccgtttgccgaattttacccgaacgtcgctctgcctgttttcatagccgtcgaaatcgtcttctttttcaaggcacgccggacaatcgcaaagagtattgtctatggcgagatattttccctccgtttcgtcgtaatagtgcacgggctcggtgaaaatctgcgcccgatagctgccgtcgctcattctgaaatgctttacgttctcctcgcgcttcgcctcgtcctcaaagagcacgataggcgcgtctttatttttctttaaagctacttcgtcgtatacctgcccctccgattcttcaagaatttcctcggaagcaagttcttcgtttacgttttcttccatgtttttaaatttaatggttcccataatttttttcctttttgattaattgttttttaatttgatttccagtatctgcggcttatcataattgtcgcccgtagataccgcgctgacgcctttttcctgcccgctctttatgacgaacccggaatttcgcggctcatgcagtcttaaaatatcccgtaggatctcgctcacatccatcctttcatagcggcggctgcgcctcgccgtatacaacaagcgggaaaaagcggtcttcgtgttccaagtcgacgcgaaactgcaccaaggcgcgtccattttatagccgtccagcctgcattctcccccccatttcggcaaatacaacgtcgcttctttgacccgataaaaattcagatcggcgaaaagcgttgtgtcgaaacgcgaatacagccattgttccccgtattcttcggtatttcccaaaaatgcggcgccgccgaacgcattattttcgtcgggaagtttcgacgctaccgtggtatcgagcaccagtttcggcgcgtacagagcgatctcgaaaagaatttctgtcgccgcggcgctttccaccgtcatttcaaaggctttttctcccctcttcaccccgtttacccgcagcggacaaacgccgccgcccgttttccctattatcccgttcacgctcaaaaatggagtaaactcctcccgcatcagcgcgaaacaccccgcgctttcccgaacggttctttccgaactcgtttccagcgaaaatttcgtcttgcttttaccgcagacgaccgcgattccgttaaacgtcggctctatcgatacgtcgtccgcaaacgcaatctcggcgctgccgtaatcgttgcaaaggatgacgttttcctctgtggcggcaatttcggcattgattccctgaaaacgatagcgcccgttttctttccgccatttcggcaacaggagcttcccttctttcgaatatacgggcacgctgcaataatacgccgtgatcccgtcctcttcctttacgagcacccgatagggattcgtgtttctcttttctatttttaaattttcctcaccgcgaatgcggcggatctcccttaaaatgtccatattcttctcacgcttatcggccgtcttccccttccaaagtcaaagcgacgatgtgcatcaacatattgtcgggaaaaacaatctcccgcacccgctcttgtttttcgaggctgcaaacgcagtgatgaaaatagaaagggtgcttcaccgcgcccgaggagagaaaaattttcgcggtacggacggcgctgtactgaaacataaaatgcgtgaaaatatccgcatcccagccatgcgaccaatcgggcacggcaacgcgcaccgtttcttcgccgccgtccccgcagacgacggtgaaattttcgcaggtatctccccaatgcgaaaatccgataaaatgcagttttttcgcttccgcatccgcttttactctctgcctgtcgcacaagacgttgtcgaaatttgaatccgcgaatcgaaattccaccccgtcgatcgtttcctcgccccgcagagaaaaattcgcctgtaaaatgcagatattttccagtccgtactcctcctcggtcgggggcagggaagcgtacaccaatttgtgattgagccacggcgaaagatcgaccctttcaaatcttttcatgcgcacgcctcccacagacagtcgtagactttctcttccgtttcctttacggaatctatctttctcagaattccgtccctccgcgtgacggcgaaagaaaaattttcctgacgccacattttccacagcagggaaaggagattcgaatagccgcttatcagaaagtccagcagggcgctcttttctttgctctgcgaaaacgcccgcgtttcggaaagacaatagagggaggttctcatgctttgcagataatccgttatcttctccgatttttcttgcagttcttttaggtcggaaagaaacattcttttcagttcgccaagattcttttccgagctttttctcgacgaaagcagcctgttcaaatccatttgcgaccatagaccgagggcacctttttgaactttcgccttgcgtaaaacgcggcaggaaaaccacttttcgggatgacgcttccgatacatcccgtttgcatacaagagattatccagagaaattactttctcccgaaattcgtaacttcccctgtaagcgtgatccaccacgttcgcttcccgcgttttcagatcgtagccgtaacaaaggagaaagtgcagttcatgccgtatgccgaacatttcggggcggctttcgagataaaagcagtccaccccgacgatgaccggcattcccttatcgatccgcctcttcaacgctctcttagagatattgcgcgatttgcagcgatagcccgccgtcctttcaaactcccgcgcgccaagaatccccccttcgtctgccgaaaatccttcttcggcaaagaccattgcgtttaaaaggaagagttcccgatcgacgcctaaggcggacagtcccgcgattaactgatgataatagcagcttttcagccaaaatttgttgaacggttttacgccctctattttattttttatcatccgctttttcctccgccgcctttatgacgtccgccaccgtgttccaagctcccatatccaattcgtcgagttcgaattcgatttgaaattcctcctctatcgccaccaagacggcgacgaaggaaagactgtccaaactcaacgcctttaattcgctctcgggggaaacggcttcttccagggcacagcctttttgaatgatgcttatgattttttctttcatcgccgtatcttctttccgctggcagtcgtttccagcttctccaccttttttattctgttcggcacgagatacgggggcaggttgcggacgagatacgtccacagccattcaggcgggatgctgccctcgtatttaagacagatcatctctcccatatgttcctccctttcgccgtacaccacgcaatcgtgcacccccgcgcatttcttcgcctcgatctctatttcctgcggaaaaatattgacgcccgcgcggatgatcatgtcgtcctttctgccgtcgatatagtaatagccctcctcgtccgtatgcgccatgtcccccgtatacagccagccgcggcggatcttttctttcgtgcgcgcctcgtcgagatagtatcctttcatcacgcacggggatttcaacaacagttcccccttctcgatcttcattttcaccgccccgataggtttccccacgcttcccgcctttttcacgaactcttcggggagcagggcgctcgcgcgcggactgtgctcggtaaggccgtagacgttgtaaaacgccgtttgcggcaaagcctcggaaagctgacgcgcggcggcttccgtcagcctttcgccgctgactgcggcggtcttgacgggcagcggcttccccttgacgctcctgacgagcgccgcgtacagggtgggcgtcgcgcagaatacgtctatttccttttccgagagaaagttagccagcctcgcgggcataaacgactcctcgtaaaaatagatcgtcagtccgctgacgagtccgtacaaaagctcccccgtcagcaccgcgatatgcaccaaggggcgcgcgatacagatgctcttcatgccttccagacgaaaataggaggcaatgtattcgagattggcaacgatatttttgtccgtcagcaccacgcccttaggagtgcccgtcgttccgctcgtgaacatgacaaacgcggtgtcgtcgcttacctgtcccgcatcttttaccgtttcgcagatatagttatactgtttcaagccgtaatccaaagaaacgggaacgacggcggcgccccctgcaaggcattttaaaatcgcgagcgcctgttcctctctcgtccctcccttacaaacttgcagtcttttttctccccccgcattgttcccccacgagagcagttcgccgtaagtgattcccgaatccgcaaacgcgacgcgctccgaatacggcttgattttttctctcagatactcccaaagtttcataaatatttctccgtcaataaggtcaaatccttcaaagtcagcagcttatcgggctgcaagtcatcctcgtcgaaagaaaaggaatacgcctcttctatcgacgcgatgagaagcaccaaagacaaactatccagtccgttctctttcagcgttacggtttccgtcagctgagcgcccgtcgtttcccgcgccagatcgacgatcttcttttcgatctcttctctattcatttcatcgcctccgcaatctttttttcgtattccgttatttcctttaattcctctttgaacgcgtccgctcgtctttcccctttcagccgccgcagacggacgtaaaagtagagcttgtccaaaagcaagatctccgctttcaatagccccgcgattttttccgagccggaaaaatatttttccagccgttttctcgtcactcgcaggactcccaacgcgccttcgagtttttccgattcccgcggcggacaaacagaggaaaacgtctgagttcggatctttttttcgcagtcgctctccgtatccgcgcgcccgtttcgaaaagcgtacgtacaaacggcgttgcccgaaacttccttcaacctttcttccgtaaaccgcccttcggagaggggatattgattgagccagcaaagagagccgtccacgcagatataatgatcctcccgccaggctttgcgcttgtactccgcaaagaaggcttcgttcacgtgcatcaggcagagatcctcctccctttggtttttcagacattccgccaatttctcccgcgatccgggcacgcccatcggaaagacggaatagacgtgcgcggcgatccccgctttttccgcggtttcctgaatgcggggcaccccttcgtacgcctcgtactttgccccttgcgcaaagtcgtcaaacacctgccctatcggaacaaaggattctccgtacagtttggatacgtcgaaacgctttgccagccacgccaaaaaatagctttccacacacgacagagcgagcgcttccgtaatttcccgtttagtgatcatcctcttttctctccttcaaaaaacgcagagggtccaagctgcaaattcgcgtccgctcgtccgccgtccaaagcaagcgctttttcccctcataatcgatcacttcgggctgtctttccccgtattcctccgcggccgatttcagttcttcgtcttcaaaaatgcgccccgtttgcccgagcaccgtaccgatttctttctgtacgccgtacttgaaggcgagtttcttcaaatcgcccttgtcgaaggagtcctttttccatagatagtagatgtccgcaagtttataaagatcgagatcttttctccgctccgccataaagtacagacagctttccttgtactgatgcaaaatgaggtgcagaaaaaacatttcctcgttcgccacgtacatgggcaccttgcccgcgtattctttgcgcgtcgctatcatctccgaaagcagagagtccctctctcccggcacgtttccgagcgaaaaattgatgtccgcctctatgaaagggagttcgggattgcccgtcgtcttcaaaaagggcgccgtttctccgcggttcatgcggcgtttcagaatttccagacgcgggaaaggcttgatctttttctcccccggcgcatacctgccctgtataaatcccagctttttcaatgaattttccaccgcggtgataccgtcttgctcgacgagaatatcgatgtcgttggaaattctctctccgtcctcatagatagcgctctcctcttcggcaacgttgcacagcacgctgcctttcagcaaaatgtgctccgcgccgtccgccgccagcgctcgggaaatctccccgatcgccgcgcgcatcgactgcgtgcgccgaatttgcctctcgaacgtttccgaaaggaacttctctatttttgacggcagctctattcgactctttttcgcccggttgtaaaatagccccgcgatcttatggcagcagaggaagcctgtcgtttcataccaatcggtcaccgttttgggattttcccctttgagaacggacaccacgtagtgcagactgttttccgtcatttcgattcctcccgcaaaagctccctttctacgacggcaaaagccttttcgggctccccctcggtatcgagcacgacaaatccttcccctttcgccattcccagaaattcccccgcgactctcaaaagcagaggctcgtcgagatgacgatcgcattcgtcggggcggctctttatccgctctatcgccatcagggggttcgcgtaggccaaaaacgcgaggtcgggttttaaaaggtgttttgccgcttcgtaaaaccatttttcgtccctgtatccgcgcgccagcatatttgccagcgaagtgtagatgtatctgtcgcagatcaccgtcttgcccgcttttaaagcgggttcgatcacctcgaagccgtgctgcatcctgtccgacatcgttaaaagctgtacggcgcgatagttgatatcctcgtgcttgcagcaatacatcatcttttgaaagagtttggtctttctcgacaaatcggtaggctgtttcacgcacaggacgcttccgatgccgtttttctcttcgagatatttttccgtcagcgagatcatcgtcgtttttcccgcgccgtctgtgccttcaaagacgatcagttttcctttatacggattttttctcagtttcagcgttttcatctttttttcctctcaatacgattttttctttttccgcatcctctgcattttccggctgcggcaaagccggggacgcgagttcttttttctcttcttccgtcgtccctgccgtgggcgcctcgttttggggattttccccttccggctccttatcggcgaactctttgattttttcgagaagctttttgtttgcttcgatttccggctcggtgagcatcttctcctttgcgggaaacaatttttcccaaaaggcgtacagcgccaggctgaggctgctggacgatacccagagcgttacgaacggcttgtctatgcccgttttgccatagaccgcccgcaaatagacaaacgtcagcagcaacccgacgacaacgggcaaaaacactaaaaaccgcgtcgctttccttccgttttcccgctttttcgcccaggccttgatcggcatttttatcaagcccgtaaacaggttgatcgcaagcgcaagaatcgtcgcttccagtccgtactcggtgatcaactgtaaaattttctcctccattccttttctcctccccttttattcgtagatggaccgtatatttttctcgtccagcttctccgccaatcggacgttttctctgcccgcccgctccaccgtttcccgataggcgcgcacctcgttgttgcagacgatccccgcggaagcgtccgcaaatatgccgcagtcgggcgtgttgcggaggatattttccgcgatgacgtttccctgcacgttctcccccaccgcgtaaatcccgcacccgcttcgacattcttcgggcgtcatcaggatttccatgatatttccgtggatgacgcagtctttcgcgccgtgctctatcagacgcgcattgcggctggtggaggtgatgatatttcctccgatgctgctgttatccccgtagctccttacgcttctgccgcagatggtgtgcgtcgccagaattttattggaggagatgcgcgcatactcgcccctgttttccaatcccacgctcatgcccgcccattccccgacgatgttgttcgcgctgatgatagaatacagtccttcgtttatgaatccgaacgcgtgcgcctcttccgtatgtttgccgacattgtgcgtcccgttcgccttgacgttatttccgacaaagcgcccgaaacgcccgttggtatacacgcccaccgcgcgctgcctctcgccgtcgccgcggtttatcgcgtaaataaaggtgttctgcaacgagatgctgttggcgagattgttgtaaagaccgtacaccgcgcattccttgggatactcctcggcaccgcactccgccttgatatagcagtcgttcaccacgaggttgtccgcccgcgtttccatatgcgtgtcgagattgccgttgttgtagatccccgctatgccgagttgtttctccgcgtatatctctatgcggcaattttccactttcaaaccgtatgccgtattgtaaatcccgaaaaactgtcttttcgcagcggcgggattttgaatatgcacgcggatcgtcatatttctcatacatacgtttcgcgcggtgggctgaatgaaaaacaagctccaatcgctccccgtgctgtcctcgatttccgcatcgatctccgcgtcgctgccgtcgatcacgatgtccgaacggcaaatattgatcaggctgtttaaacacatctttcccaatagaaagcagttgctttttactcccctgatctccattctgcctgtaagtcggatctctttgccgttctccgtttcattgatgcgcttttccaattctttattcatctttttctccttcgacaaaaatgttatgtatgacttcttattttcgccgttgtttttatttgtttctgtattcggcggcttgccgtcaattcccgcagtcggggcgcgcaaattgtctgatgatcgtctgcatctgctctcgttccatacctgccagtcctcccgctatcttttcgagaaattctttttgctcgcgtttgagatattgtcgccccagataatacccctccgccacgtatacgccgccgtagacgcccgtcttcgtatagatcgggtaagataaggaaagctcctgaatgtcccggcgcacggtcgattcgttgaccgagaactcgaacgccagattttccactttttcataacgtctttcacagagtgtttcgaggattctctgccgcctctccaaggctttcacttatctcaccccctttgccgtccttgatggctctattttctcaatccttccgtgcagtttttgcacggaacaaaaaacttttttcgattttttacgaaaaataaaaaacgcctcgacgaaacagtatctttcaaaaagaatactgctcgccaagacgcttttcgccttgctctgacacgctatgcgtgttttacgaacacttgcccgcaatctatggacaaacggatttacccgcgcgctgtttcagcgcgaccgccgtgtggactgcaaacgctctattattttattgtgtgatcaccttgatgtccatttctcttttcttgcgcagcttactgaaaatgacgaccccgcatctcggacacgtttgacgcatcaccccgtcgttgtccttatatcccctcaccttcaccccgcaattcggacaatacatctgcgcggcgcttccttccctcggctccatctcttttccttcctcttcctcccctttcaaaatccgaacatatgttcggattttattttattatacttccttttttttacaatgtcaagcgaatacgccctatcgttttgtgaaaatttcttcttgtcttttcaatggaatcggactgtccgaaaagagccgtaactatttttttctcctggacaggatagttttttctcagccttcttacaaccgttctttttctgacaagaaactttttaaaagggcaagacaaaattttccgctttctattttctatttttagtaaggaaacgccgccgctttgttcttcgtcgaatttttcaaaaatcgataaaaccttcgttctttttggatttttcgctatttattctcgttccacgggaaacgagaataaaatttatagattttcagcggaaattttttagcttccggcaaataaactcccggattctcttccttttccatcctccttggataggcggaacggaagcggcaattccttggaaagaaaaatccgagggcttcaaataatacgcgctccccggattttcctattaataaaggctacgggcttccctacgcgatttatctatccgatattcttgtcaggcggaacgccgaaaggaggctcatcacaaaaaagattcccagcaaaaagagtaaatatctgccctgaaactccgtcatcgctttaaagccaagcgtcgcgggaaagacatagcttatatactgtaaaaatcgaggcagcaaagaggagggaaacatgattcccgaaagcataatcgagggtaaaaacattaattgagagagcatcacaagtgttgtctgcgtctttcgcatcagtccgaaaacgcagccgatactcataaacagggcgagcgacacaaagtacggcggcagattgcgaggcagcgaggcgtgaaaagcaaaaggcgcgacagcaaagacagtgacgctcgtgaccgattttcaacaatttttttataattataaaatccccccgcaatttcctgtttcaaaaggccgaaaagggaaaacttccgcgtctaacctcccgattttattcgttttgttttttctccccgcttcgttctttgcttttgtttccctctctcccacaaagaccgcaaaaaagccccgaattcccggggcttttccttctcttgtcctatttcttttccccgcttccttcctccggctttacctctaacctcagctcataatcccctaagtgtttcagcttgaatccgtttttcttatacgactcatactcgaacgcttccagctcgtctatcgcgagcttatgaaattcataaaagttatgccaccactcataccccgtcccaagctccgcgttcaaataagcgtccgctatctcgcagcccatctgcggcgccacgtaaaacgcacccatcgccaagacgttcactccgttgcccgtgatcgccctaagcgccgcgggaacgctctctaccactccgctcatcacgtgcgggcatttacttgccgcgatgtggattcccattcccgttccgcaaaacaacagcgcgcgctcaaattcgccttcgctgatctgcgctcccacacgcagtcctacgcggtgaaacatattttccgtatcggcgggatcgctttcgctcgtaactcccaggtccgtgatcttccatcccttccctttcaggtgctctaccaccgcttctttcaacggatatcccgcaaagtccgctcccaccaccaaatacttatccttgattcttttcatctttcccttctccttccctttttactcgctccctcttcttttccgtcctcgtatctctccggaagcttgatatcttttcgctcttcctgcacttgctcgcgcttttcttctacgccctgtgaaaaatttttatccgaaagcgtgaggtctttgagatacaccttcacccgctcctgcgcgcggaatacaaactccgcctccaccaccttgcgcctctcctctttactcagtcttacgggcgaaccgtccccttttttgccttttcccagttcgatcgcatattcttcgaacctcgggcccagcgtcacggcgttcggcgattctttccctctccgcaaatccaggcggtatatctcgccctccgcggttctcaccaccacgcccagaaatgtcaccctgccttctcctttcagacgcacgttccagtattgataatccccaagatgatttttatgtcccgccaggcacaacgacggcgagatgccgaaaaagaaatactcctccgccgtcggactcgacgtacagcacaacgactcgccttccaaccctatctccgtttccgctccgtcgtatatctcgccctttttccacaccggcactttccgacacgtgcccgcctcccaaccgaaattgttttcatagaccctcagcgccccgttcaccgtatacgccggcggaaaacaatacttcccgtttaccgcttccacttcgctccgatacggcagcagcggcaatccctcttccgtcttcgcgttgcaaaaatcctgatactgcataaacccgtacgtcagcttgtgcgcctctttcacgtcgcggctccttacccgtatctcttctctgctcgtcacctcaccttccgccggataatatttcccgttttttcccgccagcgtaaacccgttcacctttccccgcttcatgcctttccccgcttctttaatccgacagatcgcctcccccttttcatacctcacttccgctatctgcggatacctcgtcacacggccttccaacgcgtccgcgatccgctttgcgatcggcgctttattgaccgggtgaatcggatgataatacatcccgccgtcccccttgcgccaacgcggctctatatcgtaaatcggcaccgtcgtcactttcccgctctcttcctgcaactgcgtcagcgcttcgtttatgtacagatacccgtatttatccccgtacggataatattccggcgcgatatgcaccgccacaaaccgctccgctttgaatcgctccacatattctcgccaaagaattttcagctcccgtaaaaagaaccggccgaactcgaaatcatacgccgagctttcccccaaataccacacgattcccttgaatctaagcccttccaacggcgcgattttctcgttccacaccccggacagctgcgtgtagtttcgactccctgcacggttgtactcctccgcgctcgcatatctgcccacgcgctttaaaaattccaccagctcttcgtccttctccacgctttcccgcctcaggtacgcttccacgctcagaccgcccatcgccgtctgcacaaagcctatcggcacgccgcttctttcccacaacagcgtccccgtctgcacgcacagcgccgatactccgctcagtttcgccccgccgcgactccactcgtactcccatgccaaatcctcctgcggatacgcgggacgggtcatttcttccccggctcccaccgccttttcttccagattcaaaaccgatacgtccgccttctccgcacgctcctgccacccttctgcattctccaccgcagacagactatacgacatattcgactgacccagcgccagatacacgtccccgaatcgcacccgcacacggatctcttcccctccgctcgccgcactaagctcaaaatatccccccgtttcctctaccgctttaaactccgccaggaaacgaccgccttttgcttccactcttttcgtttcccgatacccttccccgctaagcgtgcagagtatctccccttccccatatcctttcaccgtcagcggctcccctctttgcagcaccgcgccctctttcaggtatctcaaaaatctcaacatctctcttctccttctcccgctctctttatctctttgcgccgaccaggtatttatccagcacataacaggcaaccgccgaccagccgtgacaaaggctgcccgcgtcgttgaaatcggcttcgccgcgctccgtttcccaataggacgtcgcgcccgcatagagcatctttccgaaaatttccgctacgttttccacgcaccatttacaatccttttccgccttcacgatcgcgtcgtattgcatgggtaaagcggcgagcgtcatttccaccgccttccccttcggggatttgaggactgcgcagagccgccttgcgcggtttgcgtccaagtcgcaggcgagaagcgtcgccgcctgcatataggcgtgatagccgtacagcgttccgtccgacgctttataagaggcgtacatctctttttcgggatcgtaaaaagcgtttaagctgtctttcagcgacgcggaatatttctgcgtttccgccgcctgcgcaccctttccgaaacgcttttcgagcgcggcgagcttatccgccgctatggatacgagcgccgtcaaaattccgtcgtacgctttcggaatttcctccgtacggttgaaattcccgccgtccagaccgtccgaccattcgtgaaaattccaatagcaggcctccgtaaagaccgacaccccgttttcagagcttctttcgcgaaagatcccgagcattttttccgctttcgggagcatttcgcccacgaatttttcgtcgtaatcggcttcggcgttttcgcagaccgcgattatccaataggcgctgaaagagggaatggtgatgttcgcgcgcgcgggagcgcaaagctgcaaaagtccgtcgcttcgcagcgtatccgcaaacaggcgcaatgacgcccgcggaaattcgtattcctcgaaaacgccgtacccgaacagcatttgattgcgcgaatccatgccgtacagggcttgttcccgccagggacaatcctcgtaatgctcgtgcgcgcagagttcgagcgtgcgcctgcccgtttcgtaaattttattcagcagtctgtccccgaattctttttcgatcctcttaaagggatagagcgcctcgcgcaccgacagacggacgagttccgcgctcccgttttcgatatacagacagagataacggcaaccgacgcggtacaggtattcgtcgagagcgttttccccctcggcaaaaaacagctcgcaggcaaaattcctgccttctcgctccgtgcggacgcgcagatcggcaagatgctctccccagcctatgatcccgcggcaggccctgtccgtcctgacgcagagggaaagatagccgctcgtttcccttttgaggtccgcgatgagaaaaatcccgtccccgccctgcgattttgcggcaaaacggacgggacggcacgcgcccgccgcctttattctgtcctgccccgtcatctcggcaaagcgcagcgtggacatccaggcgttttgcatcttggcggcagccgttcccccaacacggtacttaaaaacgccctgcgcgacgatttcccacggcaaaggcgcggagatccgcaatctttcgatcggtcttttttcgtcggtaaatttgtctaaaacggcgcggcaaggcttccagtcctcgccaaaagcggtaaagtcatatttccatccgtatcccagctgcggggtgattttgtccccgacggaatacttcgccgcagccctgccccatgtattttcatcggaacacgcgatactgacgccgtcgatcatcacctcgaaagagataaacgccgccatcgtccgggcgacggaaaaatcctcgcccatatgcgcggcgacgatgtacagctcgttgtttcccgatttcagaaagggcgcgagatcgatctcgtccaccctctttttttcgggaatatccgcgtactgcgcattggcgacgaacgttccgtttaaataggcggcgtatttatagtccgctccgattttgagaagcgctttctttcccttcccgtcgtaaaaaaattcttttttgaactcggaaaaccctcgttcttccccttgcgtccaaatccgtttcatcgttattccttccctgtcccgcgattttttcctaacgttcgttcccgctttccgtataaatgccgctcttttcgctggctacgatgccgtcggtgatcatattgacgaaaaagccgtccgcatagggctgaaagcggagttccctgcgattgaaaaattcctttctttcggcgtccgccgccgcgatctcttcttcgggcttgccttcgattttcaggatcagcacgtcgatgagctttaagatattgtccgcggcaaagcgcaggatctccatgctttccgcctgcacgggcagaaggtctgaaacgtcgggaaagtttttcaacgtttccgtcaggaatatttttgcctctttgaaaccgggcaaagccgaagccgcgtccgtttcctctttcatgtatttaaagctgaccgtgcgttccacttcctcgtaaaaatgacgcgcaaaatctttatacttcccgaaagcgctcgcataataatcttccctgatctctttaaaagccgcgttttcgtccgagagcacccgtcccatcagatagaacgcgaagccgttgggataaaaggcgcgctgtatctgacagcttaaaaatccgttcagaccgatggcggcgagagagcggatatcctcgtacagcacctttgcgatcgtttccccgccgaaatcccgattgatgtcccacatcaggtgatagtcgaaatcgaagctgtcccctgtaaagacttttttccagcccgcgagaaaagcgagatattccgccgcgtcgttgggatagaccatttcgttgcgcttatactccaaaagaggacgggtacgccaatcccccgaaacgtcgaacgcagccgtatagcttcggaaaatgggcgcgaacatgaggataaaacgatcgggattcaggaggcgctgttcgaggggaggccaatacagttcgagatagacgagaaagacgatttttacgttcaaacgtctttccgtcagcagtctgtcgatctcgttgaggatcatcacgtaccaatcggacatccgctttttggcgcattccccgcactcgcaggcgttgttgaaatcgtccgccagccagaaatgcaaaacgtctatttcgggatgattttccgcgtattccgccaccgtttccgccagcagtttccgcgccgcaggattggaatagcagaggtgcgtgttcaagggctttcccttaaaaaactgacgtttgccgtccacttccgcgagcaaaccgcgctttttttcggacagaacttcccggcttgtgtaccagccgttgcagtcgatgccgaggcacgcgggcgtccagccgtgcccgacggaatgatagagaagggaacgttttttcagcgcttccacgatgatgccgatataattcttcgccgtttcctcgtcgattttttcgggagtcagcaaaggattgccgagatgttcgtaccaacggctgaaaaactcgtaagaggtgctgaactgagtgaaatagccgttaaatcccgccttagccgcccaatcgatgagttccagcacgttttccagactcaccgcgccttcgatggtgattccgcgatggcgctgcgagggttcaaagacgcagcaagcgcttatttcccctatctttttatgcggaatgtactctccgtttttcccgggccgcaaaaagcggcagccgcagcggcgaagcagctcgtatacgcccagcagaagcgcccgagggcagttcgccttgatctctccgcgtcccgcggacaccgaaatctcgcatctctcgcggaaaatatcctcgtcccgccccgcggtcaaagcgatgcatccgctctcccccgtcatgaagacaaggtatctgttcagttcctctttggcaaattcaatcgttttatgtatcatatcgtttctttacttttatagcatatcgtcgaacacgccgagaattcccgcgttgatggcgcccatgacggtggcgtttgccgccagatccgaaaagacgatggggtattctcccgtgaattttgaaatatagtcgaggtattcgttcccgaacccgatcaccgaacccgtcagcacgatcttttccacgtcgaggaggtcggacaaagaagaggcgaacgtggcgatgacgcgggcggcggaatggatcacccgcaccaccagttcgtctttttgtctatacgcctccaaaagttccgtgatggtgacgtcgtcccaagaaagccctttttcccggatccaatcctgcaaaacgctctttttccccagggaaagctcacgcttgacgatcgctaaggaactgaaaagcgaggtgacgtcgtaatagtttccgtaaccgagattcccgtaattgtcctcttcggagagaaacatattcattttgaaatagccgatctcgcccgcgaaaccgtgcgtcccttcgtacaccttgccgtcgatgagcaaagcggcgcccacgccgacgtccacgtgaagcatcagggcgttttccacatccttcaatacgtcgccgtacattttttcgcccaaaagagccagattgatgtcgtttttcacgatgaccatgcaaccgaactcctgttcgaaaatcgtttgcagggaaatattcccaagttcccggaaacggggattgagaatgaattttccgctctccttatcgatcttgccgggggaagcgatggcgatgcagcaaagcgtccgtccctttacgttctcgtcgtccatcaattgacggatcacttcgaggaggcgcgcgatgtcttctttatgaaagcaaactctgtccagcgtgcgttttgcgaggatgttgctcccgaaatccgcggcgctgaacgagatctgccagcgggacaagtccaccgcgatcacgtatccgaaatccgcgttgatggacagattgatcccgccgcgtccctttgcgtcgctctcccgatatacgatattctgttctatgagatcgtccacgattttcgctatcgccgtattgctgagtttgagttcccgcgcgaggtcggaatagctctgcgtcttttttcgcaacaaatcgatgatgctctttttgttttttcttcttaaatacgattgatttctcacctgcatatcacttcccatccttttcgtcttatcgatttttcttaactttattttaccccgcttcgatttaatagtcaactaaaaacggaccgtttcccgtttatagaaacgtttggaaatcaaacggtttttttcagccgatcgataaggcaaaggaatctactcccgcttctttaacgcaaagccgaccgccagcaatgcaagagccgaaaacgtccccgcgcccgccaggcttttgcagccgccgcccccgcccgacgaatcccgcgcctttgcgacgagataggaaacgggtgcggaaaggtcgctgtccagggcctcgaaggtatcctccgagagcgccttgacggaaaagatatgttcgccctcgctcaattcctcttcgacctgatagctgctcttattggaggtctttacggattttccgtcgagatatacggtatagagattggcgcccgcgatcttttcccagcgcaacgtcttgcttgcctcgtcccatacgagcacgggcgcgggcagtttttcgatgacgggcggcagctgcgtatccgctacgctgacgtaaaaatcgtccaccaaaatatccgccgtacagcagtcgaggctcaaaaagccgaaataatcgaacgaattgacctcgaagctgcaatccgccacctgcaccccgtcgagatacatccgatagcgattattttccgcttcgagtttgtattccatccagggagtgtcttcgcccgcgaccgcattgggcacagcgtaggaccgagcgctgaacgtcagcttttcgccgaacatttccccgaacgccgcgtcggaaaaatcgttggtcgtgccgccgttgaatacggcgtacgtatgcggggaaacctccgtgttttgcgtatacctctgtacggtgaagagcagattgttcgtcccgagatagtgcgcctccgccttttttcggaaggaaattcccacccagccgcgctccgccgccttttccgtcaaaaatttcagccgaaaccccgccgtgaaattttttacccgataatccccgcccggaccgatatggaaataggaattcatcgccaccgaagcgttgtcgagatggagaactttgttcccgctttctccgttttcgtattctattttgcccactcccttcaagtgcgcgtcgattccctgttcctcgccgccgtttaaaacgttattcgaccatttctccgcaaacgcggcgtccgtttcgataaacgcgccgtccgcggcgtaggattcgaagtcgtcggaaaagccgggcagcgccgcgcgctcctccgcataggccgcttttgaagagaacgggctcagcgatatacagagagccagaagtccgcctacgagcgaaaatgtctttttcatctttctattcatgaacctcccgtcacaaaacgaaaatactttcccgccccttgcgtccttccttttgacgtcaccgctttgcggaaaaggcaaggggggatataaatggtgaaaatcgcgcaaaaatacggttgaaaccgcacgacaaaatctttaaagcggacgatcgacgccgttctcttcttttgtaaaaaagctcttgtccgaaactcgccgaatatcgcccttccgcctcgcggggacaaacttttctccgctttacccgacgaccaccagcaccgcttcccccgcgccgaggcttacggacagactttcgcccgcaaagtcctttttgccgccgccgtcgacggcgtagccgctcactttcccgttaaaatttagggtgatctcgtccgccgccgcacacccttgaatcgtatcgtccgcaacggcgttgttcacgacgtaaagagccgttttgccgtcgtagtcgaaacatccgacgagggcgtgattggaagaaacggacgaaagttctttgaacgtccctccgagaagatccccttcggggatgctcatgcgctcctctccccgattgagctgaggcatgactccttttacgatgacgccttcgctcttcgcgcacatcagtacttcgtccaccgccgcgatcatctcgtttgccagcttcacgcggccgtacatttccgtcttatttccctctgcgtcgaacatggagccgacgaaatccccctgcggattgacgccgcagaaatactgaatccccttcgcgccgtaagcgaggcaggtattgacgttccacaaaagatccgcctgcgtcgggagccgctgaccgtccgcgaacgaacaggtctgcacatacacccagaaaggaatgttcgcttttaacgccgccgtgcggatgagggacatattttcaaaatatccgttcatgagagcgggaaaagagccttgaatgggataaaagtcgtaagagagcacctgaggctcgaaaatttccatatagtcccgcaaatattgctcataggtgtacgactccacgggcaacgtgtcttcggaagtataggaacggaaccaaagctgcttttcgttcgcatacgtcggaaacagattgacgtgatagagcttttcggaagtatcctttaaaacgttttcgaagatcgagcgcgaggaggcgagattttcgtacatcgttctgccaggttcgtccgagagcatgatgcccgcgaaattctcgtgatgcatgaccgtggcgagcgcgctgcggacgttgctctccgatttgacattgtccgcgcccgagtacgcgagcagatacgccagatcgtaatcgtaacaaaaatcgagcgccgtcgccacgtccgcctgattcaacgtgacgtaatcggtaagccccatcatcgtgttgacgcccgcctccgcgtacgctttaaaaatttcctcgtcggtgagaaaattcttttcgtagccgtattttgcgggagggatggaattgtacgcccccacgggcatggtcttataatcgtgctggggaaaccaatacgagccgtacgtgccgtaatcgatcgtccccccttgcgccgaggagctgtcggacaaagaatttccgggcgaggaatcggcggacgagctttccgcgctgtcggacggcgccgcgcacgccgccgagaaaagcagcagcgcggacaaaaacgccgacgcggcgatataaaatttctttttcatcatttctttcctgttccttttattcgtaaaaccgcgcgttatcccttgatgccgccgatcgtcgtattgttcatgatcgtcttttggaaaatgctgaaaatgacgaggacgggaatcatggaaaagatcaccgcggcaaaaacctggggaagattgttcttgttctgatcggaaatccgctgtaagccgtaagcgatggtcgctttttcgggcatatacatatagacggtgaaatagtcgttccaatacccgatcgcggaaagaatgcccagggaaacgagcacgggcaccgccatgggaatcatgatggtgaaatagattcggaaatgtcccgcgccgtcgatctgcgccgcttccgcatacgtccaggacaaatttttataaaagccgtacatgatgagaaaatacgagccgaatccgccgcaggcaaaaatgaaatatcccgtatacgtattgatcagtccgacagaattatacattttatacgtggaagccatggatcccatcgtcggaatcatcatgatgatcaccgcgaaggaatagaacgcgtccctgcctttaaactcgtacttcgtcaccacataggcggtggcggagcaggacatcagggaaagaaaagtggctcccaccgtcataaaaaggctgttgaaatacatcatcgggacggatacgcggtccgcggaaagcgtaaagctgtttttccagttttccagcgtccataccttgggcaagccgttgatatttaaaaagaagtcctttctcgtcttgaaagagtttaaaaggcaccacaaaaacggaaacaacaaagatacggcatacaaggcgaaaatagcgaaaaccacccacatgacgatggaatcttttttcgtcttatgtactctattcattctcatatacaccctcaaagagcttttgaggaaaggggagaggctcccctttcttaaaaactcacatacgatttcttgccgtgcttttacaatttactttctgcgttttttcgagaacagaagcgccgctgcgcctgccgccgcgatcaaggcgccgccgcccatggcgctgccgcagccgctttccgtacccgacgagccggaagtattctccgaactctccttcgttgaagaatccccgctgtcgctcgcggaatcgccgcccgacgaaaggacgtagtccaccgagtttctggacgcgatatgcgccgccgtgtccgaagggttcgcagttaccgtcactttatacgtgccgtccgccgtcagagaggagaggtcgatctccgtggcagtcacgttcttttccagcaccgtatcgctgccgagtttcaccgtcacgtcatagctcgccgcgccgtccaccgctttccaggtgacttttttcgccgaaggattcgccgtcagttccggtttttcgagcggcgtgggcagagggtcgttcgccatgtcggcgggagccacgtccgcgacgaaatccgcggtgagagccttttccgaagccgcaaacgtcaggacgtcccggcgggaaacgggcgtaaccgcaaaattgtccatttcgaaataggcgggagaatcggtggcgatgccgagatagccttccgtgtccgccgcgttaaattcgaggacctttatgtattcgcctttgacggcgcccgtcgcggcgtccacttccgccagaaagagcgccactttgttgttcacgcagacgagcttgactcgcgtggtcttgttgtacatactgtaaatatttcccgcgttgtcgggatcgggatcgtaccacgccgccacgttgttatcgggcttgcttgcgtcgtacccgccgttgtaattgggaatagaagtcgcggtgggggaagtcgtcgctttgagtttggacaaagctaccgtggggcatttacaggtcgcagccatagccaagggcgcaatgatcgtttcgttgttgccgtaaaaatcgatggcggcgagtccttcgttgatgccgatcgcatacacggtgctgtccgtgatggagagtccgccctctttcatgccgaacacgagataggcggcggaaggtctgttgccgctcagaacgagcgcgcccctctgctgtacggggacggaaatataatcgaactgcatcacgaaatccgcgtacttcttcgtggtgagcaggcgggtgcccgtcgaggtgccgtagaatcccaatttgccgttttccgcggtgacgcccgtcagatcgtgcgaagtagagtccgtcttgatcatgtgcgtttcgggagcgatgttggaagcgaactggaatttgtcgctgctgatatagttccccgtaaagttgctggtcaccgtttccgcgccctcttcgttgtccttgaattggtagcccgtcatcgtcaggttatctttgagcatatagctcaaattgccttcgcctttgtgcgtaacggcgaaaaatccgtcgggatcgaaattttcgagaaggatcttttcgttttccccgacgacgatttcgaggtcggcgccctttcccgtaaacgtcacggggatcgccgccgcgcgttcgccgatcgccccgtccgccacttccacttcggcaaacagcgcggaagacgcctcttctttatccaccttctctccgccgaacatcaccttgccgtctttgacggtaaaatagaaataactgtgcgcgcccgtcagggaacggctgttttcatagccgaatccgaatccgaccttctgccccgcggcaagttctttgagaatgacctgcgccttcatttcgagattggtcgccaggcccttatccgtttgcagagccgcccgcgtgacgattcccgtgcccgcggcgggattggtga

SEQ ID NO: 2736 - DNA, 19045 bp, Unknown
  16S sequences of unknown bacteria
tcacttcggcctgtttcgcgcactgcgcgcggccttcgtgcgccccgcgaaaaataccagaaatgacgtacactccacagttcgcaatcgtcgatctgcatcgctcgcaggctcgctcgcagctctcgttgctcactgggcttacttcggcctgtttcgcgcactgcgcgcggccttcgtgcgccccgtcatttctgattagaacctttttctttcgagactttgtcaatagtctggagggagggaaagcatgctttttcataaacccgattccgccgatctcgccgcgctttccgcctgggccacggtgctccccggcgcgagcgccagcgaggattacgcgcacgatgaaatgaccgaatacggcgctttcgcgcccgacgcgctggcgctgtgcgaaagcgccgagggcgtggccaaagtgctgggatattgcgcccaaaagaacatcgccgtcacgccgcgcggcgcgggcacagggctgtgcggcggcgcggtgcccatccacggcggcgtcgtgctctcgctagagcgcatgaaccgcatcttggaaatcgacgaaaacaccatgaccgccaccgtggaaccgggcgtattgctaagcgatttcatccgcgaggtggaagcgcgcggcctgttctacccgcccgatcccggcgaaaagaccgccaccctgggcggcaatgccatgaccaacgcgggcggcatgcgcgcggtgcgctatggcgtcacgcgcgattatgtgctgggcatgcaggtggccctgccctcgggcgaattgctcgatttgggcggcaaggtggtcaagacctccagcggctacagcctactttcgctgctggtgggttcggaaggcacgctgggcatcgtcaccaagctggttttgaagctgctgcccatgccgcgcgcgaacgtttcggtgctggctccattcgacgatctggacgcctgcgtgcgcgcggtgccccaggtgctcgcctgcggcgcggaacccacggccgtggaattcatggagcgcgaggtcatcgcctgcgcggagacctatctgggcaagcgcttccccgacaccagcgcggacgcttacctgctcgtgcggctggacggcccttcggccaaggcgctcgaggcgtcctgcgaccagttggcgcagacgctgctcgatttgggcgcgcgcgacgcgctgctcgccgataccgacgagcgcaaaagctccatctgggacgcgcgcggcgcgtttctcgaggccatcaagagcggcacgccttccatggacgagtgcgacgtggtagtcccgcgcgacaaaatcgcggatttcgtgcgcgcctcgcgcgagatcagccgcgattgcggcgtgcgcattttgagctttggccacgcgggcgatggcaatttgcacatctacgcgctgatggacgatttgccgccagaaacctgggccaatgcccgccaggccgtgatggacgcgctctaccgccaggccgcgctgctgggcgggcaggtgagcggcgaacacggcattggccacgcgaaagccgcttatctgcgggatagcgcgggagaaaccgccgtggcgttgatgcgcggcgtcaaggcggcgttcgaccccaaaggcatcctcaaccccggcaaggtgatcgcatgaaaaccgtttaccgcaaggacatccgcctttcgcacatggcgcgcctcttgcggcgctctttcgcctgcgcgccgttttcggcgggggatctttcgggcgaggtggcgctggtgcgcatggaagaagtgcgcgcgccgctggttgtgaagcacggcgaaacaggcgtgcgcgtggcggacgcgggctttttctggctggaagccgccccgcgcgccaggcattggtggctcaccgccgccctggacgaaaacggcggcatcgtgcaatactatttcgatatcacgctggaaaacgacatccgccccggcgggcagtcctcgttcctcgatttgtttctcgacgtggttttatcgcccggcggggacgtgtatatcctcgaccgggacgagctcgccactgccctttccgccggggaaatttccccggcgcagcacgcgctggccctgcgggaggcagaggcgctcgcccgcgccctgcccgcgcgcgagggggaactggcggcgttttgccgaacgtggttcgcgcgcctgcgggaacaattggcgcccgaagggtagagcctgccttcgcttcaagcgatgcgctattttggaggaattttctcgtgtaaatattccgcccgcgcttgacattcgagccaaaaggggctaaaataattctgataatctatgcagtaccgccgtgttccggcgtctaagcagaataaggaggggtttggttttgaatccagcaatcgcggctgtgatcagcggcgtgattgcgttggttgtcggcttgttgagtggttatctctatcgcaaaaatgtgatggaaaacaaaattggccatacggaagcgtatgtgcagaatcttctgaacgacgcgacgaggaaggcggaagacaaaaagaaggaagccgtcctcgaggcaaaagaagaaatcattcgcctgaaatcagagcttgacaaagaggtgcgcgaccgccgcaatgaagtgcagcggcaggagcgcagaatcaaccagcgtgaagaagcgttcgacaaaaagttcgacaatttggaggctcgcgaagagagcctgaacgagaagtttaaggaagtgcagcgcctggaagaagaagcccagaccatgcacgagagccagcaggcggagctggagcgcatttccaacatgacgatggaagaagcgcggcaaatgctcatcgcccgcatccagaaagaagcgtaccacgacgcggcggtttccgtgcgcgaaatcgagcagcgcgcgcgcgacgaggcggagaaaaaggcgcgcaacatcatcgcgggcgccatccagcgctgcgccgccgaccatgtggcggaaaccacggtttccgtggtcgccctgcccaacgacgatatgaagggccgcatcatcggccgcgaggggcgcaacatccgctcgctggaaacggcgacgggcgtcgatctgatcatcgacgatacgcccgaggctgtgatcatctccgcgttcgatcccgtgcggcgcgaaatcgcccgcatcgccttggaaaagctcatcaccgatgggcgcattcatccgggccgcattgaagaaatggtcgaaaaggcccgccgcgaagtggacaaccagatccgcgaagcgggcgaacaggccgtgttcgaaaccaatatgcacggcatccatcacgaactggtcaagctgctgggccgcatgcgctaccgcaccagctatggccagaacgtgctcaaacattccatcgaagtctcccacctggcgggcatcatggccgccgagctgggcgcggatgtgcagctcgccaagcgggccggccttctgcacgacatcggcaaggccatcgaccacgaagtcgagggcacgcacgtgaccatcggcgcggatctggccaagaagttccacgagagcgacgaagtgatccactgcatcatggcgcaccacaacgatgtggagccgcagacgatcgaggccatcctcgtgcaggcggcagacgcgatctccgccgcccgccccggcgcgcgccgcgaatcgctggagaactacatcaagcgcctggagaaattggaagaaatcgccaattctttcgagggcgtggaaaagtccttcgccatccagtccggccgcgagatccgcatcgccgtgaaacccgaagacgtcaacgacgcgggcaccctcattctggcgcgcgaaatcgtcaagcgcatcgaacaggaaatggaatatcctggccagatcaaggtcaatgtcatccgcgaaacccgcgctgtggaatacgcgaaatagcgcccaaagcccaaaaacgggggctgtgaaagaacccttgcggttctttcacagcccttttttgttaatggcgaatatagatccacctaggcgtcaaatacgatctggaacaattcttcgcgaatctggcccagcgcgttattggcgcgggtggggtgtacgcggttggtgagcagcacgcaatagcgctgatcctttgcgttcatccacaggctggtgccggtgaagcccgtatggcccacgatgttgccgccttcctgcgcgcggtacacgatccagcccagcgcgcggttgctgttcaggcgcgcggtttgattttcgcacgagcgggccacccatttttccggcaaggcttcgtggcccagcaggatggcgcgtgcgaagcggcccatatcgtccacggtggaaaacaaacccgcgtgccccgccacgccgccgagctgttcggcacgctcatcgtgcactgtgccgcacacgggcaacgactggccggggcggatttccgtggcggcgaaggcgtacttctccttgggtgggttaaacatcgtgtcgtgcatgcccagcgggccgaacacggtgttcaccgccgtttccagcggcatgcctagctggtgcgcggcgatttcgcccaggaaaataaagctcaaatcgctgtagagcacttgctgatccggcgcgtatttcagcggcgcgcggtacaggctttccagccgctcctgccgggtttcgccggtcgtgtccatgaactccaccaggcccgccgtgtgcgtgagcaactggaagatcgtggtgtgcgccaggtgcgggtagcgctcgggcgggaaatccatggcttcgggcagggtggtgtccagcgtgagcttgcccgcgtccagcaggcggatgatcagcggccacaccgccgtgagcttggtgagcgaggccaggtcaaacatcgtttcgagggtcatgggtcgttcttggggaatccactgcgcgcagccataggattcgcgcagcaacaggtcgtttccctggccaacgagcaccgcgtagccgggaatgcggcgctcatccacgctcgcgcgcagaagagcctgtgctttttccatctgcatggttcacgcctcctggtaattttcgtccacgtgcgccaccatgcggtagcgcgcgtctttctcgcgcaggcgcgcttcgatgtgggaaagcgcttgcgcgcgttcatcttgcttcatgcccacgggtacggcgatatcgaaaatcaaattgatgcggttttgcccgtccgtcatgcggaaatcgtggatggaaaagcgcgggttttcggcttttaccgcttccaacacctgggcgcgcaccgcgtccacgcgctcgctgcccaccgtgaccggatccagatggatgacgatcggcacgtgcaaatcggcatagatgcggcgctccgcctcgtcgatggcttcgtgcgcgcgcacgatatccgcgttgtcgggcacttcggcgtgcacggaagccatcacgcggcctgggccataatcgtgtacgatcaaatcgtgtacgcccaccaccatgtcggttttgcgcacttcttccgccaactggcgcacgagttcgggatcgggccggccgccgagcagctgatcgatggtttcgtgcgccacgtcgaagccggatttgagcaccagcagcgccaccagcgcgcccgcaccgccgtccacgcgcatttcgcccgtagacacggcgattaccgtcgccgccgccacggtgagcgtgatcagacaatcgttcaggctatcgcgcgcggtggccagttgcaccgaagaagagatgcgcttgccaattttgcggttgaacgcccacatccacagtttcaccagcgcgctgagcaccatcacgcacaatagcggccaacctgccgtcacctcttcggggttgatcagcttttgcacggaactgatcagcaactgcccgcccgcgaacaggatcaaaaacgcgatgatcagcgaagaaacgtattccacgcgcccgtgcccaaagggatgctcgggatcgggctgccgcccgctcaggcgcgcgctgatgatggagatcagcgaggagcccatgtccgaaaggttgttgatcgcgtccgaaagcacggaaatgctgcccgacagcagacccgcgaccattttggcgacgcacagcagcgcgttgagcgcgatgcctacgccgcccgccagttggccataggcgcgccgcacggcgggatcgcccgcttccccctggggcacaaagcggcggatcagaaaattttgcatactccctccccaaatagcgcggccgtttccgaggaaacggcccgcaatttcacccagcgcaatttgcgcgcagagctgcctctcctgcacagcacgggaggcagccccttttcacgtctctttgagttctttaattcttgccaggcgcgacttccacgcggatgcgcgccttttcgccattgatgttccattcggtggcgctttcgcccgcggggccgaaggccacgctgctggcgagcaccgccgcgctgagcgcttcctggttggcctcgagaatgcccgtgagcgtttcgcccgcctcaatggcaacggtgatgcggtcggtcacgtcgaagtccgcgtccttgcgcatggtctgaatcttggagatcacttcgcgcacgaatccttcttccaccagcgccggggtgaggttggtatccagcaccacggtcaattcgcgctcggtggcggccacgaagcccggcttgtgcgcgggcgcagtgagcacatcgtccttttccagcacaatggtttcgccctcgatttcgaacgaaacggtttcgccgcgggcaaaggcgtccaccacgtcgttgccatccatattggcgaggtgctcgccgatggcgcgcaggcgcttgccgtatttgggccccagcgtgcgcatctgcggcttgagctggtaggtagtgaaggcgcgggcgtcgtctacaaagcgcacgtccttcacgttgagttcttcggcgatgagcgcggccatttccgcgctcaactgcgcgcccttcacgtaagcggcggcgagcggctggcgcaccttcaagttcgcctccgagcggcagccgcgacccaattgcacgatttcgatcacggtttccatgtccgcttccagcgcggggttgatcttggtcgcgtcgcaggccgggaaatccgtcagatgcacgctatccggctcgccctcctggcgcaggttctgatacatggtttcggccatgaacggcgtaaacggcgcgagcaggccgcacagcgtcttgagcacggtatagagcgtttcgaacgcggccagcttgccgccctgcatgcccttgccccagaagcgctcgcgcgagcggcgcacataccagttggagagctcatccacaaaggcggcgatggcgcgcgcggattcggtgacgttgtaagccgccaggccctcgtccacggtcttcaccagcgtattcagcttggagagcagccattcgtccatgcgggtgaattccgtggccttttccttctgcgggtcgtagccgtcgatggaggcgtacaggcagaagaaggcgtagacgttccacagcgtgcccatgaatttgcgctgcgattcgctgaccatatcgcccgagaagcggctgggcagccacggcgcgcccacggaatagaagtaccagcgcacggcgtccgcgccctgcttatccagcacatcccacgggtccaccacgttgcccttgtgcttgctcatcttctggccgtccttatcctgcacgtggcccagcaccaggcagttttcaaacggcgcgcggtcgaagatcagcgtgccgatggccagcagcgtgtagaaccagccgcgcgtctggtcgatggcttcggagatgaaatccgccgggaagttctcctggaagatctcctggttctcaaagggatagtgccactgggcgaacggcatggagccggaatcgtaccagcagtcgatcacttcgctggtgcgcgccatgtcgccatggcacttggggcacttcacgcgcacgcggtcgatgaacggcttgtgcagctcgatatcctcgggcacgttctctcccatttcgcgcagctcggcgatggagccgatggcgtgcatgtgcccgcaatccttgcagatccagatgggcagcggcgtgccccaatagcgctcgcgggagaggccccagtcgatcacgttctccaggaaattgcccatgcggccgtccttgatgttgtcgggcatccagtggatggtctggttgttggccagcagcttatcgcgcagcgcggtcatgcggatgaaccaggtggagcgcgcgtaatagatcagcggcgtgtcgcagcgccagcagaaggggtaattgtgcgtgtagggctgctttttcaccaaaaggccgcggctttccagatcggcgatgatcatgggatcggcctttttcacgaacacgcccggccaggcggtttccttggtcatgcagcccttggtgtccaccagctgcacaaagggcaggtcgttttcgcggcccacgcgcgcgtcgtcctcgccaaaggcgggcgcgatgtgcacgatgcccgtgccgtccgttagagtgacgtagtcgccggtgatcacgcgccaggcgggcttttccggctcgataaagcggtacagcggctcatattccataccggccagctcgctgcccttcatggtggcgaggatttccattccctcgcccatcacgctttccagcagcgcgcgggccatgattccctcgctgccatccttcgcgcggaagcggcaatattcaaaatccgggcccacgcacagggccacgttgctgggcagcgtccagggcgtggtggtccaggcgtagaaataggcgttctcctcacccttgatcttgaagcgcacgaacacggaatcttccgtaacttctttatagccctgggtcacctcgtggctggaaagcgcggtgccgcagcgcgggcaataaggcaccaccttgtaacctttatagagcaggccgcggtcgaagatctgcttgagcgaccaccacacggactcgatgtagcgattgtcgtaggtgatataggggtcgtccatatcggcccagaagcccacgcgctcgctcatgcgctcccattcgcccttgtatttccacacgctctttttgcactcggcgatgaacggctccacgccatattgctcgatctgatccttgccgtccaggccgagcgtcttttccacttccagctccacgggcaagccgtgcgtatcccagccggccttgcgcagcaccttcttgcccttcatggtctggtagcgggggatcaagtccttcatcgcgcgggttaaaatgtggccaatgtgcggcttgccgttggccgtgggcggcccatcataaaacgtgaacacatccgcgccttcgcgctgatcgatggagcggcggaacacatcgcgttccttccacagatcgatcaccgctttttcgcgagacaaaaaatcgagatccgttgaaacctttttgatcatggcgtatatcctccctgtcgccctcgcgtccgttggaaatcctcaaaagcgccgcggctttttcgcacaaaaaaaccgcgccccacattgggacgaggctctctcgcggtaccacccaaattggcgcaatgcgcccgctcgccaggggcgcgcagcccccgcgcgctgtatcgggcgcacccgcacgcgcttactccgttcagcgcggcgctcggaaccgatgcgcgcacagctcgctcccaccgggctcgcaccctccccggctcgctggcggcgcggttgcgccgtgcgcggatttcctcatcgcggcatatccatacccctttattataatagatgcgcgcgaaaaagtaaaccgccgccgcggcatttaacgcgcttttagcccggggagaggagaaggcaaggtttgccctgtcgcttccgtccattttcgccaggaaggcggctgtatattcggggcacaaaattatccgcaaaataaaatgttttatttacaaacgtgccaaattatgctaaaataaaaatgcaacccaccaaagcggattgcaagctcacacactgtgaggccgggaaacccggcggggttggcaaagccgtatttgaacgcgttgtgttgtaagatggtaaccttacgccattatcttaccacggctgggccgccttgtcaatacgaaaggagaaaaaattcatgcaagagtattaccttgggctggacattggcacggattccgtcggctgggcggttacagacctgcaatacaaaatcctcaagaagaatggcaaggcgttgtggggcacgcgcctgtttcccgaggcaaataccgcggcggaccgccgcgccaaccgcattgcgcgcaggcgcatcgagcgccgggagcagcgcatcgccctattgcgggatattttcgccccggccgtcgccgcggtggatcccgcttttttccagcggctggacgagagcaagtttctggaagcggacaagcgcccggacggcagcggcgcgccgctgggcaaatacgcgctgttcgcggacggcgcctattgcgaccgcgattatcaccgggaattccccaccatctaccacctgcggcgggcgctgctcctggaggatcgcgcattcgacgtgcgcctggtgtacctcgccgcgcaccacattctcaaaaagcgcgggcatttcctgtttggcgatttggcgctagaggacgtgacctttgaaagttgcctttcggagttgcgggaatgcctgcgggaggaatacgaccaggaatttttcctgcaagatgaagaatccttttcccaggcgctgcgggatcgctcgctgggcgccaaccgcaaaaaggatgcgctgcgcgaggccatggggccggacgcgaaggataggcaactgagcacgctattggattttctcgcgggcaaaaaagggagcgcggcggcgctgtgcggtctggaattggcggaagacgtgaaattttcctttaaagacgactttgaggccgcggaaccccaactcatcgcggcgttgggcgacgatatgaacctggtctactgcgccaagcggatgtatgattggagcgccctggcggaaattttgaacggcgagcgctatctttcctgtgccaaggcaaaggaatacgagaagcataaggaagatttgcagcggctgaagggcgttttgcgcgattttccagcggaataccgcgcaatgttccgcaagagcgatgtagaacacaattacgcggcctacagcgggcacggcagcgcacagcagcgctgcaatgccgacgatttcctggcctatgtgaaaaaagttttgggtgcgctgcgcgagaagatgaacgcggccagccgagcggaagtagaagccatcttgaatgaagtggaagcgggcacattcctgccccggcaatcctccacggccaacggccgcgtcccctaccagtgccacgaaaaggaactggagaccattctggagcgtgcgagccgctatctgccgtttttgcgcgaaaaggacgagagcggcctaaccgcgcaggaaaaaatcctggccatcttccgcttccgcatcccctattacgtgggcccgctgaacccaaaatccaaaaacgcctggctggtgcgcggcgaggaaaaaatcttcccgtggaatttcgaccaggtggtagacctcgacaagagcgcggaaaattttatcacgcgcatgaccgcgaagtgcagctacatcggcgcgcccgtgttgccccgggattccctgctgtacacccgctttgtggcgctcaatatgctcaacaagctgagcgtcaacgggcatcccatttctgtggcgctcaagcaggaaatctacgaaaagcacctgatcccaaggggcaaaacgaatttcaaggcgctgcaccaatggctgctcagcaatggcaagctgcaaaaaagcgatgagctcggcggcgtggatgaggaattcaaactggccatgccgggctacgccgttttccggaacctgcttgcccgcgggaacagcgaagatatggtggaagagatcatccgccacatcgttttgtttggcaaggagcgcaagttgctatcgcattggctggagcgcgaatatggcgggcggctttccgaggaggaccgcgcatacgtcctgcgccagcgcgagcggttcagcggctggggcaacctttcggcacaactgctgcgggacatccgctgccccgtggaagaaggcggcgagccgctctccatcgacgaggcgctctggcgcaccaattgcaatttgaacgaattgctttccaaccaatatggctttgctagcgccatcgagcaacgccgcgcgcaggtgctgggcagggagaagcccacgctggaggaatttttgcgggatagctacgcttctccgggcatccgccgcgcgatccaccagagcatgggcatcctcgacgaaatccaaaagctcatgggcggcgcgcccaagcgcgtgtttgtggaagtgacgcgcggcgagggcgcaaaggagcgcacgcaatcccgcaaaaagcagctggaagcgctgtacaagtcctgcaagaaggacgcggagaagatttacgaggactacgccgaactctatgcccatctgcaaaagcaggacgacgccgccctgcgcggcaagaagctctatctgtatttcacgcaaatgggccggtgcatgtacagcggcaggcgcatagatctcgcggatctgtttgccgagggctatgacatcgaccacatccacccgcggagcgtggtgaaggacgacagcttcgacaatctcgtgctggtgcgagctgaactgaaccgcagcaagaccaacgattaccccatccgcgattccatccgcgaaaccatgcgcgggcactggacgttcctgcgcaaacacgggctgatcagcgaggaaaaataccgccgcttaacccgcgccacccggtttgaggatagcgaactggcgggcttcatcgcgcgccaactcgtgcagacggggcaggcggccaaaatcgtggccgagcttttgcggcagcgctatggcgacgaccgcgtggtatacgtgaaggcgggcaatgtttccgcgttccgccaggatcagcgcatcacggcggagggcgagcagaagcaggcgggcgcgtgcaaagggctgaaaatcccgcaagatccgctctttgtgaagtgccgcgaggtgaacgatttccaccacgccaaggacgcgtatctgaacatcgtggtgggcaacacctaccatgtgaaattcacccgcaatccgctccggtttgtgcaaagcaggcaaatctacagcatgaaccacgtgttcgattacgacgtcgcggaaaaggacgggttcgcctggaaagccggggaggacggctccatcgccatggtgcgccgcatgatgcgcaagaacaatatcctgctcacgcgctatgcgcgcgaggagacagggaaactgtttgatgtgcagatcgtccgcaaggaaaaggggaaggtgcccatcaagtcgagcgatccgcgcatgcgcacaaaagactatggcggatacaatagcgcaaaaagcgcctactttatgctggtcgagcacggaaaggggaagaaacgggttcgctctctggaggtcgtcactatcctggataaggcgctgtgcgagcgcgagccgctccgctactgcgaggaagttcttggcctggaagcgcccaaagtgctgatttccaagatcaagatcgattcgctgttctgcctggatggcttccggatgcatttatcggggaggcaaggaccgcagattaaatataaaaacgccaaccccctggtgctgtccccggaatgggcgccgtacatcaagcagttggctaagtgcgtggaacgatatgccggagaaaaagaggacgtccagctcacggctttcgacgcggtcgacgcgcagcgcaattgccagctctaccaaattctgctggaaaagctcacgctgcagccctaccgggtgaaatacggcacgccggcgaaaaccctggcggaacatgcggcagcgttctgccggctcactcccttgcagcagtgcaaaattttgctgcaaattctaaatctcttcagcaccaatgccgatagcgcggatctaaagctgctttgcggcaaggcggggatcgggattttgctcacctccaaaaacctggaaaatttcgccgggcattccttccatctcatctacccgtccatcacgggcgtgtttgagcaggcgatcaacctgctgggggatgagttttgagctggcgggtggtggtggtttccagcaacgccaaggtggactacaaaatggactacatcaccgtgcgcacgctggaggaaacgcgccgcgtgcacatcagcgaaatcggcgtgctgatgctggaaagcaccgccatttccattacggcttacgcgctgtgcgagctgctcgcccacaaggtgaaggtgatcttttgcgatcaccagcgcaatccttacggcgagctgctccccagcagcggcagccacgattccaccgcgaagatccgccaacagatggaatggacgcaggcggccaaggacgcggtttggacggaaatcatccgcgccaaaattctcggccagcgcgatgtgctgctgcgctggcaacggccgcaggcgcaattgctgacgggatacctgggccagattcagctgggcgacgccagcaatcgggagggccacgcggccaaagtgtatttcaacgcgctgttcggcaaggaattttcccgggcgctggacacgccggaaaacgcggcgctgaattacggctatgggctgattctctccgccatcaatcgcgaaatcgccgccgcgggctatttgacgcagctgggtgtgtttcacgataacgtgtacaacgccttcaacctcggttgcgacctgatggagcctttgcggccgctgatcgacaacgaagtgatgaatttgcggcccgaaaccttcgaaaaggagcacaagcacgcgctaatccgcctgctgcaagcgcaggtgcggctggatggcaagcaacatgtgctgctatacgcgctgcgcctgtattgcgccagcgtgttccgcgcgctgcaaagcggcaaaatcgacgaactccgcctgattgaatatgagctatagatttatgagagtgatcgtattttttgatctgccggtgcagaccagcgcgcagcggcgcgaatacacgcaattccgcaagcaactcgtcaaagacggattcatcatgatgcaggaatccgtgtattgcaagctggcgctcaatatgtccgtggcaggcgcgattatggagaacatccgccagaacaagccgccggaaggactggtgcaaatgctagtggtcacggaaaagcaatttgcccgcatggaattcgtggtgggcgaaagccacaccgaaattgtgaacagcgatgaaaggacgatttttctatgaaactggcgcatccgctgctctcttcccccattgtattttgtgaaaaccagattcctgtgctggtgctggaaaacgccgccgcgttccgcgaattcgcggtggaattgctccagcagagcgaaggacaggagggaacctttgtgctctctcgcgcggatcgctgcctggattgcgcggagcacttaaacgtgtttttggattttctccatccgccagaactggaaaaacggctgcaaagcaagctgatcacggcccttctgcgggaggcgcaggaaacgcttgccggcgaaaccctccagttctcgcgggccgtccaggaatacatgggcaagctggccgcgctcgcggattatcccgtggcctttgagcaaagtgaaaacttgcccgcgctgctcaaggccatggattttcgtgcggatttgagcggcctctccgcctgcgaagcgctgctggaacagatgaccctgctccacggcctggcgaaggaccaatgctttgtgctggtgaacgccaaggcgtttttttccgccgcggagatggaaaaactctataaaatggcgcgctaccgcaaactctgccttctgttgctggaaccgcgggcgggaaccatcctgcccggggaacaaatccgccttttcgatgaggatttgtgtgaattgacccttgattccgggccgtaaatccgctataataaagatggccatctggcaacacagcgttgggttgtggcgccgtctctcaatttgaggtttgagagttgtgttgttttagatggtaaccaaacaaacaatcaaggttttcatcgtacatatcagtttgagagttgtgttgttttagatggtaaccaaaccatcgctggctgtttcgggcggcgcagcggtttgagagttgtgttgttttagatggtaaccaaactgggtatcgatgcacacggcgaacacgctggtttgagagttgtgttgttttagatggtaaccaaacagtgcttttatcacaaacggggaaaacgtagtttgagagttgtgttgttttagatggtaaccaaaccagcaaaagatttcggaatacaatatatcggtttgagagttgtgttgttttagatggtaaccaaacagggtggcagttgggtggtgctttcgaacggtttgagagttgtgttgttttagatggtaaccaaacttcaggtcgttggcatacatggggataatcgtttgagagttgtgttgttttagatggtaaccaaacaacggcgggtgtgaattgctttccgccgtggtttgagagttgtgttgttttagatggtaaccaaacaaatgaagaaaacttatgagcaggcgttaagtttgagagttgtgttgttttagatggtaaccaaacaacggtgcggcggctgctggtgcatcagcgtttgagagttgtgttgttttagatggtaaccaaactcttggcggctaaggccgcgcagggcgcgggtttgagagttgtgttgttttagatggtaaccaaactggtgtgctggtgttcaagtggagcgaggtgtttgagagttgtgttgttttagatggtaaccaaacgacgggcagatgtacaagtgcctgcagaatgtttgagagttgtgttgttttagatggtaaccaaacggatgatggatacagccgtggcggcgattggtttgagagttgtgttgttttagatggtaaccaaacccgccaatgaggctgtgaatgagatctacggtttgagagttgtgttgttttagatggtaaccaaacaatgaagggcgcatggtgcaacagtcaggtgtttgagagttgtgttgttttagatggtaaccaaacgatacacgctttatgagattgatggctacagtttgagagttgtgttgttttagatggtaaccaaactgcgcatgcggtcaaggaaccgcgcaatgtgtttgagagttgtgttgttttagatggtaaccaaacctttcgccgcttcataggcttctttcgtgtgtttgagagttgtgttgttttagatggtaaccaaacggagaaataccatgccaaaccgagtgataagtttgagagttgtgttgttttagatggtaaccaaaccagtgcacccgctggacaaatcgcgctttggtttgagagttgtgttgttttagatggtaaccaaacaacttgaagcgccgagatactgtcgtcgtggtttgagagttgtgttgttttagatggtaaccaaactaacaaagtaaaaagggggcggcgtgatgcgtttgagagttgtgttgttttagatggtaaccaaacgcacatgtcgcaagggaaaagagcgaacaggtttgagagttgtgttgttttagatggtaaccaaaccataatcgacgcattcgcgcgacgcttaatgtttgagagttgtgttgttttagatggtaaccaaacatctggtacgcctgccagttcatattggtggtttgagagttgtgttgttttagatggtaaccaaacggtggggttttgttgcattgtcagttgtatgtttgagagttgtgttgttttagatggtaactaaactcagtgtaaaggatagactgccggaagaaggtttgagagttgtgttgttttagatggtaaccaaacaagtccgatgatgcgttttttaccaagctggtttgagagttgtgttgttttagatggtaaccaaactgagtataatggtatacgtgaagtcacgtaagtttgagagttgtgttgttttagatggtaaccaaacgactgagacatgcagggcaggaacagaacagtttgagagttgtgttgttttagatggtaaccaaaccgggcgcgcgatgcgtgcgtgggaaacgcagtttgagagttgtgttgttttagatggtaaccaaacgcgccgttgaacagcacacagtctccgtctgtttgagagttgtgttgttttagatggtaaccaaacccacggtgtcaccccaggagtacactgtttgtttgagagttgtgttgttttagatggtaactaaacgccgtttggaacaataatgttagtagtttcgtttgagagttgtgttgttttagatggtaaccaaacttgggtgcctgtgtggtggtgggcaggtttgtttgagagttgtgttgttttagatggtaaccaaactgttgtattgttgtattgtattgcattattatttgagagttgtgttgttttagatggtaaccaaactggccatatgccgcatagcggaatccagcagtttgagagttgtgttgttttagatggtaactaaacgcaaaattttgcgtcttcgtcaattgcggcgtttgagagttgtgttgttttagatggtaactaaacgagcgcattacgcagcttaatcgtcccgttgtttgagagttgtgttattctccacaatctccaagcgagccgatggggcagagcgcgcgggtggggacgcttatccggcggggaaaagtggaaattctagaaaactagaaaaagacggcaaagaggcgcgctagggccatccggccctggcgcgcctttggcgtgcaagcggtttgtgccgccgcctatccttttcccgcgcggccatgctcttcgcggaatttgagcgggggcaggccggtttcggctttgaacaggcgggaaaaatagtttgcgttggcgat

SEQ ID NO: 2737 - DNA, 15117 bp, Unknown
  16S sequences of unknown bacteria
cgaaacaggcgaagcggaagtccaatgagcaaaggagacttgcaagcggtagcgtagcaaggcgactattgcgaattgtggaacgaagcagcgcgaagtaagcccaatgagcaaggaagtactgcaagccgtcaggcgcagcaggacgaccattgcgaattgtggggcgcttgctctcccgtccaccagcgtgtcaaaaaatcttttttgacacgctgaaatccccgttcgccatgcggcaaacggggatttgatacgcgcaaaacttacttgatttcgacggtcgcgcccacttcggcaaacttcttcttgatttcctcggcggcttccttggtgacgccttccttgaggggcttgggagcgttgtcgaccagttccttggcttccttcaggcccaggccagcgacgacttcgcgcacgaccttgatgaccttgatcttgtccgcgccgacttccttgaggatcacgtcgaactcggtcttttcttcggcgggttcagcggcggcggcagcggcgggcgcggcggccacggcgacgggcgcggcggcagacacaccaaacttctcttccagttccttcacgagctcggcgagctccagcacggtcatcgactcgatggcagcaatgatttcagcacgatccatggtattaccctccatattattcattgttcattttgttttgagaatgttttggcaatcacgcggcgcgaattattcttcgccgcccttttgcttcctcaccgcttcgatcgcgtacaccagcgaacgcagcgttgcagacagcacgcccacaaagttcgtgatcggcgcattcaggctgcccatcatcttcgcgatgaggacctccttcggcggcagatcggccagcgcctgcgcgcccgccgcatccagcgtctgcttgtcgatcacggcgcacttgagttccatcttcttggtcttcttgatgaagtccgagaggatcttggccggggacgcgggatccttgtggccaaacgccacggcggtggggcccttcaggtaagaatccagaccttcgatgcccagttccttcgcggccagctcgatcatggtgttcttcagaaccacatactcaacgcccgccttgcggcactcgttgcgcagctccgtaacttccgccaccgtcaatccgcgataatcgacaaacaccgcggaatgcgcagattcaaacttctctttgatttgcgcaacgatgactttcttttgctcaaaattgttggacatggttataagcacctccttgccgtccagcttaacggcatataaaacgccctgcgcatggcgcaaggcgatgaaacaatccaaaaccttaacgcctcggcgggcagcccacaggctttacgcgcatccgcgcccgctgtctatggcacagtgttttacagcacaaaatgtattgtagcaccagacggccctgaagtcaagtaaattcttatgcaggcgcgtttgcggcatttgcatacaagtgaaaaacgtctgcgagtcctgcatgcaggttgcctcaaataaaaggcctgcggtcgagcaccaggcgcaggggaacggtggtttcgatttcgcccggcagcgcctgcgcaagttccgccagcgcgcaggatgcgccaaagagcatgtgcaaatcgttccattccgcgtccgtctgccaatcgagcgccgccagccaatccacgtacgcacgggcaaacgcctggagttgcgcctttccctcggcaaagcgctgtggcgcctggcgcagcgcgcgattcagacaaaacacccaatcgatttccataaaaccaaccatgcggccaaagcgctcgcccagcgcatgatccttatacagttctatgcaggtgtctaccaacttggcggcatagggaatgggccggtgcgcgctttcgtggttgaaaatataatggaaccagccgtacaaatggtgcgccgcgggcgctttttgcgcgtccaccgccccgcgcaagctcataccccacttgggatcacaatgttcgcgcagccaggcgaaatacgcgttctgccaggcggcatccgcttccccggcgatggtcagcgcagcaaacacgcccgcgccctggtgcgattgcggccagggattgcccagccaatccagcccttccagcagggcgaacaatccctcgcgcgtgcggtatggctccaacgcggcgagcggatgggcgggacgttgatcgaacaactccagcgcggccacgcaatgcgcggtggtgtgcagcggatggtgcgttggctcgcaaaacaggccggtatccgccgcctgcatgccctgcagggtcgcaacccatttggcgcgcgcctgcggttcgcgcacaaacgcgccgatggtatacagcaggttggccgcgtccgcgcaaccgtattcgttgggcgtgcagtcgcgttcgttcgtgccatttttatatagccaacgcgcataagcgccttcgctgaggcgatggctttccacggtttgggcaatgcgctccaacaaaaaatccaattgcatgggatgccccctcactttcgcgccttttcttcgcggtgcatggtcacttcgcccgcgcacagcgcgtgcagcgcgcccttctcatcgcgcacgagcaattcgcccgccgcgccaatgccctcggcgcgcgcatgccgccacacgcctttttcgcaataatcgatctcgcggcccagcaaaatggaacgcgcgcgatattcttccagcagcgcctcactggggttcaaagcgtcgcgcagcaaattctgataaatgcggcccgccagcgcgtcgcgctccacgccgcccagcgcgccagcaatgccgcgcaattcctcgggcagcgcgccttccgccagattcacgccaatccccaccaccgcgccgcgcgcgccgccgggcgacgttaccgcctcggccagaataccgcaaatctttttctctcccagcagcaggtcgttcacccatttgatgccaggacggtagggcgtgcacgcctcgattgcctcgcacgtggccaccgcggccgcaatggtcaaccgttccaacgcggccccatccggccagaggatcaccgtcatatagagtcccgcgtccgccggagaggcgaaggtacggcccagccgcccacgccctgcggtttgtccggcggcgatgaccagcgctccctgcgcagcccccgcacgcgcccaggcctttgcgcgcgcgttggtagaatcgattgcgcgataggcttcgatctcttgcgcgccggtcagcgcgcacagccttgcggcccaggcggagtccttacacatcgcggatcatctgcacatatggcaaattctcataacccagccgccgatacagggcgatggcgcgcacgttctcgggttccacttccaggcggaaacggcgcgcatcgcgattttcctcggttacctggcggaaaaactcgctgcccaacccgcgcgaacggaattccgcgcggatgtacaattcctccagccacaccaccggcccgcccgcttcgtgcgaatacgaacgggcggtgagcccatatccggcaaccgcgccatcgcactcgatcaaatagccggaaatatacgcctgggaacgcatcatttccgcaaacgcatccgtgtggtaggcatcgggcacatcatgcaacaccgcgtccgacgcataaaattcgcgcgtgagcgcgagaaaaatttcccggtcatcccgggttattttgcgcaccatattttttactcctcgcgaccaaacttctcttaaaatgcaaatatagcgcaagatttcttcggtaatcttgcgctatattttggtcgaggtgacaggatttgaacctgcgaccttttggtcccgaaacgcattaccatcttgcatattatactatattcgcggtattatttgaatatcctgccgcgctagtttgtaaaataaattgattgactaatagagaatgcttaataccacattcctaccacatcggaagccattttagctatttttttcaaaagggtgcgccaaatggagggcaagcagcagagagcaagcgtaatcgtgttgcgtggacacggtgaagacaggttgaggcaagcgatcatgcaaggccttatcagggacgatatagccgccgacgtaaacgaagtgctcaggcagatagatgccgtaaagcaaagcaataagcagcttaatgatgaatactatcaacagaaacaggaacttgaacgctttagggcgatttactacgacgcgctgctctgcgcgcaaaaggcaaagacccgaaagaagcaaaatcaggatactgtgatgtatgcgttcgtggtcggaacgatattcatcatcgtgttggccagcatgatgatttgcagactgattttcggatagcgaaaggagagatacagacatggacaagttttccatcatcaacagcgcaaagatgatttccgaggccagaggggatgaggcggatgctatcctgatttgtcgcatcaacgacggcgaaagccagatcagcatcattggcttgaacaaagacaagaccgacgcgaaagcgattctgatggccgaatcgctcgttacgctgatcaaaggcgatctgagcatggcatacaagctcaacgcgttgttttataaatacggcatcactcagtccagcagccagcatcactacaccatcgggctcacgcgggaagaagctccgctctacaatgcgggaaaggccagagatgaggcggagccggaggaagattccgtcgaagacccggaagcgaagaacactgggaaagtctttgcgcgggagcttgtggacgcactcttgtacagcgttttcggaggtgacagcagcaatgaggatgacgcttgagaaaatcaagatctccaatttcaagggcatccgaaaactggagatcgacttcggttccgtgacgcgcatcagcggcatgaatggcaccggcaagaccaccattccggacgctttctgctgggtgctgtggaacaaagattctcgcgggaacgcgcccggcagctacgacttccacgaaaagccattgaatgaggacggtgaagaaatacacaatctcgacacgacggtagagctggactgcaggcttgacggacagcgattcaacatcaagcgcacccagcgcgagaactgggtccagaagcgcgggagcgcggatgctgtgtttcaaggcaacacttccacgtactggataaatgacgttgaaacgaaacttagcgacttcaaagcccgcatttcccagattgccagcgaagaaatcttccggcttatcggcagtttatcggcgtttaacgccctcgactggaagaagcgcagggaacagcttatcgccctctcagacgtggacgttgacgcgatgctcttacagcaggagcagtaccggcctctcgctgatgagtgcggccagcgcggaatcgaggttgacaatctccgcaaagtgctatcggatcagcgcaagcggacgaacgatgaactcaagatgatacccatccgcattgacgaagcccgcaaagctatgccggaatttaggcccaatgaagtctttgacgctgagtacatcgtcaaagacaccatttcggacattgagcgaatcaacggttatatcgcggagatcaatgctcaaacaggggcaaccggatacagcgaccaaatccttgcacttgagacggaggtattgagcctgcagcgcacagtggcggacggataccgcgcagatatgcgcaagctggagcaagagcgttccatcgcctcggactcctaccgcagaactgccgatgcacttgccgacactaaacgcaggctcgaatgcgaccaaaaagagcttttggaggcgaaagctgcccgcgacgcgctgcgagccgattatcggacggaatacgagcgcagatttgcgccgccagaaacagatggcatctgcccaacctgtaagcagccgctctcggaggatattataaaatacattgcttacgcagtggcgttgctgaatctccaggcagggttgtaggaacgtcattgcttatatgtaagtgcagttcagaaaaacccagagacataaaatgcaaatcctagccgcaacaaaagttcccaatgaaattgctgcccgaaaacgatgctgcaagcgatctggctccgcttgtcctagttggatttcagtcacctatccagcatggatattcgcagccaatgcgaaaagcatgcaggatactgtgttgtttccagggattcaccaggcatatattacaatgagcggacgttttgatgtgcacaaagctcacatgaagctggcatgcaagccgtcaacatactggcaataatcggcaacgcttacttgcattttccaggaaactctgatatactgtattcagatggatgtggatcaatgcgtcgaggtcggtggtttggtgcaatttcggattaaggagaggtgttgaaatgaagagacggttttttatcgcgacgatgctgggattgcttgcgcttttgctgtgcggcacggcgctggcttgtccaaatccctggccttgccctggtactacttatgatattgagtatgcaaaagaggcctatcatctcttagtgtgcacagaatgcggatacaagacagcttattctcattttggagggcaggccacatgcacacagcgcgcgatatgcgaaggatgtggccatgaatatgggccagagccgattggacaacatacatggggcgagtatactcctgacggcaacgctacctgcacagcggacggcacgaaaactgcaaaatgcatcaactgccccgagaccgacacggttgccgacgtgggcagcgcgttgggccacagcttcacggattatacctccaacggcgacgcaacatgcacagaggacggcacaaagaccgcgtactgcgcccacggctgcggcacaaccgacactgttgccgacgtgggcagtgcgctgggccacagcttcacggattatacctccaatggcgacgcaacatgcacagaggacggcacaaagaccgcgtactgcgcccacggctgcggcacaaccgacactgttgccgacgtgggcagtgcgctgggccacagcttcacggattatacctccaatggcgacgcaacatgcacagaggacggcacaaagaccgcgtactgcgcccacggctgcggcacaaccgacactgttgccgacgtgggcagtgcgctgggccacagcttcacggattatacttccaacggcgacgcaacatgcacggcggacggcacaaagactgcgtattgcgaccgcaactgcggcgcaactgataccatctccgacgaaggcagcgcgctgggacataattacaaggcagttgtgactgagcccacctgcgtgaagagcggttataccacctatacctgcacccgctgcaacaattcctacacggacaataagactgctgcgctgcagcactggtacggtccatggagctttagcggtgacatgacccatagcgcgacctgccggcgagacggatgcggatatgtgcgcacgagggattgtacagcctatacaatgaccgtgggcgataatcaggtcagtatatgtccagtgtgcggcaatatgaacgggataacgatgagtacgctcaaggccactgtcaccagagtagataatggagtcaatggcatccccaagcgcggcgaattgagtgtatgcgggttggaagcgccctttgacggcatattgtacgcgctgaccattgcccatgagtatgccgggacgctggacgaattcaccggcatggtacacattgagataacactggagatgccagacgaattgccggaattccagcttgtccgtgtggacgtgacggaggctgatgaagatactgagcgcgcggaggtctggactgggatagaatacaattatgaagacggcgcgttgagtttcgataccgatacagcaggtatgttcctgctgctgcccgttgaatgatctatctcacttagaggatgcaggcgaatggcttgcatcctctttcatatgttatacggtacggtcggtaaccacatcgtgtatgtcgcgccgcgttcgggcaacacatgccggggattcatgttgaatggaggatcactcaaacatgaatgcccgcaaactgttgccgatgtccgaccgctcattgtattaaatttctgattataaccaactctgactcatatgcgctggcgaatcggacaatcctgttcattcatccacctttatcggttgtcattcgattgcagccgaaagggggattgcccgcttgcgtccggttcgaccaaaaatgcggaacaaaaaatccggacttgttttcacaaatccggataaatttggtcgaggtgacaggatttgaacctgcgaccttttggtcccgaaccaaacgcgctaccaaactgcgctacacctcgaaaaatggagccaatgaagggactcgaacccttgacctgcggtttacgaaaccgctgctctaccggctgagctacattggcacgtcacagaatattattatagccatatgaggccgcttcgtcaagaggtatgcacaaagtttaacaatgcaaaaatggcccgcgacggagggcgccgcaggccatttgggaggaggttggcacgcatgccttggatggcgctaataggcctcgtaaatctcgcaatacaacagatttcccgtttgatacagaaccacgctgagcgaagcgccctggcccacatactggaagcggaaatcgtcgtcgccatagtcgagcagaatcgcctcgtccgaggatgcgacataattctgattgtatttttggccataggtatgcttttcggtgatgcgcacgcagtccaaatcccggatggccagatagatcgtgctggccgtttgcgccacgccaccaccgcgcacacgcgccccgcgcccattcacggccacgcggtaacccgtctgcgcgctgcgctcgcccaccaaatcgttgaacgaaaattcctgcccataggccaggcgcacgcccgaaatggcggaggcggcgcgcatcgcgttgaactgctggtcctcgccgctggaaaagatcgtatacgcgctggaaatcagcgcgctggacggcgttgacggcgcgccatttccacccaccgtcaccgttacggacaagccgtattcactggcctcggtgtagaatgtcatcgtgcccacgctgttgaaaaacgccatgtcctgctcgttggcatagtccaccagcacggcgctgtcgccatccacggcataattgtccgcgaacttatcgccataaaagtgcaattcgctgaaatccgcaatgcccgcttggcgcaccgcctgatacaccgtggtggccagctgtgccgcgccgccgccgcgcacgcgcgcgccgcgcccgttttccgccagcttatagccccactgcgccgtgcgcgggccgatcacatcgttgaacgagaaggtttcacccaactccagcacatacccgttcaagcggctggctgccaatgaaacgttgtatattttgttttccgaagaacccaacagcgtggtatagcccgaatacgcgcgcaaaccgccgtatgcgctctgcgccgaagccggcagcgcgccgagcaagagcgccaacacgagcgatagacaaatcaagcgctttttcatgaaaccccttcccttcccgcttttcctattagacgcgcgcgacgcgagcgcggttcccatcttctgccaaattcgcgtgatcaagatatactcacgggcacatccgtcaacgcctgcatttgcgcgcggtacggctccagcgcttcgcgcgccaggctggtgcgcagcgcataaccaccctggcgacccaactgttcccgcttggaaagccccagtggatgatagggttccagttcgatccctgtcacgtgtttggcggtattcgccagcgccgcaatggcggcgaaatgcgcctcgcggtcgttcacgccgggaatcaccgggcagcgcaagagcgttttcgcgcccatatcatccagcatgcggaagttgtccaggatgcgcgcgttatccacaccggtaaacgcccgatgccgctgcgcgtcggtttccttgatatcaaacaaaaacaatcgcgtatacggcgcaatctcccgcaaggtctggggcgagccatagccgctggtttctatgcaaagggaaattcccctttcccgcaacaaccgcgccaccgccagggcaaactccggctgcgccaggggttcgccgccactgaatgtggcccctccctcttccccatagaaaggcatatcccgcgcggcggcatcggcggcctgctgcgccgtgtaagtttggcccaggatcgccagcgcgcccgtgggacaggccgcggcgcacgcgccacaggccgtgcaccgttcccgcaaaatgacgtgcgcgccctgctggcttgtatgcgcaccggagggacacgccgccagacacgccccgcagccgatgcattttgcggcctggaagctcagttcaggccgcgcgcgatagccctcgggattgtgacaccactggcaccgcagcgggcatcccttaaagaacagcgtggtgcgaatgcccggcccatcgtgcacggaaaaccgctgcacattgaacagaattcccgtttccatgtggattccgccctttcgcgaaatttcctgttttccattataagggccgaagcgcaacctgtcaacccagcgaacggccgctttcgcccgcaaaaagcggcggaaccgccctcaccggccactggccgcatagaggcgttccgccgcaaaacccctgcgaaaaaatgctggaattaacccttgaccgcgccaatcatcacgcccttgacaaaatagcgctgcaagaacggataaatgcacagcacgggaaccgtggtgagcacgatggccgaatacttgatggcctcggcaaattcgttcacctggtcgttttccgccgcagcggagttgagcaagttcgaattggcgatcagcaccgcgcgcaacacgttctgaatgggcagcttgttgttatcctgcaaatagatggatgccgggaaccaactgttccagtggcctacgccgtaatacaaaaggagcacggcgatggtgggcataatcagcggcaggatgatgcggaagcaaatcaccaggtcgttcgcgccgtcgatgtgcgcggattcttccaagctatcgggcacggcttcgatggcggtacggcagatgatgctgttgtacacgctcatggcgccgggcaaaatcagcgcccacagcgaattgtacaggcccagatcgcgcacgttcaaatacgtggggatcataccgccggagaagaacatcgtgaacatgatgatgcccagcacaggctttttgaacatcacgttcttcgaagccaggaagtagccgcagaacagcgtgagcaaaatgttgatcggcagcgacaccaccagcacgaagaggatattgagatagccactcaccaatagcggatgggtgaaagccagctcataggagccgacggtgaagcccaccggccaaagaatcgtgcccggatgcgcgaccagataagagttctccgtgaacgacgccacaatcacgtaccacatggggtacagcgtcacgatgcaaaggagcaccagaatgaaaccattgatgaaatcgaagatgcgctcgcccggcgttttgcggaacgcattgctgcgctttttggccgttacctgcatgatgatacctcccctctagaacagcccggattcggtcgttttgcggctgaaccagtttgtgagcagcaagaacacgatgttcactgccgtgttaaacaggccgactgccgtggagagggaatactgttgcttttccaagcccatgcggtatgtataggtggagaacacgtctgccacctcgtacgtgttggccgtgtacagcagcagtaccttttcataacccacgttcaggatgctgcccatgcgcagcacgaagaggatcataatcgtgggcaagatgcccgggatggtgatgtgcacgatctgctggaggcggttcgcgccatcgatgcgcgcggcttcatactgctcctgatcgatgccggacaaagccgccagatagatgatggaattccagccaatgctctgccaaattccggaaattacgtagatcgagcggaacgccccgggattgatcatcaaattctggcgcgtgccgccaaagaattccgcaatatccgaaaacaggccgttttcctggcaatagatcttgatgagcgagcaggtgaccaccaaagagatgaaatacggcatgtaggtgatcgtctgcacggtgcgtttgaatttggtgttcgtaacctcgttgagcatcagcgccagcagaatgggcgcggggaaaccaaagacgatgctcagcgcgctgagcaggaacgtgttgcgcagcagccgccagaaatagggatcggtgaagaacgtttcaaaccacaggacgcccacccagtcactgccgaagatgccgcgcgtggtccggtagttcttgaaggcgatgatgagaccatacatgggcttataggcgaacagcgcgagatataccagcaccggcaaaatcagcaggtacttgtatttgttcatcttgaaatcccgcgcgagccgcgttcccagcgaatgcttgttataaatcgaaggatttgcctttaccatggttttattccaccctcgctttcgtgcgcgcccacggtgggaacacgcccgcctgatataaaaggcggcggagagcgcaggatgccgcgcatctccgccgcatgaagatgaacctatgccctaggatcgaagattaacgggccacgtagcgatcgtagcaatcctggcgaatttccttgatttcctcatagttgtgggacttgagggattcaaggtgcgcttcccaagccgcgtcgtcatcgatatcctgcgcgccggtgaggaagttcgcaaagctctcggtgcaataggtgccgatgctctgcccgatgagggaaagctcgtcggactcatccagcgtgaaggtcgcgcccaccggccacttccaataggaggtcacatcctcattgggatagaaccagatgtcattggccgcgatggccgcctcggagttcttttcatacagcagcttggtggcctggatgcaggtcgcgccccaggtcgcgccgccatacttggtgacggggtcggtatcggtgtcgttggccaacagttccgtgtactgcggctcgccgtcctcgccatactcccaggacacgccttccttaccgaagttccagtagaggaagccttccgcggtgtacgcgtagtcgagcatctgcaggcagagcttcatggtttcttcgtcggcagaagtggtgataacgccggtctgcgtgccgatgcccgggccgccgaagaccatgctcagcgtgccgtcatcgccggtgggatactggatgcccgcccaaacgggttccttgccatccgccacgcgctcgttgttccagttggtcaactgacccatggaggtgatggagatacccacctggtcgttgtgcaccttggccttgatggaggtatcgtccagcgagaggctatcctggtcgagcaggccttcctcccacagcttgttcaaccaggaaacgtaggtgcgccattcgggctgcgcctgcgccaggtcgaccacgccgtcttgcacaaaccaggtttcatccgaagcgccgaacgcgccgaacgcgccggagataccagtggactggaagcggctccacgcgaaggagaacttggcgccgtacttctcgttgaacacgcggatgacgttttcgaattcagaaaccgtcttgggcgcttcaaggccgcactcttccagccagtccgtgcggatgaccgggccgaggtaggtgtcgttccagccgccgtcctcgcggaagaagccgaaagtataatactgaccctcgtccgtcttcatcgcgcggtcataggccggattgctctgcaggaaggcataataggcgggagcgtattcctggatgtaaggagtgagatcccagatgatgccgtcttccagatagaggttcgcatcgttcatccagtaggtcatcatgatgtccggcaggttggcgggatcggcaagcagcgtgttggtgaagacgctgccggtggaacccgcggtgggaatgatccactcgatgttcacgccgagcatctcgctcaggcccgtgtggaagggagattccgtccagtccgcatacttctcatgtggattcaggttgctttccgcataccaggtaatcgtcttatccgaattgagcggataagtgtccgcgccggagagcaaatccagtgcggatgcggggatgcaggcgagcgccagcatagccacaattgtgagagccaggaatttcttcatgccgagtcctccttttattttaggcgcgccgctcgcgcgccctggggcacaagaaaaaaccgcgctgtctcttgcgcaaaggatattctaccttgctttactgtggtatatataatagcatgtccttttgtctttgtcaatcaaatctcaatttttgatatatataaatttcttataattatagccttctataaatggcattattttatatacattttattgtttattaaaaaacatgcacatattatatattaaattattcataaaatcatataacttatttatattgctctatttttaataattattcgtactctcgtagaatttttctacgcatcgccgcgctctagatcacatttgtaagaaatgcacagtttatagggataacacaaatgatactctctatcgcgccaacagatgccctgcctatacagcaaaccgctttctaacccatacataaattgcgtttgaacccgacacagcgcggcgcaaacaacgcttttgcactgagcgttaacggtgcagaccgcgccgctgagcactgcataacatatacgccctggaagcagtagcccgcagcaaaaatgcaacgctacacctttccgcttgtctttattatcagaggattgccccgcgcgcgaaaacatggtataataaaaatgaggaaaggcgatcgcaaaggagggccgcggaatggcggaaggaaattggggaagcgcgggcat

SEQ ID NO: 2738 - DNA, 3055 bp, Unknown
  16S sequences of unknown bacteria
acagccgagtgctccaccattgagctaccttggaacatttgcactaatttatgattagagccgaatattatattagcacaattgcacaattatgtcaatgcaaaaattgaaaatttttaaataactcttaccttaacaaattctaccttttccgatataattcgtgcgcttcctgctgtcatatctgccagaaaagctttcagcctttcttcgttttccggttccgtcgaaagctgcataacaatactgtctgtatagcttatattttctacactgaaaaactcacctgctaaatttttcatttttgcaagatacgaataggccatccgaacttcgagcacgagcatctcgcgtacatctgcaattcccgctgcctcaagcgcgagttttgcgctgctcgtatacgcgcgcacaagtccgcccgtaccgagctttataccgccgaaatagcgtgtcaccaccactgctacattcgtaattccttcttttacgagcatctgcactatcggcgcacctgatgttccctgcggctcaccgtcatccgatgcccattgcagctgcattttatttcctatcacaaaagctggaacattgtgtgtcgctgttttatatgatgcccttatttccgcaataaattcctctgccgcttctttactcgttaccggctttatgtgtgaaataaatctcgatttttctattgtctgttctgcttccgcttcttccatcaccgtcttgtataaaatcacagcggcctccttatactttttggtttttcgcagacattatgcttattgcagctttcctgcacacattgatttctataatataaattcgcggtatctgcccgcatccgctgccgataattctgcgtccatcagcgtacctttttccgtatattctgtcgcaaacaccgtcgctttttcacacagacgcgatacgatatcacctttgtcatacggtacaagcagctttgcacgcatgcgatctgcaaacaattttttctttataagcgtcagcagctcatctatgccgtctccgcgtttagcagaaacgcatactgtctcatgctctccggagcgcagcagtgtgctcactgtttccggctcgtcatcaagcaaatcaaccttgttatatacgataatacgttccttgctgcccgctcctatttctttaattacgctttccgtcacatctatatgaaaatcacgctcactgtatgaagcatccgttacatggagcagcagatcagcataattaacctcttcaagcgtagccttaaaagcttttaccagcgaatgcggaagcttgcttacaaatccaaccgtatctatcaatataaactcataattagaatcaagcttaatactgcgctgcgctgtatcgagcgtagcaaaaagcatatccctttccatcactgacttgtccgctttttcggaaagcgaaagcagcctgttcataagtgccgattttcccgaatttgtataccctacaagcgccactaccgggatctcattcttttcacgtcttgcacgctgtgtgtttctcgtaccaataaggcggtttatttccgcttttatatcgtctattctgcgctctatatgccgtctgtcagtttccagcttcttttcgcccggaccgcgcgtaccaataccgcctccctgccgcgaaagcgatttgccgaatcccataagccgcggcagcctatactgcagctgtgccagttctacctgcaattttccctcacctgatgttgctcgcgctgcaaatatatcgagaattaaaattgtcctgtctatcacgcgcacaccgatttcatcctcgagatttcttatctgcataccggaaagctcttcgttgaatattacagtgtcgacttccatattttctgcgagttctgcaagttcgcgcacctttcctgtacctatacaggtagcgctgtttctgcgctccgcactctgcaccatctttccgaccacttcgcagccggcggcctcagccagacgctcaagctcgctcatcgaatattctatgctcccgccagcttcaatccctacaagtatcgcccggcactcgtattccgttataacttcattcttctcatcaaaatttatcataaagttctcttctccccttttctcaacaattattttaccatacagaataaagcttgcaaagagccagcgcacacttatatatccattcttttttgcctctcctatctttgccgcaactggcatcacatgatacggactggcatatgcccctgcgctgcctctaaactgcatccaggattgactctttcggcacctgtacaaagctctccggcactttaccgagtattatcgcctctgccaccagtatggtactttccacctctatatgatgcatcgaaaacggcgccattacacgcgcttccgtactgagcactacatatactttgtattttgtctgatttatgccctgcgattcaaattctgtgataaaatcgattttcgataccgccacaggaattatcgtgagctccacggtcggtccgctctgcgaaaggatcttgcttccgatgagagagcctatcggcacctcgatatccgtacccgcttcgccgtttttatacctgtcctgaagttctaccaaaagctcggaaataagattatttatcgccgcagtatttgactgtaccatttctatgctgccctcttcatccgtttccgtaatgagaagattccctgcggacgtctcatttccgaacttctcgtttatcgtttcgttaacgattctatttacaatcgacttggtctttatcgcgctcacagcttcgagattcggcgatatgcgaaatacccagaaatacgccatatatgtaataagccccataagtatgacaagcaccgccaatttaaatgcgcggtgatcgtaatttttccttcttacgcttcttctactcataaaaatacccccgatcattatatgatgaccgggagatttttgttacatactcactttagcaagctcttctctgaatttactgtaacgtgtcacagtgcatcaggaagcg

SEQ ID NO: 2739 - DNA, 8867 bp, Unknown
  16S sequences of unknown bacteria
taaacagcagtggcgcataacgggtctccttcttccgttcaatggaacaaacctctgcttccgtctgttccagtgctttcatcttctgaataaaggcttccgcgtcttcctttttcttaaatccattttccttatataaaagaggagactgaaaataatcgcttccctctactgcacgccattctccctcaaactgctctgctgccagttcctgtgtcaaaagcacccgataaaatggtgtcttcacaaagcttcggatctcacgttctctgcgcaccaccatgccaagcacgcaagtcatgacacgtcctacggagatcaccgtatacttgctattctgaaaatttgaaacagctcttccatattgcaaagtcagcagtctggaaaaattgattcccatcagataatcctccttggcccgcagataagcggaatgggacagattatcataagcagacagatcttttgcttcccgaatccctctgaggatctcctcttctgtctgtgaatcgatccacacacgacggcgttccttgttctttacacctgccatctgttctaccagacggtaaatatattctccctcccgccccgagtcagtacagacataaatgcaggtcacatccggccggttcagaagagaacttacgatctgaaactgctttttcacactgctgatcacttcgtacttccattcctttggcaaaaatggcaaggtagtcagagaccagcgcttgtatttttcatcataggcttccgggtagctcatagtcaccagatgacccacacaccaggtcaccaccgcttccgtggcttccagatagccgtcttttctgctgaaatccagatgcagcgccttggcgaattcctgggcaacacttggtttttccgcaatatataaagatttgctcatgcacaacttctctcttttccaatatatgccccacaggacatcgtgtacaattatagcatgtttgtgatataatgtccacgatagtaaatcttagagcaaggagaatttcatgcgcattgtcggtatcattgcagaatataatccctttcatcagggacatgcctatcagatcaaaaaagtccgggaactgactcaggcagacttcatcctagtgtccatgagtggtaattttgtacagcgcggtgctcctgccatgtttgataaatacaccagagcccatgcagccctcctgtcaggcgctgatctggtgttggagcttcctgtctccatcgccaccggaagcgcagaagcctttgccagaggcggcgtcagactgcttcatgatacaggtattgtcactgatctgtgctttggaagcgagtgtggagatctgtcttctcttgagcggctggctgcatttctcgctgaggaaccaacagactataagctgtatctgcaagatggtttaaagcagggactttcttttccagccgccagagaacaggcggtgagactcagtgatccatatctccctgcagaacttctgggaatgcctaataacctgctgggactggaatatctgaaagctcttcacctgtatggaagttctatccggccgtttactattcagcgggaaggatccggataccatgatacggatgtatcttccggacagtacagttctgccagcgccattcgtgccgaactgatccgttccggcggacatttttcagaagaactgctggcacagcttcctcacccggaactctatatatcttacgcagatcatccacctgtgacagaagatgccttttctcttcttctattagaaaaactgcgaagactctctctgacagacgagccactgtctcaatacgaagggatctccgaagatctggcaaaccggatctctggcgcactggatcagtttaccggattttctgcatttacggatcttatgaaaacccgcaatcagaccagaactgccatcagccgggcactgctccatattctgctggatatcagagcatcgcagcctgcctgcatgttccgcgttcttggattccgaaaggactctcgtgcagtactgacagccctgtcagaccaaggcacactgcctgttgttacttctctgaccagaagccctttggatagaaccagcctctatcccgaccaattatatgagtctgtccgctctatcttgcagcagactccctaccagaatgaatttcgcagaaaaatgctggtcgtatgaccacaggaggaacgactttgaaaaattttatatggaatcgatttacccggtttgtggatgcgatctctcaggcacatacctttcatgcccatttcagcctgttgtttaccatcggtgccatgaccttcgccacggcactgtcgctgttttttcaccagatcactcccactggctcagccaacatcgcgctgatctatattttgaccatcattatgatctcttaccacacagataaataccgctatggcatcatctccggaattatcagtgtctttttcattaactatatgtttacctatccatttggacagttcagtttttccacagcaggttatccatttacatttgctgttatgtattttatctctatcctaagcagtgctaccgtcttccgcatgaaggatcaggctcagaagatcaatgagacagaaaagctgctggcagaagcagaaaaggaaaagctccgcgccaatctgctgcgggctgtgtcccacgatctacgcacaccgctgaccagtatgattggagccagttcctcttatctggaaaatgaaagcaccctctcttctccggaaaagcgggatctggtctcccacatctacgaggatgccaactggctgcttcatatggtggaaaatcttttgtctgttacaaggatcacagatggtatttccaacacgttaaaagagacgccggaagtcgctgaagaagtgcttttcgatgcagtctccaccatccgcaaacgctatccggattatcagatccaggtctctgtacccggtgatttctatgtggttcccatggatccactgctgatcaagcaggtcatcatcaatcttctggaaaatgcttatttccatgccagaagtgaacagcctgttcagtgttatctcaccggagacgatgcccagatccaggttcatatccgggatcatggaaatggaattgcaccggaccggctgaaaagtatcttcgatgctgcaccttctgctccatcctccgccgcagacaccaaacgcggcatgggcatcggactgtctatctgtaaagcgatcatcaccgcccacaatggcgagatccatgccataaatcatgcggatggtgcagaatttttcttcaatttaccaaaggaggcgatttcacatgagtcagaacattcggattctggtcatcgaagatgagaaaaatattcagaactttattacatctgtgctgaattcccagcactatcaggtcatctcgtccctgaccgggcgggacgggctcagtcaggcagcttccgcttctcctgatctgatcctgttggatctcggcctccctgatatggacggtatggagattatccgtaagatccgcgagtggtctgatacaccgattcttgtaatctctgcccgggttcaggaggatgataaagtgctggcgctggattccggtgccgatgattatattaccaaacccttcggcaattcagaactgttggccaggatccgtactgcactccgccatataaaccgtctgaagactgatactggacaaactaaccatccttatcggagtcatggacttgtcattgattttcagaagcggctcatcatccggaacggtgctgagattcacctgacccagaatgagttcaagattgtctctctgctggctcaaaactgcggacaggtgctcacttatgaccggctcattgcccatgtgtggggaccctattccgagaatgataccaccagtctccgtgtacatatggcaaatatccgacgaaagctggaacctaatccttcagagccgatgtatatctttacagaaatcggagttgggtaccggatggtggatgaagatgaaacgtaaaacccctccgggaggcagggtgttcaggaaacctgcgcccggaggggttttacatgaagctgtcagatgcgccattctcatgcaaatgttttatggaggctatgcatgatcatccgacaatatatgtttgtgcatcactgcttagagattctcatcaaaaatgccgccttaacccacaagtcgacgtttcaagtcgggcacgcgccattcgttcccggctgtcggatgttaagctttgctcggaagctcatctcatatgccaagcaggtttcctgacttacggatacaaacgtctgtcctccccttctcacatgtatcatgattgggttatgcaatgggatattgaaaacagactctccgaacacagtgaccggatcgctcaggacttacacctgattcccttttcgtatcaaacttgtcgatacgcacttgacacagcattctttgcacatttttattttatatcattctgtgcatactgtcaagcatcagtctccattttttgtgcacttttatgtactttaattcttaaagctatggatcggtgctggaattcttccgccacgatttacaaatgcatcacatgcaaatttgtttaccggcataaccggtgcatatccgagaagtccaccaaactctaccatctcacctacaccttttccgatcaccgggatcagacgaacagctgtggtcttctgattcaccataccgatggccatctcatccgcgatcacaccggaaattgtggttgccggagtatctcccggaattgcgatcatatccagtcctacggagcaaacacaagtcattgcttccagtttttcaattgtcagtgcaccatcctgaactgcgtcgatcataccctgatcttcgctgaccggaataaatgcgccactcaaaccacctacataggaagatgccataacaccgccctttttcacctggtcattgagtaatgcaagggctgcggtagttcccggtgcacctgcgcgctccagtccaatctcctgcaggatttcggccacactgtctccaatagccggagtcggtgcaagagaaaggtcaataattccaaatgggattcccattcttctggatgcttcctgtgcaaccagctgacctacacgggtgatcttaaaagctgtcttcttgatggtctcgcaaagaacttcaaaattctccccacggactttgctcagtgcagtcttcacaacacccggtccgctgacacctacgtttattactgcatccccttcagtaactccgtggaatgcacctgccataaatggattgtcatccggcgcattgcagaagacaaccagctttgcacagccaagagaatcattttctttcgtaagttctgcagtctctttaatgatctcacccatcaatttaactgcatccatgtcgatacccgtcttagtggaacccacattaatagaactgcagactctctccgtctctgccaatgccttcgggatcgcatgcatcagaaggtcgtcactcttcgtgatcccttttgataccagcgcagaaaatcctccaaggaagttcacacccacttccttcgctgcctgatccaatacctttgcaatctccacataatcatccggagtcttgcaggcagatccgccgatcaatgcgatcggagtcacagagattcgtttatttacgatgggaatcccatactgtgcctcgatctctttaccggtcttcaccagatcttttgctaccgttgtgatcttattataaatatttttcttcagagtctccagatctgtatcaatacaatccatcagactgatacccagtgtgatggttctcacgtccagattctcttcctcgatcatcttattggtttccagcacttcattaatatttatcatgctttccgcctcctaaattctatgcatcatattgaagatatcttcatgctggcaccggatcaccacaccgatctcctgtccaagtgcagccagatctccggacatctcagttacgtcacctgcatttgctgcatcgacgatcatcatcatgttaaagtacccatctacaatcgtctgggaaatatccaggatatttacctggtgatcagccagataggtgcagacttttgcgataatacctactgtatcgcggcctactactgtaatgacaaatttgtttttcataggtttctcctccgtcttaaaagttacatataccggatatacaatccctctctgctacctgaatatcaaaatcctgaggcatgtattccaccggatccagctgaatctccagcttcaccgtttcataagccagctgtgcataattattctctttactcaggtggccaaggtatatctttttcatattgtcatgcaggattctgcataaaagctgtcccgcactctcattggacagatgtccccgctctccaagaatccgctgcttcaacggataaggatagggtcccacctgaagcatctggatatcgtgatttgcctccagcaatactacatccagtccttttagatgctctactatgtaatcgttataaattcccatgtctgtggcaactgcggcactttttccgttgctctcaaaccggtatgccaccggatccgccgcatcgtgagaaatatggaagggttctacctccacatctcctatggaaaatgtctcatccggtctgattgtatgatacagcccttcatcaattgctcccaggctgctcatgcccttcatctgatcaatcgttccctgtgtggcatagatgggaaatccatatcttctggcaagcactcccacacctttgatatgatctgaatgctcatgggtgatcagaagtccctggatatcatggccttccagctccaagtccttcagtcctgcctctatcttctttgcgctgactcccgcatctaccagtaaatgggtgtcatcggtgcctgtatagatgcagtttccactgcttccactggcaatactgcataatctcatgtatgtctcatccttctgtcgatctgccggtgcgtctcctcggcactgccattgttatcaatcacaaactgacaacgttccagaaattcttcatgacttttctgtgctgcaaacatccggtcgatcttctcatcgctataaccacggctctctttcaatcgaagcctccggttatcttcgctcgtataaatataccatgtttcattacaaaatgcatcataattttcttccagaaataatgcggcttctaccactgtatatgacacattctccaactttgcctgttcaatcctcctgagaatttcctgttttacagccggatgaacgatggcgttaagcttctggcgcatctcttccttatgaaatacaatatctccaagcttctttcggtcaatggtctgatcctcactcagaatctctctgccaaaggtttctataatcgcatcgtaagccggaagccccggctccatgacttcatgtcccaccagatcagccaggatcaggcgggcatgataagttttcttcaaataatcaagcaccgtacttttccctgctcctacgcctccggtcactccaatgatcttcatttatttcgcctcataccagttatttcctctatgcagatctatttccaacggaacctgaagatctgccgcctgctgcatctcttcccgtaagatctgctccacctgatctgcttccgacaattttgcttctatcaaaagttcatcgtgtacctgaaggatcaggcgggactccagcccttctcttagcagacggtcatgaacccggttcatagcaatcttgataatatctgcagccgtaccctggatcggagagttcatagctacacgttcaccaaaggaacgctgcataaaattagaagatttcagttccggcaccggtctgcgtcttccgaacatggtagtcacatatccctgctcttttgcatcctgtaccagcttatcaagaaataccttgattccaggataagtttcaaaataccggtcaatatattcctttgcttccttcgtggaaatgctcagatcctgcgacaggccaaaggaactgatgccataaacaattccaaaatttactgcttttgcatttcttctctgaagtggtgttacttcatcaaacggcacatgaaacacctgcgaagctgtaatccggtgaatgtcctctgcctgtctataagcttcgatcagtttttcatcacctgacatatgtgccagcacacgcagttcgatctgagaataatctgcatccacaaatacataaccatccgatggaataaatacctttcggatcaggcgtcccagttccatacgaaccggaatattctgaagattcggctctgtactgctgatccgaccagttgccgtaatcgtctgattaaaactactatgaatccgaccgtctgctgcaatgcatcctgccaggccatctgcataggttgattttaatttggtaagctgtcggtattccagaatatcccgaactatcggatgttccggtgccagtttatcaagcacttctgcagaagtagaataaccggtcttggtcttcttaccacccttcatgcccagcttttcaaacaggatcacaccaagctgctttggagaattgatattgaattcttctcctgctgcctcatgaatgctcttttccaatgcactgatcttgtccaccagtgcctcgccgtatgctttcagttcttctgcattgactcgcatcccttcctgctccatatcaaacaaggtaaataccaatggcatctcaacctcatcaaacaaagagcgcatttccatttcatcaagc

SEQ ID NO: 2740 - DNA, 4930 bp, Unknown
  16S sequences of unknown bacteria
tagcataattaattataccaaaaaatcgctcagacctcacggtctgggcgatttttctgtcaggggagtttttttacagcccctttcttttgtgagagggttatgttatacttctctatgaaaatatacaaaaggggaaaagtgtaacatgaacaaaaaagtaaaaagcaactatgaacagcttgggcagtatctgggactccggtttgatgaagaacaggaagtgctgcatggacagaaagatggctttgaactgatcgtgggaccaaatgaggtaaatggtaaagtttattatatgctgaacatttgcctgggggctgataatcagggaaaaaccctgacaaaggatgaaatcaaagagttcgtgaaagcacataagactgtgtccggactggtaaatgaaggacatacggtaactatggtactgaaaagctatctcaatcagaaaaagctccgtgccaatgcgcaggaagccattcaggaactgactgcatttcttcgcggaaaaggctacgtgccgtgctgccagtactgtggacgcgagacagagaccgaaggctacctggtatccggtaatcacatcgggctctgtgaggagtgcgcagcctctctggcgcagaacattacgctggcacagaatcaggaaaatgaaaagaaagaaaatatgatcggtggtatcgtcggtgcactggtaggatccctgctcggtgtggcatgtatcgtgatcttaagccagcttggttatgtggctgctctttccggtgtggtcatggctgtctgcactttgaaaggttatgagattggaagcggaaagctcagcaaacgaggaatcgtaatcagcgtgatcctgatgcttgtcatgacctatgtaggagaccgcctggattgggctattatgatagcaagagagctggaagtggatatcgccacaggttatcgttacttcccattacttctgtctgaagatatcattgattttggttcttatgcagcaaacctggttttggtatatgcgttccttctgttgggagcaattccaaccatcagaaatgcaaataagggcaaaaaagtacagagaacttttggaaaacttcgttaacacaaataaaatacaggctctcggaactgtcaggtttcgggagccttttttatgtcagaatctataaaaatgttgcaatctcttccactgcttttcgcttgggcatggaaggttcggctgccggataaccgacggcaattacagcgacaatgatttcggtctccggaatcttgagatattcccggattgctggctcgtcgcggatgcccataatgagagtgccaagatcaagttcagcggctttgaggacaagattttcattctgaagtcccagatcgtagtagccccagccgtcgcctgcttcattgaccggggaaccggtagctttgtcaaatcccacgattccttttttgaaggtggtgatgatcagtgccggtgcaccggcgcaatttttctgattagattccgagaggcatttctgacggaactccccgatccgagagggggacaggatacagtaatagcgggatgtctgctgattcttccaggatggagccagggaggcggcacggatcagtgtctcgatctgctcgcggctgacttcctttcctggatcaaaatttctgatacttcttcttttctcaattacggtctgaaattccatgaaaatactccttttttcaaattttattgttgttattgtcaatatagcattctttacaatcgggtacaagaacatatataataatttttgaaagaagtggcggcgcatggaacgactaatacttaaaaagtatcgcgactattccactatatgtatttcacattttaataaggttgtggtacattatacttaacaaaaggaaatcagatctgaaaatccaatcgtaactgaacatactgtggaagacaacacagctcacagaaaggtaaaggtgtctgttatgaagaaaattttaagtatactgaatgaattttttaaggagtattacaacagtttttcaactgtatgtgcttaatgcgaagttaacctatattgtagagtgtttgcgaataaatgacagaagagtccgggaggctgagaagctttccggactttctgcgtaaaatggacaaagcctctttctatgtgttaaaataaatggacatataagaagggggcattttgcattgaaacatctatgtatggcagtactggcgcatgtggatgcgggaaagacgacgctgtcggaggccatgttgtatgagagtggtacgatccgaaagctaggaagagtggacaataaggatgcatttctcgacacccatgagctggaacgggccagaggaattacaatattttccaaacaggcggaattcgcccttggtgataagaaagtaactctgctggatacgccgggacatgcggatttttcggcagagatggagcgtactcttcaggtgctggactatgcagtactggtgatcagcggtgcggacggagtacagggacatacaagaacgctctggcggctgctcaaacgttatggcatcccggtgttcctgtttgttaataaaatggaccagaatggaacggacaaagagctgctgatggagcatttgaagaaagaactggatgaccggtgtgtggactttgactgtgcttcagactcaggggaatttctggaaaatgtagcagtctgtgaggagcaggcactggaatactatcttgagcatgggactgtttctgaacagactgtacgggagctgattcatgaccgacatgtatttccgtgttattttggatcggcactgaagcttgaccgggtggataaactgttgaaaggtctggaacagtatgcttatgtagagaagcctgagcatgaatttggcgcgcgtgtattcaaaataagccgggatgagcagggtaatcgtctgacatggctcagagtgacaggcggcgtgctcaaggtaaaagatctgctgggtggaactgcggatggggaaggatggcaggaaaaggtgaatcagatccgcgtctattccggaacaaaatatgagatggtcaatgaagcggagaccggtgtggtctgtgcggttaccggactcacaaagacgaaggccggagaggggctcggcagggagcatcagatcaatgtgccggtactggaaccggtactgaattataaactgacattgccaggagactgtgatccggtacagctgcttggaaacctgcgaatcctggaggacgaggagccagagcttcatattcactggaatgaggcattgcgggagattgaagtgcagctcatgggagaagttcagattgagatactgaagacactgataagggaacgttttggggtgtccgttgattttgatgagggaaatatcgtctataaagagaccattatcaatacggtggaaggaatcggccattttgaacctcttcgtcattatgcggaagtgcatctgctgctggaaccgggcgaagaaggcagtggtatgcagtttgcatctgcctgttcagaggatgtgttggaccgcaactggcagcgactgatcctgactcatctggaagagcgtcagcacaggggtgtgctgatcggtgcagagctgacggatgttcggatcactttgatgagtgggaaagcgcaccagaagcatacggagggcggtgatttccgacaggcgacttatcgagcagttcgccagggactgatgcaggcagagagccgtctgctggagccatggtatgatttccggttggagattcccgcagaaaatgtaggacgtgccatgtcagatctggaacatatgggagccaccatgggtctgccggagcaggaaggggagatgtctctgctgaccggaagcgtcccggtagaatgtattaaaaattatcagaaggatgtgacttcgtataccaaagggcgtggcagactgacctgtgtattccatgggtatggtccctgccataatgaagaggatgtgctggaagctaatgattatgatccggaggcagatctggcctatccatcttcttctgtcttctgttatcacggagcaggaaccgtcattccatggtatgaagtaccggaacatatgcatctggaaagtgtgctgaccggagagggcggccgcaaggatggtgaactctcggacacagagatgattgcggcagcagagagactgcgtcaacgtgcaggaaatacgagaagagaaccggattatgcccagatgacagcagatacagaggaactggaagagattttccgccgcacattcggagaaccgaaaagatttcgaaataccgaaatagaaaaccatagagtttacggagaaccgaataaaacaatacggaaaagcgaatacaagcccaaagtacagaccccggaatatctgttggtggacggttacaatgtgatctttgcctgggaagaattaagtgagcttgcaaaagtcagtgtggcgggagccagagagaagctgcaggatattatgtgcaattatcagggattccggaaatgcaatctgatccttgtatttgatgcttatcgggtagaaggccatgaggaagagatcatcccataccacaatattcatgtggtctacaccaaagaggcggaaactgcggacagctttatcgagcggacggctcatcagatcggacggaaatatcaagtgacagtagcaacttctgatggactggagcaggtaatcatccgaggtcagggctgcgccatgatgtctgcaagagaattgaaggaagagattgaacggatcaatcaggagatccgccgggattatgtagaacaatttccgggaagtaaaaattatctgtttgattatgtgccagaggaactggtaaaacatctgcaggaagtacggatgggcgagacggagttc

SEQ ID NO: 2741 - DNA, 5079 bp, Unknown
  16S sequences of unknown bacteria
ccccggctcgccgatgatgacgacggaatagccctgcttgcccagctcgtaggcatgctcttggaccttggagacataggggcaggtcgcgtcgatgacctcgaagccgcgcgcgatcgcctcggccttgacggcgggcgccgtgccgtggctgcgcagcacgagcgtgccgctttgcgcctcgtcgagcgtgtgcgccacgcccacgccctgctcggcaagcgaggccacgacgcgtgggttgtggatgcgggccgagcgtgtgcgcgggccccgggaccgacgacgcctcgcgcgcgatcttgagggcgcgcttcacgccatagcaggcgccggcgttctctgcgattttgatgtcgatcatgttcgtgtctttcgcctcgctaaggtaatcgatgtgtcgacgcgcttggcacggcgctacgaacgggccttgtcgcgtgcctcgtcgcgcagctcgaagcagcggtccatgacggcgttagccacggccatggagcgttccttcttgggaagctcggcaaaggcggggtccttcgggtcgatgggctcgccgaaattgcagtagatacgcgggaagcgcaggaacttgggcttgccgtagggcatgatcctctccgtgccgctgatgcccacgggaacgatcttggccttgcccatgttggcgatgagcacgacgcccgcgtgcgggtggtagaccttgtcgggtcggttcatgcgcgtgccctcgggaaagatgagcaggttctcgccgcgcttgagggcagatgccgcgcgcttgagcgccttgcggtcggcggtgtcggggtcgatcgggatggcgcccgcacgggcgatgagcccgcctatcaccggccggaacagagagctgcgcgccaggaagcggcagccgttgccgtaggcgaacagcacgctccacaagatgacggggtcggcaaaggacacgtggttgcacgcgaacacgacgggctgctcgccgaactcgcctgcccgggggatgttctccctgccgatcgtcttgtacctgaagacgagcttcatgatggggcggacgagataggcggccacgtagatgaaccagttgcgcaggttctcgatgggaacccacaccggcccgtcgtacttcttctcgcgcaggcgcttgaacgggcccatctacgcccgcttctccgcggcaatcgaagcgatgcgctcgcagacctcgtcgatcgtcatgcccgtcgtgtcgagctcgatggcatcgcctgcgggcttgagcggcgccacctcgcgcgaggagtccgcctcgtcgcgcgcgatgatgtcggcgaggatcaccgcggggtcggtctcgccgtagcccttctcggcgttttgcagcgcgcggcggcgcgcccgctcctcggggctcgccgtgaggaagatcttgacctcggcgttgggaaagacgacggtcccgatgtcgcggccctccatggcgatgtcgtcgtcggccgcgatggcgcgctgctgctcgacgagcgcctcgcgcacggccggcaccgcgctcacagtgctcacgacacggtcgacgcgcggcgtgcggatgtcatgcgtgcaatcctttcccgcgatggcgacgcccgtggcgatggggtttcccgcctcgtgcgcgaactcgatccgctcgtcggcggcgatgcgcgcgagcgcatccgcatcggacaggtcgacgccgcgctccagcgcgcaccaggcgacgctgcggtacatggcgcccgtgtcgaggtagtggaagtcgagcatcttggccacctgcttggcgacggtggatttacccgagcccgcaggcccgtcgattgcgatgatcaccgtgaaatctccccttcaaagtcgaatacgttcagatggagtgtaccagcaagtagccggcaaggcgcaggccagttgggcgagcacgtgaaaacgcccccacggaggccgagtacttccgcagaggcgtcattgcaaacgcgtggctagtcgacgagggagatgctctcgatgatgggcatcttgctctcgtcggagatggtgcccatctgctggtcggacaccgcgggaagcgagtcggcgacgatcttgtcgacgaccttcatgcccgcctcgtcgatcgtgccgaacgccgcgtacttgccgtcgagcgatttggagacggcgtcgctggacgcaagcgtgatgaagaaggtgctcgtcgcgctgttgacggcgttcgtgcgcgccatggcgaccgtgcccttcttgaacgaggacgcgagcttgttctcgatgccgttcgacgagaactcgccgacgatcggcgtcaggctcgcatcgtcgcccgaagcgatgttgcccttcgtgccgccctgcaggcagaagccgtcgacgacgcggtagaacgcgaggccgttgtagtagccgtcctgtgcgagcttggcgaagttcgagacggtcaccggcgcgttgtcggcggaaagctcgatggtgaacgcgtcgtagcccttcaccttgacgagcgcgtggtgcgtgccggatgcatacgggccctcggccttcgtggtgtaggacgtcgacgtgctctgcgagcctgccgaggagtccgaggatttgccggagctcgagccgccgcaggcggaaagcccgaaggcgaggaccaccgcagcgagtgccgccacgaggacgggaagcaactttctcatgttagtcgatccattcaatcgaggatatctcgggcatgtcctcgttgaggaccctgccctgctcgtcggtcctgatgtgccagttgtcgtctgccgcgtccaggtgctcgacgatctcgtcgatgacgtccatgccctcggtgaccttgccgaagccggcgtacttgccgtcgaggtaggaaaggtcgctcaggcagatgatgaagctcgaggcgtcggactgctgcccgtcttcggcgcgggacaaggcgatggtgccgcggcgcagcgagttggagttgctcacgccggagtcctcgtactcgccggtgatgaggttgctgttgtcctgcgtgggattgccgaccttgacgtacatgtccttcatgatctcgaagatcggcttgttgaggtagtagccgctgtcaatcaggctcgcgatcttgcggacgctcttcttggcggagtcggagtagacctcgatggtgagcggccggtcctcgaagcccgagaggacgaccttcaggcggtggatgcccgtcgtgtagtcgaccttcttctccttctgcgcctgggcgtcagaatcctgctggtcgccggaaccctgctgcgcctgtgccgtgttggactcctgctgggaagactgctcctgttgggacgagcatccgaccaatgcgatgcacagggcggaaacggaaaccgccaccacgagaatcgccagcaaacgtttcaaagccactcctaaccgatgcatagaatctcagctattctagcgtttataatttcgaatccaaaaagcaacggcccgcttccacgtgaactgcacgagcttttcatagatgcaagcctgccggagaaaggcaacagggtaccatgtccatcccatttcgcagagtcgtcatcatcggcgtcggactgatcggcggttctatcgccgccgcgctcaagcagcttgacgaggcgccgcaggtctacgggatcggcccgcgcgaggacacgctcaagacggcgcttgccgccggcgcgctcgacgactacgcggtctcggacgacccgaaggccgacgggtggctcatgcccggggcaagcgacctcgtcatcatcgccacgccggtttccgccgcccgcgaatggttcgagcggctcgaggcccgccacttcgacggcatcatcaccgacgtcgcctccacgaagaccgtcatcacgagaatcgccgacgaggtgctctccgacccgacccgctacctgcccggtcaccccatggcgggctccgaggtcaacggcttcggcggggcgcgtgccgacctgttccaaggcgcgtactggatcttgtgccccgagcaggacacccaagacgaggtgttcttgaagttgcacgagaccttcagcgcgctgggcgcccgcatcatctccatctcgcgcgaccagcacgacagcgcggtcgccatcatcagccacgtgccgcacatggttgcctcgtcgctcgtgcggctgatggaagaggaggtgggttgcattgaagccggaggagctgctgcgcctggcggccggcggcttcaaggacacgacgcgcatcgcggcgggctcgcccgagctgtggtgcggcatcgccatggacaactccgaggccatcgccgacggcatgcgcgagctgcgcgggatactccagcagttcgaggacgccatccgcgaccacgacgaggaaacgctcaccaagctgctcgccgagagcacggagctgcgccgcaacctgccggccaaatggatacccgaatccgccaagctcacgtgcgtgcgtatcccgatgtccaaccgcagcggcgtcatcgccgaggtcacgggattcgccgggcacgccgcctgcaacatccagtccatcgacatcgaccacatcaacgaagacaccgccgtgctcgagctcatcctcaccgacgaaggcgacatgggcaagctcggcgccgagctcatcaacggcggctacgatttctcgttccgcgcgctctcggagtaggccatggcatatacaggcagcatacgcgtcccgtccgacaagtcgctttcgcatcgggcggtgctgttcgcgggcatcgcgtcgggcacttcgcatctacgaaacctcctgccgagcgacgacgtgatctcgtcgcttgaggcgatgcgcacgctcggcgccgccatcgagctcgaggaggggccgcgcgggctgagcggcacggtcaccggcatcggggggaagccgggcgtgcagggcacggcagacatcgactgcggcaattccggcacgacgacgcgcctgctcatggggcttatctgcggcctgggggtgcgggcgcgcctgcatggcgacgcctcgctttcgagacgcccgatggagcgcgtgatgaagccgctgcgcgcgatgggggcgcgcttcacggcgcag

SEQ ID NO: 2742 - DNA, 6071 bp, Unknown
  16S sequences of unknown bacteria
gtatccgctcgtaacggtaatcgcccggttcccgcacccagctctgatctcctccaacagattcatcagcttttggcagtttgcataatactttgccggcactgccgttccgtccttgcacttgaattcgctcagcttgaagtgagtgcttgcaggtacgcccgctgccttgccttccaacagcgctgtccaggtgtttttccctaccttcccgtctgtcgcaatcccggcagcgctttgcagcgcttttaccgcctgctccgtgttgctgccaaagatgccgtctgccgttcccgcgccgtatccccgttcattcagccttgtttgcaacgcttttaccagctctccacggctcccgtttttcaacaggcagtccgcaaacagcttagcatacgtgttgttccccacgatcccgtccaccgaaagccctttggctttctggtagcttctgaccgcgctttccgttttcgtcccaaagatgccgtccgcactgccgcagctataccctttctcattcagcatctgctgcaccagctccaccagctcgcccttgcttccgcttttgatttgttccatgatgttcctcctttagtcccaataggcgtacccgtttttgatatggtatccagcccgtttgagtatttttactttttcttcgtatggtatattgagtcccgttacataattcgccaccacttttcttgcctgatcgttggacatgccactatactctttcccataagaataagagggcgtttctaggtataaaaagagcagcttttgcgctgccgtcattccatatccattgatagcattgacctgagcttttttcacagaaccttcgattgattccctttctccccactgattcagtgtgtactggcctgttgcattgcttctcgcgttatgggccaggaaatacgtggtcggggaaatccctgccgcgtccaaataatcaacctttttccgccaatcactttcgttaatattataggttttccctcttccctccaacatttttgtatccgccctatactctgcgtatttgtacacatcctttatcattttaattttgtcttcatcggatgcagaacggtatgcggaattgttgatcagtgaacgcaaaattcgcttgctcatttggccccgtgtttgcctgtggtttgtcacctccgttgtagtcatcttatattcattcccaccattggtcacagtgccaaacgatgtcgtcgggatgatatacttgctatcttccacattagagttatacagccgttctatctctcgatccacttcatcgctctttatttcattcacgtaagccggattgataaagctgttaaaaacacgctctagcacattcccatcgttgacctgcttttctccccaggcattcacataaggagcatttgcaacatccttcagtcccatattttcaagcaacaagttagcgccgggcaatttattcaatgcctttctacctgtcttctctaggcggctcaacacttcgctgtctgtattggtgtcagatgtcgttcttctcgttgggtcaatgacctggttcatctgcgatcctatggttgggaaatactgcaaaatatagctttcaagcggtgtgtagatgagcccgcttatgatggatgacagattggtctcctcttttttaacagctgtaagcaaatcatccacgctggaaaccatgctcatctccatagctgggcccaaaatctgttccgcaactttcagcgcatcgtctgcactgttgatcccttccgtttcgtttaacgcagcgcccatgaaaattgggattgaagcgggggcaagccagtctaagctaatcgatgtgtctccaacttccagagaatacctttgtctgccttgcccttgctgataatactcttcttgatcatcgtctgcacccactcttaaaattccagcatccgaaagtgctttccctgcaaaaagcaatgctgtccccgttagattttcggaaattccatttataatctttgcttttgcaaatggcgttcccttgattttcatccaagtcccgaatgttttaagaaagccagccggtgaatagtctaccgccctttttatcacattagccggcgttttggcaaacggtatagtaccctctattgcgtgccctaatacgcgagctaaaatgttgttgcttttttccagtcctttaacagtcttcgttaccgaggcggcaaacttagacgaatcgtggaaataatccttctgagcctggatcgctgcgtgttccataatttgttccatcaacgccggagatctttttatgtcctctatgctatatcccctagacacagcttcctgtgcaaaatattttttgaacgcgggcccaataaagaagtcatcctcaaattccatcgccccgctatttgccttccgtagcttctccagtatttgttttgaacaccgtcatattttccatgatttggttatgagcgttttcgtatctcgtgccgttttttatatacgattggtgttcgtcaaaaagtttccctgcatatttgtacgcagctttgtaatcgctgttaaaataagcaccaaacgagtttgttctctcattcttattcttgatcaatacactttgcaaagccccatctatccagtttgatgcttttgccatcgcccacatgccgctgtttccggctatgttgcggacatgtgtcttgacattggccagcatagctgtatatcgccatgcgtttagcttttctctccatgtagaaggtacttgctgcccaatctccgcatacaaatctgtcaagagttcctttgcgcgtgcttcttctccaggctttaactgtgccagttctgaaaactttgcttcatctacctgtatatctataccacgttcggcattgatttgtcgtacttcgttcataagtttcatggcagctgccgatccaccatctttgtacaatagctttgaaaatgacaacatctgccccgcattgtgtacattttccgctatagtcttatacatgcttacccacgcttcgttttgccctccctgttcctccagggctcttaatgtctctatagccaaggtaaaatcatctacagacagcccccctttacggcctgcctctttatacagatacgcctgtgcgccatctatgcctcgttcttccaatatctttgccgctcgctcttcggttttcgcaaacgacttctttgtatagtttttgtttgcctctataacctctcgatataaatcccgggtatcactgtctgtcgttgtgttcgtaacaaacgactctccgcccaaaattctcttagcggtttgtcgtgtgcctttcccgttatccgtctctgcaaacaagatatcttctcccgtgttgccatcattgacatgattttcatcttgtggcatattatatatagaagaagcatcatcactgcttgccattggcaattggagcctctcgccgagcagctgatcgatgcttctatcgttattctgaggcacactattgacatatttttcgtcttgttgtatattatagtcaatagaagacggattaacctgctcttctgacaaagaacgtggtttgttcctgcggttaactttgtcagatgggtaggatgttgaatccgtctttttttgtcttatagatacatcgtgcagataatacctttggtttttatctcctactgttctgtgaacaataacctctgcaatataatcaccctttgcatctccctttgtaatggtcacaggggcctcaagtacaacagagttgtatcctcttcccttatggttttctacatagtctacgattttcccgttttgtatgagcgacggtattgcctcatatagcgctgctttctcatttgtcatcccgtgtgctagagaatcttttactccctttgtatttatcatcacatctcccaacacatcgttatgcaccatattcccatgctctctaaaaagttgttctacgtcggctttgagcgtccccgttcccatcttaaaccgttcgccctggatttttatgggtttttgattctctatattggcacgattttcttggatctgtgtttccaaatcaggcaaaccaataattttttgttggggtatatctcctccataaatggcttccatcaacaagttattgccttgtttgggtgttttaacagtctccactgtaccttgttttttcaattgttttgcaacttgatatggttctgcttcggaaagattgtcaatcgtgttcctgacctcttcattggacagtgacgttttatcggatatattgttcacagctcttcgatttctcagcgcgttcatggtatcctggcctgtccctaagatcgccgctgcggtagcgcctccaaggaacgattccttcaaatcatctaacgaaacattctgtagttcctcatcgttgaacgctgctttccttaccaaaggctctgccaaggtagaaacgacttcttccaatccttcccccgtagccgcccctgttcgcgacaaaagtgttctggcagccctgttgcttaccttgttatccagcaaggcattcaagcctttagaaagccccgcttttttggataaaccagctacaccgccaaatgcttgctctaccgccgcttccttgagaccttccaaatatccatagctttgagcttctctgggggtctttccttctagtagcgcatttcctatcgcatcaccagaaatattagcaaatgtaacacctgcagaaaccgcctgtcctcctggcacagcatatgccaaagccgatggcaaaacggaaccaatggatgcgatacgattcccccacttcttctgattttccgtaagccccgaatatttttgttcaatgttctcatccaattcgttttggttttgctgcactctcttgatttcttcaatgccgcgttcatctttttcttttcttgtctgctcaatcgaagaacggaacgcttgctctagctgctcaattccttttttgttccaaccctttccagcactgctttccttgagtttatccagttgctttagaacatcttctccatagccagcactggcattgatctgtgcgtttttgtgtatgtttttaaaaacatctttgaagttgtcccaagtacgctcagccgtatatcctagaaaactgtcgccgccttttgaattgctctttgcacttttatttttggtatatgtgctactatggctatctgtttcaggagttacctccatcctatagccctgttttcttaagcgtctaacgaactcttcaatttctttactagccatatctacctccacagagaaggcctaagagcattccctaacgccgttcccagggccttaccgagcggatcttcttgtttatctcctataattccaacctttttactattcgatgaacttcttctcgcagcagtgcgtctctgtgccgcagcctgtgcttctgcctgtgcccttgcctgttgcatctgcaatcgctgctgtccatactgagcctgtagatttgctaactgttgctgcaactcgttttgtgcgttcagtagagcaatatcgtattctttttgagcattggctctatttgcgtttagctccgataaataattttccaatgcgatattgtaattgtttacattcgtgtcgcgggtattctttgcattgttataatctcctctataggtattataagctgctgtattcatatactctgacatgccgttattcctaagccgttccgcattggttccaaaaggatttcttgctaccagcatggattggtaagccgccgcgccatctttagttagctgcttatctgcttgatctactaaagtatcataattacgccgttggtttgattcttgtgcagcgtatgtgttcatcaattgatctcgttttgcagctgcctgcttttccagtaaggcattggcttctctagccgcctgttcttgttttgcctgttcagcattgatttgattgattagcgcatcataatttactgccattgtctttctccttacaataccttaaagatatagttggccacgatgtagggctgtaggttgtt

SEQ ID NO: 2743 - DNA, 11477 bp, Unknown
  16S sequences of unknown bacteria
aggtttgtcaacgatcagtgtcgcgggcggggagaggaaacttccccgcccgcgacttttgaccgtactgcttcacgcggtatagcgcttgcccaaagaaggctgtcaatggagttggccgagggattgttcttgaataccgtccgccatatcaccgcgaacgctatagattttttcgccagcctgtcatcaatcccaccttgcgcaatttgcttttctgtggtaaagtataaagcaatcccgggaggtgcgtttgggcccggcgcgtgatgcggcgggccatgcgcgcgttccggatcctgctgagcacgaatggggtggtatgcatgtttgaaccaaagtggcgcgacgcgctcacggacaacctggttcgcgcgctggtctgcgtgaaagacgaggaggactgcgcgcgcttcatcgaggatttgatgacgattcgcgagctgaaagacctttcccagcggctggaagtggcgcggctattgcgcgagggcgttacatacgcggaaatcgcggcaaagacgggcgcctcgtccgccaccatcgggcgcgtgaaccgctgcctgagctatggcgcggatggataccgccgtgtgctcgaattgctggaggaaccccatgattgatttgaaaggattgaatccgccgcagcgcgaagccgtgctgcacggcgatgggccgctgctcgtgctggcgggcgcgggcagcggcaaaacccgcgtgctcacgcaccgcattgcccggctgatcgacgagggcgtgccgccgtggtcgattttggccattacattcaccaacaaagcggcgcgcgaaatgcgcgagcgcgtggagcggctcgcaggggacatgggccgcgacgcctggatcctcaccttccacgcctgctgcgcgcgcattttgcgccgggacatcgataagctggggtacaagccctcgttcacgatttacgatgcggacgaccagatgaacgtgatcaagcagctgtgcaaatcgatgaacctggatgaaaagcgctttcccccgcgcgagatccgcgccgcgatttcggacgcgaaaaaccgcgtgctctcccccgccgagtgggcgaaggagtcgggcgaggatttccgcgccaagacgatttccgaggtgtacgcggcctatgagcgccagttaacagccaacaacgcgctggatttcgacgatttgattttgaaaacgctcacgctgttttccgagcatccgccggtgctggcggcctaccagcacaagttttcgcacatcctggtggacgaataccaggatacgaacatggcgcaatatatgctcgtgcggctgatcgccggggaatcgcgcaatttgtgcgtggtgggcgacgacgaccagtccatttacggctggcgcggcgcggatctgcgcaacattttggaattcgagcgcgatttccccgattgccgggtgatcaagctggagcagaactatcgctccaccagcaacatcctggacgcggccaatcaggtgatcgcgcacaacgcgggccgcaaggaaaaggcgctgtggaccgacgcgggcgagggcgagaagatccgcgtgtaccgcgcgctcgacgagcgcgacgaggccgcctgggtggtgcgcgccatcgagggccgcatgaaacgcggcgcgcgcgcgggcgatttcgccgtgttttaccgcacgaacgcgcagtcccgcgtgctggaagaagccatggtgcgccgcggcgtgccttaccgcgtgtacggcggcatgaagttctacgaccgcaaggaagtcaaggacgtgctggcctacatgcgcgccgtggccaacccggacgacgaccagtccgtgcgccgcatcatcaacgagccgcgccgcggcattggcgacgcgaccatcgaaacgctggcgcagttcgcgcagcgggagggcatgagcctgctctccgccgtgatcagcgcggatgagagcgtgctgcccgcgcgcgcgctgggcgcggtgcgcaagttcggcgcgctgatgctggatttgacgcaggcgggcatttcgctctccgcgggcgaatttttgcaggaagtgctcgacaaaaccggctacgtcgccgccatccgcgcctccaaggacccggacgcgcagacccgcgaggagaacgtgatggagttggcgggcgccgtggcggaatacgagagccaatcgcccgagggcgggctgttgggctttttggaaaacgtggcgctggtcacggatttggattccatgggcgagcggcccgaggcggtcacgctgatgaccatccacgcctccaagggcctggaattcccgcacgtgattgtgacgggcatggaggaaaccgtgttccccctggggcgggccacgtttgaggatggcctgatggaagaggagcgccgcctgtgctatgtggcgttcacccgcgccatgcagtcgctcgcgctcacgttcgcggtttcgcgcatgctgtacaaccagcgcaggaacaacccgccctcgcgctttttgagcgagattcccgagcggctgatcgaggatgaccgcgcgcggcgcgaacccgtgcgcgtgccgccgccgcgcgcgggatacgcccccgtttcccccgccgcgcgcggcaacgcgggagccaagcgcgcgccgctcgcgcccggcgatattccgggcgtgaccaagggttttggcggcgttgtgcgcgcgggcgcgggcgcgcaggcgctgttcagcccgggcgaccgggtgacgcacaaggtgttcggcgcgggcactgtgctggaaagcaatcgggacaagattcgcatcgccttcgacacccgcggcgagcgcacgttccccgcctccatcgcgccgattcgaaaaatcgagggatgatccatggatgaaatgaaacggctggtcgaccggctgaacgaaaccgcatacgcctattatgtgctcgacgatcccatcatttcggacgacgagtgggacgcgctgtacgcccagttgcggcgcctggaggcggaaacgggcgtggtgctgcccgattcgcccacccaacgcgtgggcggcgaaccgctggcggcctttgagccgcacgcgcacctcgcgccgctgtatagcttggataaggtgcgcacgccgcaagccgtggccgagtgggccgcgcgcgcggaaaaggcgctgggcgcgtttccggaatgcgtggtggaatacaaatttgatggcttgacggtcaatctgacgtatgacggcggcgcgctggtggaggccgccacgcgcggcaacggcacggtgggcgaggccatcctcgcccaggtaaagacgattcgctccattcccctcgccgtgccatacaaaggccggttcgaggtgcagggcgaaggatatatgcgcctgtccgcgctggcggcctacaacgaaaccgccgccgagccgctcaaaaacgcgcgcaacgccgcggcgggcgcgctgcgcaatttgaaccccagcgaaaccgcgcagcggcggctggacgccgcgttttacaacgtgggctatatcgagggccgcgcgttcgccacgcagcaggaaatgcgcgccttcatcgcggagcagggcctgcccgccagcgatttcgcgctctacgcaaacgacgtggagggcgttatgcgcgccataaacgaggtggaacggcggcgggacgcgctggatttcctcatcgatggcgcggtggtgaagatcacctcctttgctgcgcgcgaacggctgggctacacggagaaattcccccgctgggccgtggccttcaagttccgcgcggaagaagtggtgactgcgctggaaagcgtcacctgggaagtggggcgcacgggcaagctcacgccgctggcgcacgtttccccggtggaactggcgggcgcaaccgtgcgccacgctgaacaactatggcgatattcagcgcaagcgggtggccgtgggcgcgcgggtgtggatccgccgctcgaacgaggtcatccccgaaatcaccggccgcgcgggcgaagcgggcgaggacgagacgcccatcgaaaagccctccatttgccccgtgtgcggcacgccgctggtggagcgcggcgcgcatctgttctgccccaacaaatacggctgcgaggcgcagatcgtggcgcggctggcgcacttcgcgggccgcgaagccatggacatcgagggtttttcggaaaagaccgcgcgccagctctatcgcgaaagccgcctcgccttcccgcacgagctgtacgcgctcacggtggaaaacctggtttcgctcgaccgcttcgcgcagaagaaggctgaaaacctggtgtccgccatcgcggccagcaaaacgcgcaagctggattcctttatcttcgcgctgggcatccccaacgtgggccgcaagaccgcgcgcgatctggccagccgctttggcgcgctggaacctttgatggcggcggagcgcgaggcgctcgtggccatggaggacgtgggcgaaatcgtggccgattccatcctcgaattctttcaggacgcggacaaccgccgggaggtggacgcgctgcgatcggcgggcgtttcgcctgtgtgggaacaggcggccggcggcggcgcactggcggggctgaccatcgtgatcaccggcacacttgagagcatgacccgcgcccaggcggaagaggcggcgcgcgcgcagggcgcgaaggcggcgggcagcgtttccaaaaagaccagctttgtggtggccggggaaagcgcgggcagcaagctggataaggcccgcgcgctgggcgtggaagtgatcgacgaggcggaattcttgcggcgccttaacaaccccggggcagggggcgctgagtagcaacgcattgcgcgcgtttaacgcgaaaatttcctgccggaatggcgaaagcgaaaaaagtgtgctataatagaaagatacggaggatggtacaatgcgcagcatgacgggatacgggcgcggcagcgcgcagatcgacgggcggcagatgacggtggaactcaagagcgtgaaccaccgctttctggatgtcgccttccgcatgccccgcagcctttcgtttttggaggaagaggcgcgccgggtcctgggcgaacggctggcgcgcgggcatgtggacgtgtacatcagctaccagaacctgcgggaggacgcgcgcaccgtgctggtggatccggcgatgctatcggcgcacaagaaggcgctggaggaaatcgcccgcttgagcggcgcgcggctggacgttacggcgctggagctttctcagttggcggacgtggtgagcgtgcaggaagccgaggaggaccgcgaggccgtaacggcgctgttgcgcgcggcgatggagcccgccctgcgcgaattgctggccatgcgcgagcgggaaggcgcggccatggcggcggatttggcccgccgcgggcaaaccatcgcgcgggcgctggaggcgatcgagcgccgcgcgccggaaacggtggcggaataccacgcgaaactgcgcgagcgcgtatccgcgctgctggaagcgcccgtggacgaagagcgcctggccgccgaagtggccctgatggcggaccgcagcgacatttccgaggaaatcgcccggcttaagagccacatcgcgcaactgggcgagttgctcgccgcggctgagccagtggggcgcaagctggatttcctggtgcaggaattcaaccgggaagcgaacacgatttcctccaaatcgcaggacatccccatcacccgcgccgcgctcgagatgaagagcgaaattgaaaaactgcgcgaacaattgcaaaacgtggagtagcaggcggaggaacgaagcacgaggaggaatggcatggccatcaaattcatcaacattggctttggcaacatcgtatccgcaaaccgtatggtcgcgatcgtcagcccggaaagcgcgccgatcaagcgcatcatccaggacgcgcgcgattcgggcaagctgatcgacgcgacctatggccgccgcacccgcgcggtgatcattacagacagcgagcacgtgatcctttgcgccgtgcagccggaaacggtcgcccaccggctggacgcgaaggacgcagccgccatggaggacgaggaagaatgatgggccggctgtataccgtatccggcccggcgggcgtgggcaagggtacgctggtggatttggcgtgcgcgatggatccttccctgttcctctccatttcctgcaccacgcgcgaggtgcgcccgggggaaaaggacggcgtgaactaccattacatttcggaggcgcgcttcgaccagatggtgcgcgaagacgcctttttcgagtgggcgagcgtacacgggcaccgctatggcacgccgtgcgagccggtggagcgggcgctggcggcggggcggagcgcgattttggaaatcgacgtgcagggcagcgcgcaggtgaagctgcgccgcagcgataccatccgcatcttcgtgctgccgcccagctggcaggcgttgaagagccgcctgatctctcgcgcgcgcgatccgctcaaggatgtgaccgtgcggctgaagaatgcctatcacgagctggaagaaggcctgaagttcgactacgccattgaaaatggcgagcgggaagccgccgcgcgggatttgctgcgcgtgatccgcgcggaagatcccgaggaatttgccctcgcgcggcagcgaggcaaaatcgaagcattgctaaatggctatgaggaggtagaaaccatatgttgatcgatccgccgattggcgaactgctgcaaaaagtggattgccgctacacgctggccgtggaagcgagcaagcgcgcccgcgaactcatcgacggcagcgcgcctttgatcgataccaaggagaccaagccgctatccatcgccatcgaggaaatcaaccgcggcttgatcacttacgagcgcaatccggaagacgaggaagaggacaaataatatgctttcgggcaaaaacatcgccctgggcgtgacggggggcatcgccgcctacaaggcggcggacctcgtcagccggctgaaaaaagcgggggcagacgtgcgcgtggtgatgacgcgcagcgcctgccaatttgtcgcgccgctcaccttcgaatcgctcaccggtcaccgggtggagcgcgatctgttcgagcggccgtgggagatggggcacatttcgctggccaagttcgcggatgtgttcgtggtcgcgcccgccacagccaatttgattggcaaatacgccggcggcatcgcggacgatttgctttccaccgcgcttttggccgcgccctgcccggtgctgctggccccggccatgaacggcaacatgtggaaaaacgcggtcgtgcaggaaaacgtggccgcgctcaagcgccgcggcgtggccatgatcggcccggggcggggccatctcgcctgcggggatgaggacgtgggccgcatggaagagcccgcgaccattttggacgcgatcgacgccctggcggacggcaggcgcgatttcgcggggctgaaggtgctggtcaccgccgggcccacacgcgaattcgccgatccggtgcgctatgtttccaaccgctccacgggcaagatgggctatgccatcgcccgcgcggcgcgcaaccggggcgcagcggtgacgctgctttccgggccggtggagctcgcgccgccggtgggcgtggaagtggtgaacatcaccaccacgcgcgatctctacgaggccgctctgcggcgcgcgcccgaggcggacgtggtgattcaggccgccgcgcccgcggatttccggcccgctcagtacgcgcagagcaaaatcaaaaagagcggcgagggcatgcgcctggatttggccgccaacccggatgtggcgcgcgccctgggcgaggccaagcgggaaggacagattctggtggcctttgccgccgaaaccaacgacctgcgcgaaaacgcgcgcggcaagcttttgcgcaaaaacgccgatctcatcgtggccaacgatgtgaccgtgcccggcgcgggctttggcacggacaccaattgcgccctgctcatcacgcgcgcgggcgaaaccgaggtgcccctgtgcgccaagggcgaactggccgagcggattctcgattgcgtaaaggaactgcggcatggctgagcagcgctatgcccgcgtgatcgtggacgtggcgaacgccgaagtcgatcgcgtattcgattatattgtgccggagggcatggcgctggaggcgggcgcgcatgtgatggttccctttggcccgcgcacgctggacgggttcgtggtggaattgcgggaagaaacgcaggtggaagcggataagctcaagcccgttttgcgccgcgtggagccctttgccgccctgcgggcggatcaactggcgctggctacatggatgcgcgagacctatcaatgcacgctggcggaggcgttccggctgatgttgcccgcgcaggcgcggcgcgaccggatagcgccgaagacgcagctatttgtgcgccgcgcgcgggaagggtatccgccaaagtgtaccgccctgcagcgcgaattgctggacagcctggccgagccgcagccgctgagcgcggtgcgcgcggccgtggcccgcgcgctggaaaagaagggctatgtttccatcgcgccgcgggaaaccctgcgtgcgccctatgcgcaaacgcagccacggcgcgcgcgggtggaactcaaccccctgcaggaggaagcgttcgcggagatcgacgccgcgctgtcgggcggcggcgggcgctttttgctctatggcgtcacgggcagcggcaagacggaggtctacatgcgcgcggtggcccgcgcgctggaattggggcgcggggccatcgtgctggtgccggaaatcgcgctcacgccgcagatggtttcctggttccgcgcgcggtttgcaaacgcggcggtgatccactcgcgcctgagcgcgggcgagcggtacgacgagtggcggcgcgtcgcttcgggcgaagcccgcgtggtggtgggcgcgcgctcggcggtgttttcgccggtggagaacctgggcctgatcgtggtggacgaggagcacgaacacacctaccgctccgagcggcggccctgttacgacgcgcgccgcgtggcgcaagcgcgcatggacgcgctgggcggcgtgctggtgctcggctcggccacgccggaggtgagcacgtttatgcgcgcgcaaccgggcgtgcggccggaaaaccgcctcacattgctggaactttcgcgccgggccaatggcgcgccgctgccggaggtgcgcatcgtggatatgcgccgggaactggcgcggggcaacacgtcgattttctccggcgcgctggcgaacgcgctgcgcgattgtctcgcggcggggcggcaggcgattctctttatcaaccggcgcgggtattccacgttcgtttcctgccgcgcctgcgggcacgtggaaaagtgcgaggcctgcgatttggcgatgacctaccaccgcaacggcgatgtgctcgcctgccactattgcgggcgcacgcgcaagccgcccaaaatttgtccggaatgcggcagccggttcatcaaattctttggcgcgggcacccaaaaggtggaagaagaggtgcgcgcgttgttcccccaggcgcgcgttttgcgcgcggattgggacaccacgcgcgccaaggacgcgcacgagcgcatttttgaggcctttgccgcgggtgaggcggatgtgctcatcggcacgcagatgatcgccaaggggctggatttcccgcgcgtgacgctggtgggcgccgtggccgcggatacctcgctcaacgcgccggactaccgggcgggcgagcgcacgtttcagctcattacgcaggtggcgggccgcgcgggccgcgcgggcgaaaaagggctggtgatcctgcaaacctacgagccggacagcccggtgattcagctggcggccaggcaggatttccgcgcgttttacgagcaggaacgggtgtaccgccgccgcgcgctatacccgccctattccgtgattttgcggctggtggcctccgcgcccgaggcggaagcggctgcgcaagccgcccagcgcgccgaggagcggctgcgcgcgtttatcgaggagcggggctatcaggaggatttgatccacatgcacgccaaggaagcgcccgttatccggctggacggcctgttccgctaccacgtgttcctcaagctttacgcgcgcgggcacgccggggaaattcaggcggagctggagcgcctggcgcgcgagggcgcgccgggcgtgcgcatggaagcggaagtgaaccccacgaacatgatgtgatggaggatggaaatggcaattcggaaaatactcaaaattggcgatgaaaccctgcgcaagcacgcccgccccgtggcggaagtggatcgccgcaccaagcagttgctcgacgacatggccgaaaccatgtacgcggcggatggcgcgggcttggccgcgccgcaggtgggcattttgcgccgcgtggtggtgatcgatgtgggcgaagggctgctcgagctcgtcaatcccgaaatcctttccaccgagggcgagcagcgccagatggaaggctgcctgagcgtgccgggcaagcggggcgtggtggcgcggcccgcgaaggtcacggtgcgcgcgctgaaccggcgcggcaagccgatagaaatcgtgggcgagggcttcctggccatagcgctgtgccacgagatcgaccatctggacggcgtgctgtacgtggataagatcatcgaagaagtgccggaggacgcggaagaatgatgcgcgtggtgttcatgggcacgccggaattcgccgtgccctcgctggaggcgctggccgcggcgggctataccatcgcgggcgtgatcacgcagcccgaccggcccgtgggccgcgggcacaaactcgcgccgccgcccgtgaaggcgaaggcgctggagttgggcctgccggtgtaccagttcgagcgcctgcgcgcgcaggaaggactggattgtttgcgcgcgctcgcgccggacgtggcggtcacggcggcctttggccagatcctttcgaaaaagctcttggccgtgcccaaattcggcacggtgaacgtacacgcctcccttttgccccggcacaggggcgcggcccccatcaactgggccattatccagggcgacgcggtaacgggcgtgaccaccatgctcacggacgcgggcgtggacacgggggccatgctgctctcgcgcgaaacgcccatcggcgcggaggaaaccgcgggcgagttgacggagcggctgagcctcttgggcgcgcagttgctggtggaaacgctcggggcgctcaacaccctcgcgcccacgccacaggacgaggcgcggatgacgtatgatcccatgctcgataaggccatgggcgaaatcgattttgggcgcggcgcgcgggaaatcgtcaacctggtgc

SEQ ID NO: 2744 - DNA, 32759 bp, Unknown
  16S sequences of unknown bacteria
ctacgccgaaaatacttgcctggcaacgggctggaaagataggtaatcgccgacacaagaaaagagaaaggtaagtcctttctcttttcacatattcctcaatagctcagtcggtagagcatgcggctgttaaccgcagggtcgttggttcgagcccaacagggggagccaaaaaaataacagtcgactttgtcggctgttatttttttaatgaagctaccgaacggtgaatgaaaaacgaaacggaacgtgggttcaatgaaaaatgcaatttgtgttggaaaaatgagtgtatattgctttgcgtaaacgatatatgaacgcttctttgaatcattatcgttgcttcgtgttgaatagcaatattttacggcatgaattttgtggagcttattccttagctcaatcacaaaaaaacgacaattttcgagaggaaattgtcgtttttttatttttcactttttgttctttactattcacttagattgtcactctcggataagtgataagcgtaaaatgataaagaatatgtaattacagtcaggtgtattccgttgcttttagttgtttgtttttatgttattatatgtatttgtgtatctgccttttacgaatatagtttgttaatatagaacagaacagaattaagtgtattttaactgacaaattgttttgatgaaaagaattcttcctgtataccttattgaataataatttctggagaatcactagtgagatatccgtattctgctattatacaggaaatttcataattttcctgcgttttatatatgcatatggcgttacgactgtctgttttttcccaagttaatatgtattcgttcaattcatatttatattcgtcataatcttccgagaaatagctttctttgatttcaaggagtgttccattggatgtggtatagttttttacccaagcaataaaagatgcggaggctccataataattaccattaaaaccaatatttaattcgtccagttctataagcaacttcaatgctttttttatattattatttgtatgatattcccccagtttctctgcaaaaacctgtatattttttttatcccacttatcaactttgtggtttggatctcgtgcccattgcacagaaaaaacgtttgaattcaaggcatttttcaactctcgatagggagtgttttttatatatgcttttatacaaattattgatatgattattgctgcaaatagtaacaatgtgatgattgcgataactgttttcttcttctttttctttcttttcagtttttcctttgtcatgttcagcaattcgggacagtttttgtattctccgagagttgaaatgtgaattaagcaagcttcataatccgcaattgattttgcatctttcagttttgcttgtatttccaaataacggcgttccgaatcatcttttttaatttttatttgagcgataagccagtcgagaagcgtattacgtttgcatatattattcggaataattgatgatttttgaatcggatttatagagtgttcttcaaaaaaagaccagctttcatcagataagatttttgacagtttctttatacagtattcattaatatcagtgactgcatcaatctgttggggagagattatgtcttcaatatcatgtgtaatcttggttgctaatgcagtaagaagatttttaacatctttcgcatataacagcatttcattctctttgattatctcaactccgctgtctcccaaaacttcgttgattgttttaaggagtctttctgcacgttgttttttgctctccgcaatttttttttcaaccttattttctattcccaaaaaacgaattaaattatccagttcctgcgagtcgtatttatattcctttgcataaacaaatgcggcgatgttgcacggataattttttagggagcttgcgatagcttcgctgttgtctgcaaaaggatctgttatccggttgattatatggtatgatttttgtatatctattgaatcttcgatttttggtgaaattaacccagcactgataagaaattctttttcggcgttgtaaagcccgtcaatatatgcacataacccgcgttttagaaaaggtttgattttagaaataaattggacataagtatcattgccttttttaatatgttcatcgcaaaacagagagtgttttttttgagcttccgaatatgcttcttttctttgcttttcctttttgcgatattcgtctattgaatatgcaattaaatcaagtccatctcctatgattccgtaactgagtcctgtaatcttactttctgcttcctcaatgaggttttgtttattgctgctaatttggtcagctacggtttgcaatatattgtcatggacatctttaatttgctttactgcttctaagattgagttatatgagtgggttatgtatatacttaaattttcagatttaatgaagatcccatgtgatgaaattcggttaagggtattatcttgctcagattgaaggacttctatcaaatttccgaaagtatctgaaatgctatttggtattagagcaaaaaaattttgaaagaaaggttcttttctgtctgaatagtattccatagtttcatgatatgttgccaaagattttgtgcattttatatcttctccaaaaatattgaatgttttaatttctgcgttaagttcagatgtatttctttccataagaagctcctttattatattttctgtaagtaaataaagaatattttctctattttatagattttttgttttgagacaaatagtactttatccttttaatcagttgcctttttaaatgatattgtcctttcttgtacgctgatttcaagatttttttcttttgaaaatcttgccagagcagatttattaagtaaataattggtgtctttcggcagattccttcttgttaaattataatactgtttttctgtcaaggaaaaatctgttgatgaattaagcatttcagctattttagaaaaatcaatttttgccataaaagtttcctcatttccttttcttttttattatatcatactcagaaattgagtatttgtcaatactcaatttctgagtgtggtaaacttcttttatataataaaaaaaaggggggagtttacaatggattacaggagcataatgcgaaaccttagggaggatagagatttaacacaaaaagaagtaggtgcgataatcaataaatcacaacaaggatatagtcatatagaggacgggcgagcggagttaaaaatagacgacttgataaaactctgtcgttattacggtgtaagcgcagattattttatcggactttctcatgaaaaatagaattttgtttgatggattattatatttgtgtttcatgatttgtttaaacggtttagcgttgaagtattgcgatgataaatacggtgatcgtttttgcttatgtaacttattgtgattaagattaaagagtgttgatgttatgaataaaaaaagttttgaatcaagatatttgcgtatatgtcgactgatatctgttgtgtgctcggttctggttgtcgcaaattttttaataactgacatttgcacgggagataaggctttttcggaatttgaacagcgggattggaatatttttattgcttttttgtgcgaggaatttctgcttctttccgcttctgttatttgcgcggttgtgtgcggtcggataacaaaaaaacgaaatcgggcgcttgcctcagcatgggaacggaataagtttgagggaatcaggccgaccgattataattatatttggtttaattctttctgcgacgaacgcgcgctgatcacggaaaaagacggaaaatatgcgttgcacttggacatgtatgattccgaaacggaaaagtggaattatgataaagaaatacgtctttttgattctttgcaagatgtgaaaaagtatttgttttacgactgtgatttttactgcgacgaaaataccgaaatcggtgaatgcggagatgatatatagaggaaaatagtcgaacgtactttccttttgacgttttcaaactgtttataaaagtattgaaaagagaatcctgtcaaacttctcttttcttttttgaaaaaacgtcaagcctgtttactatttctattatttatgctataataatgtcaagaggtgatactatgaccgatatcggggcgcgcatacactctttgcggacaaacgcggggctgacgaaatcgcggttggcgcagatgcttgacgtgacggaacagactgtctcggattgggaacgggacattgccgagccgagcgcacagaatattttttcgctgtatgacatattcgggcagaaactgttttccgatgtcggaaacatcgcagcggacaagcctaaccgcccctgtatggagagcataaaagaaatatataaaataggaagaggtccgtcaagttctcatacgataggtcccgaaagagcctgcaagcggctgaaagaactttatccgaacgcaaccggatataaaatcacgctgttcggttctttggcaaaaaccggcaaagggcacggcacggatgttgttataacagaaacgctaaaacccgccgccgtagagatcgtctttgacaatataacgcagaccgcgcatccgaacacaatgcgtacagttgcgtttgacggagaaaagatactcggagaaaatgaagttcgcagtatcggcggcggagatatcgtttttgacaacgaaatagcggcagagaaaaaaacggtatatcaatatcgcagttttgcggatatatcgaattattgcaagtcccgaagtatttcgctttgggaatatgcaaacgaaaacgaagacgggcttcgggaatatctcggcacggtttgggagcaaatgacgcaggccgtcgaacgcggtcttcacgatgagggtattcttcccggcggtttgggcgttcacaaaaaggcaaagcaactgtttgaggcgcagcatatagatgaaagcccgaaatcaagagaaaaccgtcttatttgcgcgtatgcgttcgccgtcagtgaacaaaatgcgtccgcacagaccattgtgaccgcgcctacttgcggtgcggcgggcgttttgcctgcggtgctgtattacgaacagcaaaaaaatgacctttcggaagaaaaaattattcgggcgttggcaacagccggaataatagggaatatcataaaaacaaacgcatcgatctcgggcgctgaatgcggttgtcaagccgagataggcagcgcctgcgccatggctgccgccgctctcggtgaactgtttgaattgagcatagacaaaatagaatatgccgcagaaattgcacttgaacatcatttgggactgacctgtgaccccgtttgcggacttgttcagattccgtgcatagagcgcaatgcggttgctgcaatgcgggcaaaggacgccgtcagtctgtcaagtctactgtggaacacaaggaaaatatcgtttgacagcattgtcaaaacaatggctgaaacaggaaaagatctgttgccctcttaccgtgagaccgcagagggcggtcttgcgaaaacttatcgcggcgattccgaatgattttgggaataagtcttgcccgtttgtgctgattatggtgtgtctgaatttgttaatatcagcactttttcggaaaatctctgtcgcagacagaggtttttcttttttattctctctttttttatggcgttacagaaaaaaatgaaataagcctgttatacaattgttttgttatatgtgcaccaaaaatgcctgataaatttggcaagtaatactaattgtgtcgaattttgtcttcggaaacacatatttgtgatacaattcctaaattattttcgacaaaattcgcttgaaatctataatattttgtgatagaatttttttgcgaagaaaaaaacaggcaaaaattaaatttatataagatgaaaccgtttttcgaaaacatctctctccgggacatgctcccattgttttcgaatgacggcataggaggatttttatggaaggattcggttatgaaaagaagatccgaattatgatcgttgatgagaacgcagaatttcgttcatatacggcgaataaacttcgggaagagggttttgatgttgttttgacgacatccgacccaaagaatgcacttgatgcaatcgaagcaacatctcccgatgtcgttctttttgacttgataatggtcgggcttgacggaatagcgtttctcgaacaggcaggcaaaatgccttttgcgcaccgtccgcggtttatcgcaacatcaacagccgtcaacgaaatgatgataaaagaagttatgcgactcggggcatcatatttcttggttaaaccgataaactattccattctgaccgagcgtatacatcaaatctgttctgtaccggaacgaaaggagatcttttccgtgtcccaacccgagcctacgcctgaaccgcgtcaggtatatattgaggatgaccttgaaaaacaagtgacggaatccattcttgaaataggtattcccgcgcacgtcaaaggctatcattatgtaagaagcgcaatcatgctcgcagtgaccgatcccgaggcaataaatgccgttacaaaaatcatttatccgaccgttgcaaaacaatataaaacttcgccctcccgtgtcgaacgggctatacgtcacgcaatagaggttgcgtgggacagaggcgacgtcgatgttttgaactcgattttcggatattccataagttcctcccgaggaaaaccgacaaattcggaatttatagcaatgattgcggacaggctccgtttgcggaacaaaaaacgcgatatcagaagaatgacagtctgatttttacataaacacataggtttagtattcttttcctatcaattcattacagacagcgactgttaccctctctctcttcttctttgcgtaaggggctgtaaataacttgcgtttttttacagccccatgcaataagaattttcaaaatgttataccctcttttcttttctcttctctttttgctgccgttccgcattgctcggttcttccctcgttccgggcacggaacggctcacaatttttgtgaatcccatttcaataacgacagtcaactgtcctttcgacgggaaagttttgattttcagcataaatatatataaacattaaaagaagcaagcgacggtagaaatgttgcttgcttctttggttaggctgaataggttggattttgcctgaaacaacggttattccgtcattttcagaaattcggcttcgtcgattatcggcacgccgagagattgggcttttgtgagttttgatccagcgtcttcgcctgcgaggacgtaggtcgttttctttgagacggagcctgagaccttgccgccgtaactttctatcagtgcggaggcgtcggagcgcgaaaaggtcgggagagttccggtgagaacgaaggtcattccctcgaagcgcgtgtctttgatgttgcccgtgtaggtcatattcagaccgagcgccttgaaacggttgataagttcgatgtttttctctgtttggaaatactctgttatatacgtcgccgttatcggtccgacatcgttgataacggtcagttcgtctcgggtggcagagataagcgcgtccatggtagtaaacttttcgcagaggatttttgcggctttgctgcccacctgacgtatgccgagagcgtaaaccaaacggtcgagattgttttcttttgaacgttcgagcgccgcaagcaggttgtccgcggatttttctccgaaacggtcgagttcggcaagagtttcgcgtttgagagtatacaggtctgctgcggaatgtataagtccctcttcgacaaaacgttcgacaatgcctttgccgagcccgtctatatccatggcatcacgcgatgcaaaatgaatgatgttgcgcactatctgcgcgggacagtcggagttcagacaacgcacgaaagcgtcctcttcgtcggaaaagacttcgctgccgcagacgggacagactttcggcatttcaaacggaatgctgtccggggcacggtcttcttttacgacttcgacaacttcgggtattatatctcccgctttttgaattattacgctgtcgcctatgcggacatctttttccgcaataaaatccttgttgtgcagcgtcgcctttgatattgtgcttcccgcgcaaaagacgggttcaagcaccgcaaggggagtcagaacgcctgttctgcccacgtttatgcgaatgtcggtaacttttgttttcttttgttcgggcgggtatttgaaagcgattgcccaacggggaactttgacggttctgccgagagcttcgcgcattttgaggtcatttacttttacgaccacgccgtcgatgccgaaaggcagttcgtcacgcatatttccgagacgttgaatttcgttccacacgtcttccatattgtcaaagaccgaataatacgggctgacgggaaacccttgcgctttcagaaaatcgagcgtttcggagtgcgacgcaaacgttttgccctctgccgcctgcaaattgaaaacgattatgtcaagtccgcgtgccgccgcaatcgaggaatcgagttgtcggagcgaacccgccgccgcatttcgcggatttgcaaaaagttgttctccgttttcttcgcgttcggcgttcagacgttcaaaagtttttttcggcatataaacctcgccgcgaacgatgagtttcggcagtttttcgtcgagcgaaaggggaatggagcgcacggttctcagattcgccgtcacgtcttcgcccgttgttccgtcccctcgtgtagcgccgagttcaaaaacgccgttgatatatgtcagactgaccgaaagcccgtctatcttcaattcgacgtcataacgggcattcgggaatttttctttgactctgcggtcaaaatcgaggagttcttcttttgaaaaggcgtcctgcaaactttccatcggaacttcatgcacaacgggttcaaagccctccgcaatgcttcctccaacgcgcagggacggggagtccgctctgcgcaggtcgggatattcggcttcaagcgcctgcaattcgcgcgagagcatatcatattcatagtccgatacttccgaaatgtcttcggtataatatttttttgcatatcggttcagcatgtcggtaagttcgtcgagcctttttttcggattcatttttttacctctgtctatttttgtctcatcgcgcctgtcgctgcgtaaaaatcgggtatgggaccgacgattatcgtttccgcaacaacgaccgtttccgagcattcggcggaaactatccgcgtcggaaaaacaaggtctattcctacggttacggtcaaaagcacggaatgtatcgtctgatttattccgacagattcaaagcgggtagaaatatccgtataaacgctttgcgtggggcaaagttctattgatatcgccggtcctctgcctgcaaaatattcgctgtcgaaaagcgttcccaacgggatttttatatatgtttcgttcagttcgttcaacccgtcgatgagttcgagtgttatctgcgtggtgagtttgtttatttgttcggggtttgtgcgtatcgaggatatatgcccgtcggaggtcttttcgacaacggtcaggtgtgaataatctatctccggatttttcagcgtttcttttatcgccttgtttatcgccgccgtggcgatgtcctgcgcatccgacatacctatcgcttcaatcagcggggcaagccgtgcgttgtaataaatcaaaaaaacaacggcaaggacaagcatcagcacaagaagcgtcacgacctttttctttcgtgtcgttctccgtgctcttctgcgcaaaatatcaccctgaacagtatattcgggaaaggtgtttataatgcgtgggtaaactcaatctgacttcaatctctttccgtcagtccgctatcacgggcgaaccgtagtcgtaaagcggaatgtcgggaatatatacggcttttttgccgtgctttgatataaaatcgcaaatgtctttgcagtcttttcttcttcgtatatctccgaaaaagagaacttcgttttcggtaaccgccgtcgctccgcctagaaaacccgtgtcgtaaccgttcagcaaaactccgtcattgtcggcaaaaaacacgtccgcgccgagtctttcgcacgccgcataaacggatcggtcggaggttataacggcattttccgaaacagtaacggaactgcactttgcatagccctgtctgacggaaacaacttttgagaattgcgaaagcaaaatcttatcggtcgcgtcttctttgcagacgagcgttccgcataccgcaaatgcgttgtatgccacgtcgtgcggatatttttcggaaacaaaggtttctccgctgattaccgagggaaaaatttctttgtaaaactcataaacgctcggttcacagacatatattccacatgacgcgaacagcccgatatcgacgtgccgttttatcggttcggcgacgggcaaagacggaacggtaactatgtcgaatctttcgataagaaaagcccgtgccttttcgtcttttatctcgcctataaggagtttcattgctttgcgccctttttattcgctttcagcgacgcgaatatttcatcgacgtcaagtttttcaaattcaagttcttcgtcggtcttgtccgcttctgttttcggctcaaaatcgccgttaaccccgagcaggtattttttcaggctctcctgcaacggcctttcgggggagtttgctcccgtgtcgccgcccatatagtaggcaaggtcggtcgttttgtcgtaaaaaaccgggagaacgcagccgttttctactgcggaagcgtccgccgcaagttttttgtcttcgtctgttatcccgtcaacgagaaaaatcagtgcgattgctcttttgtcgtatcttgaagatgcccgcattgccgcagcaacttttgcctttattgtttcttcgggtgattccgcattttcaaataccgtgacggacagtctgaaaagccccgcttttgtcagcgtaacgcttccgtcgtcgttttccgttgccgtaaaaccgccgttttcaaacgaagccgcaacggagcttacggaaatgtttctgttgttcgatttccaatatcttctgtccgttttcagtcgtttttcgttttttatcatcgcttcgacaatcgcgaacgggttcatcgtttttacgagaactatcaatcccgcaagagtgaacgcaaggataatgcaaacggttatcaacttcggctctttattgaaaaagtcaggaaacaacgcccgaacgccgaagattacgggcaactgcgcaagcgcgatgacaaatgccaaacagagccgtgcggtcagccgctttttcttttgatgaagatttttcattttcagacttccttttatttgagagtgactatcgtaacgccgctttcgccctcgccgtatgttccgagacggtaactttcaacgagtttgttgcgtttgagccgctgctgaaccgccgcacggagcgcgcctgtgcctttgccgtggataacgctgacgactttcagcccgctgagactgcattcgtcgatgtattcgtcaaccatgcgttccgcttccattaccgtaacgccgcgtaagtcgagttccgaaaccgctcttcttgttgcacggctttctatgtcgagcgttgtctgctgctgcttcggttgcttcggcttgattatttcaaggtcttcaagcggaaaacgcattttcacgcttcctatttgtagcatgacttttccgtttttcggttcttcgagcacctcgccctctttgttcatcgagtaaacgcggacactgtctccgactttgagcgggcgttcgagaggctttttcttctctttcggtcttgtttctattttttcttcgagtttgtcaagcctgtcttccgtcgcggctcgtgtcgcttcaatgtttttcttgaaatctgcgcgctctttttctttgcgcagacggtcgagttcatccgttaccacctgtgcttctctgcgcgcgctttcgatcatgtcaagcgctttttgtctcgatttctgcgcgtctttttccgcatctgcaagaattttttcccgctcttctcttgcctttttgagttcgtccgccgccttttgtcttatatgttccgctctttcgatgtcgaattgggcggtttttttgctgatttcaaggtcggcaagcactctttcgactttgacgctttccttgtcgaggtggaattttgcgttgtttattatatcttccgatattccgagcatggaagcaattgcaaaagcgttcgatttgcccggaatgccgataatgagcctgtatgtcggcttcaacgttgcaacgtcaaattcgcacgaagcgttttcgacgtcgggcgtttgaagcgcatagagtttcagttccgcatagtgggtcgtgcacattattcttgcgcccgtcgcctgcatttgctcgattatcgcaatggcaagtgccgcaccctcgacgggatctgttcccgagccgagttcgtccataagcacaagtgagttcggcgttatctgcgtcagtatcgaggagatgtttgccatgtgcgccgagaacgtcgaaagcgactgttctatcgactgttcgtcgccgatgtccgcaaaaactctgtcaaaaaagcctattttcgcctcgtcgcggcacggcacaaaaagtcccgactttgccatcaggcagagaagccccgtcgttttcagcgaaacggttttgccgcccgtgttgggtcccgtcactatcagcgcggagtatttatcgccaagagcaatgtctatgggaacgcatttgtcctttgatataagcgggtgacgcgccttttctgcttgtatgacgccgttttcgttgagttccggtctgaccgctcgcaatgcggcggcgtatcttgcctttgcaaagcagaaatcaaaaaatcttgcagtgcggaaatcttcgcttatcgtctccgcataatctccgacttccgaggaaagcgccgaaagaattctgtctatctccgcgcgttcttttgcgtcaagttcggaaagttcgttgtttgcgttgacaacgctcatcggttctatgaaaagcgtcgcacccgacgaagatgtgtcgtgaacaagtcccgctatctcggaacggtattccgcttttacggggataacatatcttccgttgcgctgtgtgacgatgttttcctgcaaatatttctgcgtctgctgtgaccgcacaagcgaatcaagcgatgattttattttgttccttgcctgcgcctgtttgcgtcttatttccctcagtgcgggcgacgctccgtccgcgacttcatcttctcccacgaacgacgaaagtatcttgtccgcaagataattgttaggcacaagcaaatacctgtcctcggaaagagcatcgctttcatccaaatgctcatcaaggaattttttcagccgctccgtcagtttcagcacgtttgcggcggcaagaagttcgctcggcgcaagctgcgccccgttttgcgctcgtgcgcaagcccctgtcacgtctttgagactgccgaacgacggcgcgccgaaattgagcagcagtttttccgccgaagcggtctgcccaagcgctttttctgcatcttcccgcgtctctgcgggagaaagcgaaagacaaagttcttttgcggcgggggaaattgcgtgttccgcaagcgccgcaagcactttgtcaaattcaagtgttgtaaattctttttccatatctattttccgaaattctcaaattgtttgtaatagtcaaggctttcaaacctgtgttcgagatgatattccagatatttttccgtcagtcccgaaaggtgtgagagttcctctgttccgataggcagacggtatgttctcattcccgaagacgtcagaatgtggtttacggtcatgagttcgtcgtccgagagtgaaaagccgtctccgtgcgcgcatttttcgcagagaagtccctgcgaaaaggaccagaatgcgggcgtttttccgcatacggcacaaccgcctcccgacggcgcaaagccctcttcaagcgcaaaacgcagttcaaaaaccgttttgacaacgagcttttcggctttcgcttccgacaggagagccaaagagttgagcagcagacgcagcaattcggggtcgcccttgtccgttgtaacaaatgcgaccgcgtccgcgaaatactgtgcaagcgcaaggctttcgatgtcttttctcaacccctcgaacgcttcgcagacttccgcatcgtcaaccacggcaagccctcttccgtcgaaaatttcaagttcggcataagcaagcgtctggtatccgctcaaatctctgcggctttttcttaaccctcgggcaaggacgttcattttccccttttccgccgtcagcactgtcagcagcatatcgttttctttgaacggcgtgcgcttgattatcaagcccttgactgtttctttcatatcagtcgtcgaagagcgcgagttccgtgattatcttttcgctgtcgcgccaattctccttgaccttgacatagcattgcaggttgactttgttcccgagcagtttttcaatgtctgctcttgcttccgacgctgtttttttcagcatcgagcccgctttgcctataagcatgcctttatgcgattctttttcgcagattatgttcagcacgatgtccgtgacgggttctccgtttttgttctctctgtccttgaaaacaagcggctcaaccgctatgccgtgcggaatctcgtcgtgcatattgcgcagtattttttcgcgcacaagttcggacgccatctgacgcactgtctgatccgtgtcgatgtcgtctgggtaatactgcactccgtcttcgtttgtgaacggcattatttcgtcaagcactatcttcacgccgtcttttttcagcgcgcttatcggtactatggacgcaaattcgccgagttttgaatactcttcgatggttttgattatttccgatttcttgactctgtctatcttgttgatgacaagtaccgtcggcgtgccttctgcgttgagacgttcgattattcttttttccgttgttctcggcggtttgcactcaaccacgagtatcgccgcgtcaacatcgtccatcgcttccttcgccgccttgaccatgtgctctccgagtttgttgtgcggggtgtgcatacccggggtgtcaacaaacacaagctgcatatcgtcgcggttgtatatgcccgttatcctgtttctcgtggtttggggtttattggaaactatcgagatcttttctccgattatcgcattaagaagcgttgattttccgacatttgctcttcctacgatggatatatacgctgttctcatttttctccgtccttttatctgtgaagtcccatttttgccataacggttttctgtcgtgctatcatttccttttcttcttctcctgccatgtggtcatagccgagcaggtgcaggcaggaatgcgcaacaagaaaagccacttctctttcaaaagagtgtccgtatgcctttctctgcttttcggcgcgttcgaggtttaacgatatgtcgccgaggaaacattcctctccgtcttcgggcggatattcgcctgacggaaaagaaagcacgtccgtcgtctttgaaatgtttctcatgcgggcattcagttcgcgctgctgtctgttgttgacaagttgaacgtcaacgtcgcattttgcctcgacaccctcgcattcaagggtggttttaacggctttttttatgagtttttcaaggtcttcggtgatttcgaaaatattctgtctgtttattatttcaacgtcgggtcttttcattgttttttctccgtttccgcatccgctttttcgtaagctttgattatctgctgaacaagtcggtgtctcacaacgtccttgtgcgtcagcatctgaactgttataccgtctattccgtcaagtattttcatcgcctgtttgagtccgctttttcgcgttgcgggcaagtccgtctgtgtgatgtctcccgttatgactatctttgagcggaagccgagacgggtcaaaaacattttcatctgttctctcgtcgtgttctgcgcctcgtcgagaatgatgaacgaatcgtcgagcgtgcgtcctctcatgtatgcgagcggagcgacttcgataactcccttttcctgatatttttggtatgtttccgctccgagcatatcgaacagcgcgtcataaagcgggcgcagatacgggtctactttgttttgcaggtcgcccggcagaaatccgagattttctcccgcttccacggcgggacgcgtcagaattattctgctgacctgtttgttgcgcagcgccgtgacagccatggctaccgcaagatatgtttttcccgttcccgcaggtcccacgccgagcgttaccgtgttgttctctatcgcttcgagatactgtttttgtccgagcgtttttgcgcgtatgggtctgccttttgcggttatgcaaacgcagtcggaggaaaagtccgcaagcgccgcgtcgttgccctcttcaaccatggagatgaagtaactgactatctgcgcagttaccgtttcgccgcgttccgcaaccgatatgagaagttttatgaccttttccgccgattccgtgttctcttctccgccgcagacttttattttgccgtcacggttgaccacggcaacgtcgagctcgttttctatgagtttgatgttctcgtcaaaacttccgaatacgtttccgattatttcggttccgtttacctcaatgtttctttccatattttcctctgttttattcccgctcttctgcggtttcgttgtttcttatctccgcgtcttttccgaaatccgtcaccacgctgtaacggtaagccgcatatattccctcggatgtgtattttatttcaagccgtcggctttctatttcaatatttttcattccccgcgcctccgcttcgtcaagaagcgtcaacgccttttcgtaagcctgttcttttgtcagcgtcgtttttgccgtctccgtctgcgaaaacgtcgttcttgtcagacgaacgggcaaaataatatttttcgataaccgcagttcgcttgtctttgccgtgcggtagaattcttcgtaatcgcatttgttcaggtcaaaagactttccgaaaagcgtcagcgaataaaccgtttttgtcctgcccgtttcggttttttcttcctgttcgaacggaacaaaaacatctatcgttctgttcaccctcgctttgatctccgcacgggcgtggacaagacgaaatcctattcgtttgctgtcgtaaacgccgccgacaagcaattgccctttttttacgagcgcaccgtttttaaccgcccgaacgccgttgaagaccgttacggagattatctgcgcgtcctcttccgcgattatgtttgacggcgacgttatatccaccgtcgggttcggaactgcttgttcgagttccacgaccgcaacgctgccgaaaaaattgacggtcgctcccgcaacgtcgtcaaaatttctcataagatcgcgacgcagggtctgttcgtcgagcattccccgaatcgcaccgacgcaaagtccgttttctttcagaaatttttcaacggcgatgagttgcgttttgtctttatatcccgatatgtctatacgccaaatcacgtttgacataagcacgattattccgataaacagcaccgcaccgacaagaaagccccaccgcttcattcgtctctttgcgcggacgggaagccccgccgtgacttttgaaagcgatgttgcgccgctctcaaagcaaagtttttcgacctctttttcgtcgggcaggcggcagcggaatcggagcgtgcaggcatcaagccttcgtatcgcccagatatcgacgtttttgttcatgcaggcggtcaaaaatctttcgggttcgggactttccgcttcaaattcgacacagcccgtcagaaaattgattatatccgaacttttcaatttattaacagcaaaggtcaacggacatgacttttccgtcgatacgcacgcatccgtccgcaagattttttatgcgcaggtcttttccgataacgcggacattgtattttccgacatttaccttgaccgcttcgttttcgtactcgcagatacgccgacagccttcgataacgacgctttttctgtcgtctatctcgatctgcggcgttttcggacgccaatcgcttgccatttgccaacctccgttttgtttcttacaaaatgtatatttcaaaacggatatgattattctgcttttttcaggctgatcccacgcgcctaacggcaaactttgtcaatgaatttcagaactttttcgacatagttcttttcgtctgttctgtatgcctgcgcatgataacttttttgacttatccaaatctgagtttcgttttcggcatgggctgctgcgttgttcaacgcagttgcataatcggaagaaaacacattgtccttgtcctctccgataaaaaaccacgcctgtccgtttttttcggaaacggcatttatgggttttgcggaaaacatgtcttcttccgagagaacggaaataaagaattttgtcagtccgtgcgtccaatcgggcattgacgaccactttttaagtccgccgtcttcgttgaaatatttgtccgcgtccgtataagccgcatcggaaatgacagccgttacgtcatcattgcccgctcccgcgagaattgccgcggaggcgccgaacccccagccttgaaggacgatatattttgacccgtatttttcctttacataggaaattatctgtttcagttcatttgcttcgcgttttccgtaggtataaccggagcccgtcgcaaaaccgctgcccgagtagtcgaacgtcgcaacgtttatgcccgcgtccgcaagttgttttgcgtaaagaatgccgtcatcgattttcgttacggtcttattgtccccgacatcgtgcgaaaaaattacggtaatatccgattttttactttccgccgttttaatgtcctgtgcgggaataaaccaaagtacggtttcgtctccgctctcgaacttcacggtcgccgcttcgtagtaaagacctatttccgaatcgtcggggaaacgctttgcggagactttttcggggtgaattatcgagtatgcgtccgaaaaaacaagcgagacaaaaactatcgcaccgagtccgacaaccgcgcataaacagatgatgaaaacctttttgaaagacttcgcttttcgcttttgcgcactttcgctctttttcatctcttttgtttcggacggctttttattttctttttctttcatatcagttctttttccattggtcgagccacggttgaatgatttttatatctttgaatccgataatataggcaacgcctgccgcaattatgcccgaaagacagaaaaacgccgtaatcagcgcgcctgccaatcctccctcggcgctcgtaactccgaacatcgcgtagatgtacatcgcgtgacccgaaagaatatagttaagtatgcgtattccggaacgtatgccgcagtcgggaagcaatacgccgagcgtgtaaacaacggctgcgggaacaaaaacgaccgcggaagaggcaaaacctttccaaatcatgggcttcatgtgccccgcattcacctttattttgtccttgcagcccgcagtccaaagattgaaaatgcagaaatacataaaaacaatatagtaaaaaaccgcaagaatacatttgagcgggtaagcaaaatcctttgccgccgcaacgagcggataagaagcgaacgcaagcgccgtgaccatcagcgttcgcagaaaaacatcgagtgaagatctaaaaaccgttttcatatatatactccgatattttaatatatattattttaacatacagagcggtgatttacaataccgcaattgtgacatttttatattgcagaggggtcatacccgtcacttccgcaaattctctgttaaaagttctgaccgtttcaaagcccgtatctgcggctatgcgtgtgacggtcttttcgggttcgtttatcagttgatagcacgcttttgaaacacggtagtcgttgacgtaacgtttgtacgaaagccccgtttttgctttgaattgtttggaaagatacgaatagtcgtatttcagcgtctccgaaagcgttttcagcgaacaatcggtgtcgtaattttttgcaacaaagagaaaaatctcatccagaacggaaagattggcggtcgaagttctcggcacgacaggcagttttcttgccataaggtcacatgcggtgtaaaagaacgctttgaccgcaaacacgtttttctgctccgcgagtgcaaacgcttcctcgggaatgtggaatacgggattttgaggtatcttgtttttcatcagcgagtcgaattcggggataaattcgggcgcaaaaatataggcaagtatctgcgaagacgcatccgccgaaaacgaatgatattgaagaggaaaaacaacgacgctttcacctgcggggacttctcttttgactcccgcaactaccgattgcgccgtgccttttaccacgcgcatgatctcgtatgttctgtgtatgtgatacggaaaactcatgttcgatgccgaaaaaatatcgcacctttttcctttgagttccgtcggttcagcataaagcatataatatctccgatgactaattttgtctataagtatactacatttggcttgaaaaatcaagacctttttgatataataggtcgaattttgacttactgtgaggtaaatatgtggtatcttgctctcatcgcgtttatccccatcgttttttgcgttgttgcgatggccgcgttcaactggcccgctaaatttgcgcttcccgtttcatggcttttggcgtgcctgctcggcttcattttctggaatatggaccttttgtccctgacggcttattccatttcgggacttttaaattccattgacgtacttataatcatcacgggcgcaatactcgttatgaatatgcttaaaatgtcaggtgcaatggctacgataaatcacggattcagagccatcagtcccgacggaagagttcagacgataatcgtcggcttcctttttgtttcgttccttgaagccgccgcgggtttcggaactcccgccgcgcttgccgcaccgcttctcgtcagcctcggctgtcctccgctcggagccgccgcagttgctcttatctgcgactccgcagccgtttcgttcggtgcgataggaactcccgtcataacgtccctgaactgtctcggttccgaaatatcgacgcattcttttgcaatgtctctttctttctggtccgccgttccgcacgttgcggtttcaacttttttgccttttatcatcgttgcggtaatatgcaagtttttcagcaaagaacgctcgttcaaacccgcgttgcagattcttcctttctctcttcttgcgggtctttctttcagcattccgtatcttcttgtcgcaacgtttatcggttatgagttcccgtccatcatcggtgcgcttgtcggtcttatcgtgaccgtgcttgccgcaaaaaaaggatttcttgtcccgaagacggaatggcatttctccgattccgtgaactgggacgaatcgtggaagtcgagccgcaaacttgctccgatgaaaccgtcgaatatgcctcttttcaaggcatgggttccttacggtcttatagcgcttcttcttgttgttacccgtctgcccataaaactcgggggcaaaacaataggcgattggctcaaatccgatgttatcagcccgagcatttcaagcgttttcggcgttgaaaacacaagttacgttctcaaatgggcatacatacccggcacgatgtttattcttgttgctcttctgacgatacttttgcatcagatgaaaggcaaagacgttgtgtttgctttcaaagaaacaggcaaacaggttgcgggcgcggcggtagccgttgtattcggtcttgcgcttgttcagatactgcgctattcgggcagcaacgacataaactcagaaggcaccaagagcatgattttctatatggcggaagcgctttcgggcgtcggaaaatccgtatacgtcataatcgctcccataataggcgacctcggagcgtttgtttcgggttctaataccgtttccaatatgctgttcacaaacctgcaatatcagtctgcaacgcacctcggtctgcgcggcgatatgatagttgccatgcaggtggtcggcggcgcagtcggaaatatgatctgcgtcaacaacgttgttgcggcatgcgcaacggttgcaaccacgggcaaagagggaaagataatccgtatgaatcttatccccgcacttatttacaccgccgtggtcattctcatttttcttgttgccctttggaccggaaatatggatataggagcaaaggtgttctcctgactccgcttttgtaaatatataacataaaacattttgccgcccgttttcacgggcggctcactttttgatctttatgttcgaatcttttcttgtggaaaaattgttaaattttatgaaaaagggtatgctacctattgacaaaccgaaagaaaagtgatactatttagtcaatgattagcactcgggtgcgcagagtgctaaaaacgggtcggaacattctgacacggaggcgaaaacaatggaacttgacgagagaaaaagagtaatattgaaaaccgtcatcaacgcatatatcagaacgggtgagcctgtcggctcaaaggctttggcgggaatggaagatctgcacgtttcgtccgcaactataagaaacgaaatgtccgatctcgaaaaactcggatatctgatgaagccgcacacctcggcgggaagagttccgtcgggcgaaggataccgttattatgttatgaacgcgcttcacgcgtatcatctgacgcagcgcgatattgaccgcttaataagcgacgcgcgtttggcaggacttcgaaacgccgttgaggattccgcaaaaagacttgcggatttttccgaatgtgcggtatttgccgtcaatcctgtctgcacgggcggggcgtattcgttcggacttatgcctgtcggaaaaaacacggtggcgctgcttgcgataagcggcgtgggaagcgttaagactggatttataagaacggaaacggaatttgaccaaaaaacgcttcaaggcattgcatcagttttgaacacggttctttcgggcgtatcgcttgaacagataaacagatccagacttgaacttctgaaaaaagcgatagaggaaaatttctcggactcttccgaaatagcgtctgcggcggcaaaactgctggaagaactgaaaagttacgaactgaccgtctgcggcggcacaaacccgctgtcttatcccgaattttccgagatagatgtggctaaaaagtatataaatatgctttccaaaaagcaggaaataatgaaaacgttgcttgacgttccgtcaaaagaaagcgatttcagcgttatgataggcgaagaaaatcctttcttcccatatcaggatgcgggacttgtcagggttgggtgcgattcaaaaatacctgtcgttttcggcattatgggacccgcaagaatgaattacgcaaggttgaaagcgggctgctcttacatcgtttctcaacttaaacacaaaatcaacgaagaatactgatctgcgggtatttccgacggaacaggacatcggaggtaatgagatgtcagataaaaagaagaaaaaaaacgaggtaactgaggatacggaaaaagatcttccgcagaccgaggaaactacgtccgagactgaggaaaaaggcgaagaaaagtcggagacagagaataaaaaggaatccgacgaacttgcaaaggcaaaagaccaatttgttcgtcttgcggcggacttcgacaattataaaaaaagaacggaagccgaaaaagcggcgctgcgagggatggttgtttcggacacggtgcagatgatgcttccgatactggacaacctcgaaagagccgtcagtgcggcggctgatgagaattcccccctgaaagacggcgtggttatggttctcaatcaggcgaaaaccgcgtttgagaatttcggcgtaacctctttcggcgaaaggggagacaagtttgacccgacgatacacaatgcggtcatgacttgccgggacgacgaactcgaacccgatactgttgcgaccgttcttcaaaagggttataaaatcaacgaccgaataatcagacacgctttggttcaggtcgtttcggaataagcgtataattaaaaagtatataaattattcttttaacggaggatatatattatgggaaaaattattggtattgacttaggtacaacaaactcctgcgtggcagttatggaaggcggcgagcctaccgttatcgcgaacgccgagggcgcaagaacgaccccgtccgttgtcgcgttctccaagaccggcgaaagaatggtcggtcaggtagcaaagagacaggctattacaaaccccgacagaaccatcatttccatcaagagaaaaatgggtactgccgacaaaatcaaaatagacgataaagaatacacccccgaaatgatttcggcgatgatcctttccaaacttaaagcggatgcggaagcatatctcggcgaaaaggtaacggaagccgttatcaccgttcccgcttacttcaacgactcccagcgtcaggcaaccaagaatgcaggcacgatagcgggtcttgacgtaaagagaatcgtcaacgagccgacggctgcggcgcttgcttacggcgttgacaaagaaaaagaacagaagataatggtttacgacctcggcggcggtacgttcgatgtttccattctcgaaatcggcgacggcgttttcgaagtgcttgcaaccaacggtaacactcacctcggcggcgatgacttcgacgagagaatcatgaactatcttatctccgagttcaagaagtccgacggcattgacctttccaacgataaaatggcaatgcagagacttaaagaagccgctgaaaaagcaaaaattgaactttccggtatgaccagcgcaaacatcaaccttccgttcatcacggcagacgcgacaggtcccaaacaccttgacgtaactctttccagagcaaagttcaacgaacttaccgcagatcttgtggaagcaaccatggaacccgttcgcaaggctctttcggacgcaggtcttactgttgataaacttgataagatactgcttgtcggcggttcttcgagaatccccgcagttcaggaagctcttaaaaagtatactaacaaagaaccccacaagggaattaaccccgatgagtgcgttgcggtaggcgccgcaattcaggcaggtattctcggcggcgacgttcaaggtcttgttcttcttgacgtaactccgctttcgctcggcgttgagacttacggcggcgttatgaccaagataatagatagaaactcgaccattcccgttaagaagagccagatattcaccacggcggccgataaccagacttccgttgaagttcatgttcttcaaggcgaaagagaaatggctgcgggcaacaaaacgctcggcagattccacctcgacaacattccgccggctcgcagacagactccgcagattgaggttacgttcgatatcgacgcaaacggtatcgttaacgtttccgcaaaagacctcggcacgggcaacgagcagcatataaccatcaccgcttccaccaatatgtccaaagaggacatcgacgcggcggttgcggaagcagcgaagttcgcggaagaggacaaaaagaagaaagaagaagtcgaagtcaagaacaccgcagagcagaccatcttccagatagagaagactatgggcgaagcgggcgacaagatcaccgacgatgaaaaggctcccgtcaatgccgctatcgaaaaacttcgtgcaactcttacttccggctccgttgacgacatcaaagccgacacagaggctcttaaccagtcgttctacaagattgcggaaaagatgtatgcccagacgcagcagggcgctgccggcgcacagcccggtgctacccacgcaaacgatgacggcacggttgaagtcaacgacgccgatttcaacgttgaggacgataacaacaaacaataattcctgcaaaataaaaagacggcgcggcagtattgccgccgcgccgtctttttagactgataatccccgaactttttgttctcaatgcaaggtttcgcaaaagaagaaaagtagcattgcctttaagacagatatgagttcatgtgttatcagtctattactgtttgaaagagaagaaacaatatggcggaaaaaagagattattacgaagtcctcggcgttgacaagaacgcaacggaagacgaactcaaaagcgcttacaggaaaaaagcgaagatgtggcaccccgacctgcaccctggcgatgcggaagccgaaaagaatttcaaagaggtcaacgaggcttacggtgtactttccgacaaggaaaaaagaagccgttacgaccgtttcggtcatgcgggcgtagatccctcttacggcggcggtgcgacgggcggcggatatacgacgaatatagatttcggcgacctcggcgacattttcggcagttttttcggcggcgcgggcggcggagcgagaagacgttcttccgcaattccgggttcggatgtttctgcgtccgtaacgcttgaattcaatgaagccgtattcggctgtcaaaaaaccgtaaacgtgcgcagaatggaaaaatgcgaagagtgcgacggttctggcgcagcaaaaggcacgcagcccacgacctgccccacctgtaacggaacgggcgttgtacgtcaggtttcgcagacgcttttcggcgcaatgcaaacggagcgtccctgttcaaactgccacggaacgggtaagataataaaagatccctgcaaggtctgcggcggcagaggcgaagttcgcaaggaacgcacgataaacgtcaaagttcccgcaggtatcaacaataacaacactcttaccatgcgcggacagggcgatacgggtcttaaaggcggtcccaacggagatctgaacatttccgtaaaggtaaaaccgcacccgatatttgtccgtaaggacaacgacctttgctgcgacgttcctataacgcttgcacaggctgttctcggcgatacgattcagataccgacgcttgacggcgacccgataagttataagattcccgaaggtacgcagtcgcacaccgtgaccacgttcaagggtaggggcgttccttacatcaacaatccgaagagccgcggcagtcttgttgttacgttcatcgttgaaattccgagaaatctgtcctcaaaacaaaaggatatcatcaaagagttcgatacgcagacaacaggtaagacctacgaaaaaagccgttcgttctggaacaaggtcaaggacgtatttgataaatagatttaacagaaaaatgttatccgcgaagacaaaaatcttcgcggatttcttttgtttattgtatttttccgttcagcagtcctctttcgaacatcttctgaaccgaggtcataacgcctatctttgcgtgataccacgtcagaccgccttgcagatatacggcgtagggttcgcggagaggaccgtctgcggaaagttctatcgacgaaccctgaacaaatgctcccgccgccatgataacctggctgtcatatcccggcatcggcgcgggaacgggggtgacgtaactgtcaacgggcgccgccgcttgaattcccgcacaaaacgcttccattgcttcgggagaaccgagttccaccgcctgaataatgtcgtggcgcggttcgctgccgttcggaacgactttgtatccgagtttttcgtatatgttagccgcaaatacagcgcctttcaacgcggatgccgtaaccgtcggcgcaaggaaaaatccctgataaagctgcgtcagtatcccgagattcgctccgacttcctgccccagtcccggtgcgctgagcctgtaagcgcagcgctctatacactcttccgtgccgacgatatagccgcctatcggtgcaagtccgccgcccgggttttttatcagcgaacccaccgtcatatccgccccgacgtcggagggttcggctgtttcgacaaattcgccgtaacagttgtcaaccatgcagataatgttcgggttgacgcttttaaccgtttttatcgcttcgcctatctgcgcaacggacagcgtcggacgtgttttgtatccttttgaacgctgaatcgcaacgagttttgttctgtcggttattgcggagcgaatgccgtcaaggtcaaacgagccgtcttcttttaaatctacttccgagtaagccacgccgtattcggcaagcgaacacggcgacggacgaagtccgataacttcttcaagtgtgtcgtaaggtctgcccgaaacggaaagaagttcgtccccgggaaacagatttgctcccagagccaacgcaagcgcgtgcgttccgcaggtgatctgcggtctgacaagcgccgcaggcgtgtggaacgtgtccgcataaactttttcaagcgtatcgcgccccatatcgtcgtatccgtagcccgtcgttgccgcaaaatgctgtgcgctgacgcgatttttgcgcatggcttcaagcaccttgtattgattgtattccgccacgcggtctatcttttcaaatctttctttcagtccgttcagcgtcttttcgcaaaattctgcgacttccgtgcatattccgaactccgaaaacatttcttttgtatccatacttttaccttcatcaaaattgcattatatacatttaataatagcaaatcccctctgtgttgtcaacccccctgcgggctgatttcgtttatgcttcttcaaatcgcataccgaaaggcgtattttagtttcggagttcgtcattgacatacctatatttttatgatataatattttacggtgcgtcgggcttttcccgtgcgcagaaacaaaagataatcttcgcttcggaggggaagttttatgaagaccgatatagttatcatcggcgcgggtcccgcaggaatttttactgcgatagagttgataaaaaagggaagcaaacagcatatcgtcatcgttgaaaagggtaaggcgatagaggacaggcattgcccgaaagaaaaaacgaagaaatgcgtcaactgcaagccgtattgtcatataacgacaggtttttcgggcgcgggcgcattttccgacggaaaattgagcctcagctgcgaagtcggaggagatctgccgtctttgataggtgagacccttgcgcaggaaacgatagattacacagataagatatatcttgaattcggtgcagacccgcacatcgagggtctgggcaacaaagaagaggtcaaaaatataagacgccgtgccataaaagcgggcttgcgtcttgttgactgccccattcgtcacctcggaactgaaaaggcacagggactttactacgcgattgaaaaatatctgctcgaaaacggcgttgaaatgttattcggttatgaatgttcgaatattatcctgaacggcgacgagtgcgacggcgtatatatcacaaacggcaaagaaacaaaagaaatccacgcaaaaacgaccgttatcgcaaccggaagaagaggcgcggaatggcttgaaagcgtttgcgcggaacatgatatagcgcatattccaggcacggttgacatcggcgtgcgcgtcgaggtcagaaacgagatcatggaaaaggtcaatgaggttctttacgaatcgaagttgataggctatccgcagccgttcaagaacaaggttcgcactttctgccagaatccgggcggttttgtcagccaggaaaactatgacaacgatcttgccgtagtcaacggtcactcctacaaggaacttaaatccgacaacacaaatcttgccattcttgtttcccacaacttcaaccacccgttcaatcagcccatcgcttacgcgcaaaaagtcggagaactgactaatatgcttgcggcgggtcatatccttgttcagcgtttcggcgatattcttgacggaaaaagaacttggccgaaagaacttgcgcagtcgaacgtcagaccgacgcttcccgatgccgttgcgggcgatataactgctgcaatgccgtaccgcgcaatgataaacataatcaatttcattcaggctatggacgaagtcgttcccggttttgcaagttcggaaacgcttctgtactctcccgaattgaagttttacagcaaccgaatcaaaatggacgagcatttcaacacaaacgttcgcggacttcactgtctcggcgattccagcggttggacgcgcggtcttatgatggcttccgtaatgggtgttcttatgggacgcgagatagccgaaagagaactcggaaaaatacccgaataagttatttgcaacaataataaagctttattaaaagaaaaccgacggtaaattgatatgcaccccaaaagtgtctaacttttggggtgcatatcaatgcgatggtgggtacgctgcgcctcgccgaattgcgaccgctgatgcggttcccgcaattcgttgcttgctcgcgacttcacggtcggaaaaagtttctttttccgccgtttcggcgaaccatgtttttgctgcgcaaaaatggttcgattatccacccgccccaaacaaaaacagaccatcaaaaagatggagttgattaaaacgataaggacgagggtgggtacgctgcgcctcgccgagttgcgaccgctgatgcggttcccgcaattcgttgcttgctcgcgacttcacgatcggaaaaagtttctttttccgccgtttcggcgaaccatgtttttgctgcgcaaaaatggttcgattatccatcacgcaccaaacaaaaacagaccatcaaaaagatggtctgtttttgtttggtgggcgagggtggattcggaccaccgaagctgaaaagcaacagatttacagtctgccccctttggccactcgggaactcgcccataatggagctggtgatgggactcgaacccgcaacctgctgattacaaatcagctgctctgccaattgagctacaccagcgatgagtcttcaccaaacgtcgagtctttttcaacgcttactgattataccatataatcaaacggctgtcaagccctttttgtgaactttttcgattttttgatattgacaacatcgcttcataattgtataatagggatatattaaataataagtaagaaaatgagaaagggtgaatctcgtggcttctaaaaatgcggtcggatcggaacttataaccgaacaactgaaaagcggcgagttttctcccgtgtactatattttcggcaacgaaccgtatctgaaattcttttggcttgaaaaactgcgtgacgcattcctgcccgaggacgtccgtgacgacgtgacataccgctatgacggcgaaacgctttcctcagaagagtttgaatccgcagcaggttcgttttcgatgctttcggaaagaaaggtcgttattgtcaaagacctgcccctgaacggcgacgtcgcggctttttgcctgaaaaatcccgatgtgttcgcgcccgatggtatgataatcttttacgatacgaaagacgattatgacaagaagtcggagaacgcaaaaaaatttatcgacttgataagcgaaaagggcagccttgtccgtatagattcccccgatgaaaaaacgcttgtgcgctggataggaaaacaatgcgccattgagggacttaccgtttccgaatacgatgcaaaatatctgcttgactgcataggtccgtcaatgcttgccctgcgctccgaaatagagaaaatcaggttttataccgatgacggcaggctcaaagcctccgatgtggacgcgatatgtcataattccgcagaggtcaaaggttatcttatcacaaatgccattatcgagagtgaccccggaaaggcatttttgctgattgaggattttctgaaaacgaaagacggcaacgaacagattcttgcggcgaccgtgttcggatatatcggaaaactttggaaggtcaaacttctgctcgacctcggcagttcggattccgaaatagcgaaagcgataggcgtcaaaaacgcgttttcatatatcaaatgcgcaaaaaaacattcggtcgaagatattgatgacgctgttgaaatatgcgtcaaagccgatattgcgctgaaatcgacctcaacacctccgaacgccgtactttatcgccttgtctcggaactgacggagcgcttatgataaccgttgacagaatagttgtcgttgagggcaaatacgacaggataaaacttgcgggaatacttgacgcaacggttatatgtaccgatgggttcggcatattcaaaaatgaggaactta

SEQ ID NO: 2745 - DNA, 23636 bp, Unknown
  16S sequences of unknown bacteria
aaaccgaagaagagacagccgagacatgcggatgcggttgctgctgcgacgaagaaaccacggaagagacagaaacaacagaagctcctgaagaatgctgcgacactcacgaagacagcgcggacaactcagaagacagcacaaacgaataacaaaacaaaagaggtatgtatcgaaaggtatgtacctttttttctgtctgtttttttcggattaacgcttgacaaagggggaagattatagtataataaaaaagctgacaaaattaaaaatgctagtgtggctcaggggtagagcagctgattcgtaatcagcaggtcgagggtccgaatccctccactagctttttttttatttttactgaaaaagagctttgcacattcaaccggcatggtatgaaaacgtgaaagctcttttttcttatattctctcttctcttgttatcttatacgcggcgctgatctctccatccgctaccgcgctgtttcatttgttcttcggcattacggcaaagcagttgtttatccatctctcgtgaccaaggctcgggcggtttatgtattcgccgctgtacaccatagcagtggagcttcctccgtcgagcattgcggcattgtacgcgttctcggcgagcatgacctcttgcaaaacgtcaaggtcacacccgatgctccagtccgcctgccgtccgtcgataacgagaagtaggaattcacccgtcttgcgctgtcctatggcggttctcggcgcaattccccatccgcctgtgccgtttttgataagtccttctccgtttaccacaaggaagggggaaaacgataccgcgcttacgatgttgttttcgagcgcccagtctgccgtacagtgtctgagcaccatcgcaccttcatcgtttatgcctatcatgttgtagacagtgtcgtctattacatacggatatacaaccttgctgtcctcgatgagcagtcccgcaggcattccgccgtttgagtcgtagttcgcgccgtcctggaaaccgcctccgtttattcccgcgacagctcctgagtttgttaccatagtcatgacgttttctccgcaggtgtactgttgggaggtgtcgacgagtttcactctgagcgggtcttccacgagcatgacataccctctccacgtactgccggacacttctttcacgtatagcccgtcctcgagcatggagtagccttcgccaatgtagtcgtgctccccgtcctcaagctcagttaccgggtctgtctcctggctgtacgcatacctgttcggcttgcttgtctcaggctcggtttcagtctctgtctcagtttctgtttccgtttctgtttcaggttcagtttcagtctcgacttcggtttcagtttcggtttcagtctccgcttccgtttcggtttcgggttctatttcagtttccgtctctgacttcttattgaacgacagaatctcggagtcgtatccgctgtcatcgatctcgttcgccttcatgatactgtcgatatattcgtcggagaaaaacatggtcgcgagatatttatgcgacatcgtcctcatcgcggagcatatccatatcgtttgcaggctcggacttgctcccgcgactatcagtatgtagaaagcaagcacgcacgtcagaaaaaatgtcatgcaggctatcactaaaacagaaaacgcacgtcttactattttcattattccctctgtactattatcaagatgacataatagactgagaaaacatggaaaaagttccgtgcgttttgtttttttaattctcttttgacttaatgtatttgtctatagctgcggcggctttctttccggctcccatcgcgagaattaccgtggctgatcccgtaacggcgtctcctccggcgtaaactccctctcgtgaggtaagtccgtcttcgtccgttacaattccgcctctctttgagacttcaagaccgtccgttgtggattttatcagcgggttcgggcttgtgcctatcgcgattatcacgcagtccgcgtcaagcacaaagtccgctccttctatcggtacgggacggcgtcttccgcttgcgtcaggctcaccgagctccatcttctggcatacgactttcgcggcgtgtccgttttcgtcgccttcaatggatgtaggattcgagagaagtctgaactctattccctcttcctttgcgtgctctatttcctcggctcttgcgggaagctcgctctcacctctgcggtatactatgtagacattctccgctccgagacgttttgcacatcttgcggcgtccattgcaacgttgccgcctccgacaaccgccacatttttcgcgtgaagcacgggtgtcgcggagtcgtctttgtacgctttcatgaggttgattcttgtgaggaattcgttcgcggaatatacgcccgacaggttttctccggggatattcatgaagttcggaagtccggcgccggtgccgatgtaaaccgactcaaatccgtcctcgagaagctcatccactgatatcgtcttgccgattattacgtttgtctctatttttaccccgagcgcacgaagattgtctatttccttcgcaacgatggctttcggaagtctgaattcgggaatgccgtatacaagcacaccgcccgctgtatggagagcttcaaataccgttacttcgtatccgagcttagcgagatctcccgcgcaggtaagtcctgaaggtcctgagcctattacagcaaccttatgtccgttcttctcgggctgagcgggctgttcggtgcagttttcgttgtgccggtccgcgacaaagcgttcaagtctgccgattccgacgggttctcccttaactcctctgacgcattttgactcgcactgtgactcctgtgggcatactcttccgcagactgccgcgagcgagcttgatttcgctatgattttatacgcgccctcgtaatcgctttcggttatctttttgatgaagtgcggtatttcgatattcacgggacatcccgacacgcacggcatatttttgcagttcaggcaacgcgccgcttcatcaagagctgctttttcgctgtagccgagagcaacctctttgtagtttttcgcgcgtacttccggctcctgcgtgggcatttcgttctttttcagtgacatattaggcatatcgtattctcctcagttattcgcctgctgcttcaagaggttgcagtgttcctcacgcgcgtgcttttcaaattctctgtacatcgagccacgcttcagtgcttcgtcaaagtctacttcatgtccgtcaaactccggtccgtctacgcacgcgaactttgtttttcctccgacagtgagtctgcatccgccgcacattcccgttccgtctatcataatggggttcatgctgacgacagtttttatgccgtatttcttcgtgagcgcggcgacaaacttcatcatgataacgggacctatcgctatgacctcgtcgtacttctcaccggattctataagcttttcaagggcgtttgtcacaagtcccttttcgccgtatgaaccgtcgtccgtcatcatcacaaatttgtccgacacagtcttgaattcatcttcaaggataacaagctcgcggtttctgaagcctacgatggaatggacttcgcatacgttttcgtgcagcttctttgcaacgggatacgctatcgcacatccgacaccgccgccgactaccgccacttttttaagtccttctacatttgttgctctgccgagaggtcccgcgaaatcggaaatatagtctccttcgttcagctccgcgagtttatcggttgtcgcgccgaccttttggaaaattatcgttacagttcccgcttctctgtcgtagtcggctactgtgagcggaattctctccccctcgctgtcgacacgcagaatgataaactgtcccgcctgagctttcttcgcgacaagcggcgcttttatattcattttgattactgtaggattcagtatagttttttctgttatctcatacataatatgacctcgcttattatgagttcgcatttggttacaataattattatatcatattcacgccggtatgtaaacggacataacacatgaaatcccgccgcggcttgattttgtttttagatgaatcattttttcacacgggaatatacttaatcaaaatcattcatcgggagacttgccatgtcgtttttacgtgccgccgccgatatgctcggttctgctgtaactccgtttatgcttatcttcactgcggcagttctcatgttctcgacaaagagggagaaaaagcaggagaagactactgctcacgtcggattcttctcgaaaaactcacccgtccgcgctctcactttagctcttgcgggaactctcggcgtcgggaacattacgggagttacatccgcgctcatctcaggcggtccgggagcggttttctggatgtgggcgggctcggttatcgttatcataataaaatacgccgaagtatatctgtcggtactgtacagacagcgtgacagatacggattcttcggcggtgctatgtactatattagggatgggttgtcaaagcgtttcggcgggagagcctcggcgttcttcgggagcgtttttgctgttctctgcatcgcaaactcacttgtcacggggaacatcgttcagtcaagcgcggcttcctctgccctctctcctaagcacaggattgttacgggagcgatacttgcagtcctcgtgctgttttcgataatattcggcacacggcgcattgagaggataacggcttatctcattccacccctcgcgggagtttacatagcgatttcggcttatgttatcttctcaaatctttcacttgcgggagaggtattctgcgatattttttcgtccgctttctcttaccgtgcggtactcggaggagcggcgggattttgtatgcgggacgcggtgaggtacggtatcatgcgcggcattttctcaaacgaagcgggttgcggaacatctcccacggctcacgcatcggctgaaacggcttctccgagcgcacagggacgtcttggcatagcagaggtcgtcttcgatacgccggttctatgcacgctgacggctcttgtgatgctcatagcggacaagaaatactctctcatcccgtggaacacctcatccgatgcggcgagtgtcaccttaagcgcgttcggtatgatcggcggattcagagaaattttgtcggtatctataatactgttcgcgtatgctacgataatcgcgcagatatactacggcacagtcgccatcggttatctctcacagaagaaaaagtggagagtgctctactatatcctctcggttgtgtgtaccgtcataggctctgtcgtctcatcggagcttatgtggatgggggctgacgcgcttctcggaactatgaccgtactcaattgtcttgcgcttctgtttctgcggtgggagtgtcgattataacgtcagccttcggtccgcggtttatctcacatatctttttcagcacctccacggcttcgtttatatggtacacgccggagagatcgtattcgctcagcgagagataaatcttattatgcgcggtaaacttcggcgaatagttcatgaggtagtacctgaaatacttgtcgagcgtcttgttgtattccgcgcttccgtttttgaggcgtgaaaatctcgctctgccgaagagtattttagcctgcttatagtattccgagtttatggcgtatcctttaccgtacagttcggacattcttctgtcaagcagtgtgtcaagtgcgcgtttgtcgtctttcagcgatagcagatacgtgtcgatattatacaccattgactccgacagctcgtttgcggtgtcagccataacggaagaggattcgtttttcgtatagtatccgataacctcggcgagggctgtcatgaggtcgcttctgattctgtcaatgtcgctttcctttatgagacccactctgagagcctctgctgcgagggtgttcatgtagtcggagcggtcgagattcgccggattcagtccgctgtaggattgtatgtcagtcatcgtcttcctcctcgtcatcgtccatgtcttccttcgcggcatcgggattgggattgtcttccttctgcatcacggcttcgctgtcaaggaactcgtcaaacgcgtcaagctcgtctatctccgtgtcctcttcgtcaaagtcgtcttcgtaaaggtcgtgatccgcgggtccgtcgctctcaacaccgtcaaagtagtcgtcgccgtattcctcgcgcacataattatcaggagtttcacgctgacctacgccgggtttaagattgagctcatctctgtcggcaaaccacttagcatagttttctccgctgttgaccttgcgtattatcctctcgacttccctgcctatgagagtatcaacgcttccgcggcagtacagctcaaatctttcaaaaagctcgtctataagctcgttgtcgctgattttgtcgtcagtttcggttttaatgtagtagaacagatatgtcagctcgttcaggagataagtgtagttttcttttgtaatatatcttgacgtgcagaagcgctcgattatctttgtgacagctcccgtacctatttcaacgcggtcgttctcgacgatggatttgtttctcgtatcggaaagctcacgtgcttcctcttcagtcaggacaagaccgtattttgacgaaacttcgttaagctccagtatttcctttgacaccggtctgagcgacatattctcaagtgatatcagtccattcattatgttgtttcacttcctgaataaaatttacaaaaaagtttatgtgattctattgacaacgcgtttgttgtgtgatataattttgatgtattgatgtacttatattcacgcgtgctcaatattgttattatatcacttgcgggattctctgtcaagtgttttttcttttttcgacttattttatcggtcttgcttcaagcatctttatcggcacgcctttttcggtgaagctgcgctcgtattcggttacgatattgccttcgtttctgtcggaattgtgcaaatctcgcgtggtgtaggttatctcaaatccgctttcggggagaacctcaagtgtatagtcgaaaagcgtgtcgttatccgtcttgaacgagaacacaccgtcgctttttaacactcttttgtaattcacaaggagcgcgggatgggtcagtcttctcttttcgtagttgcactttctcgcccacgggtcgctgaagtttgctatgattccggagagtgagttgtcgggcattgcggaaaccacatcagccgcttctcctacgataaaacggacgttgccgcgcttttcgagtggaatttcgcatacttcgccgtttttgtacagctttccctcgggagtcagccatccgccgttcgcaccgagcttaccgagatcacggctcttcgcgtacttctctatcgcacataccgcaacgtcggatattctctcgagtgcgatatagttcttctcggtctcgcgcgcggatagcattgtaatgaattctcccttgccgcagcctacttcaaggtataatggcgcctcgtcagcgaaaactttctcgggagaaatccactcttctgtcgaaaatgggtacaaaagtgaggacagcgcgagaagtctttcatttccgtggcgtttttttctcattcgcatattgattattactccgttttttgatagaatataggtgatactattttttgcaatttgaatctgtaatcagctacccgttattatatcataagatagttcaaaaatctacactaactacataaaaagagaggtgagataatggaattaaacatctttatgcatgagttgaaaaaggctcttgtcgaaagagggattcctgaggaaaccgcggcaaagcacgtttctaatctgagccgttcttttacaaatgacgatttgtctgaaataaacgcaatccgctcttacgaagaagtacagcagcttgccgacagcatttccgtcattctgtcaaagggaaaaagctctcagcagcaaaacccgccccctgccgccgaacaaatccctcccgttgccactccgtcagacaggcatgaggcaaaagaggttgtagtgaagccgcaggcacgacaagctcccaggcagcgacctcagccgaaagccgaagaagacagctactttgagtattcgcccgagaacacgccgtcaacaaagggtatgctgatattctgggtgggactgtttttgacgctgcctatcacgctcggacttgcggctgtcattttcggagcgttcgcggcggtatttgtcggacttgcgggacttatcgttgccggagttgtcgctcttgttgctgttgttgcggcaggcgcgggtatttcgctcgtcggcataattttcggcataacgcagctgttttcgttcgtcgccgccggaatttacgagatagggctcggcgttatggttgccggagctgcgctgtttgtggcggttctcatctacaatttgtccatcagattcttcccgtggctcatcaccctggtcggaaacttcatgggatttgtctgcggaaagctaaaggatttgtttttaaacgtcagaagggagtgttatagactatgaaacccgcatcaataatttctcttgtcatagcagtccttcttgtagtcgtcggtcttgtttcctgtttcatcgcgcagaacatggcaaaggcgaacggagaatatctctttgcggaggacagaggcgcggattcggtttacacagtcgacctcacagactccgaaatatcgaaaatcgagcttatcgcctccaaggtgcaggtgaacatctatggcagacaggaaaagtcttacatagaatttgtaaacttcagagagaattattattcaatctcgaacgccaaccgtgtgcttagctttgacgaaatccccgatgtgaagtccatgctgaaattctgggaaaacggcttctctttcaagggaatgagatacattttcaacttcaacaacaccgttgacgaaagccgcgacaaggtcataaatgtttatctgacaagcgacaaggacattaagatattcgacatcaaatcagacaatctcacgctgaacctatcgggtatgacaacgggaacggactacaacatcaccacgaaaaacgctgtaattaacggagacgttctcaggacctcctccactctcagtataaactacggagaaaaagccacgcccgcggacaaggtcgacatgaagctctcaacggctctcatacagtacgtaggcatcaacgcgaaggagcttaatttgacaacggacaagttcagatgcgcgggcaagactgacattacctccgaaagcggctctatctccatcggaaccataagccagattgacgatatctctcttgacctcactacaaactccggcagaatagttctcgacaactcggaagtcatgagcccgtacaagcactccgtctccgaaaactcacagggagagattgcaattaccacagattcatccgatatcacggtattccgctcggcaacggataaagcgaccgaccgtgaagcctgattatataaaaagcaaaggaaaagcaaaatgaaatactcttacaaaacaagcggtacctgctcctcaaaaatcgactttgaaattgaggacggcatcatcaaaaatatcgtattcaccggaggctgcaacggaaatctcaaagctgtctccaagctatgtaacggcaaaaacgcgcgtgaaatcgctgacattctccgtggaaacacctgcggtccccgctcaacctcatgtgcggatcagcttgccaaagcaatagacgaagctctcgcgggctaagttaagacaaaaaacaaggtcggttcaggattatattcccgccgaccttttttctttagtcaaaattgtttgttcgtctgtagtttattatttcaatgtccttgaagtacgcctcgaggatttcgtttgcgctgcgtccgagagccgccatgtcaagcgcaccgtactggctcattccaacgccgtgtccccatccctttccgacaaagatgaagttgtcgctgtcgtccgcgtaggcgattttgtgctttacttcatttgtggatttttccgctatctcttcggttctgtgctgtgtgtcagcggattcgtcttcttcagcgtacttcttgtactcatctccgaggaaagccgccgcgttctgtttcgtcatgacaaacacgtctttacggttgtagattaccttatcgtttgacgtgaggaccaccgcagttccgcgatcgtttgtgtccaccgaatccgccgtcataatatagcagtcgtcgatgttcgtgtagccgtagtcgatatcgtagtcggagcttttgtcatagtccggcgcgacatagtcaatgataacgtcctcggtgtattctacctcgccttttccgacgacaaagttcgcgcttttaacatacggagtgagagaggttctgactttatcggtagtgttaatgtcaacgctcgtgccgtgaatgtcggtgacgcggagagttttgacatatgtggagtttgtggcaagctgaactatttcaacatcctccacggcgtcttcaagctcttcgtaaccggctttatgcagtctttcgagtagctcttcgggcgacacttcgtttatccagaagccgttgttgtgtaccatgtagttctcccacggagtttcaacggcggcaaggtacggatattcggttgagcttccccacgcgtcctttgcactgaccgtgactccgcccattgacgaggaataatatgcgtttacgatatccccgtcgtatgtcataacgtcgcctttggtttcgaggacggcgttcattacgttttcgttgattcttcccgcgcctttgtaaacctgacactccgtcgttgtacagaggtcgaagccgtactgcttatgcttgttcagatgtgtcagcgtaaacgagcgcaccgtcacagcgaatgctttaagagtttccggaagccacgaatttgaggtttcataaggcagaactcctgcgacatatgcttcaagcgggagaatatttatcagcgaaacgccgtccgtatctccgttatcgtatctcttgaagcagaaaactccgtcgtacacgttccgcgcgggtgtcattatgtaagtgttgccgtttttgtcttcgtgagccttcagtccaagctcgctctctcctccgcagtcgtactcaaacaaaatcacgtcgtcgtaagggtcgataaccgaaacggcggtatcggtcggcgaggcaacataaacgtcattacgcgggaagatatcctcgatgtcggagaggtattcctcggcgtccctgcggcttgaaaatgaaccgattctcagcgtgtagtcggaataaatatacgaaggaatcgtataaagtccaagtctttcaacgtcgcgcgaggtgtcgtcgataagcgtttcaagctcgtctcggtcataaccggagcagcttacctcaatatggtacccgcctatagcgcagtctctttcgtcgtccgtgatgagaaaagtcatgtcggttttggaaaggttcgcgtcggaggtgcatgaaattacttcatcgtcaatatcccacaattcgcggaaatccttgtccccgtcgagatactgttctcctatagtatagccgtagtcggtttcgcactggaatcccgtcgtgatattgtcaccgtacataagacccgcgctaacaagaacatccccgccgtccttgagcgaggatgtgtcaataacagatgcagtctcaatatctgccgctccggcggacgaggcgagtatgtaaatcgtatagtaagccatgcttccgaccataagagccgcaagtatcatggcaagtatccgcacggcgagctttttacgctcttccttcgtgcgttttttgtgttcattaattttcgacaattgtgtagtctcccctcaccatgatataaacggaatcggacgtcgcgacaactcctctgccgtctccgcgcggaataaggcaaaggtggttcttggtgagcgaatatccgttgtatatttcggaagcgtcggtcatgtccgcaattccctgcttagcgtcgggagcagtacaaacagcacttcccgagcggagtataatctcgcaggcgttaacggcatacagcgcttctccgtttgtaagctcgataacctcataggtctgcgatgcggatgtattattggacggagcttccggctcggtttctgcgggtgtggtttcggttgaattaccgctgctcggtgtatatccggctaatttttcatcaacctcattcatgagttcaactttgaacacgtctctgagatagctgagagttataagagggtcggaagagctgtcataagctgccgccgcagtcaaagcaagacccgcgacaagggacgccagcactgcgccgacaactatatttttctttttcataaggatggctgcctttcatattatcacaacttgtattatacactgtcatgaatataatttcaatagacatgggaaaactcttccgccggagaaacgaaaatttacatttctgcctttgttttgccgttattttgggaatatcttactccattgcaagctgctcgccttttttcacagccactcctgtcgcgggaattttattctttctgcactttgacgcgtagtccttgtcgatgccttccccatagcgcacgtttgtcacttcaagaccgttcttcatgttaaatagggtaactccggcggacgaacgcgtcgttttctgcggaatgagcgaagaattaattaaaattccctttcccgcgctgttttcgatgaagatatcaagcggctcgtgctcgtaaattaccgcagctatcggagaagcgctcgagaacgcacctgtgagcttgcggcggttcgtctttgtttcgtatgcggtgacgggaattttcactcccttgccgtttttgaagatgaagatgaagttgtcctctttcgggtagccgctcatcgccttcatcataacaggcttttcatcgtcttcaaatccgagcttaactgcgatgaattcaccgagagcggacgccttgacaacatccagatccgcggttttacacttgtacgcctgcgccttgtccgtgaagaatattatctcggagaggttgtttgagttctcgcagttcagaatttcgtcgccgtccttcattttctgctcatttgcgcgcatgatggactggcgggttatcttcttgaaatatccttcctttgtgagcacgaggaacacgtcgtagttttcggtttcatcgtcatcagcgacgtatgcgctctcgtctacttcgattatatctgttttacgggggattccgtactttttcttgacggcggtcagctgctttgcgataacctctttcagcttcacatcgtccgcgattattccctcaagctccgctatttccttttgcaggctttcaatctcgcggattctctcaagtatatactcgcggttgaggtgacggagtttaatttctgcgataaagtcagcctgaacctcatcaatcgagaagccttccataagtctcggcacaacatcggattccttttcggtttcgcggacgatttttatcgctttgtcaatatcgacgagtatcttaccaagacctctcaagaggtgcagcttttccttctttttgtcaagctcgaacgtcagctcacgttttaccgagctcatgcggaactttatccactcttcaagtattccgcggacgccgagctgcatgggagtaccgtctataagcacgttgaaattgcacgggaagctgtcctcgagcgtggttgtgcggaacagctttgccataagcgcgtcggggtcggttcccttcttcacgtcaatggtcagcttaaagccggagaggtcgatttcatctcggatatccgatatttcgcggagttttccgtccttcagcagatctgttattcttttgagaatcacgtctattgatgtagaatacggtatctccgttatttcgataaggctgtttttcgcgtcgtaggtgtattttgagcggactttgaagctgccgtcgcccgtttcgtagatttttttcagctgctctcggtcgtagataagctcgccgcctgtggaaaaatctggtgcttttatgatatcgagcagcttgtccgtcgtcgttttaggatttttgagcagagctattgttccgtcgcagacttccgccaaattgaacgagcaaatctgcgactgaagtcctaccgcgatgcccatgttcggggagacgaggatattcgggaacgaggttggcaggagcgcgggttcaagcatggtgttgtcgtagttcggaaccatatcgacagcgtttttatctattccgccgaatatctccgcgcagaacggctcaagcttgacctcggtatatctgggtgctgccgccgcgtctccgctgtagtgcttaccgaacgagcccttggagtcaatgaacggatggagaagcgattcgttgtcacgcgtcagacgcacaagagtatcgtaaattccggcgtctccgtgcgggttcagagccattgttcgtccggctacggttgcgctcttcatacggtttccggtcatgagtccgagcttatacatggtgtagaggagctttcggtgggatggcttgaatccgtctatctccggtattgctcgcgaaacaataacgctcattgcgtacggcatatagtttttttcgattgtgtcaactataggctggtcgctgattattgcaggggatttcattttttcttccgctgcggtgttcttttttctcggcattttctatttttctttcgttaatatttatattatatgccacattcgtcctacataaatcaagcagctatagtttgtgtctacggctgcttaacattaaattatctttcggctgcgtggattacaaactccgcgaaaatggaatttgcccatgcgaaccatgaacgtgtgaacttatcgggatcgtcaacgtggaagccttcgtgcatgagtccggttcctgccgttgtggtttcaaacaggtcgaggaggtagtttatctcgtcgtcgctctcggaggtaagtccctgcattgcgagagatacgtgccagatgtaatccttcggtgtgtgcgggcttccgataccctttgcggcttttccttcaaagtagtacggatttgcgggagagaggatgaactttcttgtgttcttgtagatctcgtcgtcagccttgcagtatccgaggtaagggagtgagagaaggctcggtacgttcgcgtcgtccattaaattgtagtttccgagaccgtctgtttcataggcgtaaatcttgccgaattcgggatggttatatatagcgtactttgcgataccggcgtcaatttcggatttgagctttgccgcacgatttgcgagagcttcgtcatgatatacttcgtttgcgatttcaaccatatatccgatgataacggaggcgaacatttccgagggaataaggtagtggtatgtgcatgagtcgtcgctgggtctgaatcccgaccatgtcatgccggtatacgctacgggagaacctttgccttcgttgcagagtgtgtctgtcggcgggcagtttgttctctcaaagcggtactttgacttttcggcgtgatactgctcggtttcaaacacgtcaagaatcttctcgcaggctttcttgaagctgtcgtcaaaatgctcggtggtttcggaggctttccagaagtggtacgcgaggtttacgggatagcagagtgagtctacctcgtacttgcgctcccatgccataggattgttgtattcggttttatcaacaagaccccagtgagttatctcgtcgcctgtgcggttgaaagcgtttgcgtaagggtcgcaggtaatgcaatacgcctgtctctttacaaggcttgcgacaagtgctctgatttctgcgtcgtcctttgtgagcgggagataatgtctcacctgagcggaagagtcacggagccacatagcgggaatatcgcctgtgataacaaacgcgccgtgttcgtccatctttaccgttgtgtcgattgtgttgaggtatgttgccttgaacatttccgctatcacgggtctgccctttttgatgagcttatcctgaatatcggcaatgtagctgttcattttttctgtaacaagtgacataattacacctttattaatatgttttggtttttccgagttttattattttgcatcctgccgctcttactattctgttgtagaacgcaagatattcgcctgacgctgacgggagcttcgcgtagactgtctcaagatttaattcatccgcgcgtctcagaagactgaagagccgccttgatgcttcctttgcgtctccgcgaggtccgagaaggagcattacgccgccgctgaaatagccagcgtcctcattcggcacgagaagtccgtattttccgtgggcgttctccctgacgtaattcacaaacgcgtcttcatctgcgtcaatgaggtttacgtcagccttcggagcgtaatgcttgtacttcattccgggggattcgggattgatattgttcgcaagggacggctccacaaccgcaggagacacgacaaccttatcgcacacctccgcgagcatatcggcagtgacggcgcccgggcgaagtatcacgcaatcattgccgtcgagctttattacggtggattcaagaccgaactcgcagtctccgccgtcgattatcatgtcgattcttccgtccatgtcggcaagcacgtgtcctgcgtttgtgggggaaggaattccggaacggtttgcgctcggtgcggctatgggatgaccggacacctcgatgagcttatgtgcgatgggatttgacgggcagcggattcccactgtgtcaagtccggctgtgactgtgctcggtatgatatcgcgctttttcagtattacagtgagcggtccgggcatgaacttcttcgcgagcttatagaacgtctcggtcggataagctatcttctcggcgtcctcgggatatgcgatatgcacgatgagcggattgtcggcgggtcttccctttgccatgtatattttctcggcggagctttcgataagagcgcttccggcaagtccgtacactgtctccgtgggaattgcgacgataccgccggattttatcacctcggcagctttattgattatatcgttgtccgatggtgttcctgttattttcagatattccgttttcattgtcttaattaaaagtctccgttctgcagttttgcagctgtgtcagccgttgcgagcgcgtctatcatgccgtcgatgttgccgtttaggaagctctcgagggagtatatggtaaagccgattctgtggtcggtcacgcgtccctgaggatagttgtaggtgcgtattctctcgcttctgtcgcctgttccaacttgtgagcgtctttcgctggctattttttcgttctgctcgcgtgtcttcatgtcgtacagcttcgctctgagcagcttcattgccttatcgcggtttttgaactggcttcgttcgtcctgacactcaatgacgattcccgtcggcttatggagaagtcgtatcgcggactcggttttgttgacgtgctgaccgcctgcgccgcttgattttatcgtttcgatttcaaggtcgttttggtttatctcaacctcaacgtcctcagcctcgggaagaaccgcaaccgtcgcagttgaagtatggattctgccggaagactcggtttctggaactcgctgcacacggtgtactccgctttcgtacttgaagcgcgaataagcaccgtttcccgttatcatgaatgtgatttcgcggaatccgccgagtcccgtttcgttcatgcttacggtttcggttttatatttcatcatatcggcgtacattgtgtacattcgatacagaactcccgcgaacagtgcagcttcatctccgcccgcgccagctcttatctcgatcatgacgtttttctcgtccatcgggtctttcggaaggagcagtattttcagctcttcctcaaactttgcggcgtcggctttggaatttttcagctcttcgtcagccatttcgcgcagctccgggtcgttttccgtttcaagcagagcgagagcttcatcggcgtcactcagagcttttttatattccctgtatttttcgataacaggcgcaaggttcgctctttccttcatgagtgaggtgaagcgttccatatcctgcatagtctccggtttcgcaagctcggattctatattttcaaatcggttttcggcatctttcagtttatcaagcataaatacatccgttattattaaaaggataatccggtgcatgggtcaggaagcctctgatttaaggctgattttccgtctggcagaaaaacgcgattaattcacagtatccttaaatacaccggagatatcttaaaaattatttgcagaaggcgctgaacgcacgatgagcctcgtaaaggtcagccttggagataagctcgaagggagcgtgcattgaaagtacgggaacgcctatgtcaacagtttcgatattgtggtttgcaatatacttagcaacagttccgccgccgccctggtcaaccttaccgagctctgctgtctgccaaattacgcctgcttcgtcaaatatcttgcgaacaaagcctacaagctcagcggatgcatcgtttgtgccgccctttccgcctgaaccggtgtacttggaaagacctacgccgcagtgaagaagcgaagagttgcgtctttcggaaacctcgggatagttcggatcgtagcaaaccgttacgtcagcggagagacacttggagttcatacgaacaacgtttgtgttgccgtcgagattctttgcaagctcgtcaatgatgtcgaagaggaggcagttctgcataccggtaacgccgtcgcttcctgtttcttccttgtcggcgagaacagccatgcaggtatgtgcggaatctgcggtttcgatgagcgctgtgagagcggggaatgcgcaaactctgtcgtcgtgaccgtatgagccgataagccatctgtccataccgacgtcaacggtgttctgtgcgggaactatgcaaagctctgcgctcataaagtcggattcggtgatgccgtacttttcgttgagcataatcattatgttgagctttaccttttcgtcagcgggagttaccttgccgtcctcttcgatataaggagatgtgccgaggataacgttaagtccttcgccggtgaaagcagagccgagtgtacgggcattctgatccttagcgaggtgcggaagaaggtcggtaatgcagaaaacggggtcgcctgcttcgtcgccgatctttacgtcaacggtagtaccgtcagcctttgttacaacgccgtggattgcaagcggaattgtagcccactggtactttctgataccgccgtagtagtgtgtcttgaaataagctacgccgtcgttttcaaagaggggatgctgctttaagtcaagtctgggggagtcgatatgagccgcgcagattcttacgccgttttcgatgctctcggtacctaccttgaacgcgaacagacctttgccgcggttgttgaggtagagcttatcgccgactgaaatcttatcgccgagcttgtattcgcggtaaccttctttttcgagcattacgatggagtttttaactgcctcgcgctctgttttaacgttgtcaagccaagcggcgtagtttttaccgtattccttagcagccgcaagctcctcgggagtttttacctcgaagacattcttctttttatagaaaagctcgtctttcaatgtctgaccttttgttttttcactcattttattttcttcctttcatttaatggcttatcaataataaagttccttgtaaagctccgcgttgtcctcaattttgtcaatcttgtcgctaacggctttatccggaattttaataaggtttccgcttgtgtccgtgtttgctttgtcacttatccaggctgtgtattcgtctgtgcttgttagataagccgcaaacacgtttttccatcggctgtactcggtgtaaaggtacgaaagataatatgtaccgtattttacgtttgtttcggggtcgtacaaaattccactctcgctgttttctccgagcaaatcggaaatcttataaaacgcctcgtcggagagctgcataagccctactcttccgtcttccgacagacagttgctctgaaatccgctttcctcaagtatcacggcatacacgatatattcgggaattccgtactccgcggcgtatttttcaacatattctgtatattctcgcgggtggttattcaagtccgctctatgcccgagaagtgaataaacatatcccaccgcgatggacatgagcagtatcactattatgacaaagctcctgtgaacggcatttttcagtttcatattgcttctttccgtctcttgtacagctctttcagctcatccgcgcaggcttttatctccatgccaagcatccggtcgtcgccgttgtttgtgataacgtagtccgctttctccatcgctatattcacgggagtctgggataaaatccgtcgtttcgcgtcttccggacttataccgtcgcgctcggttattcttctgattctcgtatcttcgtcggcagtcacgcagatattcttctcgcaaaacttgtcaaatccgctctcaaacagaaccggcgcgtcaacaagtacgatacaaaatcctttttccgcatattcttccgcgattctcttagtctcggcgagaatgaacttatgcgagattttgttcagcatatcgaggttcgcgtgatttttctctccgaacactaaatttcgcatggcggcgcggttcagtgaattgtctcccgacaccacttcgtctccgaaataatcctgcagagctttcatgcaatccgtgggttcatcagccgccgaggtcagcttccgatacaccgcgtcagtatcaatcgacggaattccgtaatcgcgaaattttgcggcgacataaccttttccggctccgcttccgccgcacagaccgacgagcatgactttcttcatatttttgccttcaaaaactataatatgatatattttatcacatttttccgtgcttttcaatatgttttacgcaattgaatgggtcgtcaaaaagatttattataaagcctctgatttaagagattatcctcagaaaaacagctttatcgcgtgctcggatatcgtaacttcaccgtttttgacaactccgccgctttctccgtcaattgtccacggaagctcttccgcggtttcaaacttaatgtgctttgtgtggacgaacgtgatgtactcgcttgaaatatcctgcgccagaaccgcgttgagcattttcgcgttatccatgtggtttcccggattttttatcagcgtcagctccataagtccgtctgaaatgctgatgttgtccttcattttaagttcaaagccgccgactctgcgtgtgttcgatatcattccgtagagaaattctccctcgtcaacaccttcgtcatgctcgattctgaccttccacggctttatcgacgcaagactttttattccctcgatgatgtacgccgtcctgccaagactttgcttcagctgctgcggagtttggtatgaagcctcggtgaatactccgaacgccgcaacatacacgaaaggcttgccgcagaacaggctcacgtcggtatttgcaggcgtgcttgatacgatactctttgccgcgttcaacggatttttcggtattccccagcttcccgcgaaatcgttagtcgtacctgcgggaatgtatcctacgcaaggctttttctcgagccgcattactccggttacggtttcgttcagcgttccgtctccgcctgcgcaaacgacagtatcatattcgccgccgacagctgttataagctcgcaagcgtcgtttttctttttggttatatggacatcgaccgcatagccgcctttttcgaacgtatctattacatcaatgagatgcggagttatggttgctctcgcggtaacgggatttattataagaagcagttttttcatgcgcatcgtcctccgaaacacacaagtctatttttaattttatcttctatattatatacccgcgttacgtccttgtaaaactttttttaattttacagaaaaaaagaacccgactcacgggaatttccgcaaatcgggtcgtgtatccttattacgcgaggaatattgtcttacctgtttcgatggattcgttgcaagcgaggcagagtctgagggactttatagcgttgtcgtagtcggcaagaatctgtgatctgtcgcctgtacgaactgcgttgatgaagattctgtccatgataccggtctgttcttcgcctctctcatagaacttttcgccgtttatgtcgcgaatcttgagccaactgcggagagcatattcaagtgtagcgtccttgcagtagatattcataccgctctgcattccgccgcctgcctgaacgtagcatcctgtgaagatgttggcaacaacaccgctcttgaacttgataacagcggaggagtagtcgtgtacgttgtatccgggaacaccgtaagcgtcgccgtcaacgatacctcttgcgcctgcgcagtttacatagaggggttcgccgaagaggaaacgagcctggtcgaagatgtggatattctgttcaacaacctgaccgcctgaggtttccatacgtctccaccattcaacaccggggatgccgccgaaccatgcgccggaaacaagacctacttctttatccttgatgtagtccttcattatctgggtgaggttctggtatctgtcctggaagcctgtagctgtgatgaggtcctttttctttatcatttcgccgatggattcagccgtcttcatatcaagcgcgataggcttttctacgaggaacgggatgcctctctcgattacagcgggttcgatttcgccgtgctgatgcggaggaactgcgatgaagataacttcgggatttgtgtttgcgagaagatccttatagtttctgaaaatctttccttcgggatctgtctttgttcttgctgcgtaggaatatgccttttcttctactacatcgcagaagccgacaaattcaacgtcgcccatgtccatgcacttatcgagatgcacgccgttacgtccgccgcatccgatgaaagccgctttgatttttgccatgtttgttctccttatatatgatttttttaacgaacactgattctgccgttattataacaataattttctcgcttgtcaatacggttttagtaaaaacatgacaaaaagagccaatcgtttttgcgactgacccttaatctgtatagttcaaggaaagaattacttgtacttacgctttcttgcagcttcggacttcttctttctctttacgctgggcttctcgtagcattctctcttgcgaagctcggcctggatgcctgaacgct

SEQ ID NO: 2746 - DNA, 2045 bp, Unknown
  16S sequences of unknown bacteria
ggtgacatcattcatttcgatcgtgagataatcatagccgtgtccggagtctgtttttgtccaggtaccggaggctgcgccggatacggtgccgtcctcatttaaggtgagcatctgtgtgttgagcatgtcgccgctcgtctttgtgccgtgatcgataaattcataggagccgacgacctcgctggtttcataattttccggctgttcgccgcggtattcatagactgcggtggttggccactgatcctcatttaagaactgctgatgaacgcgcacctcatgtgcctcaagctgcggatccatgtcaaaacgctgatggtaaacgaggtagcgcaagccatcctcgtcgatcaatgcagagttgtgtccggctgcgcgtttgccgatctggtcatagaagctgtagtttccgatcagcttgatgccgtaattgtcattgttctcgccgctctcggaagcatctcctcctgcagcatcgacatacggcccggtcggattttcggagcggaagagacgcatattatatccgccttcagcggtcaggccgccgtaagtttcgtacagatagtaatagccggtttcaggatcatactggatataaggagcctcgccggactgatggttgccgcctgcaaggtgcacgccgaagtagcggtccacgaaattgccggagacctcatcggtggagtcgacacccggataaatggcttcgccggttgcaggatcgagctcgagaaggaacagtccgccggaccaggagccgtaggacatatacagcttttcgccggatgcatcaaagaaaaggttcgggtcgatcgcattcggcgcatacagatggttccagtcaccggtttgatcgaaccagttgtcactgatctcatcgatgccgccgttttcacttcccttttccagaagcgtattcaggtttagataatcattgtcccatttcgtattgcgggagctgttgccatcgacggcgccggtctttgtaaagccggaataaatgattgtgtctacataagtataagtaccgtcgaacgtcttggagacgagatagctgatgcaggagcgtctccaggtcgaagaggtgcagcagtacagcatatatgcgccggtgcttccatcatcccatttatagtaaggattccagatcgcatccggagcccagatcgcatagccgccgacgcagtctccgtcgttgtagccggcccactgaaacggtttctcaaacgtttccttcagattgccgtaaaatggcgtgctttccggattaccatagtcgctgttcagctgcgtccactggatcagatccgaagaactcgcggaagcggtgtgggagccgagcacatagtacatgccgtctgcttttacgatggacggatcatgtacgctcacgcgggtcggcgtttccggtgtatccgcagtctcgtctgtatctgtgagctcggaggaatcctcgatcgcgatggtttcttcctgagcggaagcgtcctttgcttcggtgtcaatttcgatcacaacgtcatcttctacgacgacatccacagcatccgaagcatcggcctctgtcaccaaagccgcgtcctcgacgatgatttcatctgcaaacgccgggatggaagccgtacaagagatagcggcacataaggcacccgacaggacaaaacggtacaggtactttgcccgaagagatttgtttttcataaatactcctttcttcttttagaaaaacctaaaataatatagataaatctattatatacgaagcatgaaaggatagcaagagagattcgggtaaaatgctgtgagactttatgaaagaaaaagatatgaaacgtagaaaagctgaaaaacaggcagaattatcagaaaaaaaggtcagaatgccaatgctaagcaaaaagaataaaataaaaataaagtgattgctattttttccggcaatgctatactggatttgcaggtttaattatctggtatgatgcctgcgaattgcttcgctgcgaagcagctcccgcaattctacaaacattcgaaatccg

SEQ ID NO: 2747 - DNA, 3983 bp, Unknown
  16S sequences of unknown bacteria
gtgctgtggaagaaattccctcgcgcagagcggaagtgaacatctctcccgttttatgcctcgtattatgcacccgtttctttgggttgtcaagcacttcttgtaaaaaatttcaacaaattgaaacttctttcacttttccagttcctgccggtaatcatacagttcggtgacatagctgccgtcaaagcaggccgtgcacagaccgcagcccgccgcctcttgcagatcgtcgagcgcaagaaagcgcagcgaatccgcctgcatatagcggcagagcgcttcttcatccatacgcgcgccgatcagctcggccttggtcgacgtatctacgccatagaaacaagggaagcggatcatcggcgaagcgatgcgcatatgcacttccaatgcgccggcttcccgcagcagctgcacgatgcgccttgaggtcgtgccgcgcacgatggaatcatcgatgacgacgatgcgtctgcctttgacgatgctgtgaatggcagaaagcttcatgcgcacgccgcgatcacgcagctcctgcgtcggctggatgaaggtgcgcgccacatagcggttcttgatgagccccatctcatagggcagcccgctggcttccgcatagccgctggccgcgctgatcgaggaatccggcacgccgatgacgatatcggcctgcagatcacggtcctgccttgccagcaaggccccgctcttcttgcggaacagatgcacgttcaccttgtccagcgtgctgtccggccgggaaaaataaatgtactccatcgcgcacatgtgctgacacacgtcctctgtataacggaagtgatctacgcggtcatgctgaaagcgcacgatctcgcctggctcgatgtcgacgatgtcctgaccgccgatgacatcgctggtgcatgtctctgagctgacacaatagccgttttgcactttcgcataagaaagcggacgcagcccccagcggtctctgacagcatataaagcatcttcgctcatcaccaggaaggcaaacgcgccctccaactgctgcgctgtcttcgtgatcttttccagcagggtgcccgggctgcggcggatcagatgcaggatgatctcgctgtcgctggtgccctggaagatgctgccggcatcctccatctcattgcgcagccgaatggcattgacgatctgaccattgtgggccattgccaaggtcccgctgtgtgagaccgaaagcagcggctgcacattttccatcgtattgccgcctgctgtggaatagcgcacatgtcccacggcgatattgccgggcagctcattcaggttctcccgagtgaatacctcggagatcagccctcttcctttctggctcttcaccctgagcccgtcactgaccgctatgccgcagccttcctgcccgcggtgctgcagcgcgtgcaatccataatatgaaagctctgcagcgtgttccacatggtatacgccgaacactccgcattcctcatgcagttcatcaaacatcgcgtgatcccttcctttcattttatgggagaatgttacatcaggaaagtgcccgctgtcaatcatgcatttgctgaatatggcctgacgcattgacttttcgctcattttccggtataaatatgtcgttaatcaagattgcgaatgagcaatggcgttcatcgggatagggggcagtgtccgcttttctgatggacgctttcattttttgcacggaaaggagccattatgcattattcttatgaagatgtggaaacgttcatccaagaagaaaatgtcaaatttatccgtctggcattcttcgatgtcttcggcgtccaaaaaaacatctcgatcctgccgcaagagctgaaacgcgctttcagcgaaggcatctccttcgacgcttccgcgatcgccggattcggcgataccgccaaaagcgatctgtttctgaaaccggacccttccaccctggtcgtcctgccctggcggccgatggacggacgggtcgtgcgcatgtactgcgatatcatgtatccagacggcacacagtttgaaaaagactgccggctcatcctgaagcaggcggtcgatgaagcggcaggcatccacgtcgattttggcgccgaggtcgaattttacctgtttcagcaagacgagcacggcatgcccaccgatatccccttcgaccgcgccggttatatggatgtagcgcccaaggaccgcggcgaggatgtgcgccgtgagatctgcttcaccctcatcgacatgggcatccagcccgaggccagccatcatgaggaagggccagggcaaaatgagatcgatttccgctacagcgacgcattgagcgcggccgaccagaccgccacgttcaaatgggtcgtggaaatggtcgccatgggcaacggcctgcatgccgatttctccccgaaaccgctgagcgcggaagccggcagcggcatgcacatcaacatgtccgtgaccagcgacgacggacgtgatctgcaggacgcgttcatggccggcatcctggcgcacatccgcgagatcaccctcttcctcaacccgcataccgacagttatcagcggctgggcgagatgaaggcgccgcgctatatcagctggtcaaaggaaaaccgttcccagctcatccgcatccccgcgatgaagaatggccgcaggcgcatcgagctgcgctctccggacccttgcgccaacccttacttgtgctatgcgctgctcatccatgccggtctcgacggcatccgcagccagatggagccgcctgcgcctctcgatgtcaatctgtttcaagcagaggcatcgctcacccgcgagctggacaagctgccgcagtctcatcaggaagcctgggaaatggccgagcgcagcgaatttgtgaaacagctgcttcctggatccatcatcaaggcttaccgatactaacggaaaggaggggaagcgcatgagcagccagccatgcattctggttctctcaaacagtgagatacccgccgggatcctgcgggaaatgcttcccagggattcctttccgtctgtcctcttcgccgcttcgatcacagcggccagacgcaccctgctggcacgcgaagtggatctgctcgtcatcgatgccccgctgcaaaaagaaagcgcgctgggatttgcgcaggaaatcgcacagcgcagcacgcctgggcttcttttgctcatgggcgcggagctttatcaccagcaggctgcccggctggaggaagcaggcattccggtcctgcccaagcccatttccaaggcgatgctgcagcatagcgtacgtctgttatgcaccgcgcagaagcggctttacatcgcgcagcgcgaaacgatggacctgcagcagaagatgcaggaagtgcgcatcatcgccagcgccaaacgcctcatgcaggaacagctcggctgggaggaagagcgcgcacaccgctatctgcagaagcgggccatggaccaatgctgcaccaaatacgaagcagcacgctatatcatacagaaactgaaaaacggaggaaggttatgacaaaatatatattcgtaagcggaggcgtcgtctccggactgggcaaaggcatcacggccgcctcgctgggcaggctgctgaaggcgcggggactgaaggtcgccgcgcagaagctcgacccctacatcaatgtcgaccccggtacgatgagtcccttccagcacggcgaggtcttcgttaccgaggatggggcagagaccgacctggacctgggtcattatgaacgattcatcgatgaggacctgaaccagttttccaacctgacgaccggcaaggtatactggaacatcctcaataaggagcgccgcggagaattcctcggtgaaacggtgcaggtcatcccgcacatcaccaatgagatcaagtcgttcatctatcaagtcggcaagaagaccggcgctgatgtggtcatcaccgagatcggcggcacgac

SEQ ID NO: 2748 - DNA, 2952 bp, Unknown
  16S sequences of unknown bacteria
ttcccgccatgaaagctacatgcgtctctatgaggagctgaaaggcctgaaagagtgggaagccaaaggaaaagaaaaatcgtaaactgtgtaagcagcatcgccggagcggccgtagaaggccgctccggcgatcttgttttatcactgcatccagccatccgccgcctcgtagccgatgcaccatagccgtttgcgctgtatataatgaaacagaaagcagttgtgcaggaggggaattgcaatgtgcaatcatcataaattctggtttattgggttgtgcgccctggccttggggttggggatcttgatcacggcgatctttcccattggcgcgctgctgtttctcattgcttttttgctgatcgcgtgcggcatcggctgcctgcgccggtagggatgaaaggagatgtgccatgatatgaagatcgtcgttgtaaaatcgccgaagtttttgtgcggcgtactgaaaagaattttccatatcgcgtgaataaagctcccctgtgggacataggtttgaatgaaacagatgccgctgctccgtgcaggcgctgcgccttgccgggcttggcccgctgcgcgcgggaaagggctgcggccttctgcacggattctgacatggatcgcaggggaggacaactatggaattagaattgaaaaaggaaacgctgtgcttttatgagttcagcactgcggcaacagccgttcatgaagaagcgacggaaacgatcgtgccggattactgcccggatattgcccggattatcgattcggatggcaaggtatttctgcgcggaaaggacatccagggggataaagccattgtcacaggcagtgtgaaggttacggtgctttttacaccggagggtgagaatgggattcgcaatcttgaattttcgctcccattcaatacatccctttccaataaggattttgagcactgtcaaagtctttttgcccgggtacacatccagagcattgagaccaaaagcctgaatccgcgcaagatattcactcgtgtcctgctgacggtgcgtctgcagggcctcaaaagcacaaaggcggatttctgcacggatatcagcgcacaaagtgccctaggcattgcccagatggcccgacaggaaactttaaatttaattactgcatacactgaaaaggattttacctttacagatgaaattgccattccggccggaaaggaagccgttctggaaatcctgtcctgtaccattacccccagcgtacaggaaacgaaaattttcggtgcgaaactgattgtgaaagggattttgcttgctgaacttctttaccggagcgagcagcaggggattgcctcggcaacggcagaactgcccttttctcagatcatggagattgaggagtcgccggaggatgctgcggcggcgattacgttacagctgtctggtatggactaccatatcggcagcgatgaaaaccccgacgaccgccggcgtgtgacgctggctgtatatctcagtgcgcaggcctgtatccgccgcagtgttcagttccgttgcatcagtgatgtttacagcaccgtttatgaagtgacgccaacgatgtccaatctgcagtgtaccggggaaatcaatgcctttacccgccgacagagcgttcggcaaaccattgaggtgggcgtggtgccctcagccgtattgtccaccgctatttccttcgatgaggtcaacgtcagccgggaggacaatactgctgtccttcagacgatggcccatgtaaagctcctgtttctggacgaaggcggcgtacctctagtggcggaacggcagctggaatgcacctgccgggtagaggtttctccggagtgcagctgcacggcctccgtgcgttacggcggcgatctttctgttgccatttcctccaatggcattgaaatccgtttttcggcagacttttctgtggaagcggcggaccgccgacagttgctggggttgacagatatgacggtggacacggagcatccaaaagatacaagccagctcccatccatcgtattgaaagtgttcgacgaggatgaaagtctgtgggatatcgccaagcgctattccacaacggcagaggtcatccgcgccgcaaacgatatggaggaggactgcgcctgcagcgccggccagcttctgctgattccgcgcaaacggtaaagagggggaaagacaatggatacggaaaaaatttacgaagacatcgctctgcgcaccgacggtgacatatacataggtgtcgtgggtccggtgcgggccggaaaatccacgtttatcaagcgctttatggaaactcaggtactcccgaacatcgacaatgtataccgcagggagcgcgccaaagatgagctgccgcaaagcggctcaggccgtatgattatgactaccgaaccgaaatttgtaccggaagaggccgcggagatcaaactggaaggcggcgcagcatgttcggtgcgtctgatcgactgtgtggggtatctcgtggacggcgcagtaggccagacggatgaggataaaccgcgcctggtcacaacgccttggtttgaccacgaaattcccatgacagaggcagctgaagtgggaacgcgcaaggtgatcgctgagcattcaacgatcggcattgtagtgaccacagacggcagtatcacggatattccgcgctccagctatgtgccggcagaagagcgtgttatttcggaactgcaggagatcggtaaaccgtttctggtgctgctcaactccgccagccctgactcggaaactgccagagccatggcagaagatatccaggagacctacggtgtacgctgcctgccggtcaactgccagaccctttctgacaccgacgtagcagatattctgaaggcagttctctatgaattccccatgcgggatctggacctgttccttcccgcctggatcgatg

SEQ ID NO: 2749 - DNA, 5005 bp, Unknown
  16S sequences of unknown bacteria
gggctgtaagccccccctcaaacgagagcccagcgaagcgggtctcgtttgccataaaaggcacgccgatggcgtgccttttgtggagttatatgacaaagatcgccagccccgaaccaccagagccgctgaccctgtaaccaaatttttcgcgccgctcagcaacagctgcagcaatccccgccgccgcagtccttaaacttctccgcgtcgtaggagatgccgtggcgatcaaaataatccttgaccgccgcctggatggcctgctcagccaggacagagcagtgcagcttgtacgccggcagcccgcccagggcgtcgacgacctctttgttcgtcagctgcagcgcctgcgccaccgtccgccccttgaccatctccgttgcgatagagctggacgcaatggccgacccgcagccgaaggtctcaaacttgatatccgtgatgacgtcgttttcgatcttgagatagatcttcataatatcgccgcacttcgggttgccgacctcgccgaccccgtcggcgtcctcgatgacgccgacattgcgcgggttgtggaaatggtccatgaccgtctcattatacaatgccatagcaaacacctcacattatttcagtaaaaattcccgtttcccgcagcacttatcccgccacagcggcgacatattgcgcaggtagtccaccacatccgtcaccgcggccacgatggtgtccatctgctccatcgtattgtccgcgcacaaggtcagccgcagcgacccgtgggcgatctcgtgggtgtgccccagagccagcagcacatggctcgggtccaaagaccccgacgtgcacgccgaaccggaggaggcgcagatgcccttctcgtcgagcagcagcagcaagctctcgccctcgataccctcaaagcagaaatggacgttccccggcagccggtgcaccgggtcgccgttcaggacggagtgggggatcttggaaagccccgcgatcagccggtcccgcatggcggcaaccttggcggcgttctcgtccatatgggcgcaggcgtcttccagcgccgccgccatcccggcgatcccggccaggttctccgtcccagcccgcttgccccgctcctgggcgccgccgttgatgagcggcgtcagcagcacgcccttcttgcaatagagcacgccgacaccccggggcccatggaatttgtgggccgacaggctcagcatgtcgatttgctgcgccgcgacgtcgatgggcagatgccccgccgcctgcaccgcatccgtgtggaacagcacgcccttttcccggcagaccgcgccgatctcgccgataggcaggatcgacccgatctcgttgttggcgtacatcaggctcaccaggcaggtgtccggccggatggcgtctgccacctgctgcgccgtgaccgtcccaaccgggccgaccggcaggagctcgatctcaaagccgtcgcgccgcagcttgtccagcgtgtggagcacggcgtggtgctcaaaggcagaggagatgatgtgccgcttgccccgccgcgcgccgatggccgccgctgagagcagcgcctggttatctgcttcgctgccgccggaggtgaaataaatttcctgcttctgcgcgcctaggcaggccgcgatgcggccccgggcatcgtccagcgcctcggcggcccgctggccaatggaatgcaggctggagggattgccataaatttcctggaaatacggccccatcgccgccaccgccgcgtcactcatccgcgtcgtcgccgcgttatccgcgtaaatatacataaaaccacctcgaaaccgtattgataatacctatattctttgtaggttattatgattataacagtcatttcctattctgtcaatagggttacgcaaagaatgttaccgtgcgctaactatttttctcgcgaactttacacgcccttctccggacgcacgctgcgtcacatgaaaaaggagaagcccccgccccggtacgcgccaagcccgccgcagcttgcagcattctccgggaatggcctatactgtcggcgagggagaagggcaatgaaaaactataagacggtcaaggaagtgtgcgctctaaccggcctcacggccaagcatctgtattatttccatcatgaaaatgtcgtacgcgccgccgcttatgcgaattattcggtcgcgggcaacgacggctataagctctatgacgatgccgctgtggaaaagctgcagcaaattgcgctatactaccagctcggcctcaagcgcaacgagatccgcgacctgatgcgcgaccccacctatgacagtgcctgcgccctgcgccagctgctggaccgggagcggcgcaagcgcgacgaagccagccgtcacatcgccgccctggaatatctctgccgcgtcgggctggacgctgcgctgcacagcgtgctccgccagatgacgctggacgagctgggccaggctctgctccaatctgaccccccgcaagcccccgacgccgcgcccccagacgcagacgccccagaaaagacacccctgacgctgtaaaaagccagcccggctttttcagaaaaagaaagaaaccgtcaaattagaaaggagacccccatgaaaagaagccttgccatcgttttggcagccgccgtgctgctcctcctcgccgcctgcggcagcaaaaagcagcctgccgccagcccaaatacccaaagcgcccccgtcgcagcggaacccgacgacgtcacagccgccgaatccgccgctgccctccgtgtcatcaccgatgactttaccgataccacggcggagctgacgcaaaagctcgatgagacctttgccgctgtcggaatgacctatgcagactaccaaaagaacaagggcctgatcgacgaatgggtcgccctcgttctctctgaatcagacgctctctttgcaagaacaaaggaacattccatcacttacttcaagcagatcgccgcggaggaagatcattcatacagcgaattttgcagtgatgctttggagcaatattacgataccgtctgcaacgacgccttagatatctattacgacgcactctacagcaaagccctggataccctctatgatacctactatggcggtctgctcgacgaagcgtatgacgacattccatatcaggaatggagcaacgccagcagcgcgtgctatcaagtctggtccgatgccagctctgcggtttaccaaaaatggtccgatgagagctcctatctctacggcctatggtctgctgtcgattccgcattctgctgggatgacaattttgatgtagatgccattgtcgcggcgtacgacacggaacaagaggaagaccgcaccgaggaggaagccgaagcgtcgtctgaagatgaaagcgatgccgccgatcaagctgccgctaccccatcccaggccaatccagcggcaaatgccaccgacgaaaccgccatccgcgacgatttcaaggccgccatggacagctacgaagccttcatcgacgaatacgtcgccttcctgcaaaaatatacccagaatccaacggaccttagcctgctcaacgactatgcgacatatatgagcaaatatgcggacctggcagccaaattcgacgcttgggagagcgaggacctgaacacggcggagcttgcctattatctggaagtccagtcccgcgtcagccagaagctgctggcagtctcataatgcacaacctaggaggaaaattacaatggatcagacaaccaagcataacttaaaccgtcagctgcggcagcccgtttacgccattttggctgcggccctggtgatgctcctgtgcgtcttcctcccctacggcacagccacgggggaacggcgcgactggatcgacgcgcacccggattccatcattgaagagtccctgggcctgaccgcccaggatctggcgcaggtctcaacggtggaatatacgcgcctctacgtcaccgttgctgatgaatggggctttactaccgcctacctcggcttctacgtggcgctcctgggcctgctgctcctattcccgctgctgacagccctctgtgccctgctgcgcaagcccatcggcgcgatgctcttcaccgcgctcacctttggcgtatcctgtatccagaatgcagattacaccatgcggggcatcctcccaagcgacaattacagctggggcatcgcccacaccctctggcccattgcagccgccgcagccttcgccggttctgtctggctgctggtcaaaaaaaagcgctgcaaacgggccatcccgcagcctgccgccttgcaggaatcacagctccaggacgaaacgcaagcccaataacatccccactccataaacggcgcctgcctcgattcgaaaatcgcagcaggcgccgttctatttccttctgcttgcatcggccgcaccacgccgggccacaggggttcgctttcctgccatgcacggctccagatagaacgccaaacgcagctccagatcaaaccccagacgcaagccaaatacaaaaaacgccgcagacaatcgcttgtccgcggcaaatctggagcgggttacgaggctcgaactcgctacctccaccttggcaaggtggcgctctaccagatgagctaaacccgcatcaacgtcatttattatattggcttttcctccatttgtcaagagaaaaaacaaaaatttcctccattcctacatctttccctcgccgggagacccccaaaaccacacccctgcgcccgcaggcgcaaaaagcttcacagaatttgtgccgcgcacggcgcaaataaattccaatccgttttttccggcggcaagtgggtgagactccaagagcgcaagcgcagcgcagcgcgattggctaagtcgaacccatgcagcgcatagtcgaaaaaaactcttctcagcccgcaaacgtaagcgagagtcaaaatcttaagcgagagtcaaaatctttgattttgcccctcga

SEQ ID NO: 2750 - DNA, 11462 bp, Unknown
  16S sequences of unknown bacteria
aagcaagttaagacctttggttgacaggaagttcggctgagacggaataatcacactgtctgccgcaacaagcgcattgaccgtcatcattcccagagaaggcatacagtcaataaggatatagtcgtaattcttcttcatgccgtcgatagcgtttttcaaaacatactcgcggctcataacgttgaacaggccggtttccatgccggacaactcaatattagaaggaagcaagtcaacaccttccggatgcgtaataatagcattaccgggcggctgttcatcatcaatgaccgactgcataagggaagaaagcgaaacatccaactcatcgggattcttcactccgaggcttaccgttaagctaccctgcgggtcagcgtcaacaagcaaaacctttttacctgagtttgcaagtcccacgccgagattgactgcggttgtcgttttaccgactccacctttctgatttgtgatggcaatcactttacagttttccatgtggtatcctcctttctttttatttgaaccatttctgatccactaaaacctcaaagataatctttggggctttagtggttgcacttaatttttcctcgaaccccaagtgcaaaaaaaggaaatcatcagacgcccgatagcgaatcgggtccatgggaatctcacccctgccgggttctccgccagctccgtagagaagtatcattagccctgtagcgtttcattgccatatccgtagctgtcggatatttcagaatggttcggaaacgctcgccaccttgctttccgttataacccggatgggcaggagggtcttggcgcaccttcattcggctggagctctcgcccccgcacaggaacgtacctgatgaatgtatattcggttgtcaaagtgcatcgaggttttttgttcctcaaagagtaggcagcgagaaaggccaaaaattgcgggtagaccaaaaaaagttgtaaaaattttttcatgagctcctccagcgaataaaaaaagcaccacatcaaaatgatgaggtgcaataaaagtgagcaaaaaaataacgggtatctgatcaagaaatgaacagatacccgtttgtaggacttatttcaggcgagaaagcctaatttttgaagccgttttttcatcagttttcgatgctgaaaacccttgatattactggcttttttgcttaattccgcgagtctttaattgcggcctgtgccgctgcaagacgggcaatcggtacacggaagggtgagcaggaaacatagtcaagaccgatcttgtggcagaactcaacagaggacggatcaccgccgtgctcgccgcagattccgcagtggaggtcttttcttacgcccttaccgagcttaacagccatttccataagcttgcctacgcctacctggtcgagcttggcaaacggatcgttctcgaatatcttcgcatcatagtaagcgtcaaggaacttacctgcatcgtcacggctgaagccgtaggtcatctgggtaaggtcgttggtgccgaagcagaagaattcagcttccttagcaatttcatcggctgtgagagcagcacgcggaatttcaatcatggtgcctacttcatacttaaggtcgattccggcagccgcgatttcagcgtcagcggtctcaacaacggtcttcttaacatacttaagctctttaacatcgcctacgagcggaatcatgatttcgggaactatattccaatcggcgtgagccttcttaacattgatggcagcgcggataacagcggtggtctgcatttttgcaatttccggataggttactgcaagacggcagccgcggtgacccatcatcgggttagcctcgtggagggaagcgatgatagccttaatgtcttcaacgctcttgccctgtgcgtcagctaacttcttaatgtcagcctcttcggtgggaacgaactcatggagcggaggatccaggaaacggatggtaaccggcttaccctcaagcgcctcataaagcttttcaaagtcgccctgctggaaggggataatgttttcaagagccttttctcgctcttcaacggtggatgagcagatcatctgacggaagtagtcaattctgtcgccctcgaagaacatatgctctgtacggcaaagaccgataccctctgcgccgagctctgcagctttcttggcgtctctcggagtatccgcattggtgcgaacgccgagcttgcggtatttatcagcccagcccataattctgccgaactcgcctgcaatagacgcgtcaacagtcgggataatgccgtcgtaaatgttaccggtagagccgtcgagcgagagatagtcgccctcgtgataggtcttgcctgcgagtgtgaactgcttgttctcttcatccatattgatggcggtgcagccggaaacgcagcaggtacccataccgcgcgcaacaacggcagcgtgagaggtcataccgccgcgaacggtgagtataccctgagcagccttcataccctcaatgtcttcaggtgaggtttcaagacgaacgagaacgaccttctcgccgcgagcgccccaagccttagcgtcttcagcggtgaatacaatcttaccgcaggcagcgccgggggaagcggggagagccttgccaaccggagttgcagcctttaaagccttagcgtcaaactgcgggtggagaagtgtatcaaggttacgcgggtctatcataagaaccgcttcctcatcggtgatcataccctcgtcaaccaagtcgcaggcaattttaagagcagcctgagcggttctcttaccgttacgggtctggagcataaagagcttgccgtgttcaacggtgaactccatgtcctgcatatcgcggtagtggttttcaagtctctggcaaacatccttaaactgcttgaaagcctcggggaatttctcttccatttcggaaatgtgcataggagtacgaacgcctgcaacaacgtcctcgccctgtgcgttggtaaggaactcaccgaagagacccttagcgccggtagccgggtcgcgggtgaacgcaacgcctgtaccgcaatcgtcgcccatgttgccgaacgccatcatctgaacgttaacggcagtaccccaggaataagggatatcgttatcacgacggtaaacgtttgcacgggggttgtcccatgaacggaaaacagccttgatagcgcccattaactgctccttaggatcggtcgggaaatcggtgcctattttagacttatattcagccttgaactgacctgcaagctctttgaggtcatcggcggtaagctcaacgtcctgagtaacgcctctcttttccttcatagcgtcaataagctgctcgaaatactttttgccgacttccataacaacatcggagtacatctgaataaatcttctgtagcagtcccaagcccaacggggattgttagacttttccgcaattacgttaacaacctcttcgttaagaccgaggttaagaatggtatccatcataccgggcattgaagcgcgtgctcccgaacgaacggaaacgaggagcggattttccttatcgccgaactttttgccggtgatagcttccatcttctcgatgtattccattatctgagcctggatttcatcgttgatcttctgaccgtcttcataatactgggtgcaagcctcggtggaaatggtgaagccctgcggaacgggaagacctaaaccggtcatttctgcaaggttagcacccttaccgcccaaaagctcacgcatttttgcgttgccttcgctgaaaaggtaaacgtacttgtgactcattaagaatcgacctcctgatttttttacggacgccgcgccgaagccgacgcgcacacccattgttaacaaagtaccttgatacaggtatccataccattataccaagtattcaagcaaaaataaagtgtttttttctttttttctcaaataattttattttatattattttcaacatatttcggcgcggttttgcggcttttgatattgcttatgcggcattcgagtcctgtcacactaaccagcctgcggtaggagtcgaatatctcgccgtattccttataagcgttattatatacttcaattattgcagtgccgtcaaagccgccgtttttaagtatcccgaaaaattccgcaaagtcaaaaccgccgtttccgggaagcatacagtcagaggctgtggaatggtcgcttatgtgatagtgctttatattttccgaaaattcgtttataagcgtgtatgggtcataaccgcagcgcagtgcctgctttaaatcgatgcagaattctgcctcatttcccaaaatattgcgcattgagcgtaaaaattcaatatcacccgcacggtagcgtaccacattttcctgcagtacggcaacgccgttttcccgcgttgcttccttaaggcgcatatagcgctcgcaatattcctcatcggttgtgagtccgttaggcttgccgccatgcataataatatattttgcaccgaagcgcgccgcaatttcggagtaacggcggtattgctcctccgcctcgtaataacggcgctcgtagcttgaaaatatcataaacgattccgcaagcgacatggtagggtgaaccgaggtcaccttcataccgtaattatccaaaatatcttcaagtatatctataaaagcgggctttaattcagaaagcgcattgaaaaatatttcggtatattttactcccgcctttccgagctcctctaaggctgcctcggtttcaagcggataaaacgaagcggttgataccccgatgttcataatttacccccattgtccggcgttacataaagcgtcttatttgtcgtataaataaccattcccggctttgcgccgttcggctttttgacaaattttatcggcgtgtaatcaacaggcacctgcgcgcctgcagcggcggatgaattttctgctgccagcgttgcggcgtaaaccagcgtttcatcggatacctctttgccgccgcacattacaaccacatgcgagccgggaatattctttgtgtgaaaccataaatcgtttttggcggcaagtgtggtggtaatatagtcgttctggcggttgtttttgcctacgattattctgtacccctcggcggatctatattcgcgaatcacgggtgcctgtgcttttttcggtttagacgcgggtgattttaaatacccgccggcggtcagttcctcacgaatctcggttatttccgctttggtgcggctgcgggaaatactgtcaagcaccgaatcaaagtaaataagctcctgttcatcccgccgtgtcagctctgttaaggtctgctccgccgtgtggctttttttatagtccttaaagtatttcgctgcgtttttctgcggggagagcgcggggtcaagcggaatacggatctgtttcatatcgtcatagtaattttcaacctcaataaaggcggcaccgggtacggacttataaagattagcctttaaaagctcgccgtaaattcgcagttgctcgcggttttcgcagcttttaagctcctgcaggcgcagtgcaagctttttctcggtgcgtgttttaaggttgtttacaagctttaaaatatctcctgcggcgtgcttcattcggtcggcggtatcgcgcgcagagtaaaattcatcaagcagctgcgagtagctttgaaacacttttttctcaaacagactgccgtattgcgaaatatccgtaaagctgaaatcctgtggcgtgccgtcgctttttataagcagcaggggagtgccgctgccctttaaatcggatataattttttcgagcgccgatgaatggcggcccgaaatctcggctttatatgctgcctcgcggcataacagcggcgaaaagccgtcaaccgtgttgagcagcgcggaggaaagctcgccgcccgatttttcggcggcttcgataatcgcttttgtatcggtggtcagcggatcgagcttgtgcctccgctccgggtaggtgtaggcagcgcccggcagtatcattctgccgcccgattcagggtctgaatggcgcagcgcgtcaataattttgccgttttcgtttatcagcacaatattagtcttgttgcctataaactccgccgccaggcgaatttcggcaatatcacccatctcgtttgtgtaggaaaatgtaagctcggctattctttcaaacccgggctggctcacctttaaaagccgcgccgatgagagatatttgcgtataagcatgcaaaacatgggcggcacggcggggttttcgtatttcgtttcggtgaactgaatacgcgcagcccccggtcgcacatttataaggagttttttgcaaaatccgcttttgcgcagcaaaaagactagctcatcctttgagggctggtatattttatctacaaacgtattttcggcagtctgtagctctgttaccgttttgtgtaaaaatgctccgtcaaatgccatttcggttctccgtaagtttctttttaagtgcggcggaaatttccgcgaatcgcctgtattcttcctgcttttcagggatatcttcaagcgcgtcggcgcattttttaagccgcaaatattgcttttctatgtattttgcaccgtccgccgttcgcgggtctactcttccgcagtagtaaaattcctcgccgaaattatatttttcgcccgtataccgcgcggtcatgactgaataaagctttttattttcgcaaatcgcggtatcgcttataatttcaaagccgttttcgcataagaaccgccttaaaaattcgggcgaggtggtaggctgcaaaataagcagcggagcgggcaaggcggtgggaatggcagaacgcgccagtattgaggctataacctcgccgcccatacccgccgttattacagtgtcaacttcgttttgcgctataccctcaagcccgtcacacaggcgaagcgctatgccgactacacctgccaatttaatgtttttctcggcgcttgcaagcggcattttacgaatatctgtcgcaataacgcttttaatatccccgcgctttataagctcaatgggtaaatagccgtgatctgtccctatatcgcacaccctcgcaccgggcggcacgagggcggagataagcgcgagccttaaactcagcgccattatttattttcaaagttacggttaagcttttcaagcagtgcgtcgcagtcggttccgtgaacctcgcacgcctgctcaatgctttcgccgcgggaagcggggcagcccaggcaatgcatgcctatttcaaagaaatattcagccgcgctgctgtcaatatcaagtacctcgcctataagcatatcctttgtgatcttcattttttattcttcctttcgttttttatatattatgtgtttttttcgtcctgttatcagaacagcttaacaccgctgtcaagctcggtgcgggagtgattgaaaagcttacggttatcaagtgcccaaagccgagatgaaaaatcctcgggcttggttgcggcaaccgcctcgcgcatttcaaaaacgcgggaatccataaggtcgagctcgcttaaaagctccgcctcgataaacataggtcttaccgccgcgccgaactcgggctcgccgtggtgggaaagcaccatatgctcaagcagcattgccgttttgcggcttatgtcgagcttttccgcgtatttatcaattaccatagcgcccattgccaggtgaccgagcagattgccctcgtttgaataacctgttgcaattcccgtatcggcaacagtaaattccgaaagcttcgcaatatcgtgcaaaattgcgcccgcaagcaaaagctccctatccacaaacgggtagaccttgcaaacgccctccgccagccttactatcgataacgagtgcataagcagaccgccgcgcaaagcatggtgcagcttaaacgccgcaggccagtaaagaagcgccaagcggttatcggctaaaatagcggtaactatcgctttaagctctttatcttcaaagctgtcggctattctgtacagctcgtcatacatctgctcgcccgaataatccgaggacttaacaaaatcctctgttttaacattatcctcgggggttattttgcgtatgcggtcaattttcaactggtcatttccgttgtactgcgaaattacgccgcgaattttcacaagctcgtttacatcatattctccgtgaacggcggggttataccgccagagctttgcgtttatttcgccgcctgcgtccgacagggtcatatcgaggtatgtatcgccctttgaggaggtctttttatcgagactttttataaggcagaagccatctaccgttccgttattgtcaattggagtaaaattcattttattctcccgggttattctttaataataatgttttcgcgtgcagggccgttgcttaccatatgtattttaaagcctatctcccgctcgataaactcgatatatttgcggcagttttcgggcagcttgtcatattcggtaattccggttatatcgcatttccagccgggcagggtggtaagcacgggctttgccttttcaagaagacccgtaacagggaagtcctttgtcaccttgccgtcaatttcatagccggtgcagaccttgatctcgtcaagatatgaaagcgcgtcaacaaccgtaagcaccgcgtgggtcgtgccctgaacctcgcagccgtatttggtggctacacagtcaaaccagcccattctgcgcggtctgcccgtggtagcaccgtattcgccgccgtcgccgccgtggtcgcgcagctgtttagcctcgtccccgaatatttcgcttacaaacgcgcccgcgcccactgccgatgaataagcctttataacggtgtaaatttccttaatggcataaggcggaagacctgcgcccacagcgccgtagcctgccaatgtatttgaagacgtaaccatggggtaaatgccgtggtcggtatccttcatagtgccgagctgcccttcaagcagtattgttttacccgccttatcggcctcgtaaagcattttgcgaacatcgcccacaagcggcgcaatgccctttttccattccatcattttattgaaaatatcgtcaaccgaaagcttttccttatgatagaggttttcaatcaaaacgtttttaacctcaagcacgcgctcaagcttttctctcaacgccttttcgtcaaaaagctcgcacacctgaaagcctgtctttgcgtatttatccgaataaaacggcgcaatacccgattttgtagagccgaagcttgccttgccgaggcgctcctcctcgtaaacatcaaaaagcacatgatacggcatgaccatctggcagcgctcggaaatcaccagcttgggagcgggaacgccctgttcgactatgctgttatattctcctaacagcttgtcaacatcaagcgcaacaccgttgcctatgcagtttgtaacgccctcgttgaacacgcccgacggcagagtgtgcagcgcaaacttgccgtacttattttttatagtgtgacccgcgttggcaccgccctgaaaacgaacgacaaaatcggcgtttcccgcaagcatatcggtgattttacccttgccctcgtcgccccagtttgcgcctacaacagccttaaccataataaatataccccgttttttaataaatttgcaatcacgcacaaggtaattacattttattatacaacggggtatatgatatttcaagtattttatttcagtttctgcgacggaaattctgcgttgtaaagtgatatgacccattttctttaaaaaaagaagaaaatgaatgatataatgttatatccgccttgaaacgagccttaggcgaagtgaaatgcggatgaaaacggccgcttcacgccgccgtcagcggcagtcaataaagttgactgaggggtatttatctaatgccagaatcaacctaattgaaataataatttttgccttaaagcgacaaggtcgtaggaatttatttccccgtcacccgaaacgtcaagacactcttgcggcacaacagcttcagattgtttggcaaaatattttttcagacttattaaatcgcgtatatcaattacaccgtctccgtttatatcgccagtatttaataatgctgtatgaaaatccgcaccatcgcttattattttataggcattttccgaataagtatctgccaatctttgatatacggtataatccatattatcgattaaatcggtgaaaattgtgcctttttgccaattgattttgtcaagactatactcaaatccctcaacttctttaacaataagtttcatcgctccaattaatattatttccggtttatttggaattgaaaaaagcattccactacttgtttctgatgcataatcagtagttgtctcagccttgcgctgataaagaatgtatattttatttttctctatacctgtgaaggtgtttgagctttgccagtctcctatcagtaaatcatttgtataagtttctccgttggatttagatttatattcccgctcataaatacagtattcatagccatcaacctctgataatgaaacacatcctgtattatattcgcttattattggcattcgcgcttgtggtacggttcttttttttgtaattactctcaaaggatcgctgcaaacattatattgactatctttaacccgagcataaatattgtattcagttcccggatttagcccggaaaatataatgccattactatattcttttgttttccaattttttaaatcgatactatactcaagtctactattagaataaacaacacgaataacagtatcagaaacatatgatagaataggttttgctacttttgttgtagagatcattagcggcttaccatatgttacaataccattttcttgtttctttatataaataatatattccgtttccggtttgagaccagtaaaatataccgacttaggtcctgaccaagaacgagaaccaattttgtaaaaagtattacttccaccttgcatagatattgtgctttctgtaatctcacccactaggtcataggtttcaaaaaagccagaaaaattcaaagatgtatttttacaattgctttctaaagcacctccagaatacgaatagacataaaggttttcattttttccgtttaaagcatacagccccagtttaagatcttgattttccgttataacttccttaagattattgaaaccataaaaactataagttcctacctttctaatgcttttaccaattataattcgctcaatattatctttcatttcataccaaggcgtacttgtgaataaattataattaaaaattcaatcttccgaaattccttgatttttcaaggcttaccgcctatca

SEQ ID NO: 2751 - DNA, 7384 bp, Unknown
  16S sequences of unknown bacteria
tgttagaataccataccttcaagctcttgtcaagacttttttcatatttttccaaaagttttttcacagctcggaaatatggccgctctgtagcagtattcccggtttccaccatttcatgcattcaccggaaactcctcagcggactatcgccagcaactctctcaggtcgtggataatgtagtccaccggaagtgtaccgatcacgtcctggcaggtcggattataccaacatacatggagtccggcattgatccccccttgcatatcactggtaagcgaatcgccgatcagcaggcagttgtcccgcgtgatgtccgggatatgctccagtacataatcaaaatagaacttattcggtttttcataacccacgcactccgacacaaaagattctttgacatacggagcgatcagggaacgctgcatgcggtcggtatgtacgctctccaccgaattcgtcagaatataaatctggtgctcctgcgccagctcccggcacacttcttccgcataaggcatcaaaaaactcccgcggccaaggaactccataaaatcccggttgacttcctcgggatcttcactgcggtgcagcgcatccaaaaagcgccgaaagcgctccgttttcaaaaactcttttgtaatcgttcccctttccaaatcccgccacaaaggctgattgaacgcctcaaacaacgcgcggctttcctcattgcagggaaaactgtattttgcgcacagcagggaaaacgccttgtctccattgcgcgaaaagtccagaagcgtatcgtctgcatcaaataataaataaggataacgaaccatagcctcacctcaggtatgttttctgtctggttatgtctgagtataccatattctccgtccgggtgcaatcaccaactctgcccagcaagaataggatggtgacggagggaagctatggaacagacattttttgtagcgggcggagacgcccgccaggaagcaatcatacatcaattaaaagaggccggccgcagcgtttccgcctttggatttcaagccgccgatcacctgacgccggaaatcgccgcccatctgggcgcggcggacatcatactgctcccgctgcccgcagcggacagcgacaactgtctgaacgcgccctctatggaaaaacggttgcctatggaaatgctgtggtctctgctgcatccgcagcaaaaaattttcggtggcatgctgagcgaagctctgctgcgttcggctgcagagtataatcttctgcctatcgattactacaaacgagaagaattcgtgctccgaaatgcctacattacggcagaaggagcattggagctaacaatggaccgcttgaaacgcaccgtaaaaggcacaaactgcctgatactggggtacggcaggatcggaaagtttctggcacggctgctgctggaccttcacgccagcgtgaccgtggcagcccgcaaaggcaaagatctggtgcaggcagaactggacggctgtatcccctgtccactacgggatctggccggatgtcttcctcgctgcgacgtactttacaacaccatcccccacctcattttggaccaaactctgctccccctggttcccaagtcgtgtctgtgcatcgacctggcctccaagcccggcggcatcgacctgcgcgcagcagagcagctggaacttgaaaccatatgggccctcgggcttcccggcaaggtcgccccgggttccgccgggcaggccatcgtagatacggtccttcaaattctgacagaacaggaggtgtctttatgaaaaaggagcgcatcggcttcgccttctgcggctctttctgcacgcacaaaaaagtgctggaacagtatctcctgctgacgcaggaatacgaaacagtgatccccatcgtgtcagagagcgccgcttccacagatacccgcttcggaagtgccgcagatttcttgaaaaccgtcgaaacggccgcgggccgttcagccatccgctgcatccgcgacgccgagccgatcgggcccaaaaagctgctggacgcgctggtcatcgccccctgcacaggaaacacgctggcaaagctttccggcggcgtgacggattccaccgttaccctggcagccaaagcgcatctgcgcaacggccgtcccgtacttctggctatcgcaagcaacgacgccctggccggtaacgccgaaaacattggccgtctcttggcgcgtaagcactattatttcgttcccttcgggcaagatgatcccgagggaaaaccatgctccctggtagcggatatgaaccagctccgccctgcgctggaggccgccctgcagggccgccagctccagcctctgctcttgcacacataaagagaaaagcagcctgaccgttcgccggtcaggctgctcttttcatcatcgattctgttcctgctgcgcccgcttgtcccgcagtccgcaccggcattcgtgcgcctcacgctgcgtcggcgtagcctggcaccgaccaacccgctgacgcggacactccgtgcagtccctgcggccgcaaaccctttttttctcatccatcattctgaaaactccctccgcatcctctgcgcttctggttccgcttcagttccccgtgaccaggttgtaaggcgtcgtctgatacacataataattcagccagttggtatacaggagctgcgccgcgctgcgccagcggacaacaggcgactgccggggatcatcatgcgggaaataatgttccggcacatggatctccttccccgcctccacatcccggaaatactccttggccagcgtatcgcggtcatattccggatgacccataacaaagaactggcttccgctcttttctttcaccgcaaacaccccggcggcctcggacacagccatcagctccaagccgggcactttccggatctcctcctgtggaatttctgtccagcgggaatgcggcgcataaaacgtatcgtcaaatccccggaaaatgggcgaattgcgtctgagtaccgtgtgctcatacacgccgaagagtttttctggcagctgccgcttctgcaggccgtaatgataatataggcccgcttgggcaccccagcagatatgcagtgtgcagtgtacgttcgttttgctccattccataatgcagcacaactcctgccagtagtccacatcttcaaattccaaattttccaccggcgcgccggtaatgatcataccgtcgtagcgccggtttttaatctcatcaaacgtgcgataaaatgattccaaatgctcctcactggtatgcttggcatcgtgactcaccacctgcagcagttccacatcaatctgcagcggcgtattggacagcttgcgcaggatttgcgtctctgtggtaatcttggtgggcatcaggttcaaaataaccagtttcagcggacggatatcctgatgcagcgcacgatactccgtcatgacaaaaatattttcgctctccagcgtcgccgtagcaggcagggagtccgggattcgaatcggcatgggttcacttccttgtcatttgctctatcctgtttcagagtattttatcatgtttgccgccttcgttcaagcgttccgccccggctagggacagaaccgcagaaaaccgacccgcagcatggcaacaggccgcgggccggctgtatcaatcgtatgccgtcattccactgtgacgcttttggcaagattgcgcggcttgtcgatatcgcagccgcgctgcagcgccacataataggcaaacagctgcagcggaacaacacccagagagggctgcaccacaggatggctctccggcacggcaatgaccgcatcggcagttttttccattttcccgcggaactcatctgtcgtcacggccagcacctccgcgccgcgggctttgacctccaccacgttgcttatgcttttatccagcagcgcccggtaggtgcccagcgccaccacaagcgtcccatgttcgatcagggaaatggtgccgtgcttcagctctccggaagcgtatgcctccgagtggatgtaactgatctccttaagtttcagcgaaccttccatacccatggcataatccagattccggccgatgaaaaagatggaatcatgattgaaataacgggaggcaaaatactggatatcctccacatgcgccagcactttttccagtttttccggcagcaccgccagttcctccacaatggcgctgtactccgccggctccaccgtgcccagcacgtccgccagatacagtcccaccagatccatcagcacaagctgcgtcgaataagccttcgtagtcgccacagcgatctccggtccagcccaggtatagagcacatcgtcagactcccgggcgatcgaagatcccaccacgtttacaatggccagtgtccgcccgcccaggcgcttggcctcgcgcatggcggccatggtgtccagcgtttcaccagactggctgatgaccaccaccagcgtgtgttcatccaccaaaggcgcgctgtagcggaactccgaagccaggcacacttccaccgggcggcgcagcaggcgttcccagttgtatttgctgaccatgcccacgtgataagacgaaccgcaggcaatgatatagatacgggagatctctttcacatagtccgccgttagggccacgtcgtcgagtaccacacggccgtccctgatccggggcgacacggttttgcgcacggcttccggctgctccatgatctccttgagcataaagtgcggatagccgcctttttccgccgcagaaacgtcccagtccaccgtgtggtgtttcttgtccaccggtatcagctcatcgtcgaacacgtcaatgctgtctgcggtcagcacggcgatctcgccatcgtccatatacaccacgtcccgggtgtgcttgatgaccgccgtcacatcggaggccagaaaattcccattctccccataacccagaatcagagggctgtccttacgtgctgcgatcagggcattcggatagtcagcgcagatgataccgaaggcgtaagacccttcaatgcggcgcagcacgcggcccaccgcctccagcatgttgccgcattcatgatagtgaaactccagaagctgggccaccacttcgctgtcggtatcggaggcaaaggtcacgccctgcttgatgaggtgttctttgatctccatgtagttttcaatgatgccgttatgtaccagggcgatgcggccgttttcgctgatgtggggatgggcattcacatcattcggctccccgtgggtcgcccagcgggtgtggccaatccccagcgttccggacagttccgccccgtcgcgggtcagctctctcagcacatgcagccgccccttggcctttttcacctgcagtccttcctgttcagaacgcacagcaatccccgccgaatcatagccgcggtactccatgcgttccaatccatccaacaaaatgggtgccgcttcttctttaccgacaaatccaacaataccacacataaaattatagtctccttttattgttcctccgcccaatgatatgtatgacaaagccgccccgcggcataaagaccggcgcaactgcaaatactgaacgcggaggtgttatctgcatgctgactgcgctgatccgaacgatcattctttattttctgatcatggccggcctgcggctcatgggcaaacgccagatcggtgaactggaaccgtccgaactggtgctggcactgctgatctctgatttggctgctgttccaatgcaggatttcggcatcccactgatcaacggtgtccttccgatcctgacactgctgtctctgtctatgatgatttctgtactgaacctgaaaagcatccgcttccgggacctgatctgcggcagtcccaccgttattattcaggaaggccacgtcctgcaagatgagatgcgccgtacccgcttcactgtggacgaactgattgaagaactgcgtcaacagggcgtggtggaccttgccaccgtgcaatacgctatcctggaaaccaatgggaaactatccgttctcctgtatccggagtatcaaccgctgacgcccaagagcgcccaaaaccataaagtggacgataccggtctgcccaccgtgctcatcagtgatggacggttgctggaacggaatctgcatcgtctgcatcttgaccacacctggcttcagcggcggctggaggaaaacaatatcccctccatacaatcgctctttctgctgaccgtggacaaacagcatcagctctattttctcaaaaaggagtaacgtatatgaaaccttttttcattgcctgcctgatcctgatgtccctgttcactgccggcgccatgaaccagcgcaccgtgtccgacatcagcgattccatccgcacacagctgaatgcatcccaagccgccgcccagcaggaacagtgggaatccgccgagcgcgccctctcccaggccgaccggacctggcaggcgcacgaggcataccttcacgtagttatcgaacacgacgagatcgacgaagccgaagcgctgttcaccgaagtgagccaatacgctcgacagcacgacagcgacaaatactgcaccagcgccgaacgcttgtgcacccaactgaaccatttggaagaaagtcaacagttgagtatcaaaaatattttataaacaaaagcaatatagatactatagtatagcacgcagcgcacccgcgggcaacaaaaaaatcgcttgaacaagcgattttttgccgccgtgcgggtcttttattccgttttcagaagctcgggcagatacagatcctccctgtgcacccgcgcgcaggacaacgtgcacagccccgccgcccattcccggcccacatccagcgtgcggtaatgctctcctgtttcttccgccaccggcctgcggcaggaaagcgcgctgccgccgcggcacttcacacggctttcccgctccacccatccggcataaaattcctccggcgtttcactcaggcgcagtcgccgcgcccgctgcgccgtaacgggacgaatgcgctccacatctgcccccacagcccgatcgctcagcgcgcacagcgcagcgccttcagtgtgactcaagctgaactgcagttgaggatatgcggcaaagcagggttttccccgtaggccataggagagctccggtacagaagcacagcccagcagacgcgctgcagcgcgccgcagcattgcataagcagcacagatttgccgccgctcctccatctgaggacgacccagccgccccaaacgttccggcggtaccagctgcaccaaaagatcctccggaattttttcttccccccagtgtgccg

SEQ ID NO: 2752 - DNA, 24489 bp, Unknown
  16S sequences of unknown bacteria
ttgtaatatttttaaaaatatgttatgataaatttgatttggatattttttaagaattgacaaattaccacgaaatattgcggatttttgcaaataatgcctgtattttggatgtgtttttacgtttcggtttgatccttttcgttgtaaaatgaaaagattaaatatttttaagaagcaatagtggaggaaaggaggtacgaaaaatgtcaaatctttttgttttaggtttgggtcttggtactgtctttgttggattgatttgcattattattctttgcaaattgatgagcgctatttgttctaaaattggtaaaaatccaacgcaaccggcagttgttgtcccatctgcagcgcccgccgctccggctgaagcgtctattccgaaccggcaggagtttattgctgctgtctccgccgtcattgctgaagagatggggacggacgtctcgaaaattcgcattctttctgttcaaaaaatttaacaccaatttagaggagaggtcatttgattatgaaaaagtatcgtgtaaatgtaaatggaaccgattatgaaattaccttggaagaagtgaccggtgcagaagcctctaaaccggctgctcccgctcctcaggcggcaccggctcctgctgttgcccctgcacctgccgctgcctctgccggaagcgaacagatcgtcagcccaatgcctggaaatatcctgaatgtcaatgtaaaagttggcgatgcggtgaaaaagggacaagttttgctgattttggaagccatgaagatggaaaatgaaattatggctcccaaagatggaactgtcacttcggtaaatgttcagaagggctctaccgttgaaagcggcgcactccttgtaaccctcgactaatccctttaatttttgaaaggagtgtgaaaacacgtggaggcaattttagatttcttgcgtcaaaccggattttaccttcttgggtcggatcccaaagttctgattatgatggcaattgcctgtgttttgctgtacttagctattaaaaaaggctttgaaccattgctgcttttgccaattgcatttggcatgctgttgaccaatctgcctggcgcaggaatgtatcatgctgacttttttaccggaggccatgtggactggactcagtttgcggctggtaatgcaggtctaattgatattttgtatttaggtgtaaaattgggcatttatccctgcctgatttttattggcgttggtgccatgaccgactttggtccgttgatcgcaaaccccaagagtttgctgttgggtgccgccgcacaattgggcatctttattacttttatcggtatgcgctatttgggctttttgccggaagaagccgcatcggttggtatcgtcggtggcgctgatggtccgactgcgatttatgttgcatctcggctggcgcctgctttgttaggcccaattgcggtcgccgcatattcgtatatggccttggtaccggtaatacagccgccgattatgcgtgccttgacaacgaaaaaagagcgtgaaatcgaaatgaaacagctgcgcccggtgaagaagatcgaaaagattattttcccgattgttgtaactgcctttgtagcgttgctggttccttctgccggtgctctggttggttgtctgatgttaggtaatctgatgcgtgagtgcggggttgtagaacgtttgagcaagactgttcaaaatgaactgatgaatattgtaactgttttgctgggtatttctgtaggcgctactgctaccgcagaaaatttcctgaacctgaaaacattggcaattttggcaatgggcattgtagcttttggattcggcactgctggcggcgttctgcttgcaaagtttatgaacctgtttgtaaaagagaaaatcaatcctttgattggttccgccggtgtttccgctgttccgatggccgcccgcgtttccaatgttgaaggccagaaagcgaagcccggcaacttcctgctgatgcacgctatgggtcccaacgttgccggtgtaattggctctgcgatcgctgccggtgtattcatggcgttgtttggcgcgaaataaggagggaatagtatggcgaaaaatccgctgaaaattacagataccattttgcgtgatgcccatcaatcccaagctgcgacccgtatgcgtttggaggatatgctccctgcgtgcgaattattggacaatatgggatactggtctttggaatgctggggcggggcaacttttgacgcctgcatgcgttttttgaacgaagatccatgggaacgcttacgtgcgttgcgtaaagcaatgccgaaaaccaagttgcagatgctgctgcgcggacagaatattttgggatacaaacattatgcagacgacgtggtagaggaattctgcaaaaagtccatcgaaaacgggattgatgttgtccgtatttttgatgctttgaatgatcctagaaatatggccgccgcgatgaaatacaccaaggaatatggcggtatttgtgaggcagccatcagttatacggtaagtcccgttcataatgaagactactttgtaaagcttgcagtaaaattgcaggaaatgggcgcagatgttatctgcatcaaagatatggcaaatctgttgttgccctatgatgcatattctctggtgaaaaagctgaaagaaaatattgatgtaccgattcacttgcatacacacaataccacgggtactggtgatatgaccaatttgatggcagctacagccggcgtggatattgtagactgtgcgctgtctcctttggcaaacggcacatcccaaccggctaccgaagctttggttgctacgctgaaaggaacggaaagagatactggtttagatctggaacagttgagcaaagcggcagctcatttccgtaaagtagcgaacaaattaaaagcagagggcattttggatccgaaggttctgaatgtagataccaatactctgctgtatcaggttcctggcggcatgctgtccaacctgatttctcagttgaagcaggcgaatgcagaagacaagtactatgatgttctggcagaaattccacgggttcgaaaagattttggttatccgccgctggttactcccacgagccagattgttggttctcaggctgttttgaatgttgtctccggtgaacgttataagatgttcccgaaagagtcaaaaggtctgctgcgcggagaatacggtgcgctcccggctcccgtgaatgaagaagttcggaaaaaggcgattggagatgaagagattatcacctgccgcccggcagatcttctggagcctgaacttgaaaaatatcgggaagagataaaagaccatatggagaaagaagaggatgttctgagctacgctctgttccctcaagttgcaatgaagttttttgaagcccgcgaggctgcaaaaaatccgcagacaaaagctgcgccgaccaatgaagccggtgaacggattttgtacgtcgaagatctttcaaaataaaatggatttttcccaaagggacatgcaattataattgcatgtccctttttcttttcatttttataaatacataaaataatcgttgcagtaagaagctgagaagaatagtatcgaaacaggagcagagaagagctcacccatatgaaaaactatcttattcattggacagaaggaggtggaatttgtcaaaaacaaatttttcaaaaatttgattgtttcaatattttagtgttgatcttttcacaatatttctttgctaataaatttggcataaaaaacgggactggctgaaccagtcccgtttgcactcaagttgagtggttgtgctaaaaaaggaattcgaaaaacaaaattatttcgcgttatcgtaagctttctgcaagcaatccaggaaagaaccgatatcaatggtgcagctgctttccagatcagcaacatccggtacacgagtatggttttcgtctctctgtttggtaggagtagcaacagcatccgcagcggttttacctttcaggtaatcttccagagcggtcatctgctcgccgacttcctttttaatgccggaagaatctctcatgccatactcgtcgcccagctcttttttggttttctgctcttcgctgacggtgacaactttaccctcggcatcataagttactttcggctgaatcgcatcaaaagatacgcccaggattttgccgttggcatcgaaagtagcagcacagatggtcacatttgcctggaatttgccgtccgcatcgtcagtagcgtcagaagcggaaccagtggtgatggcacccagtccggtttttacggtggtagcgccacagccggccagcatcaacagggccagagtcaaagcaatgatttttttcatttgtagacctccagtttcttgtcacaaaaataacaagtgtcttctttttatttagcattcctaagtttatgcacaactataaacaagaaatgctacgtttttcattatacacgaaactgtcacaaaattcaagttggttttttccataagaactggcttgcatcccgcctaatttttgctataatagagaagaattagattttcaaataggtaattttgccgatacataatagactgggcaagtacgtggtcaatttttttgaatgggatgaacggatgaaaaaaagatggtttcttcttatatgctgtatgctttgcctgatttttccgggatgcaattcacaaaaatatgaacgataccggggagaattttatggaacattcgatacagttgtaacgattgttggatatgttcaaaaggaacgggattttgaccggtatctttcatatgcgcaggaacgttttcaatattttcaccagctttttgaccgatacgaagcgtatactgacgtgacgaatatcaaaacaattaacgataacgcaggaatctctccggttaaagtgtcaaaagatttgttcgagtttttggaatattgtatgacgtggtgcgaaaaaagccagggacaggtgaatattgcgttaggaccggtgctggaaatctggcacgattatcgggagcgttttgagaatgctgctgagggaacgcttcctccgaaagaagaactggaacaggccaatttgctgacggacttacagaaagttcagttggacgaagaagctcagactgtctttttaacggaaaaaggaatgtctttggatgttggcgcgctggcaaaggggtatgcaacagaaaaagtaggggaagagctgtttaatatggggtttacctctttcagcatcagcggcggtggtaacgtcaggactttttccgaaccggttgattcggaacgcaaaaagtggaatatcagtattatgaatccgaatactgcggaagatcccaatgcggaaccaatcgattttttgtatgtcaatgatttgtcggttgtaaccagtggggattatcagcgttattatctggcggatggaaaaaaaattcatcatatcatcgatccggacagtttgtaccctgcagattattaccagtctgtaactgttattacggaagattccggggaagcggatctgctttctacctggttgtttacattaccattagaggaatcgaaaagagcagcgcaaaaggctggtgtccaggcattatgggttttgcaggataatacggtggtctataccgacggctatttggcttattccaaaaattacggcggagccacattaaattaggaggcagcatggaacaaaaaaagagtatttttgatttgaaaaaaagctggcaatggatggcgtacatctattttattctgccggttatcatgtttattttgggttggctgatgggcgataatgatatgggaaagttcttttccggactgtttcatgcctataacctgtatattatgaatcctttgttggatttcggcaaaaagatgggcattatcggaattttaattccgctggttctttttggctgggcgatcaagcgcaaggactatattgacttggccatcagcgttggaatagaagcgcttgtcgtgctttatttctggcaggaatggaattatcttgtgattggatatctccacttttaagcgcttattggaatcgttggattccaacactttccgtgagaaaatattgtttggatttccaaaacggacaagatttacttgacagaactggagagttctattatactggtggcaattcaaaaaaccatgtgactgacggtgagtgggtaaccacaagggagcatggggatttttagccgaccgtctgggcaatcttttttaggattgccctttttcttttgtccggtgatcttaaaaaagactatgaaaatagaattttacaatcaaattaggaggaaaagttctatggagcataaaaattggatgggatttgcaggggagagctggaaagagcacattgatgtacgaagctttattcaggataactacacaatttataccggagatgaaagctttctctccagcccgacagaaagaacacgaaaattattagcccaatttgaagaactgcttcgtcaagagcaggaaaatggcggcgttttagatgtagacactgagcacgtttcttccttgactaattataaacccgcttatctgaataaagagttggaactgatcgtcggctatcaaacggagaaaccgctgacccgtggcgtgaatccgtttggcgggattcgaatggcccgttctgcctgtgaggcttatggatacaagctgtctgaaaaggtagaacaggaattcacttaccgcacgacgcataatgacggtgtttaccgcgtttattcagacgaaatgcgcaaggccagaaaatgcggggtcatcaccggtctgccggatgcttacggcagagggcgtattatcggggactatcgccgagttgcgctttatggcattgaccgcctgattgaggaaaagaaaaaagataaagcggatattgccatgggggtaatggatacggatgccatccgccaaagtgaagaactgtttcagcagattgcctttttgcaaaagctcaaagagatggcttctatgtatggttatgatatcagtgagcctgctgccgatgcaaaagaggcggttcagtggctgtattttggttatctgggcgcaattaaggagcaaaatggcgcggcaatgtctttaggccgtgtcagcacatttttggatatttatttcacgcgggatatggcgaggggcatattggacgaaactggcgtgcaggagctggtagacgattttgtgatgaagctgcgtgcagcccgtcatttgcgcacggtagagtacaatgagctgttcggtggagacccgatgtggattacggaaagcattgggggagtaggggaaaacggtaaacctttggtgactaagagctcgttccgtttcctgcatacactttataatttgggcactgcaccagaaccaaacctgactgttttgtggtcgaaaaaacttcctgagccgtttaagcgctattgtgcccgcgtatcggtggaaaccgatgccattcagtatgaaaatgacgatgtgatgcggccgatttatggagatgactatgcaatcgcgtgctgtgtgtccgcaatgaaagttggaaagcagatgcagtttttcggtgcgcgctgcaatttgccaaaactgcttttgctggcgctgaacggtggccgggatcagctgaccggtattcaactggggccgcagatggagccttatgccggggaaacattagattttgaagcagttcgcggaagatggcatatctatttggaatggctgtgtaaattgtatgtcaatacgatgaatgtcatccattatatgcatgacaaatatgcttacgaaaaaacgcagatggcgctgcatgatacgaatgtagaacgattcatggcatttggtgtggcgggcctttcggtattggctgactcgttcagcgcgattcgctatgcaaacgtaaaagtggtacgggatgaaaatgggctgattgaaggatttgagaccacaggagaattcccgaaatatggaaatgatgatgaccgggtggatcaaattgccaagacggcgctggaagaggtttatacgcagctcaaacgcaatcctacttaccgtagcgcgatgcatactttatcggttttaaccattacttccaacgtggtatacggtaaaaaaaccggtgcgacaccggatgggcgtgtaaaggggcagccttttgctccaggtgccaatccgatgcacaatcgggagcaaaacggcgcattggcatcgctgaactcggttgccaaaatgccgtatgaaatttgccgtgatggcatttccaatactttttctattacgccggatactcttggaaaaacggaagaacagagagtggataacttggtgggtatcctagatggttattttgcgcagaacgctcatcatatcaatgtaaatgtactgaataaacaaaaactgatggaagcatatgaagatcctcagaaatatccgaatttgaccattcgtgtctccggctatgctgttaatttccaccgtctttccaaggaacagcaaaaagaggttatcagccgaacctttcatcaggcgatgtaatcaagaggtgattccatgaacggatttgtccattcatttgagtcgttgggtacattggacggacccggcgttcgctgcgttgtgtttctgcagggatgtccccttcgttgtatttattgtcataatcctgatacgtgggataaaacgaagggagtgtctttcagcgcagaagaagtcgtccgcagagtaagccgttatcggtcatattttggcgagacgggtggcattacagtttctggtggagaaccgctgcttcaagcagagtttgttacagagatttttcgtctgtgccgggaatccggcatccatacggtgctggataccagcggccatggggcaaacccgttaagtttgatgcctttgctgaaagagacagatttggtgctattggatatgaaaatgaccactgagcaggactatgacgaaaaaattggaggttctttgcggcaagttatggattttcttttgctgctggagcggcagaaaatcccggtttggattcgtcaggtcgttgttccgggtatcaccgactctcgggagaatctttttcgcctggccgatctgctcgccgggaaaaagtgtgtccagaaagtggagtttttgccgtttcgaaaactttgcaaggaaaagtatagccaaatgggaatcccttttccgttggatcgagtcccggaagcgacagatagtttttgccgggaatatgccagtcatttttatgaattgttgtccgcagaacaaaaaagcagatgaaaaaagccgtcgtccaaaaaaatggacggcggctttttacaaaatgtattggggatgaatcaattctagcaaattccggcaaaaagtattgtcgaaatatagcgaatcacaaaaaatttctatgtttattttacttttcgcaaaaagtgaggacggaaaaaatgacggtagaaataaaaaatgcgggtcagtgccagttcaaatacgataaaaacaatattgccagctaataaggtcaccaaaccagtgaactggcctaaagttcccatttcagtcataacatccggcatttggaatacataaatcattaaaccataggcagccagaatggagaggttaaaaacggcaaatttgatgatccattgcatagcccggcttttcatatgatgatccagatagtcctttaacacgggatagtagccgagaaaaacaaaaatcatagcagcctgcttatccggtaccacaaaaatggataacaacgcaaccaccagatatacaagcatagcccaacgataaccgcaatctacaatcaccgcaatgagaagaaaaccggcagcagcaggagccgcataagtgagaaaaggaaaaaagccagtcatcaacatcagtaaaatgcaaagggaggccactacgccgcccaatgccacctgggaactttttttgagcataatgatccccccgagattttgtcatgacgcagttagcagcagccacgcccccccatacactggcagcagcagtcggcgcagaccattgaggtgcagaaattacatggagaacaatacatgcctccagcgggcatagagccgggattggtaccgtgtgtgcgctgccagctcatttgctgtaatgccatgcgatattcctgattgttgggattcatctggacggcctggttaaaatgccggtaagcttcgtccagccaacctctggtgtagaaaacgctgcctttcaaaaaataccactcagcgtctcgcgaagcctgcggaactccgtcgagcaattcctctgcttcggtaatccggttgttgttaatcatgcggcggatatctgaaaattgggattgccccggagaagaattcccggaatttgctttgctgccacgcctcatgtccataatctggtcataagcagcggtgatttctttcattttttcttccgccaaatcagatagtggatcattctggtaatggtccggatgatattttcgtgctaaatcccgatatgcttttttgacctcctcgtctgaagcggaagaggaaatacctaacactttataaggatcagtcatgcatttttctcctttttgtgcaaaatattctgcaaggactgttttaggccaaaatagataatattctctaaaattggttgccaatcattgagctttaacaatgcaaacgccttttccaattcagcaatggtgctgtaaaggctttccacagcaggtgaataggaaaggctttttaattcacaaacgctatgagattgtaaaaatgggttaaaccgattctttttctcatctttttccaaatcgtccaatgcgtcagaaagataaacataacgtcccaaaaggtatccgaatcgggataggacccgtttttgagatggatcatttgataatgcctcacaagtgagggataaataccgagcagtaggttccgccgccggatcaggtcccgccttttgggactccacaaactgctgtgcctgtaccatatcggaaaccgaacgatcgtactcctcatccttctgccgggctttgcgccagcaatggcggaaaaagggaagggcgacgcggacaggcagcctcagtgcgaaattttcatctgacagctgatcttgacatttgtaatatagtgtaatcatcgcctgtgcggcaattcgatctgtaatgccgtctttgtggcaggcagaacatttttttaatgggtttatcaagcaacggattttgccgaattccggcggatccttttgcacagccatagaaagaattgctaaaaaggtaaaatcataacttagcgtgaaccgggcaaaaatgccgtattgtcggcctaattctttgcaaaggccacagtagacggatttgtacgcttcatactctttgattcgcagttctggctgaaaaggtctgatatatccaaacaaaaagcgctccatcctttgtgttgatatgctgatattctaatatgatattctacatcaaacagcagtattatttggtgaagaatctgtgaatttgcaatgaaatgacatttttttgcaaatttgaaagagaatgtctgccgctttaaaggattgaattgacattatgttgcagttatactataatcaaaattaccaatctttcgcaatggtggggataatttggacatcttgacgttattttttcttgcagtgggcctttcgatggacgcaatggcggtatcgatttcagacggcttgtgttttcaaaaactacgccgttccggttttttcttaattgcatttgcttttggtctgttccagggaatgatgccgattatcggttactttgccgggcagacctttagtgtatacataaaaagcctggaccattgggtcgccttgatcttgctgggatttatcggcggtaaaatggtttgggaggcaatttcacagatgcgccacccagaagaggaaagctgtgaaaaaacttttacactccggctccttgcagtacaggcagtggccaccagtattgacgcactggcggtaggaatcggttttgcagtaatggacgttaatatctggtccgctgcaggtttcattgcggctacaacatttgttttttcggccgccggcgtttggattggcaaaaaattcggctccttcttaaaagaaaaggcagaactgttgggtggactcattttaatctcgattggtattaaaatttttgtggagcatgtgatgggataaaagggaggtattaacatgaaaaggctgatgcttggcaatgaagctgttgccagaggcctgtatgaagcaggttgccgtgtggtttcgagttacccaggaacacctagcacggagatttctgaatatgtggccaaatatgaagaagtatatgcggaatgggcgccaaatgaaaaggtagcggcagaggtggctattggtgcgagttttggcggagccagatctttttgtgcgatgaagcatgtaggattgaatgtcgcggcggacccggtgtttacttccagttataccggagtgaacggcggtatgatccttgccgtagccgacgatcagggcatgcattcttcccaaaatgagcaggattcccggcattacgccatagcggcaaaattgccgatggtggagccctctgattccaaagaatgcaaagattttatcaaagcggcatatgaaatttcagaagattttgatacaccggtacttttccggctttctacccgggtatctcattcccaaagcattgtggaagaatgtccgcgagaagaaaagcctttaaaggattatgtgaagaatccgcagaaatatgtgatgatgcccgcttttgccaaaacccgtcatattgaagtggagcggagactggaagcactgtctctttttgcggaaacaactggcctgaacagaattgaatgggcagataccaagatcggcgtgatttgttctggtatcgcctatcaatatgtcaaggaagcgttgggagaaaaggcgagcgttttaaaattaggtcttatttttccgttgccggaacagatgatccgcgattttgctcagaaggtagacaagctgtatgtgatcgaagaactggatgatatttttgaaacgcaggtgaaaaaacttggaattgcctgcgaagggaaaaacttgttcacaaaacttggagaatattccccgcaaatgattgcggaaaaaattctcggcgaaaaaacggattaccgcacttttgaggaatcggttccggtacgtcctccggttatgtgccctggatgccctcaccgcggtttatactatgttctgtcaaaattaaaggtcatggtcagcggcgatatcggctgttatacattgggagcgacggctccgctgaatgcaatggatacctgtgtgtgtatgggcgcctccatttccgctttgcatgggtttaataaggccagaggaatgcaggagcgctccgttgcggttattggagactccacttttatgcattcgggaatgacaggactcgtcaatattggttataacaagggcaattctaccgttattattttagataatcgcattacgggaatgacgggacatcaggataatccgacgaccggacggactctcaagggggatgaagttccacaggtgaacattgaagcggtttgccgtgcagcgggtatccgccgggtgcaggtggtagacccttatgataccgtacaggtcgaggcagttttaaaagaagaactggcatcaccggaaccgtcggttatcatcagccgtcgtccctgtgttttgttgaagtccgttcccaaaaaagcgccacttgtggtagatagggataaatgccgttcttgcaaagcctgctttaagatcggctgtccgtccattcatatggaagatggcaaggccgccatcgatccaactttgtgcgtaggctgtggtttgtgcgcgtcactttgcccgttccatgccattgggcctcaggaggtgcggtaaatgaaaacaaaaagtgtaatgattgttggtgtaggtggacaaggctccctgttggccagccggattctggggcatgtatttctggaacaagggtttgacgtaaaggtttctgaagttcatggtatgtcgcaacggggcggttctgtagttacctatatcaaatatggcgatcaggtgttttcccccattattgaacaaggagaggcagattttctgctctctttcgaacagctggaagctgcccgttggctgcctcatctaaaaaaagacggtaccatgattttaagcacacaaaagatagatccaatgccggttatcattggcgcggcacagtatccggaaaatattgtatccaagttgcggcagacaggcgccaatttggttgcggtagacgctttgaatctggcacagcaggcgggttcaccaaaggcgacaaacacggttttaatcggcattctctctaccatgatgccctttgcaaaggagaattgggaagccgctattcgggaattggttccccaaaaattcttggatttgaatttaaaagcttttgaattggggcgtatggctacagcagctgatgttgaaatgagataaaaatgaaagtttgtctggaggaattacgatggaacgctactggaatccggtagaaacggcgccaatccacgaaatgaaagctttgcagagcctacgtttatcgcagacagtgcggcatgtttatgaacatgtgcctttttatcggaaaaaatttgatgaaatgggcttaaagccggagaatatccaatcgatcgacgatatttccaaacttccgtttacttataagcaggatttgcgcgataattatccttatggtttgtttgccgtaccggtggaagatctggtgcgcattcatgcttctagcggcacgaccggtaaacagacggtggtgggctatacacaaaatgatatcaagatttggggcaactgctgcggacgcgctttgacggctgctggcggagacgccagagattttgttcatgtttcttatgggtatggtctctttacgggaggacttggtctgcatgccggagcagaagaaattcatgcaacggttatcccggtttcttccggtaacaccaaacgccagattcaaatttttaaagattttggctctactattctctgctgtaccccttcttatgcattgttcttaggcgagagcttgcgggaaatgggggtggacaaatcagaaatcagcctgaaagcaggcgttttcggtgcagaaccctggagtgatgaaatgcgccgtaaaatagaagatctgctgggaataaaggcttatgatatttatggtttatcagaagtcatgggtcctggtgttgcctttgagtgcagcgaacaaaccggtatgcatgtcaatgaagaccatttctatccggaaatcattgatccggataccggagaagttttgccggaaggtgaagttggggaactggtgtttacctgcatcagtaaagaagcattgcctctgatccggtatcggacccgcgatatcgcatctttgagtcgagaaaagtgcagttgtggacgtactctgattaaaatgaaaaaacccagcggaagaacagacgatatgctgatcatccgcggcgtaaatgtgttcccgtcgcaggttgagtccgttctgctggaactgggggatacagcgccccattatatgctgattgtagaccgtgttggaaatctggatacgctggaaattcaggtcgaaatgaaagaggacatggagtttgatgcagtccgtttgattgaaaaaacagaagcgaaaatcaaagcggctgtggcttccactttggggatttctgcaaaagtaacgctgcttccgccaaagtctattacaagaagcgaaggaaaagcggttcgggtaatagataaacgaaaaatctagctgttgtttttgtatcaactgtgatataatggaattgatacaaaggataattgttttccatagattatcggcatcaaaggcagtgtaaaagaaagcttttgattttatgctgaatgatatgatgcggaaaggatgatatcgtatgacaatgaaacagctgtccgtttttgtagaaaataaaccgggcactttagcagaaattactggtattttgggagcaaatgatatcgatatgtgcgcgctgtcggttgcggatacagaacgttatggtattttacgtttaatcgtcaataatccgcagaaagcagaggatgctttaaaagcagctggttttaaagtgtcgctgacggatgttatcgccatcgcagtgtctcataaaccaggcggcttgtctgaagcgctaaagtatgttgcgcaagcgggaattgcggtagaatatatgtatgcgtttgtttctcccaaggcggacaccgcttatgtgatccttcgcgtacaggataatcagaaagccatcttggctttacagcagggcggcatcccggttattcgcggagaagaagtttacgggaagtaaggttaaaaacagcgtaggctgttttagctgccgtatcgattaaacaggacacctaataatcagcggcaaataaaaagtcaatagtcattggcagagtagatttttgtgcgttaagtgctgtctggacggggagttgccagatggacgaaaaggagacttgcggtacaaatttcgcatcccgctgccgcatgaaggggagaccccctctctttctgtggcttgcagtggctagcaacagaaaaaggaggagtctttttgtatgcaaaaaaagcgtgagtaattctaacatttttctattttcaaaatcaacaggagcggcgattggttgaatggaggaatgaaaaacacgatgccgcacaaaatgagcatttcataaatgttctgagcccctatcttctaatatgaaccattcattaggaatatcatgacaatagcaaaaggagagaaatgtttttatgaaagcaaaacgaattgtgacgacggctatgttaattgcgatgtatgtggtcctgagtcttttttcgatcaacttgggaaatatgaaaataacgctagacagccttccgattattgttggagcagcactactgggtcctttggatggcttcctgatcggattttttggtagctttttaaatcagcttttgacatttggtttaacaccaactacaattatatgggtgcttccagcggccatacgaggattattgatcggtctgtatgcaaaacattgtcattttgacatgagttttttgcaaacacagatcattacaatttctacggcgctgattgttacggcactcaataccggtgcattatatcttgacagtaaaatttatggttattattcttttgcctttgtttttggggcagttattcctaggatttttactggtattcttaccgcctttgtttttggtagtattttgccttatatcgtaaagcctgtcaaaaaatttctcggaatgaaacgagtctaaaaattttataaaggtttgtgcacaaaaagccgcggattccgcggctttttgtgataaatcaaaggtcatcaacgtcctgaacaggtttttctccataatttacattttttccagtataacttccatgtgggtctgttttccaagaagaagcatctacaaatgcatctgcaaccttttgagcttttttctggggatcttttttcgaatggtaatccatattctttctcctttatgataaaatagaatcaagtattaggatggactgaaaagtagaagatatgagaggaatgtatttgtgaaaaaagatattttgttatttgatttggatggtactattattgactcccaagatggtattttaaatgcagttcagcatacattgagccaatatggtataaaagaaagcaaaaagaatttatattgttatattgggccaccaattttggattctctgatccattttcatcatttttctttgaaagaagcacagttggcagtaccgatatatcgagaatattacgcacaacatggaatgaagcaaaatccactttttccaggtgtttgggatatgctgcaaatctttttgcaaaaaggtaaaaaattagctatcgctacttctaaaccagtcgaggtagctgttccgattttagaagatttaaaattaacgcctttttttcatttcattggcggcagctccttgtcaggagagcggccgcataaatcagatgtcattcgtcatgtcattgatcggttgccggtgcaggatctttcaaaagctgtcatgattggcgatcgctgttatgatattgcaggggcaaaagaagttggtatttcgtctgtcggtattttatatggatatggaagtagaaaggagctggaagaagcaggggccgatcaaattgcggaaacgccaatcgatttgatttctctaattgagtagctgaaaacatagtaataaaaaaaccaacacttttttagcgttggcttttttattatcgtatcatcttttgaaaaggttattttaacagatcttttaaatattggcctgtataagatttttcacattgcaccaattcttcaggcgttccggaaaagacaatctgtccgccgttatctccgccctctggccccaaatcaatcagataatcggctgttttgataacatctaaattgtgttcaataaacacaaccgtatttcccgcatcgaccagtgtttgcaatacttcaatcaatttgtgaacatctgctgtgtgtaatcctgttgtaggctcgtccagaatataaatcgttttgccggtgggcttgcggcagagttcagcagccaatttgactctttgtgcctcgccgccagatagagtggtggcaggttgtccgattttgatgtaaccgagcccaacatcatataacgtttgtaatttccgtttgattttaggaagactgtcaaagaaagccaacccttcttctactgtcatttccaaaacatcataaatgcttttgtctttgtacttgacttccaaagtttcccgattatatctttttcctttgcacacttcgcagggaacgaaaatatctggtaaaaaatgcatttcaattttgatgatcccgtcgccttcacaggcttcgcatctcccgcctttgacattgaaagaaaagcggctggaggtgtatccgcgcattttagcttgatttgtcgttgcaaaaagatttcgaatatccgtgaatacgccagtataagtggcaggattggaacgaggtgtcctaccgataggagactgatcaatttcaattactttgtccaactggtcaatccctaaaatatctttatgtttaccggcgcggattctcgcaccgtttaggtctgcggccaaacgcttatataatatttcgttgatgagagatgactttccagatccggaaacaccagttacgccggtaaaagttcccaaaggaatttttacggaaatattttttaggttgttttcggttgcccctacaatctcaatatactttccgttccctttccgccgtaaagccggaacctcaacttttttcttgcctgacaaatattggccggtgacagagtcttcacaggcgataatatcttctaaagtaccggcacaaaccacttctccaccgtggatgccggcgccaggaccgatatccacaatataatccgcagcacgcatcgtatcttcgtcatgctctacgacaattaatgtattgccgatgtcccgcaaacgttttaaagttgcaattaacttatgattgtccttttggtggagaccgatactgggctcatccagaatataaagaacccccatcaaagaagagccaatctgagttgccaaacggattcgttgactttcaccgccggaaagagtgctggcagatcgagcaagagtcagatactctaagccaacgctttgcaaaaagcctaaacgagcacggatttcttttaaaatttgcgctgaaatcattttttgccgttcggtcagctgcagtgtgttcaaaaagtccaaagcctgcacgattgacatacgacaaaaatcggagatatttttctccccgacagtgactgccagatattccggttttaatcggtggccatggcaatccggacattgttctgaactcattaaagaagcgatatcattgcgcacccagttgctgttggtagtacggaaacgacgctcgagattattgataattccttcaaaatcagtagtaaaagtgctgcctcggctgccggattcccgctggactgtaattttttctccattattcccataaaggacgatatcctgtatttcttcaggcagttgtccaaaaggagtgtctaagctaaaatgataatgatccgccaacgcttcaaaatagctttggaccagcccgccttccgcaaaataccatccgctggcacggattgcaccgccgcggatgcttcgatcccgatcggggatgaccagtgccggatctactttcataaaagttcccagtccagtgcatttttcgcaggctcccgcaggattgttaaaagaaaacatgcggggagataattcttcaatactgatgccgtggtcgggacaggcgtagttctgggaaaaaagcaattcttcgccgttctgaacatcaatcaggaccagaccgccggatactgacatcgcagattccagtgagtcggataaacgagaacggatatctgactttaagataaggcgatcaattacaatttcgatattgtgctttttatttttttccagcttgatttcttcagaaaggtcatatagaataccatcagctcggactcggacgaagccagagcgcttggcgttttcaaactcttttttgtgctccccctttcggccgcgcacaacaggagccaagatctggattcgggatccttccggcaatgccataatctgatctaccatttggtctaccgtctgctgttcaattacccggccacacacaggacaatgcggaataccgattctggcataaagtaaacgcaggtaatcataaatttcggtcactgtgccaacggtagagcgaggatttttggaagtggttttctggtcgatagagatagcgggggagagcccttcgatgctgtcaacatcaggtttttccatttgccctaaaaacatgcgcgcataggaggaaaggctttcaacataacggcgttgaccgtcagcgtaaatggtgtcaaaagccaaagaggacttaccggatccggaaagtccagtaaaaacaataaatttatcccggggaagttccaaatcaacattttttaaattgtgttccctggcgcctttgataacgattttatccaaagccattggatttccctccgttttatttttcgttttgcagttttttaattttatctctcaaataagccgcatgttcaaattccagtagcttggcggcatttttcatttcagcagtcagtttggcaatttgtgccttgcgttcggcaggagtcagacgtttaccggatttctttttgtcgtgatcttttgaagaaatttcaagaatatcgcgaactcctttacgaatcgtctgagggatgatgtggtgttcttcattatatgccatttgaatggaccggcgtcgctctgtttcccgaatggcccgctccatagacccagttaccgtatctgcatacataattaccttgccgtcagcatttcttgcagcgcggccgatggtttgtaccagagaggtttctgaacgcagaaatccttctttgtcagcatccaaaatggcaacaagggatacttctggaatatccaacccttctcgaagcaggttaatgccaaccagcacatcgaattcacctaagcgaagatcccggataatctccatccgctctatggtatctacgtcatagtgcatataacggactttaattcccatattttcaaaataagcggttaagtcttccgccattttctttgttaaggtagttaccagtacacgttcttttcgctctatgcgcaaatgaatttcggataacagatcatctatttgcccatctaccggccgaacggagatttccgggtctactaaccctgtggggcggatgacttgttcgacctgttgggcactatgctctttttcaaaagggccgggggttgcgctgacatagatggcctgattgattttgctgtaaaattcatcaaaattcaaaggacgattatcaatcgcggagggaaggcggaacccgaagtcgatcagattcttttttcgggcggcgtctcccgcgttcataccccgcacctgtggcaatgttacatgggattcgtctacaaacaaaagaaagtcttttggaaaataatccatcaacgtataggggctggaaccgggcgcacggcccgaaattacgcgggaatagttctcgattcctttgcagaagccgatctcctgcatcatttccatgtcataacgagtccgctcggcaatgcgctgcgcttcgatcagttttccttcctgctgaaaatattttatccgttcattacattcttcttcaatttcaatcaaagcagccttcattttttccggcggtgcaatgtaatgagaagcagggtaaatcgcaacatgggaaactacgtttttcagctctccagtcactgtattgatttcgctgatccgatcaatttcgtctccaaaaaattccacccggatggcagtgtcgcctgaataagaggggaaaatttccacaacatctccccgaacacgaaacttgtttcgaacaaaattgatatcgttgcgttcgtattgaagctgcaccagcttatgcagtaaatcgtccctttctttctgcataccctgccgcaaagaaataaccatatttcggtagtcaattgggtcacccaagctgtaaatacaggaaacactggaaacaataattacgtcgttacgctcagacaaagcagaagtagctgaatgtcggagcttttcaatttcttcgttaatggcactgtctttttcaatataggtatccgtactggcaatatatgcttccggctgatagtagtcataatagctcacaaagtattctaccgcgttatgggggaagaattctttaaattctgagcacaactgcgcagccagcgttttattatgcgccaaaataagcgtaggcttgttgatttgggcaataacattcgccattgtaaaggttttgcccgagccagttacaccaagcaaagtttgttcatgcatcccgctacggaggccttcgaccagcttatgaatggcagcaggctgatcgcctgttggctgatattctgatatcaactgaaatttttccactccgaaaacccctttctaagacatgaacgaatgttcttatacattataccctggttatttttttacgtcaatagtcaggaaaagatattttttgcgaaaaaggtcttctcatggaaatgagaagactttttcgtgttactgttttttctcttttttccaggaaaggtagtcgtcaaaagtcatagaccggtcgatcataccatcctctgtcaattcgatgatccgattggcgatagaatcgacaaattgatggtcatgagaggtgaacagaagattaccgccaaaatcgatcaatccattattcagagcagtaattgcttctaaatccagatgattggtcggttgatccagaatcagaacgttagagccttttaacatcatgcgggagagcatacaacgcactttttctccgccagaaagaaccttagcgggcttcaaagcgtcgtctccgctgaataacattctccctaaaaaaccacgaagataactgatgtcctgatctgcggaaaactgccctaaccagcggattaagtccagatcgcagtcttgaaaatagcgggtgttatcctgtggaaaataggattggctggtgctgacaccccatttgtaaaaaccttcatctggttctaactcaccagccagaatctgaaagagggtagtctttgcaatctcgttttccccaacaaaagccactttatctccgcggtttagccggaaagatacattttttaataccggaattccttcaatcgatttgcagagattttccacctgcaaaatttcctttcccacttcacggtccattttaaactgaacaaatgggtatcggcgagaggatgcaggcatttcttctactgacagtttttccagcagtttctttcgagaggtggcttgacgggatttagacttattggctgaaaaccgcgcaataaaattttgtagttcttttgccttttcctcgttctttttgttttgatcccgcaacatctgctgaattaggcggctagattcataccagaaatcatagtttccgacatataatttgattttattgtagtcgatgtccacgatatgggtacagacggtatttaaaaagtgacggtcatgagatacaacgataacggttccggga

SEQ ID NO: 2753 - DNA, 12487 bp, Unknown
  16S sequences of unknown bacteria
agataatgtttgttgtgtgcgcgctcaacatgatcggatattcagtgaactgcacaacgatatccggcattttctgctcaggcggagattcaaaattcggcttgtgctgcgattctgtcgtgatgtggtgcataacagtaccgctcggtctgatttccgcctttttgctgaagctgccggttgtttgggttttcctcatcgtaaatcttgatgagctgctgaagcttcccgcggtatatcggcactataaaaagtacaattgggtcaaggaccttaccgtaaaatagcgcgcgggaaacggcggtgtgtaattttgcaatattttcacctgaaaagggaagtgccgcttcaaaataaaaatacacccgaaaagtctcgagtgcattaatttagcccatattgaacttatttggattcggaaacgatgttctggatctttcttgcccagtccacgattgcctgacgttcttcgagtgtgattttcttgccgaatatgccgcactttatataatatgtatcgtcaattacatttgtgcctgcggttctgagaatttccttgagctgcttttcgcctgcggaatccttttcaccgtcaacaaacagcgcaacattctgagctcttgcgggaataagctcgctgcagaaacgtcttactttatcctcgggttcgcccttgagtgtaacgccgatgattacaagtctttctttgtcagctggatatgccggggggatatcgtttgtaagacatccgcaagcctgaccgatagcttcagcgtatgtagctacctttcctttttttgacgagtacattactctcattttcatagtaaaaatgcctccatttatatatgttccactattattatattataacacacaaagaggcgttattacgagttatttttgaaattttctgaattttgtggaattgaacaaaatattcgtcgaatattgggcaattgaaccaaaccaaaaaagcgcataatacagcataccgtattcgggataaatctgtgtatttattctattgtagtacaacgccaaaaatgttaaaataacggtaaacaaatacttataaagctggtgttcattatgaaaaaagaactcgctctaaactctaatctgaaaaagctcgtactggctgctatgtttgcggcactctcatgcgtggctacgatggtaatacagattccgtctcccatgagcggttatgtaaacctcggcgactgcttcgttcttcttggcggtattgtgctgggacccgtgtggggatttcttgccggcggtgtaggctcaatgcttgcggacgtcatctcaggctatgctcattacgcaccgggtacgttccttataaaaggtcttatggctcttgcggctgtgttgatatttaagtctctcacaaacaagctcccgagaagcgcgtcatatctcatcgcggcaacagcttccgaattcattatgatcgccggatatttcggatacgcatccatcttcctcggcaaaggtcttgctgcggcttccagtatccccggaaacatcatgcagggtatattcggcgtagtatcttcattcctgcttctgaaagtgctcgagagaacaaagctgaaggacagaatataatttatccgcctattgtaaatgatatattcaattatacaaaatgcaaattttgtataatacagggtagtgcgaaacggcacgaaaccgaaattcacaattagtttcttgaatttatccgcatatttcggctataatctgactgtacggcaaataagttgaataagctataagtgggagtaaatatgctgattgcgtttgatatcggaaattcttcggtttctgtgggagttttcaggctgagtcgagattcgcacgaattactgacgtcgttcaaaatctcaaacaaaccttattcagccgatgaatacgtaatgtttttgagagtttttctgcgcgagaacggattcaaaacttacgaaaaaaactgcacggatgaaaatatgataaactgcgcggtggtctcatcggtagttccggagcttacggatatcatttgtgcggcggcggcaaaactctgcggaagaaatccttttataatatccgaaggcaaaaaaacaggattcggcatcaagataaaaaatcccgaacagctcggctcggatattgtctgcaatgtcgcggcggctttacatttgtcgtcagctccgcttgtgatacttgatatgggtacggcgactactattacagttgtagacaaaaacggaaatgttctgggaacaataataactcccggacttgcggtttcaatgaaagctctttccgattcggctgcgttactcggcaacatacgtcttgagcgcgaaaatgtactgataggacgcgactctgaggaatcaataaattcgggcgtaataaacggcaacattttcatgatagacggattcatccgcaacatccgcgaacaaataattccgcgtgattctggtgaaaaattgtcgcttcttgcaacaggcggactttcggagagcattattccctacaccaaaaacaaattcacatattacaagaacctcactcttgagggcgcggcatatctttttgaaaagaatgttgcattaaattttgtataatacagctaaggctatattataaatattgtcgcaccttaccgttttttcatgtttgcagaaggaagcgacattaaataaggaggaaaatatgaattctaacaaccacgcaaaaactcaaaagatggtgcgcattgcccttctttccgcgctcgtaatcgttttacagctgttcttctctgccgtaaaggtaggacccgtaacgcttaactttgtccttgtgcctatagttatagcgtccgtgttcatcagccccacatcaggtcttatcgtaggaacgctcgccggaattaccacattcattcaggtgtttacctccgccgacccgttctacctcttcctcatgactaacaacccggttgcgactgcgctcatctgcattgttaaaaccgcggctgccggacttcttgcgggacttgtttacagactcatcagcaaggtcagcaagtacaagtcgctcaacatcattcttcccgccatcgtttgcccgcttgtcaataccggactcttctgcctcggtatgtatattttcttcggaaatgcgatgcttgcggactcaacatacgcttcactcatcggcggcaacctcatctactttatcatagtaggacttgcaggaatcaactttgttatcgaacttatcctgaacgtagttctctgccctctcctcggcaaagcgctgtattcaacgaagttcttcaaccaaagcaaataatcgcataaataaaacaacggatacgttttttgcttctcccatgcaggcggagcggctgacgtatccgtttttgttttattcaagttcgtatccgagctctttcatgtcgttttcaaagaagtcgaacatatgctcacccttgtcggtcttgtatcttccgactgaatccgggcgcatttcgattttagctatcggtattccaaggtagtccgatatgcgagcgagggtattgtcctggtcgaacaccatgtcttcaaattttatcgagaggtggttcttcggtgtcggaacggagcgcacgatctcacgctgatagagccagcttatagcgcggttcttgcgtatgtcgtccgtcttgtcgtaggttatgccgaacttgttaaggtcgtcagtgagatggcctgaaaggatgcagtcgcgcggatctcttacccagaaaatgtactttatgtcgggatacatacgcgctatccaaggataaacaagggtggtttcgggtattttccatcctttgtactcgctttttgactcaaaaacagtgtgaagatattcttcgatgagcaccttgaattcattcggaatcgggcaggtgtttaccgtcgagaaatcccatgtgttgtttccttcatatttaacatactgcgcgaacacacggcaggcatcatacattttctcgggcggaagaaggtcgccggatacattcagaggctctcccatgaatactccgcttgcggaaagagtatgcgatattgaacgggtaccggaatgaccgcgtcctattacagttataagcattgttttgctccttttggattcattttacggctttagtttatcatatccatcgggttatgtcaatacgacccattgctatttcttgccgaattccgtacaaaatgagttgttttggtgagagtggcttatctccgcaagacgtttgtatttttcctttgtcgcttccccgccgcgtatatgcctttctgctttgtttttattgaggatggctttcacgtcttttgacagcgcgggatcgtttctcgacaatctttcggttacgtctttatgtacggtagacttgcttattccgaattttgccgcggtttcacgcactgtcgcgccggtttccacaatatattcggcaagcataacgcatctttctttatattcaaaatcgggattcatacttccctccacaggataattcttattcaattatatgaatccgtcatttgaatatgcaaaaaaacgcagccgaattgctcagtccaaatagaacaatgcaaactcggctgcggatttttactgtttaattagttgaagaacgcgaatgtggtggttgtgtcgtacttttcactgggcttcagaacagtgttggtgaatccgggatggttgatggagtcgggcatagcctgtgtttcaaggcagactgcgcaatgtgtgtactgcttaacgccgttcttgaatgaagggtcgtttacgttgatcatgttgccggtgtaaacctgtacgcaaggctgatcggtgtaaagatcgagctttcttccgctctttgtatcctcaagagaaccacgtttgaagtacttgccgctctggtcagcgaacacgaagttgttgtcgtagccgccgaattccttcatcatcgggaagtcagtgccaaagccttcgccgaccttcttagcttttctgaagtcataaggagtgccttcaacgtcgatgagctttccgtcgggaatgagctcgttgtcaaggctgtttatcttgtcgcagtcaagctgaagaacaagatcgtctaccggacctgcgttgtagcctgcgaggttgaagtaggagtggtttgtaaggcttacgattgtagtcttgtcggtttctgcttcgtaatggatggagagcgcgccgtttttggaaagagtgtatgttaccttaacggtgagtgttccggggtagttttcttctccgtcggggcttgtgtatgtaaggatgagagaaggctcgctgtcggaatccgcttcaacaacattccaaatctttgcgttgaatccgtcttttccgccgtggagggagttgttgccgtcattcttgtaaagctcgtattccttgccttcaagagtgaacttagcgccgccgatacggttgccgatacgtcctatgagagcgccctgatatcctccggatgtgaggtagccttcaagattgtcaaaaccgcatactacgtccgcttcaacactgttcttgtccttgacccagatattcttgataattccgccgtagtttaaaacgcaagcggaggtaatagagccatttgagagcgtgtaagcgtaaacttcacagccacaaggaagcttaccgaataattctttcttaatcatttatgtttctcctgtgattagtcgtcgtagccgttgggattcatcttctgccatctccatgaatcctcgcacatttcctttatgccgttttcagccttccagccaagttccttttcggcaagagccgcgcttgagtagcaggtatcaatgtcgccgggacgtctgggcttgatggaatacggaattttaacgcctgtagcttcctcgaagttctttacgatatcgagaacgctgtagcctacgcctgtgccgaggttgtatgtcttcagaccgcagttttcggcgagctttttgatagcgcaaacatgacccttagcgaggtcgacaacatggatatagtcgcgcacgcccgtaccgtcatgtgtgttgtagtcattgccgaatactccgagctcggggcgcttgcctacagctacctgagtgatgtaaggcatgagattgttcggaattccgttcgggttttcgccgataagaccgctcttgtgcgctccgatggggttgaaataacggagaagcactacattccactcgttgtcagccttctggatgtcggtgagtatctgctcaagcatggattttgtccagccgtaggggtttgtgcagttacccttcgggcattcttcggtgatcggaatgaacgcgggcttgccgtatactgtagcggatgaagagaagataatgttcttgcatccgtgctttctcataacgtcaacgagagtgagcgtgccggtgatattgttgttgtagtattcccacggcttagctacggattcgcccactgctttaagacctgcgaaatggattacggagtcgattttctcgttctcgaagatgttttccatagcatcacggtcgagaatgtccgcgagatagaattttacgggcttgcctgtgattttttcaactctttcaagggatttgcggcttgagttgcaaaggttgtcgcaaactacgacgtcatatccggaattctgcagttcaacaactgtgtgagagccgatatatccagctccgccggtaacaagaatagccataattataccctttctgatatttctgttttaaaatataagccgagaaaaccgacgaaggtctttcggcttattgatattggcttgtgaagtgagattcagacttatttccagagaccgtccggatattcgccttctgcaatgagcttgttcagcttagcgataacatcgggcttgtcgtttgaatatgttacgccgaaccacttagcggaggttgtgagaaccttaacgtcgcacttgttttcgttgatcatcttgccgatggtgttgggaaggaggcattcgcccttcatcttatcggtgttcgggtcagcaacgaattcgtcaaagtccttagcgaggtattcaaatacggaaggaccgaatccccagaagttcattgaaacaacagtgtcgttgggaaggtgtacggtttcaccgttttcttcaaagtatgcgccgccgtcttccttgaagagctttgttctctcaacgattttatcgagcataccgttttcgtccttgtggcaaacgcctcttgctacgcttccgttatctgtgagagtattgccgaggaggtagcctaccatgcagtagtgatgagcgtctgtgtcggcgttcttgatgaactcggcagccttcatgaaagcgtcgcgtccgtagaagtcgtcggcattgataacagcgaagccttccttgagagcgtccttagcgcaaaggagagcctgtgttgttccccaaggcttaactctttcgggaaggagcttatctgcgggaacaaagctgtcgagcttctggaatacgtattcaacgtcaaccttcttctcgattctgtgaccaacggtttccttgaaggcttcgtagttttcttccttgataacgaatactaccttgttgaagcctgccttgatagcgtcatagatggaaaagtcaataataaattcgccgtgctttgtgaatgggtcgatctgcttgagtccgccgtaacgagatcccataccggcagctaaaatgaataaagtcatatttcctccaaaaatgtgatatttttaccaaactatattttataacatcgccccatttttttcaaggggttttatgataaaacctactgaattttttatattttttacgattgtattctatttattatttctttcattataaattatacgatgtcttgacagtgcggatgttttgtgctataattcagttgtctcatatgagacaaattttgcaggcggagagtataatatggatacgaataacaaagctcttctcgcgtcgctgtttttgtttgacggtctcgattttttcacccttgactcgggagagagtatctcatcgtgctgtcctgtgaagaattattcctctggggaaaaaataatgcttcacgacaatgcggacgaaaaatatattggtcttgtatctgcgggaaaagtcaggctcaccaccggatttaaatcaaaggaagtccttctcaaatacgcgggtgtaggcgaggctttcggtgcggcttccctcttcggctctttcgcttatcccaccgagtgcatagccgactgcgattgtgagcttattttaatcccgctctctcttgtcacaaggcttatcggagaaaacaccgtcatatcgctcaattatttgagatttctttcgtctaaaatatcgttcctgaatcgcgaaatagcggtgttcactgccggttctgcggaagacaagctcgctttatatctgtattctttaggcttggcggataatgtaatttctatcggttcgatgacctcccttgcgtatcagcttggaataagccgtgcttcgctctaccgtgctgtagaaaatctcgtttcggtcggagcggtaaaatacgacggaaaagcctttacaataatcgacagacaaaagctcacaggtgtttaaacagttaaaaattatcctaaaaggagataaaacaatatgaaaacactcaaaaaaatcatttccatggcaatagcggcgattatttcctgcaccgcgcttgtttcatgctcaggcggaagcgacaacgctaagcttgacagagacatcaaggtctacgcgctcaaaggacctacaggaatgggtatggcaaagctaatgtccgacagcgacgccggaacaacgaccaacaagtatgatttcacaatagcatccgctcccgatgaagttaccgctgagattatcaaaggcaactacgatatcgcggcacttcccacaaacctcgcgtcagtcctttataataaaaccgaaggaaaaatcagagttgcggctgtaaacactctcggcgttctttatgtcctcgaaaacggcgataccgtaaattccctcgaggatttgaacggcaaggagctttacgctacaggtcaaggctccacaccggaatatattctcagatatgtccttgaaacaaacggcattgactgcaacgtaacatacctcgctgaacactccgagcttgcggcacagatgatttctggcgacgtttccctcggtatgcttcccgttccgaacgccacaacagttctcgcacagtctgatgcaagaaccgctatagatctcactgccgaatgggaaaaagctgccgaaaagaacggtgactccagcgcgctttacatgggctgcgttatcgtaaatcccgattttatcgaagaatctcccgaagctgttgacgctttcctcgaagaatatgccgcatcggttaagtatgtcaacgaaaatattgacgacgcgtccgctatgatagaatcttacggcatagttccgaaggctgctatcgcaaagaaggctattcccgacgctcacatggtatgcattaccggcgacgaaatgaagacaggtctttccggattctacaatgttctgttcggatttgatcctaagtctgtcggcggctctgttcctgcggacgatatctactacatcaaaaagtaattcttgatgcaaaaaatccgaagaattgccgaggttatactttccgcggcgttttggctcgtagtttgggcagctctctcatatgctgtcggtaaagagatacttctgccatccccggtgagagtatttgccagactttttgagcttatgggaacgggagagtactacggaagcgtgtttttctcccttgccagaatcagcttggggttcatcataggaactcttgcggggtgcctgcttgcgtatttctcatttgcttcaaaaacggttgagattctcgtgtcccctatgctgaccgtcgtaaagtccacacctgtcgcgtctttcataatactcgcgcttgtttggatgggaaaagagcgtgtgccggtgtttacgtcagttctcatggtgctccctgtcgtctattcgagtacgctgagtggatttcgttccactgacaaaaatcttgcggaggtcgcgtgtgtctacggcttcggctacttcaaaaagcttagacttttgcttattccctctgcgcttccctcctttgtttcgggggctaagacagctctcggacttgcgtggaaggcaggaatcgccgcggaggttctgtgttcgctcaaaaactcgatcggcggaaaggtctatcagtcgaagctgtatcttgagtcggtcgaccttatggcatggacgcttacggtgattatcatcagtatcattcttgaagcggtaatatcgcactcgctgaaaaggatagtcaagagatttaccgtgacggatgtcggaggggacgagaaatgacgcttgaagtgaaaaacctgaaaaaatcctttgacgccaaagacgtgctgtgcggagtggatttagagctttcagacgggatatatcttctgacaggcgcttcgggctgcggaaaaaccacgcttcttcgtattctcggcggacttgagacagcggacagcggagatttcactaaactgaccgtatcgtttatgtttcaggaaaacagactgttcccttggctgaatatcacagaaaacataactgagactgcaaactgctcacgtgagacggctttagctctgcttgattcacttggacttggcgggaacgaaaagaaatatccgcatgagctatcgggtggaatgcagcggagagtgtctcttgcacggactcttgcgcgtgaagctcagctgtatctctttgacgagcctctcgccggacttgacccggaatcacagaagacagcctgcaatgtgataaaaaacagcattccgacgacctcagctgcaataatcgtaagccacgagacagcggagccgcagaagatagctaaacagataatcaggcttgacaaaggaaaaatcgtataataaaatcaggtgaactaccatttcggcggctcacctgacttttttattcggttgttctgttttggcagccgcactttttatcgcttctgtcaggcatatctgtcggagcaaagccggagcttgaaaattccgcggtcgggaacgacatttgtctgaacaggctgcaagggtcttctacaggaggagcggcgcattctttttcgggaacggagtattcaacggcactcacgagatactgagccggtctttcgattcttacaaccgagaagaatccgagtgaaacaagaagtatgtttgagtcacgagggtctacaaggtcgccggacagccgtttgcacacgcattccggaatttcatctatagtgcagggacagcatctgcaaggcttgtgcggctcaacgatgttggtgttcaatatgatggggtcgactgtctcaagcactgctatcggaagcgagcttacaggcttggagcagttggagcatgagcagaatccgtcgcttcgtatttcgcttttgaacacgttgacgtttccttctccgccgaaaagaattaccttcttctcaacgatagccacgccttcaaactcttgagaattacccggaccgaggcaggcttcaaactgtatttttacaaaaatctttatgaagagttgataaaagccgcgattgaagggaacgttgtcgatatctatgcatgaccataccacattggcgttttttgcgcgcacaacgcaggttcggtcaattatgtcctgtccggcgcaggttatatagacccgtacatcctcgaagcagtctttatcacggcaggaatcaaggactctgtatgtgtcaatgcagaccatgtcgcggtctcttgaacactgccctcccgtgtttctgaattcagccatttaattatccatgcctttcgtttattatttgatgaccggaagagtttcctcttcataagcattgtatgccgcgcatggataaaatgacaaaaagccgaatgcgtatccgtgcgaaataatccgcttggtacactcggcttttttaagttatttgattgttaacttagtcaacgtacttcttaacagtatcggaagcttcttcaagagctaaagaagaagtgataacgcagtttacaccgtatttgtttacgacagcgtcaacttccttgaggaatgtatcaaagctgtctgcgttgttctgacaaatcttaagagcggagtcaacaaatatatcggtcacgtcatgattgcttgcaaggattccggagatgaaaccgaacagtgactgaccgtctgtgataagatagtcgtcagtgtcgataagtctgcaatgataattgatgtcgaacttgagcttgtcgcccttttcgatgcagactacggaacctttggttacagcaagcgcactgtttaccatttcaatgagagccttggttttgcctgagcctttgttgccgatgattaacttga

SEQ ID NO: 2754 - DNA, 12733 bp, Unknown
  16S sequences of unknown bacteria
gcatatgaaacagtcaccgttaacaataaaaccgatgagtacctgaaagataagaggaatcggaagatatttaacaatgcataccgcacatatcgagccgataatcatcataaaaaacagttgtgctttattgactctccaaggttgtctctcaacagcccatactcccagtaccactgaaattccttccggaaacataaattcatgtaagcctgtcaaatgactgagcaatatcatgataaacccaaacacaacaacagaaccgtatcgaattattttatggcagaaacaatgtttcgaataatgcatcttatgctctcctttccttttatgaatactttgcattgtacacgattgcatttggaagtacaattgcattttagaaagaaagcataagtttgtgtctttggtatgttttcagcatttcttttgtctgcagtttgctaaattgtatataaattgtataaaagaaatttatattcttataaaatagattgatacaatctcaaaataaaacagctgcccaattggcagctgttttatttttaatgatttactttcataaaatccggaaaaaaagcatcaggattttgtttgaattgttctacaatatccatttcgtttttttcaggcattttttgttgatgtggtttcatttgcatccatacaggcattggattatcttctgcattggtgcaatggtaaaccttcatttctaccacaataatcgcctcccaccattattatattcaaaagataagaaaacgacagtggcgatttttttgtgaatatcatgcatcttatagaataggggcatcgtttttctttgccaatccttctacatatctcagcatctcttcatctgattgaagttgctgtgcgcgatgtatcatttctttttgttcctgttcacttttgctcataaaataatctttagcacgaacattttgtgccagtgcataaccaaatcccaacggaaggtcgaacatatgctatcacctcatttttagtatcaacttttgaagcaaaaatatacaagttcatgcaattttttcttgaagaacaggaaaaagtatgctacattaaacatataaattcgttgaaaagggtgatgctatatggtagatccaaaacaaaaaccaaaagaaaaagaattgacggaagaagaaaaaatggatttggttgaacaaaatttagcagacttagacgattacatggaagaaaacggcgtatatttaagacaataaaaaacagcgtatcccaaatttaaggggatacgctgttttttatttttccataccgcgtttgagcagattgattttaattaaaaacatattgcaggcttcctcaaacggaatatttgctcccaatgcttttgcaatattactgagtgttaaggtagttaaaatttccaatatgtattgaaattcttgttcgttttggatatttagtttatcaaagtgagcagtttgttttaagtcatttattaaggaagccatgtactctttatccacttcatgcttgcgaacggggagaaaagcatgaataccggaacgcatatttaaaaaggaattggttaaaaagtggtctaaatttgcttgttggcattgttttaatatttcattatggaataaaataaatgcatcaaaaatatggttattttctcgttctaaacaagaataaaagagactgcgaatttgtgtacggtattcttccagtatataatgatataaatcttctttgtcatgaaaataggcataaaaactgcctcttgggatttctgcttcggtcacaatatttttgactgaggcttcttccacagaattctttccaaattcatgtttggctgcgtttaatattttggtttgcttttctttaggtaagtttaaaaaggttgcagtcggcattttctcacacctttcatcatttatgcattcattgcttggtttatttgtgtttctacaattaattcggattcttgaattccttttaataaatcatacaagttaagaataatggagatttgagttttatcttgctctgcgtgtactacttcagacaatccttttgtattatcgtgcagtacgtgataagcataatttacttgttgcattgtcaatttatgtgctgccaagctgtcatataagaagtaaacgcgttctgtccattcttggtctgacagcaaatattgcgccatttcatcagattttacatactgttgattaaatttaatttttctgttgattgctcttttttgttttaatgcttgcaacagttcttctgcagttgtattaggattggaaatgcatgacaaaatagtttgattcaatgcgactgatttattcagttgtttttttacactttcgtttacatggcgggggaagaacagagaatcaattaggacaatcagaatacaagccgcacatacataagccagtctgacaaaagcgtactctgttcctgtaagcgtggtggacgacgccatagaacccattgctacagcaacaataccggtaataacaacattgaagttaaatttaagaaatatatcaccgactatgatggttactacgaggattaggatattcaaccatatgatatcggtaaatgaaaatgctagcagataaatgaccaccatatataatgtattcagcattctgctgccagcggctttgcgagttaatttggtatatggttgtgtcacaacgactacagataatgggaataaatatgcttttggtagatttagcaattctgtgacaagcataccggctgcacaaataagcgatacttttaacgcataaatcacattgtttatattcatacggctttttaaagtatcccagaaagatgcagctggctttatttgctctgcatcgtcgatgtgcttcttttcaaatagttgaatgtctgtttccaattcataagtcagtgcagtagaatgcatttgttttgaacattcgtaaatagcggcttccactacttgttgctctacttgtttttctccatattgcacaatggtatgaattaagttagtaagggatgttagcgtatcgggagaaaagttttcttgattatgttcggaagaacaatatgtttctcttacaaatcgattgatacgtttaaagagtaaaacgccttttaaataattgtttccttcatcccatttttgaacaaaatggctcattttagcatcaagtgctccctgcaaagctgtaagtttagcagcggtctgtttattttgctctaaaattacttgtttgtcttctttattttcaatggaatgtacctgcttttccatcatagggattaattcttccatctgctttttaatattctttttgaatttattgcggtgaaccaatagctgtaagcccagcattataatggttgcaatggctacaatagcaaaacgaatgccaagatcaacgccataaacagggaagtaaagcatcataataaagttcaataaaaacggcatataaatgctcattttatcatcataagtaaaaatataaatgataagaaaaaatactgcaaatgacaccggaattttagtagccaaatttaaactggctgcataagcaagtgcaactaaagacatttgaacaataaaaaagaataacgagttctttttaaaatgcagcgtatagtcattttttgttactaataatataggcataatgctcatacctactatcatcgcattgttcatgccaaccaaaggcataaaggcaaacataacggcaaacataatcaccatcattaacactgaggtaatcagttcttttctgattggaattttaaattttttcttttctttcttttccatcaaaataccctctctttctgttttgttttatatataactatatttcagtgatgacattgtgtcataattatatatgacatcgtgtcattttgtcaagtggagaaaatagttattcacaaattattcacttttaaaaaatttgtttgtacaaaaataagttttcaacaataattttagcctgtttttaaaagatttgtacaaaaattcttttggcagggaaatactattgtaaatctacccgatttgtaataaaattaacaatgattgattaattaaaacttcaaccaataaagatattgtttgttgctataaatcctgaaaaggctataaatgcacaaatcgaatcagaaggagaatgtttttttatgaaaaaatttaaaagagttttggtggcaaaccgtggcgaaattgccattcgtgtgttccgtgcatgtaaagaacttggcattagaactgttgctatttattccgcagaggataaagaagcgcttttccgtaccatggcggatgagtcttatcaagtaggagcaggtaaatctccgattgatgcatatcttggcattgccgaaattattgaattggcaattgcaaagggtgtagatgcaattcacccgggttacggtttcttggcagaaaacgagcagtttgcatatgaatgtgagaaagcaggtattgaatttatcggtcctgaccacatcatgatgaatcaaatgggcgacaagattaaatctaaactggtagctcattctgttggcgtacctactattccgggtgttgaagaagccattcaaagtgaggaagatgcaaaacgatttgcggattcctgcggttatcctgttatgttgaaagctgctgcaggcggcggtggccgtggtatgcgtattgtgcataagcctgaagatttgattgcagaatttaacagtgcaacaaacgaagcaaaaaaagcattcggcaatggcgatatctttattgaaaaatatttagagtgcccaaaacatattgaaattcaggtaatgggcgataaatatggcaatattgttcatttatatgaacgtgattgttctattcaaagacgtcaccaaaaagtaattgaattcactcctgccattgcattgacagaggaacagcgtactgcaatttgcaacgatgcaattaaacttgcaaaggctgttaattatcgtaatgcaggtacgcttgaatttttagtagacaagcacggcaaccattactttatcgaaatgaacccaagaattcaggttgagcataccattaccgaaatgacaaccggcattgacttggttcaaactcaaattttggtggcagaaggctatcgtttggattctcctgaaattaacattaaatctcaggatgatatcaaaccacaaggctatgcaatccaatgccgtattactacagaagaccctgcaaataactttgcacctgatacaggtaaaattgcagtatatcatacaagttccggttttggcgttcgtttagacggcggtaacggatttgcaggtgcaaccattacaccttactacgacagcttgttggtaaaagcaattacccatgcaagaacatttgaagatacgattgataaaatgattcgcgtacttcaagaaacaaaaattacaggcgtaaaaacaaacatttccttcatcttgaacgttttaaatcacaaagatttccgtgaaggtaaatgcgataccagctttattgcagaacatccggaattgttaacttttgctccaaaaggaaataaagaacaaaaacttctgaacttcctgggtaataaagtagtaaacgaatatactccaaaaccgaaattcaatgttccgattgttcctaagattgaagtacctgaaaatttggaaggtaccaaacaaattttggataaacacggtcctgaatatctgtctaaatgggtatatgaccaaaaagctttgctgtttacagagacctctatgcgtgacgcacaacaatctttgattgcaacacgtgtaagaactgtagatatggaaagaattgctcctgcagtatctgtcttggcaaaagatttgttctctatggaaatgtggggcggcgctacctttgacgttgcttacagattcttaaaagaagacccatgggagcgtttggcaactttgcgtgaaaaaatgcctaacattttaacacaaatgttgttccgtggcgccaatgcggttggttataaaaactatcctgataatgtaattcgtaactttatttctgttgctgctgatgcaggcattgacgtattccgtgtattcgactcactaaactggttacaaggcatggaagtagctttggatgaagttctcaaacaaggtaaagttgcagaggcatgtatgtgttatacaggcgacattttggatgaaagccgtacaaaatacagcttgcaatattacattaatatggcaaaagagcttgaaaaacgcggtgcacatatcattgcaattaaagatatgtccggcttgctcaaaccggcagctgcatataagctgattaaagaattgaagaacaatgttggtcttccaatccatctgcatacacatgatacaagcggtaatggtgtagcttctctgttaatggctgcacaggctggtgttgatattgtagatacagcagtaaacagcatggcaggtttaaccagccaaccggcattaagctctgtagttgctgcaattcaaagaacagagagagaatccagcattaatttggatgacatccaaaaaatctccaattactgggaagatgttcgtcctgtttacggccaatttgaatccggtttaaaagcaggtacaactgagatttacaaatacgaaattcctggcggtcaatattccaacctgaaaccacaagtggaaagctttggtttgggacaacaatttgaagatgtaaaagcaatgtacaaaactgtaaatgacatgttgggtgacattgttaaagttactccgtcttccaaagctgttggtgatatggctatcttcatggtgcaaaatgatttgacaccggaaaatatttacgaaaaagcaaaagatattgacttcccggattctattgttgcttattttgaaggtatgatgggacaaccggagggcggattccctgaaaaacttcaaaaattggttctaaaagataaacaaccaatcacatgccgtccgggtgaattattacctgatgaagactttgataaaatcaaggcttaccttcgtgagacttatggtatagaaggaaatgaccaagaagctttaagctatgctttatatccaaaagtatttgaagattaccaaaaaggtctcaaaaaagaaggcaacttccgctttatgggcagcgatactttcttctacggtctgcgtgtaggcgaaaccagcgatatcaaaattgctgaaggtaaaattttgactgtaaaactaatcgaagtcaaagagttggatgaagaaggcttccgtgaagtggtattcgaagtaaacggaaatcgccgcactgtttctattaaagatcagggagcaaaagcacaagctgcagctgcatctgttgtaatggctgatcctgataatgaaaaagaaatcggagcaaatattcctggtaccatcttaaaagtgcttgtaaaagaaggcgaaaaagtggaagcaaaccaaccaatcgctgttattgaagccatgaaaatggaaacaaatattctagcacctgtaagtggtgagattgataaaatttatgtaaatgatgctcaacaagtaaaatccggagaattaattgcaactctaaaataattacctaacggttttataaaaactgattgtcaatttgtttgacaatcagttttttatatttgaatttgttatacattacaaataatttgtttttctaaaatactttcttacttaattttatagaaaaatccgctcggataggttataacgtctatttttattatgatgtcataacagcaataagattatggattgctatatgaatgtcatcgtttttatttactgtacaatggtttttatgcttgcaataaaagtaaagttatagttattgacaagaacgttttagtgattgtcagttaaaaattataaaacgattttttatactatagcaaccttccgatagcaacaaaatagatacagaaaggagcaatttgttatttttagaatcctgactgttaatatgaacatgataacaattaatttttgttgaaaattgctttatatttccttttatgatataatatagacagattgaaattatatttttagtaaattagtagaaaagtaaggttatgttatgttacaaacaataaagcaaagagtattaaatgcgattcctccaactgtactatttttagtattgtttttttccattttatatatttgcggcttacaagacgcgttaattgccacctttttaacattggaatttatgcgcttaaaaacagatgagtttgtcgaaagcactatgataaaatccactgtgctttatattattattgcagtatttgcctatcttgcaggtttaaatgtatatctatgtgccgttttcaattttgtaacgccttttatgattatttatctttttttagatgaattcgacccgaccaatcagataccatatacattggcgttggcattttttcaattaattccaacagatttacgaggattacctatacgtattggtgcgattgtaggtgcttgtattgtcacttatattgctgttattcttaccagattggcgacgaaaaaacagccgaataaaaatattcagatattaaccgtacaaggtttacaagaaatggtttgtcaattagatgcagtgatacaaaaggattttgaccgtgtgaaacagcatcaagataaattgtttgaaattaaccgttctctcagtcattctatttatggtgccaatgacaatttagttttaaatggcagcagtggtcaatcatattttccttttatcatagtatttcagcatatgaatcatttgatgggagacatctgtgataagccaaaagtgctgacacaagatactattttatatttggaaaaattaagagatgtattgaatcaagcacaaaaactggcagcaaaaaatcaaatgaaacaggcatctcttaaattaattgagttctcaggagaaattgaaattgatcaaattgatatcaactataatattgtttatatcttgaattatttatctacggcatttatggaaatatccaataagagaaagggattttcttttaaaaatatccaatttaagtctcatatttggtatcaaataaaagcaaactttaatatccattcgtttaaaatgcgctttgcattgcggttaagtattgcagtatgtcctgtggcgactctgatgtactactttaatttaccccatggattctggatgccaatgacaattttggttctgattttgccatattgggaaaataccctgcgtaaaatagcagacagggtaataggtacactattgggcattgcggtatttgctattttatattatttgttcccaagtcctttggaacaaatgattattatggttattgtaaatttcttaatttatacgaccaaacgatatgcgtttacggctatctttttaacttgttcttcatttgcaataaatgtagcaatggataatgcagatcatttattttcactgcgatttatttacacaataggagctgcaattatagcgattgtagccagctactgtatttttccaaccaataatgaggcagaattaaaaaacatgatgcggcgtttattggatatggatgactttttattggacactttgttacagttatcaaaaggaaaccaaaagcaatctatcaaacaagagttggtactgacatcttatctggttagcggtaaaattgaaaatcattgtattatgtcaaaatccagtaaaaataaggtatatgtaaaacgttttattatgctcaacaataaatttgttacggatattgcacatatctacactttgatgtccatgcagcagaaagagcgtattgacccggaagcgttaacctctttgattatggatttgaaagcaaccattaaatccatgaaagatatgctttcccataaaaaggtagtggttagtcatccaaaattggattacaatcaagtttatgatgatgtgtacgtaaacggtaaaatgatacgcagtgctgattgtttataccgcatgtatgactgtgttcagacgcacttattgaattagaaagtaaactttcaacagcagaaaaacaaatatagataggaacatctttccatgttcaaagttttggctgttaacaagaacgttttaacgttttatcgttggaaattgcacagcaatttcttttatgttataataaacacaagaaaaatgatgaaggagagattttctatgctagatgaaaaattagttgagttattgaatgaccaagtaaataaagaattttattccgcttatttgtatttatcaatggcgaattattacaatgaagaaggtttaagcggttttggaaattggtttaccattcaggcgcaagaagaacgtgaccatgctatgctgttcttagaatatctgcaaaataatggtgctcatgttgaattaaaaacagtagaagcacctaagaaacagtttaaagaatttaaagatccgctgaatgaaagcttaaagcatgaaagatatgtgaccgcttccatacataatatttatgcagccgcaagtaacgtaaaagatttccgcaccatgcagtttttagattggtttgtaaaagagcagggtgaggaagagaaaaccgcagaagatttaattaaaaaattagaattgtttggtcaagatggaaaaggtttatatatgttagacagcgaattggcatccagaacttactctgcaccaacattaacactgtaataaacaagcaccgtgttgcggtgcttgtttatttttactctaaatgaccgtattttatcatatgagaaaaattgttcaattagtgattgttcccagtacatgttgtatgctactatgattcagtcaaataatgaagcattatggaatgattgagtattacaaacatatatccagtatattttgttgcaagtattctttacactatacaaaacgtgtttatatgtcgtatagatgaattgaataacggaaaaaaggaattttgtaatgaccattctgctgatttgttttattaatttgtatataccaatatagtttatccggagagctgtattgttatagagttaaaatgagggggaatcactatgaagaaaacttcaaaaattgcagctttgtttgtggccgcagctcttactgtggcattagcaaccggttgcagccagcagcaaaacgaacaatcatccggtagtaatcagtctgcttcttcggcagctgttgatagcctgaccattgctattagcgcagatgaaaatacattgacaccatttacctatgtacatggttcgcccggatttgatgcgatgagtctaatttatgacacgttgtttgtacgcacaccggataataccatcattccgtggatggtaaaagaatacagtgtcgaaaatgatagtaaagtgtatcatattacattggaagacggattaaaatggcatgatggacaaccgttaacagccgaagatgttaaatttacgtttgagtatgttttgacccagtcaagaacacgttttagtgccattggcaaaaaggtagagaatattgaagtaaaaaatgataaagagttcaccattacattaaaggaaacagatgttaattttatcaataactctttgacagatttaagaattataccaaaacatatttatgaaaatgaagcagacgctacagctgtaaccagttctgttggcagcggtatgtacaaattggttgagtataaatcaggtgagtattataagctggaagctatggaagactactttaaaggttctccaaaagtgaaaaatttaaatttaccaattatgacggataagtcttccattcagcaaggtattatttcaggtcaattggcaggaagcaccacatctgtcagtgctgccgtattagatacctttaataatgcttccggaattgatattttaaaggccgatggttatgctcctacaatgctgtattttaactgcgagcgtgagccatttaataatgcaaaattcagacaagcaattagtttaggtattgatatggataccattattcaacaagtggcactgggacatgctacaaaaggaactcctaactttatcagagaagatttggaagaggcagaaaagggactgtcttatgagtataatgtagagaaagcaaatcaaatattggatgaacttggctatcatcagaaaaatagtgaaggaattcgtttggacgcaagcggttcaccgttacatttttcactgttgacttattctgacagtacgaatcgcgttcgtgcagctgagttgattagcaaacaattaaaagacataggaattgatgttgaagtgacttctatggaatctactgctgttgacgataaagtttggccggaatttgatgtatccaaaggcagagattttgatatgacaatgtggggatggtccgcaccggttatgttaaatggcggttccttggcagcgctttgttcatctgattacgcaataggaaatgataatatcggcggctataaaaatgatgaatttgataaattggtatccaattatcaatccgccacaacaattgaagaagcaaatgaagcttcaaaagaaatgcagaaatttattgcaaatgagtatccattcattacactgtattatgacgataatttgtatgcatgtaatacaagcatgtatgatggttgggtagcttccaaaa

SEQ ID NO: 2755 - DNA, 13961 bp, Unknown
  16S sequences of unknown bacteria
ctttaaaaaaattcttcaacaccagcggccagctctatcagaaaatggggctgaaggacaagctgggtgaaatggatgaaaaagcccaatacgatctgctggcccaggatggcatgctggtcaagcggcccatcctgcttttggacgacggccgggtccttctgggattcaaagaaggggaatgggccgccgctttggaagggtaacaggctatgggctgtttaggcaatctgctgtggctctgtctgggcggctggtcgctgggcctttcctggctgctggccggcgtgctatggtgtatcaccattgtgggtatccccatcggcctgcaatgctttaaattcgctgggctggccctgttcccctttggcaaggaagtggtctacggaggcggcgccgtgtcctttttgtgcaatctggtgtggctcatcgtcagcggcctgcccttggccttggtatctgcgggaaccgggctgctttactgcatcaccattatcggcattcccttcgggattcagtgcttcaagctggcccagctggctttgatgcccttcggggcccgggtggaataaggaggggccatgcgtctgtttatcgccctgccggtgacaaggcgttgccgggagcagatctgggggctttcccagcggctgcaaaaatgggacccccaggcccgatgggaaagaccggaaaagctccatctgactttggcctttctgggagagcagcccgatgaaaaggccgcccacgaggccctttccagggtggaaggccgagaatttgctctcaccttttcccacctgggacgatttcccggggaaaaaggagatgtgatctttctccgcccgcagcaaagtcctcccctcatggagctgcaaaaacagctggcccatgagctggagcaagaaggcatctttttggaaaagcggccctttactcctcacatcactctggcccggcgagggaaaaaggaaacagcctgggagcgccttcccctgtctcccttggttctccctgtgcggacgatttctctcatggaatccatcccatcccctggcggcaccagctaccgcaccctgcatcagattcatctggaagaaatgcataccaatcgaaaggagcgatccatatgaaagtattcatcagcgccgacatcgaaggcgtagccaccaccctttcccacgaggattgccgccctggcaatcccaactatccctaccactgcgacgaaatgacaaaggaagtgctggcagcctgtgaaggggccatggaggcgggagccgacgagatcgtcatcaaagacgcccacggcccagcctgcaacatcgacagcaaagtcctgccgccctgcgcccagatcatcaaaggctggtcggggcatcccttcctgatggtggaggggctggacaagagctttgacgccgccttgttcgtgggctatcatggcgccgcttcccgggagggcaatcccatgtcccacaccgtcagcggacgggcggcctacatcaagctcaacggccggatttgcagcgaatttatgatgttcagcctgtgcgccgccagcctgggtgtgcccaccgtctatctttccggagatcagcagctgtgtgaggattcccagaatctgcacccctgcctggtgaccacggcagtcaaggaaggtacaggcggtgcgctgcgctgcctggcccctcagaaggcccagcagctgatccgggccgatgtgaagcgggccctctcccagcctttccaagggaaagtccccgctctgccccagcattttactgtagaagtgtgctacaaagatcataatctggcggccaaaaacgccttttaccccggcgcacatcgtttggatgactgcaccatctcctttgaaaccgatgattattttgaagtgatgcgcttcttccggtttgttctctaaatccctggcctgaaaggagtcctggttcatggacaaaatacaacagttgcagcagtttgtggacgaaagcagttacatcgtcttttttggcggcgccggcgtctccaccgaaagcggcatccccgattttcgcagcaccgacgggctctatcatatgaaataccactatcctccggagcagatcatcagccgcagcttttttgaaaaggacccggaggaattttaccggttttaccgggataagatgctctggccggaggcccagcccaacccggcccacgaaaagctggcccagctggaacaggagggaaagctgaaagcggtgatcacccagaacatcgacggactgcatcagatggcaggcagccgccgggtgctggagctccacggcacggtacaccggaattactgccagaaatgcggcagactcttcggcatgagcgacatcctgcgcagcgaaggcgtgccccactgtccctgcggcggcgttatcaaacccgatgtggtgctctatgaagagagcctggatacccgcatcctcacccaggcggtggaggagatcgcccgggccgatctgctgatcgtggccggtacctctctggtggtctatcctgccgcagggctgctggactatttcaatggccgtcacctggtgctcatcaaccgcaccgaaaccggccgggagggaagagccagcctgtttatccaggacagtgtgggaaaagttttttcccgcctgcgctgaagccgcttttttagcagaaatcgcccttgacaaccggagaaaaatggtttaatcttgtaagaaaccaatccaaatgcattgactgggggaaaagaagcccgcctggcctgcagagagctgtcggatggtgcaagacagcggcagaaggcttttctaactgacccacgagcagcaagtccaacggcattttgcccagtaagcgcgccggaagcccaccgttatgagggcacggggtgatggccccgaccgagtgggccctttggccaacaagagtggtaccgcgggattgcaccgaattccgtctcttgcgtttttgcaggagacggttttttattggtttgcctcgcctgccagttttcatcgaaagaggagaaggaaaaatggatctgatcaaaaaaacccgggacgaaaattgggaagaagaagactggtgcaaagaccgctggatgctccagggctatgtggtcaattccggctcccacatttcggcaaccgccaatgtgagcctgtgttacaatggagatggaatggagacggtggcctttggcatcggccccattgaggcggccttccacgccatcgaaaacatcgtacagaccggcgcccagctggtcagttacagcatccgctctatgagccggggcatggacgcccagggtcaggtggaggtgcagctggagcatggcggaaacaccatcaccggcgtgggactgagcaccgacatcatcgaagccagcatcaaggcctatctggacggcgtcaatcagattctggcaaagtaaccaaagcgggaggcaagcctcccgcttttttgtagggcccgtgccttgtacccagccccaaatgggggtacaatgggaaaagactgcctcggaaatgagaggcaatagggggaggacacaatggaaaaagggagaaaaaagaaaccgcttcccaccaggcggaccatgatcgtggcctttgtgctgacggcgctgtttgccgccatggccatgcctcctctggcggtgcatttcagcgaaaagcggggaagcatccaggtggagggcacggtggtggacatggaacgcagccgctctctgcgccagaacaaaaacggaggatattacaactcctacgaccagttcccggtatatgaattcacttatggcggggaagagctgcgcctgaccggcgacgcccggggcgatgtggagatcggtgaaacccgctccctgtattactggccggaaaccggtctggtcattgccaagggagacgcccggcgccttgttctgtcggcggtaatggggctggccgcctgctgcgcctttgtcaccggcacccgggcggcctggctgcggcgggatatggaggaaaacaaacccagcaaagccaaaggacggattttccggattctcatcctcaccggcgtggtgtgcatcgtctttgtcattttgctggtgaccaccgagcttcgctatatctggaccggcgtgcaggtgcgggcccaggtccaataccccgacggggacggccggggagccagcgtcaccttccagtggaaagacaaggaaaaaggggtccatgccgtgacctcgcccttctctctgctgcctaaaagctactaccgtggcgacaaattgatcatctactataacaccggctggcagcagggacacattccggccaaccggggccttgtgtggaccggcgctttgggtggaagcgctgcggggatcatcaccctgtcctggggcgtttggggactgacccggcaaaaacggcggcagaaaagctgagtgtccagcggctgaacccccacatttttctttgccctcatgggttgtttcagcccagaaaaccattgtcctgcgtgatgcggattttcacgaaaaaaggcggccttgcggccgcctttttttcgcattataataaaaaatataaaatcatccaaaggaaagaggggaaccgccatgaaccagactctgatcatcggaaagaaagacgcagaagaacttctcaccatggaagcctgcatccgcgccatggaagaaacattccgggacatttccgctggaaaaaccaccatgcttcagcggagcatgatgccccagaaaaaggggaacacatttgccctcatggcatcggacaaccagcagcaggaaatctgcggcgtcaagaccattgtctttcccggctctgaggccaagaaaaacggcaccagccagggaatcatccccttgtttgacagcgccaccggcgctcttctggccattgtggatgccgagcacatcactgcactgcgcaccgccgccgccagcgctgcggccacccgtgtgctggcccgggaggacagctgcaccctgggattgctgggcgccgggcgcattggccggatgcacattgccgccatatcccaggtgcgccccatccgccgtgtctttgtgtggaaccgcactcccgccggcggagaagcctgctgcaagtgggtaaaagagcagctggaactggaagctgtcctgtgcgaaacaccccgtgaggccacggagcaggcggatattctctgcaccgtcacccaggccaaagagccgctggtggagggagaatggatcaaagaaggagctcatatcaacgctgtgggcgcttgcgcccccacggcccgtgaggtggacagccgcaccgtctgccgctcggccatctacctggatcagcgtcaggccgctttgcgggacggcggagatctggtgattcctctggaaaaaggggagctttccatggacaacatccggggcgaagtgggccaggtgcttctgggcaccgtgcccggccggcaaagcccagaagagatcacctttttcgaatcggtgggcatcgctgtggaagacctgtccgccgcccatcttctttaccagctggccctggaaaaaggccggggaacgatggtggaaatcggctgatctgtttatcaaaatccgacctatacaaaaaatccgccgtttgctgtgcaaacggcggattttcttgtttttcagcaaaggacggcacggatgacggcctggtattcctcctgagaggaaaccttgcccacagcagagaaggaagcattgggcagcttaaacagctcctgggccaactgatggactccatcccgggtgacggcgtcatagccccggatgatgtcctcggcgctgaggggatggccatagaggaactcaccccgggcgttggcgttcatccggctgttcatgctttccaggctcatcaaagctgagctcttcagctgttccaccgaacgccgcacttcttcttccgtggggccttcctgggcaaaggcccgcacttcctggccgatcagctccagagcctgcatttcggtgggacggcccagggcggtatagatgccgaaatagccggtgtcccgatgggccgaagagaaggaatagatggtatagcaaaggcccttctgctcccgcacccgctggaacaggcgggaagacattccgccgcccaggatgttgctgagcacctgcatccggtaacgctccgggcttccggcggcgatgccggggaaggccaggcacagatggttctgctcaatgtccttggtcttgatggtgaaagagggctgatagacggcctggggcgctgtcagcggctctccccccggcatcttttcaaaccggcgggcaatctgctcgatgtcgttcatggtaaagctaccggccaccgacaccacggtattggcggcagaatagcggctgctgcaataatcccgcagggtgtccccctggatcttctccagggtctcccgggtgcccagaatgggacggcccagagaggagcccttgtaaatggccgaggacagccgctcgatcaccagatcatcgggggtatcctcatacatgccgatctcttccagaatgacgccccgctccagatcggtctcctgctggccgaaccgagagtggaaatacatatcacacagaagatcggcggcttcctggatgtgggtgtccagcacccgggcatagtagcaggtgttctcttttgtggtaaaggcattgacctggccgccgatggcgtcaaaggcagtagccagctgggccgctgtgcggctttcggtgcctttgaaaagcatatgctcgatgtaatgggaaatgcctcccagctcttccggctcatgacgggagccgctttccacccaaacgcccagggcgcaggagcgcaccgagggaacctgctcataaagaatacgcacgccgttgggcaaagtgattttttcgatcatagtcacacctcaaacgcaaaaatctgcggccctgccgcgtaaaaggcggggcgggccatgagacccgccccgtttcctggagctttgtctggctccgtaacagtatttcttctttcttaccggatatgccggatatgttcgccgggcttggcgccgccccgggcgttgatctcggcaatggcgtccttgcgggacaggttgatccggcccttgtcgtcgatctccaccaccttgacccaggtcatgtcgccgatgttcagcacatcttccaccttctccacccggcggttgtccagcttggagatgtggatcagtccatccttaccgggggcgatttccacaaaggcgccgaagctcatgatgcgcaccactttgccatagaagatgtcgccaatctccggatccttgacaatggccaggatggtcttcttggcggcgtcgcagtcggcggcattgatggcggcaatgcacaccgagccatcgtcctcgatatcgatcttggtgttggtgtcggcggtgatcttctggatcacagagccgcccttgccgatgacatcgcggatcttctcgggatcgatggtgaagcgcaccatcttgggagcataggcagacagctcaggacggggagcggggatgcaggggagcatcacctcgttgaggatctccatccgggccacgcgagtcttttcaaaggcttcttcaatgatctccatggtcaggccatcgcacttgatgtccacctggatagcggtgatgcccttctcggtgccagccaccttgaagtccatgtcgccgaagaagtcttcgatgccctggatatcggtaaaggtgatgtggcggtcgccttccaccacaaggccgcaggaaatgccggccacaggagctttgatgggcacaccggcatccatcagagccagggtggagccgcagacgctgccctgggaagtggaaccgttggaagagagcacttccgagaccagacggaaggaataggggaactcttccacagaggggatgacgcattccagcgcacgctcagccagagcgccgtggccgatctcccggcggccgggggagcgggagggcttggcctcgcccacggaatagccggggaagttatactgatgcatatagcgcttttcggtttcttcgtagatggtgtccagctcctgggcatcccggagagtacccagggtgcaggtggtcagaacctgggtctggccgcgggtgaacaggcccgagccatggacacggggcagcaggcccacttcggcagccagaggacgcacctcggtgaggctgcggccgtccacacgcttctgctcatccagcagcatacggcgcaccacatacttctgcagcttgtacatgcactcgccgaagagcttttcgctgtcggggtatttctcgccgaacttctcaatcacttcatcggtgagggcgtcgatggccttgtcccgcacggttttgtccacagccagaatggcctgacgcacctgggcctcggcgtaattcttcacatcttcgtacatctcagcaggcacggtgatgtgctcgaaatcaaacttctctttgccgatctccttcttgatgccgtcgatgaaggccaccagcttcttgatctcatcgtgggcgatggcgatggcccggagcatctgatcgtcagggaactggtcggcgccggcctcgatcatgaccaccttgtcagcggtaccggccacggtcacattcagctggctcttctgccgctgctcggagttggggcacaccacataagcgccgttgacataacccatattgacgccgccgatggggccgccccaggggatgtcggagatggacagggcaatggaggtgccgatcatagcggcgatctccggcaggttgtcgtggtccacgctcataacggtgcagctgatgaccacatcgttgcgcatatccgaggggaagaggggacggatgggccggtcgatcaggcgggaagccaggatggcccgctcggaaggacggccttcccggcgcatgaagctgccagggatgcggcccacggcgtacagcttttcttcaaagtccacagacagggggaagaagtcaatgccgtcccggggcttcttggaagcagtggcattgaccagcacgcaggtatcgccccagcgcaccatgcaggaagcgttggacaggccagccagcttgccggtctccaccaccagaggccggccggccagggtggtttcaaatcttctttcgttggggaattccatcttggtaatcataaaaaaggttcctccttttccggtgcggatacccaatgcttttagcacttgaatggccgggccttgccatgagaccgggtcattcaactgctaaaaagacagggggcaccgcaggtgattgtgatattctggatgaaagaaaatgcacagaagggaggacaaagatttgtccccccttttgcatatttctttacttacgcaggcccagcttcttgacgatggcgcggtaacgctccacatccttcttctggagataagccagcaggccacggcgctggccgaccatcatcagcaggccacgacggctgtggttgtccttcttgtggaccttcaggtgctcggtcagctcgttgatccgggcagtcagaatggcgatctgcacttcgggagaaccggtgtcggtctcgtgcaggcggttggcttcgatcacttcggcctttttgtctttgagaatcattggtatttcctcctgtttttcattcgccgcaaggctgtgtggggggcctggaaggcgctttgctgaaacaaagcctgaatccccggacaaagcacaagggcacacatttgaattttaccatagctgctcatagatgtaaaggaaaaaaacagaaaaacccgatgcttttttattctttcacctggtagccgcaataggtgatggcggccttggccagaactgtggtggggtcgacgcattcctcttccagatggaatagctcctggagaatgggaagctcggtgcagcccaggataaagtaaccggcgcccttttccttcatctgctgcaaaaccttgcggaaagccgcttcatccaggttctcgctgcccgatttcacgccgtagatcagctccatcagcactttctgctgctcttcgtcgggagcgatgcagggaacgccctgctcttccagagccttgtgatagatccccgagcggatggtgccggtggttcccagcagtcccaccggtgtatcgccatggctctcccggcaggtgcgggcggtctcctccagcatgctgatgaaggggatgggggagacttccttcaaccggggcaggaagtaatgggcggtgttgcagggcatgatgagcacatcggccccgatggaagagagcttcttcaccgaatcggtcatggcgggcaccggatcggctcccccttccagaatggcggtggtgcggtcgggaatctgggcgttgtcgtcaatatagatgcggatatggtcgttatcgcagccggccttggtgagcaggacgatcttcttgaacaagtcggcggtggccagaggccccatacctcccaggatgccaatggattttttcatctttctgacctctcaaacggtttttattggttttcttccagccaacgggtggcgcaatgggcatagagggcggcccccaccggtaaacagccttcgtccggggtgacaaaggggctgtggagggcataagtatacccttcctctgtgctgcccgctcccaggttgatcatcatggaaggcactttagtggacacataggcaaagtcctcactgcccagagagggctggttttcccggacgaataccttgtcctccggtacgatctccttgataaaggggagcatttcttcgcacagggccgggttattataggaaggaggtgtgccgccggtgggttcttccacccggatggtggcccggaaggccttggcaatgctttcggccacttcccgtacccggcggatgagaaattcccggttttccggagacagggcccggatggtgccttccagtgtggcggtatcggcgatgatattgcaggccgagccgccctggaacacccctacggtgacgatggacagctgatcggccggcacttctctggccgggatctcttccaaagcgatgaggatatgggcggcgacgctgatggcgtccacaccctgataggaagaggcgccatggcagcccttgccctggacgatgatgcggaagctgtctcccgaggcgtgggaggggcctttggtgaatttgacgctgcccaccgggctttccggattgccggtgccgatgtgcatggcaaaggcggcgtccacatggggattttccagcacgccgttttccaccatatcccgtgcgccggccagcttttcctccgccggctggaacatcaatttaacggtacccggaagggcgctttcattttccttcagcagctttgccgctcccagcagcatggcggcatggaaatcgtggccgcaggcgtgcatgcagccgtttttgctggcaaagggcagatcggtctgctccgggatgggcagagcgtcgatatctccccgcagcaggatggttttgcccggcttgcccagggtgaccaccaccccggccttgccgcagcgctccccttcaatgcccatggcacgaagctggctcatgatccgttccacagtgtcgtccaaatcaaaacccacgccggcgtgagagtggatataccggcggttttcggtgatctcctcctggagttcataggcgcgtttcagatagggattcatttgatttcctccttgtgatttcgggccgaacgaacggttttattatagtactcccgggcctgcttgacaaggacgcgatccaccggggagggatcgtagcgggccgacagatagacctgccgcaacagcgtgagcccctcctgttcatagcaggacagacaccgctgcaaaatctcccgggtggtgctctccggcgtgatgtggatgccccgcttgtgggcatcccgaaggaagcgggcatagtagtggcgtaccgcccgacgggggtcccggggcgtgaagatctcccgccggggccccttgggttcccgccattcctcccgggtgtcctccatctccgcttgccggtcgtcgctgtagcgccgccttgtcatgcgccagagcacatagccgatgatggccatcagcgccagaatcagcgcgccgataatgatgcgctgcacccataagggcgtttgcgtcacctgttcatattccattcccttgaggccaaaagccagctccacctctccctcggtgggcagggtgggctcaaacttcccgtgaaacagggaatagataaaacggaaaacataggcgataacggtcaccgccagcagcaaaagccgggcaaaattcacaaccaccaggttgtaaaacagggccagaccattgcggtaaaggatctgggccggttctgtggccgagatcaatgtgaggacggccagaaagaccagcacggccagattccgcagcagaaacttcctgttttccagcgtggccgggctgtggcgcagcatccgggtctggagcactgaggatgccagaaagagaaaggccaaaggcaccgcatcggtgagggcggccacgccgccgctggccagcgccaggaggggcatggcaatggccagaataatggaacagcggttgaaattctccagggccatatcataggaatgatagtagatcttgcgaaacaccagcagcgttccataaaggcagccgaaaagataaactccgatatccggagcggtatgtaaaaagaaaagcccgatgaggcacaacagaaggggaagccgttcccatttgtttttccggctgttcagcaaacggcacagcgccacggccaaaggggggagcagacacagaggcaggggaactccgtctccttttatctgagtggcaaaatagttgcccaggatgaaataaaaggagaactccgacaccattttaaaacaaaacagcaaattcatccgctcacctcctgggagcccatcccatcctcccgggcgttgataatgaacaagcggccctggctctgctgaaacaggggagccaggaaggcgtcgcttctctgcaacggcgcaggagtgatgaggatgtgggcctgtccatccctggccccccgcacggcccggttgaccaaagaggaaaaaggttcccgcacatcataggtggcccgtcccaggccctccaggatggtacgggtatggccggaacccagaccgtcggacacctggttccattggccgatggctccggcggtggctgcattggtgaggaaggagcaggaaaagccccgcttctccagtgcctccagcaccatgcgggtgagggagaagcaccgctccagctcttcatggctgcctccctccacattgagcaacacggtgacggtgttttccaccgtgtgatccagctccttcaccatcagatgaccggtgcgcaccgagtgcttccagctgatggacttcataggctcccttccggtgtattcccgggcgccaatggtgagcatgggatcttccagaataaaccgctgcaccgaaacatcccccagaaagccgcccaaagcccggctgagggccggctcttccacccgggccggcagtaccacaatctcataaaaaagggggacattccggaatcggctggtaaaccccaacaggtccccgccggtgatggtggcatcggaaatgatccgccgccctctctggggcaggctggccttgatgcgccgggtgagtttttgccgggggcccagaaagcaggaggaatacagcctgcaaacggtggggtcgctttggaaatggcccagataggcattgaggcagatgtcgtggggcagattctgcaccacttccagataggacaccggcagccatttgccgttttgtatggtggtgagaatttgaaattcctctcccggttccaccacgctctgggaagga

SEQ ID NO: 2756 - DNA, 2474 bp, Unknown
  16S sequences of unknown bacteria
tttcagaagctgtttatttagaataccgctgtctgcctctcggcgacagctagatcatcttatcaaatccacttccttttgtcaatcccttttttgaaattcttttcaaaagtttttgcctgctgttcagcgactttcattccctctgttatgcgcgtttgtggagaccgaagcctatgtataatatgactcctataaggttgtataaggcaaagaacatatacactccgcctccgccccaattgtcaagtataactccgcctatcatctggcatactatagtgctggcgtttgagcttatggcatagtatcccgacacagcaagaccggtaagtcccgccgggaccactttacctatatatctgattacttcgacaagaacaatgccgtttaccattccctgcaggaagaacagtgctgttattgccgccgccggcggacatgtcgcataccagctgtatctgattaccgatattatcattcccgccagaatcattttttcgagggtaaagcggtcggacagttttttggaccacgccataaacggcgcttcacttcccaccaaaagaagcatggccgccgccattcccgccatactgcctccgcagtcactgtagagaaatgtaaaatatgtattattggcaacgttggtgccgcccacaaagaatacggcggcaatcagtttgagatattttttgttatgaagcagcgccccgaagcctgttttttcttccgaggctatctccactatctgcgcttcacattcatcaatcagcacattctgctcttttttcattgaggctgtaaataccgcagaaagtatatagcttgccgcgtacataaagaatatgactctcaaatccacagcacctgcaatcctgcccgagatgaaaactcccagcgcatagcctacagctccccacattctggcagagcccaatgccttgccgtcttcaagacacattgcatcaacaagtcccatgacaggcgcctggaagaaatacattaccgcatatataataaggaatataccatatatatgtaccgtcgaaagaccgagcgctatggcagcagcgcagatgcacagcgttcttaccacctttcggccgttttggcatctgtcaaacacaccgccccagaatgcagaggcaaagattgcgacaagcgttcccgcggcagtgaccgtacctatctgagcccctgtgaagccctcctgcgcaagatatctgcctatgaggggcatcatcgaacctattgccatatatgaaaatgtgtatataaaaatgtatctgatgtgcgttctgtccataaaaacctctcaaaaaatattaccagacaagtatatcacaaaggctgtctgcaaacaatatcactatatatttctgaacttacggaggtttgtatgtccattgtactgataagaacttttattttgtatttcatagttctgtttgccataaggattatgggcaaatccgagctgtcaaaaatgtcaccgtttcagatggtagttatatttatgatagcggagcttgccgccattcccatagagtcacctacggtttcatttataagcggggttatcgccattttcacgctgctgtttttacaggtgctcatatcatatatttcaatcaaaagcgagaagttcaaaaacttcataaacggcaggccgagtgtaatcatcgaaaacggtcagataaatcaggaggagatgcgcagacttcgaatttccattaacgaccttatggagcagctccgtttggggaacactccgaatgttgcagatgttaattatgccgtgcttgagtcaaacggaagtctttccattgttccaaagccggataaaaaaaccgtaaccttaaaggatatgggtattcctcccaaagatgaaattctgccgtcggttataatatcggacggtactttatacgaagaaaatcttgcaaagtcaggtcttgatacggacatcctgaaagctcagcttgcagcctgcaatatgggaggccttgaagatgtgtttctggcagtctgcgatgaaaaccgcaggcttcatatatatgccgccgatgcagacgccaaaaaggcaagggaggtgagcatatgaggtcgctggttgtttcaagtctgtgtcttgcggttctgcttgcaggctggggcgcttttcattatgtttccgcggagaaatcagacgagtatattacggaaataagggaagtgatgatcccggcggttcaggcagaagactgggaaaccgcgcagaaaagttttaaagaattcggccgggactggcacagatataaaaaagccgccgcatatttttttgatacgacagctttaaatgaagccgattattccatatcccgcgccgaagagttcataaaggcaaaggacccgtccaactcggcgggtgagctggccgcattaagagagcagtttaagttcctccaccggaacgaaagtatatccatggg

SEQ ID NO: 2757 - DNA, 9559 bp, Unknown
  16S sequences of unknown bacteria
tgagcatttttgaattggtttgtcgggcctgttatctcttggagaactgaggcgcgcgacgagcggccttgaggccgtatttctttctttccttcatacgcggatcgcgtgtgaggaagcctgccttcttaagctcggcgcgaagctctgcgtcggactgaagaagcgcacgggaaataccgtggcggatagcgcctgcctgaccggtaacgccgccgcctgcaacgcggcagacaacatcatacttatcggcagtgccggtgagaacgagaggctgacgaacgatgagcttgagtgtttcaagaccgaagtaatcgtcaatatctctgtcgttaacggtaacctttccggtacctgcataaagacgaacacgggcaacagaactttttcttctgcctgttccgtagaaataaggctttgcttcaaacattgtttctgtctcccttcttaaaattcaagcttttcgggcttctgggcaacctgagcgtactcggtgccactgtaaacatgaagcctggtaagagccttgcggccgatcgtagtatccggcaccatacccttaacggcaagctccatagcgagctcggggcgggtcttcataagagaggaataattaacctctttaagaccgccgatatagccggtgtgacggcgatagaacttcttttcaagctttttacctgttaaaaccgccttatcagcgttgataacgacaacatggtcgccgcaatcgacatggggagtaaactccggctttaactttccgcgaaggatatccgcaaccttggtggcggtacggccgagcggtctgtcagcagcgtcgattatataccatttacgctgaatttcagcaggttttgccataaatgtagacataattcaaaacctccaaaaaatctttcgttatttaaacagctcaattataataccacactcgggatataaagtcaacaccgaattttcaaaattttaatttaaagttcgcaatctctgtttttctttaaaatgctccgtttttctcccgtttcctcatttctcatttttaaaattatttaagattaaatgcctttttaacctgcggcagacggaaaatgattgctgcggcaataagggttatcacaagctcgggaagcatataagagccgttgtaggctgcagaatacagccaaacattgttgaatttatccgcccattcctccgggataccgaaaagaatagctcccgaaaacaggtgtgaaataaagcgcagcacgaacacaagcgaaatgccggcaagcgttcccgcatagccctttttcgcaaacgcgcccgcaaagcccaaaacggtaaaggcgattatgtaatcaaggaaaacagtgcctacaagatatgccggtgtgagtccccagccgaggagaccgtccatcactattccgaagaacagctgaatcagcgaataaacgaatgaagagcctacgccccatttaagacctaaggaaatagatataaccacaatcggcagcatgctcaaaagggttaccgagccgccgaggggcagcttataaagctttataaggcttaaggcggacgctagcgctaccataacggcgctgaaggtcagtttgtagatgggtttgttttttgtttccatttttcaacactccttttatatatcgcaattacccgcgaaaaaaagccgcaggcaaagacctgcggcaatactgttggcgtatttccctacgacggcattatccgtatcaggtcataggtcgaagtcatagcaaaaagcggacttcctctcagcctgagtttcatcaagctccctaaattgcactgctattatagcattcactgaacggtttgtcaagcaccgattgagtgtgtcgaaaaagtcgacacactcttggacgggaatgccgttcgctcgaaaatcacggattttcggactgcactctatccccgccaataccaccccagtgcccttgaaaaaacgcttattcagcgttttttcgcttacaaggtgtttttccgccgcacatgtcgccggaaaaacgaaaaatgcggcgttaccgccgcagataaaaatttttggggttatcaacagaccgaaggaatcccttcggtcggcgattctttgtataaaattcagtttcatcgtgcaagggggtgaaatttcgcataagccgcagtgtacttgcttttcacaaaccgcgcgtacacctgtgtggaggatatatccgcatgcccgagcatttccttaatatccttaagcggcgcgccgttttcaagcaaatgcgccgcgaacgaatgacgcagcgtgtgcggcgttatatcctttttgattcccgccttttcggaataatgctttataatcttccaaaagccctggcgcgacattgcacctccgttcatattggtaaacagcctgtcctcgtttttatcggtgactataacgggtcggacattcacaagataatccgcaaccgcctttaccgccgcgggatacatgggcacaatgcgttccttttcgcccgaatgcatatgtaaaatacctatctgcaaattaacatccgatacggtaagctccgtaagctctgacaccctgatgccggtagcgtaaagcagctcgagcatcgccttatcccgaatgctcttgtaatcgtccccgtcgggctgggaaagcagcagtattatctcgtttgaatcaagaattcccggcagctttttttcggcttttttaagcttaattccgtttacggggttttcctctataatattttttgaaattaaaaaacggtagtagcagcgaaccgatgccacggtgcggctgacagtcgcgtccgacttgcccttgcccgacaaatattcaacatatttttttatgagcgcggaatccgccgtttcggtatccctgccgtttgaagcgcaatattcggaatactgatgtatgtcccgcatatacgattcaaccgtattcggcgacgccattttaacgcttaccaggtattccctgaaagcgctgcacagatcagccatattgcacctccttaaaaaattaacatcccttacaaagcaaggcttgccccgaacgtgcaggacataaccgcgtcaataaccgccgacagcaatgtcagcagacatataaatatgtatttactgcagtagctgcggaaatccgccgaaagattgaccggcggcgcagacggaagcgtcagccttgccattccgagagaaaaaccgaccgattccctcgccgccaataaaagcgaaaccgcaaaaattatttccgcgggaattatcagcacggcgttaaaggctattcccttaaccgaatactgcgagtaaagcagagccgacacgctgccgtaaagcacacagcggactgctgccgcaatcggcaccaaaacaacacccaaaaccgacgtgcccgcagcaaacaccgcaagcaaaacaagcgcagaccccgcaaaggaattcaaagtgacagataaaaaagaagcgtcactgcgctccgcaacaaaccgttcaagataatccgccgaataatccgagaatccgactatcctttccccggcaaaggttcccaccgctataccggcgataaacagcagcaccaacagcaccagcacattgtttttaataataaattcggaaagcctgattcttttaaggcttaaaacagttccttttttcatattcatccctccggcttctatgaaataatatgccggattcggacaagatatgccgaaaaataaataaagccatatttaggtatttaatattcctcaaccgctaaatatgggttttgttcggttttatgtaaactgaatttccgttttcggagccaagggtgtaacgataccgcaaatcggtatatactgcgcttacgctcaacaatatagttatacaacatttttataattatgtcaaccgccaattttgcatacatcaaatcttatgttaactctttatgtaaaccacacaacatgtatgccgtgttctgttatgtaaactcaatttcttgtaattgggtctttaattttttttgaaaatatgttatacttaattcaggaaaaaatataaacgccgcaagacttgtgcggcacgggtggggtttgattatgaaaaagacagtaattgttaccggctcttcaaagggtataggcgcggcaacggcaattctctttgcgcaaagcggttggaatgtggttataaattataacgaatcctttgaatcggcaaatctgctttgccgctcgcttgtaagcaacggctactcggcgatcattcaaaaggcgaatgttgcaaacaagctcgaggttgatataatggtcaaggaagcgctttacaaattcggcagcatagatgtgcttgtaaacaatgcgggagttgcgtatcaggggcttataaccgatactgatgagatcgatttcgaccgaataatagatgtggatttaaagggtgttttcaactgctgtaaggcggtaactccggttatggtaaatcaaaaatcgggctgcattgtgaacatctcgtccatgtggggtcaggtcggagcttcctgcgaggtggcgtattccgcggcaaaggcgggcgttataggcttgacaaaagcgcttgccaaagagcttgctccgagcggcatcacggtcaactgcattgctccggggcttattgaaaccggaatgaattccaatcttacaatagaggagcttaacgatttcgttgagggcattccgctcggccgcatgggcagtgccgacgagatagccgccgccgtgcgcttcctctcctcccctgctgccgaatacataaccggtcaggttctcggaattaacggagggtatgtaatttagacattagacattagattttagatgttagagtacaaaagcagcagcctcgatactgaggctgctgcttttaagttaaaaccaaggcttcctctgatgagggtgcgggtgtccggcagacacctctgcaaagcggaagcaccgaccgaggcgacagccgagacggtgtcatgcaccaaaaatagcctcccctgtgtaaggggaggtgtcatgcgtagctatgacggaggggttgttgcagacttaaaatcatcagaaagctaagttatgtattaaaactattttttatctctaaactctaatttataaataagctttaatccccaacaatccctcagccgctgacagcggcagcttcctttacacaagggagcctttggtctgtacggaagctatgattttgcatatctgatatctaccgtctgaaatcttacgttattttccctcacgcagcttatttatcttatcccgcagatacgccgcgtgctcaaactcaagaatcttcgccgcctgcttcatttcggcggtaaggcgcttgatttccgtctctttttcgattcgcgacattttggatatcggcttttcgtctttgaccttctgccctatctctattatatcgcgcacatccttaatgacggtcttcggcgtgatgccgtgctctgtgttataacggctctgaatatcgcggcggcgctctgtttcgctgatagcccgctccatagagtcggtcacggtatcggcgtacataatgacctcgccctctgcgtttcgggcggctctgcctatcgtttgcacaagtgatgtttcactgcgcagaaagccctccttgtccgcgtcgagtatcgcgactaaggagacctcgggaatatcaagtccctcgcgcaaaaggttaatgccaacgagcacatcgaattcaccgaggcgcagatcgcggattatttccatacgctccattgtatcaatatcatagtgcatataccgcacctttataccgaggtcattgaggtactcggtcagatcctccgccatcttctttgtgagggtggttataagcacgcgctgctttttggcggtgcgtatattaatttcggaaaccagatcgtcaatctgcccgtctgtcgggcggacggaaattttcggatcaagcagccccgtaggtcttattacctgctcggcaatctgcgccgcgtggtccttttcaaactgaccgggcgttgccgatacgaatattgcctgattgacgtgggcataaaattcctcaaaattaagcgggcggttatcaaaggcagagggcagacgaaagccgtattgcacaagattttcctttcgagccctgtcgccgccgtacattccgcgcacctgcggcatcgttacgtgcgattcatcaacaaaaagcaaataatcgtcggggaaataatcgagcagggtcgatggcacgcttccgggcgctctgcgcgagagaactctcgaatagttttcaacacccttgcaggtgcctatctcccttaacatttcaatgtcgtattcggttctctggcgtattctctgcgcttcaatcagctgcccgttttcgttgaaaaaccttacgcgttcctccatttcctcatcgatttccttaagtgcgtcttcaagcttttcatgcggtacgatataatgcgaagcgggatatatcgccgcatgcgaaagcagcgccttgacttctccggtcactgtgtttatttcgcttatcctgtcaatctcgtcaccgaaaaattcaacccgaacggcattttcctgcgaattggcgggaaatatctccaccgtgtcgccccgtaccctgaatttattgcggataaaattaatatcgttccgctcgtactgcagatccaccagcttgcgcaaaagctcatcgcggcttttctccattcccgtgcggagggatatcaccatgtttttataatcgatagggtttcccaatgagtaaatgcatgaaacgctcgccacaattataacatccctgcgctccgacagcgcacaggtcgccgaatggcgcagcttgtctatttcatcgtttatggcggaatccttttcaatataggtgtcgcttcccgggatatacgcctcgggctgataatagtcataataggaaacaaaatactccaccgcgttttcagggaaaaactctctgaactccgagcacagttgtgcggcaagtgttttgttgtgtgctaaaacgagggttgggcggttgacgttagcgataatattcgccatagtaaaggttttgcccgaacctgtaacaccaagcaaaacctgctcttttaagccgttttcaacgccttttgtaagcttttctatcgcttccggctgatctccggtaggttgaaatttggaatgtaaaataaatttatccggcacattaatcacctgtttttactgtatattaccgattatagcataaaacgattatcaagtaaacagtcttatattgacaaaatccctcacgcgttataaaataataatcggagtggtttaatatgaagttccagttcaatattgatttaaccgataaggattataccgactttaatgttttttggcagacaaaatcccgctacggcaaaaaaatactgcttactttaaggatttttttgctgttgctgtgtttgcttccgacactgtcggcagtgcttgacattgggctttcggcggaatcgataatttcaggaactttattacttataataccgcagctgttagtggtgcccttctttaaattaacagccaaaattcagataaaagcccttataaaaaacggaaaaccgccctattcgccccactcggtgcttatcttttatgaggacagctttacagaagaaacggaagacattaaaaccgaagtcaaatattcgggaattgacagaataagcattgttgaaaacaagctgattatgattcataccaactcggtgcaggcctatctgctgcccgcaatctgctttggctcagatataaaatataacagctttaaggaatttattaaaaccaaatgcgccgccgttgacacatataaataagggtgaaaaaatgaaaagctacacaacaaaatcccccgaagaaaccgaaagcataggctttaagctggcgcaaacgctgcgcggcggcgaggttatagcctttcgcgggggtctcggaatgggcaaaacctgctttacgcgggggcttgcgcgcgggctcggctttacgggcacggtcacgtcccctacctttgcgcttataaacgaatatatcggcggcaggctgccgctttatcattttgatatgtaccgaatttcggggtgggaagacctttattccaccggcttttttgagtacgcagagcaaggcggagtaatagcagcggagtggagcgaaaacattgaaaatgcgctgcccgcaggcactgtaaccgtcagctttgagcaaacgggcgaaaacgaacgcgtgataaatattgacggcgcgcccgatcttgatttaacggagactgaaacagaatgaaaatactttctcttgaatgtacggcgggccctgcgtccgctgcaataaccgaggacgggcgcgttatagcctcctcctttgtaaacgtaaagcttacccattcgcaaacccttttgcctatggcagaggggctttttgccgcggcaaggcttgggctttccgatattgacggaatagccgtaaccgcaggtcccggctcgtttaccggggtgcgcataggcataagcgccgcaaaggggcttgccgccgctcggaatttgccctgcgcgggggtgtctaccctattatcgctcgcctttaactaccgcgataccgattgcattgtgttcgcggttatggacgcacgctgcagccaggtatacaacgctatttttgaaatttccggcggcaaaattacccgcctgtgcgaggacagggcgcttttgtgcgaagaacttgcggaaaatttaaaaaaagtgtcgcaaaacggagaaaaacgtgttataatagtcggtgacggcacagaagtgttcttcccctttgccgaaaatataccgggcgtttgcaaatcatcgcccgagcgcaggtatcagaatgcggtatccgcttcccttgcggcggaggatatattcaaaaacaatttatccgtaacgcctgacaagctgctgcccgtatatttaaggcttccgcaggcggaacgcgagcttaaaaagaaaaaagaggtgagcttatgaaaatagcggtaggctgcgatcacggcggattggagcataaaaacgcaatagcggagcatttaaaatccgagggctttgaggttgaagatttcggcatatatgaaaataagtcggtcgattaccccgaaatagcgctcaaggtggcaaacagcattaaaaacggtgaaaacgagctgggaatactggtttgcggaaccggaatcggaatgtcgcttgcggcaaataaggtaaacggcatacgcgccgctgcctgcagcgagtatttttccgcaaaatatacccgtcttcacaacaattccaatattttatgcctcggaggcagagtaataggaatcggcactgcgcttgagctgtgcgatattttcgtcaataccgaatttgagggcggacgccaccaaagacgcattgatatgataaccgaaattgaaaaatcaaattcttaaaggagcagcaaaaatgaaagataatgtatttattatggatcatccgctt

SEQ ID NO: 2758 - DNA, 1777 bp, Unknown
  16S sequences of unknown bacteria
catttcttttcttctttttttaagaaaagtggttcatatctatttacaacacagaccgtgattttttctgtttatatgtcgggtattgcttttaattgtaaattaaagtataattaatatactgcgctgacaggtgcggcatgtatataagaaaaaacgaggtgcggtgttaatgttttcggagcttaaaagcgtgggactcttcggcattgattcgtatatgattgaggttgaagccgatatatcgtctggtcttcccgcctttgatatagtgggccttcccgatgctgcggtcaaggaatcgcgcgacagggtgcgtgcggcgcttaaaaactgcggctttaaattccccatcgggcggataaccataaatcttgctccggcggatctgaaaaaggaaggctcgatatacgatctgccggtgcttatagcaatcctcaaggcctccggtcagctagatttcgatgtaggagacagcgtttttataggtgaggtttcgcttgacggaagattaagacccgtcggcggcgttctcgccataaccataaccgcgctcaaaagcggcataaaaaatgttttcgtccccgaggaaaacgcggcggaggctgcaataatcgaagggataaatgtatacggaatcaacaatataaagcagctgatagcccaccttacgggaaccgacaccttaacccccatgcccgttaccgaaataaacgcgcccgccctttcggacgcggtggatttcagcgatgttaaagggcagttcgccgccaaaaaggctcttgaggttgcagccgcgggcgggcataatatcctgcttatagggcctcccggagccggcaaaagcatgcttgcaaagcggcttcccacaattttgccggaaatgacctttgaggaatcgattgaaaccacgaaaattcattccatagccggaattcttgataaaaataacccgtttgtccgcgtccgccccttccgctcgccacaccacacggtatcgcccgcaggcataaccggcggcggttctgttccgaagccgggcgaaatatcgcttgcgcataacggcgtgctttttcttgatgagctgcccgaattccgccgcgatgttaccgaggcactccgtcagccgcttgaggacggtaaggtgaccatttcccgcgttgcggggacgcttacatatccaagctcgattatgcttgttgccgccatgaatccctgcccgtgcggatttttcgggcatcccacaaaggagtgcatctgctctcccaagtcggtgcgcaattatctcaacagaatttcaggcccgatgcttgaccgtattgatatccatgtcgaggtgccgccggtcaactttgaggagcttaactcctcgtctgaggaggagacctcggctgaaataagggagcgtgtaaaccgcgcaagaaagctgcagattgagcgctaccgcggtacgggagtatcctgcaacgcaagacttacccccgctatgcttaaaaaatactgcgttaccgacagtgcggccgacggatacctgcagcttgcgttcgacaggctcggaatgtccgcaagagcctacgaccgaattttaaagattgcaagaactatagccgaccttgacggaagcgagcttattaaacgaaaccatatttcctcagcgatttccttcagaagtcttgataaaaaatattggagcgaataaaaccgtaagtgtcgggagggtgcgggtgtccgccggacacctctgcgaagcagaagcaccgaccgaggctgcagccga

SEQ ID NO: 2759 - DNA, 7544 bp, Unknown
  16S sequences of unknown bacteria
ctgccgatacaggcggcaagctgtgcagacagctcagcgagcgctttcgcagctggcaggtgctggagctgaaggccgcggcagaaggaggtgccttcgagatccatgagtaagtattacattgtcgattctgcgatcctgccggatgtgatggataaggtcatcgaggcgcggcagatgctggagaacggcacggtccgccaggtgagcgaggccgtcaagcgggtcggcatctccagagggacgtattataaatataaagattatgtgtttccggccgtacagggcaaggaacagcgcaaggcggtcatctcgatgatgctgcatcataagaagggcatcctcagcgagacgctcaactgcatgtctgaggtcaatgccaacatcctgaccatcagccagaccatcccgatccatgactgggccagcgtcgtcctgtcctttgacatcagcgagatgcagatcggtctggatgagctgctgcgcatgctcaagaagatcaaggggctggccaacgtgcagctgatcgcggtggagtgagatggcgatacggcggatgcacgcatcgcagctggatcaggtcacggagatctggctgcagggcaacctcagcgcgcacgatttcatcccggctgcctactggcatgggcagcgcaaggcggtcaacgcacagctggcacaggcagagatctatgtgcatgaaggcgcagacggtgcggcagatgggttcatcggcctgcagggcgatctcatcgccggcctgttcgtgagggaagatgcgcggggaaaagggatcgggcgaagcctgctcgatcacgcgctgaagctgaataaggatgtgtgcctcaggctgtgcgtgtatgagaaaaacgaacgagcgcgccgcttttatgcgcgcgccggatttcaggtctgtgcagaaggcgtggatgcggccagcggcgaacgtgagctcatcatgacgcacagccctcttttcatggcggaaacgctgtgatacactgataagcaggaagtgatgatcgatgaaaaagactgcggaaacgctgaccgggatcctcttcggcctttcgctgatcgtatttttgctgctgagcagcatagacatgaactgtttcaacgtgaccttttttgaagagcaataccgggagctgaatacggccgagtcgctgcagatgccgcaggaagacctcatgaaggcgacgacgacgctgctggattatctgcgcggagatgtggattcgatcgaagtggacgtgcgcatcaacggcgtgacgcaggaagcgttcaatgacagggaaaaggcgcacatggtcgatgtgcgcgcgctgtatcaacatgccatgatcgtgagatggggcgcactgggcgggatcatcctcagcctggcgctctcgatcgtcgaacggcgcaggcatttcctcagcgtgctcagcgccggactgttgcaggtgtcggtgctgttcatcttatttctgtgcctgctgggcgtctggatcatggctgacttcaacggcttctggaccacgttccatcagctgttcttcggtaagccctaaatggaacatccggtgcacacccacaaatgcggccgctgctcaacccgtataccgatttgatgatcaacctgttcccagaggcgttcttcaatcatctcgtggtccgcatcatcctgtggttcctcgccttctatgtaccggcagcgatcatcgcgctgctgacccagcgggatgtgctgatgctgcggttttgtccgggactgctggcaaaaacggctcagcgccgcaaaaaaagctgatcatgatggcatttttcagttgtctgtgatatattctaggcagcattgtgccatctgtgcgcccgtctgtttcggcgcatggatgtcctcgtggcgacacggggcttttttgcgaaaggggaaaggaaatgaagaaggaacagaaaaaagacaagcagtatgggtctgtctacgaattcgaaggaagagtaccgctgaaacgtgcgcttccgctgggcatccagcatgtgctggccatgttcctggccaacatctcgccgctgatgatcgtctgcggactgctggacatcgcgcttgatctgcgcacatcgctgatccagaatgcgatgttcgtcgcagccatcgcgacattgctgcagctgtatccggtgtggaagctcggttcgcgactgccgatcgtcatgggcaccagctccagcttcatctccacggccggcgtgatcggcgccagcgcggggtatggcgcgatcgtcggcgcatgcatcgtcggcagcgtgatggagctcatcctcggctatttcatcaagccgctgcgcaagctgtttccgccgctggtcacttcgctggtcatcatggccatcggactgacgctgctgccggtgggcatcagctatttcggcggaggaagcggcgcggcggatttcggcagtccgaaccatctgctggtcggcacgttcgtcatcatcgtcatcctgatcgccaagcagttcaagggatggatcgcagacgcgtccatcctggtcggcatcgtggccggctatgtgctcgccatctgcctgggcatggtggatttcagcccgctggcggatgcggcctggttcgccctgccgaagttcatgccggtcatgccgacctttgatctgcaagccatcgtcgcgatgtgcatcctgttcgtagctaccgccgtggagacggtcggcaacatcagcggcatcaccaacggcgcatttgaccgcgagcctacgccggaagagatgcgcggcggcgtcatggccgacagcgtcggcagcctgtttggatcgttcttcggcgtccttccggtcacgaccttcgcgcagaatgtcggtctggtcgtggtgagccgcatcgtcaaccgcttcgtcatcctgaccggcgtcatcttcctgctgctgtgcgggttctgcccgaagatcagcgtgctgttttcgatcatgccgcagtcggtgctgggcggcgcggccgtcatcatgttctcgatgatcgtcgtcagcggcattcaggcgctggggcgggagaagatggacgagcgcaccggactgatcatcgccctttcgctgggactgggcgtcggcatcggcaacatcccttcagttctggctcagctgccggaatgggtgaacatgatctttgcgcagaacagcatcatcatgaccttcgtggtggcaacggtgctcaacctcatcttgccgaaaaagaaagcgcctgaaccggcagcaaagcaggatcaggcgtgatctgggcgatcgatgagcgcaaagcaggagcaagcgcgtgatccgtgctgatcagacaaggatcgaaggaggaaatagggatgaaagagatcatactggccagccagtcgccccgccgcaaggagctgctggaggaggtcggactgcgctttcgcgtagagccggcgcagatcgaagaacatctggatgaatcgctgcccatcacgcaggcgatcgagcagctggcgaaggaaaaagcgatgcccatcgcccgccggcatcctcaatgcatcgtcatcggcgctgatacgcttgtcgccgtcgatggattggtgctgggcaagccggcggatgaggcggatgccgcacgcatgctgcggatgctcagcggccgtcgccatcaggtcatcggcggcgtcgcgctgctctgcggcaatgaggaagtgctgtttcactgcgtcagcgaggtgcgcttcttcccgctgcgggaagaggagatcgccgtgtatatccgaagcggggagccgatggacaaggccggcgcctatggcatccaggggctgggccgtctgtttgtcgaaagcatctgcggagattatttcaacatcgtgggcctgccggtatcccggctcatgcgcgcgcttgatcaattttcatgacacagggagagatctctgtgtttttttcccgacaaagttcgagagatgtcgtctaggcaagctgtcgaaaaccgtctataataggagaggcgaattttggaaaaacaaggaagtgaggagacggtgatgaacagaaggaagatcgtggcgtctgtcacggcggtgttcctgcttgccgccagtgcagatccatgcggaagacttttccgatgaggaatattggatcaaaaaatgttcggccgttcagccgacacaggaggacgcagatctgtgcacgcagttcaagaatgcatatgcgtccagacagcaggaagtggaacagcagatcagcgagctgcagcagcagatcgagaacatcggcaacgacatcgatgagatcgccgcgctggcgcgtgagcagtatgcgctcgtgcaggagctggatgcgcagatcgcgctgaaggaagaaagcattgcctcctttgatgcgaccatcgctgcgctcaatgcgcagatcgatgaaaagcgtctggagatcgagcaatatgaccgcatcatccgcgaacggatggtcagcgaacaagcctctgtgggcacgaacatgtatgtggatctgatcatgggcgcagatgacctcagcgatatgctcaggcgtctggaaggactcaaccgcatcacacaggatgatgaagatcagatgaagcagctgcagaagctgcgtgatgagctgcagctgcagctcagtgagcaggaccgcctgcgggaacagcagaaggagcagaaggccgagatcgaggaacagcgtgcggcggcagatgaggtccgccagcagcgtgaacagctgctggccgtctatcaaagcaaccagcaggagatcgtgcagcgcatggagaacgccacctacgatgcgcagacgatgggcgggaacatgatcgccatggatcccagctcgctggtcgaagagccgcaggatgaaccggataacggcggttccggcagctccggcggcgggtcaaacggtggaagcagcgacaacggcggctcatccggctctggtggatcgggcggttccggaggcggcggaaacatgagcagcgatgggttcatctctccggtccgcgggacgctttctgccggaagctggtattatccgggcggaggagagcatctgggcgcggatatcgcggccccgatcggcacgccgatctatgcaccgtccaacggcatcgtggtatggaccaacgagggattcccttcggacaacggcggctatccggatgcttcggcaggctggccttacggtgcggccaacaacatggccatgatcacgcgggtgaacggcacgacctacttcatctcgtttgcccatatgtccaccggcatcgtcgtctctccgggacagacggtctctcagggacagctgatgggctatacgggcaacagcggaaattcatttggcgcacactgccatatcgaagtggtcaacctgggcagcatgtccatcgccaacgcggtggcgcgcttccagcagacgagcgactttgcgtttgggaccggatggagcgtagcgacgaccggctgtgacatcatcggcaggacgccttgccgcgaacaccctgaagatatcttatattgaggagaaggcgcttctttgacggagcgtctttttcatcacgaaaatggacacttttactgcaatgggtaagcaaaagcagacggttttcagtataattatccttaagtcggcacgatcgtgccggcaacggaggtcatgttatggaaatactgattctgtcctgcggcaccggcggcggacataacgcagctggcaaggccgtggctgacgagctgcgccggcgcggacatcaggtcacgttcacggacccttatctgctggccggccggaatgtcgccaatctggtctcagactcttatgtcaggctcgtccagcgctcgccggggctgtttggcaagatgtattccctgggcgagtcttaccgtcagcttccgatccattcgccggtatactgggtgaatgggaagatggcgtccgtcatgggcgagtatctggatgcgcatcattttgatctgatcatcatgagccatatgtatccggcgcatatcctgacgaacctgaagcagcagcgctttgcgcttcccaggacgatgctcatcgcgaccgattatacttgcatcccgttcatggaagagacagactgtgattattatgtggtgccttctgacgatctggtcgaccgcttcagcgcatacggcatcccggcagagcggatgctgccatacggcatcccggtcagcagcgaattcagcgagggcatctcgaaaagacaggcacgcgcggcgctgaggctggatcagcagagccgctatatcctgctttccggaggcagcatcggcgcaggaaagatcgaggagacgatcgaggtcatcacggatttcctgcaggaacagaaggaatgcacgctgatcgtcatctgcggcaggaatgagcggctgcgatgcaggctggcgcggcgctatggagatgatccgcgcatcctgatcaaggggagcacttcgcatatggcgcagtatatggcggcatgcgacttgttcatcaccaagccgggcgggctctcttccacggaagccgccgtgctgggggtccctttggtccacctgtctcccattcccggctgtgagacatacaatatggaatactttgtccgccgtcacatgagcgtggccgtctgcgatccaacaaaggagctgccagatgtgctgcgccggtttgccgatggtacgctgagcgcacagatgaaggcggctcagcgcgcatgcatcgaccgcagggcaacggagcgcctgtgcgatttcatcgaaggcggcagatgatcaagggtccggcgtgtgacggggattgagcagaaagaggttttggcttataatattgaacttgtaaagcatgattgtgcaaaaaaggggttttggggatgcaaaacaaatttgccgatgggatccgtgacgggatcccgatcgctttagggtatttttccgtctcatttgctttcggcatgacggcgctgacacagggcgtcccgctctgggcggccgtcgcgatctcattcacctgcctgaccagcgcagggcagtttgcaggactgaccatcatcgcggcgtcagggtcattgatcgagatggcgctttcgcaattcgtcatcaatctgcgttattttctgatgtcgctctcgttgacgcagaaggtggatccgcagatgccccgtccgcagcgggcgatcatttccttcggcatcacggatgagatcttcgcgctgtcttccagccgctataatggggtcggctttcgttacatggtcgggctgatgacgctgcctatcgcggcctggacgctgggcacgctgtgcggcggtgtggccagcggactgcttccgcaggccgtgcgcgacgcattgggcatcatgatctacggcatgttcctggcgatcatcctgccgccttgccgcaagtcgaagcagatcacggctgtcgtggcctgcgcctcgctgctgagctgtctgtctgcgctgctgcaggcttatgtgcccatcagcagcggattcgtcatcatcatctgcacggttgcggcggcgtcgctgg

SEQ ID NO: 2760 - DNA, 2080 bp, Unknown
  16S sequences of unknown bacteria
ggaggctttggacggcgcggcggcgcttattctcccgcttccggcgtcggttgacggggagcatataacgatgccgttctcagacaggcttatcagaaacgaggacgttgtacggatggcggcggagcacggggtaaggctcatagcgggcggaaggctcgggaatatcgcgaagctcgcggagaagtacgggattgaggcgttcgattattttgagcgtgaggatttcgcggttgccaacgccgttccgacagccgagggggctatagccatcgcgatgaacgaattgccggtgacgatagacggcgcgtccgttctggttgtcggttacggaaggataggaaagctgctcgcggcgaagctgaaatctctcggagcgaacgtgacggcgagcgcgagacgtgacgacgacatagcgtggataaaggcaagcgggataaacagcgcgcggacgggaaaactcgatgagacaatcgcccgcatcagacctgacgtcatcttcacgacggttccgcacacggtcataggaaagaaggagctcgaggtgtgcggcgacgcactgataatagacctcgcgtcaaagccgggaggcgtcgacatagccgcggcgggagcgctcggaaagcgcgtcatatgggcgctgtcgcttccgggaaagacgtcgcctgtgacggcgggaagaataatcgcggacacggttgcgatgaagatacctgagatatccggagggggagacagaaaatgctgataggctatgcgttatgtggttctttctgcacattgtcggagagcatcgcggagatggagaaattacgtgcggcgggacacgagataataccgataatgagcgggagcgcggcgacgaccgacacgcgcttcggcacggcggctgacataaccgacaggatagtgcatataacaggcagagggataatccacacgacagagaaggcggagccgctgggaccgaaggtgaagctggacctgctgataatcgctccatgcacgggcaacacgatagcgaagctggcgcacggaatcacggacacagcggtgacaatggcggcgaaggcgcactcgagacaggaccgtccgatactgatagccctagccacgaacgacgcgctgagcgcgaacctcgagaacatcggcagaatgatgcagaaaaagagcgtatacttcgtcccgatgcgtcaggacgacccggtgaagaagccgcactcgctcgtcgcggatttcgggagaattgaagaatgcgcagacgccgctttggaggggaagcaggtttatccggtgtttgagtgagagacagataacaatgggaacaacagagggactgccggttttcaggcagtcccttgcattcacttacttattcgcctcaaagaaatccacaataagatcccgtctcttctccgcgcttttgacccggctggcgtagaacgacgcgtagtcctttttcggggaatccccggagaatatcgcgccgagcatgtgtccgaagccctgccagttgtcgtagacataggcgaagctgactgtcagtgtgtcgtttatgatgtcgagcatctgtccggactcgctgtcgtacgtgaacttttccttgagcgccgtgccgaagtacgcgggaacaacggtcttgtaggtctcagccgccagagcctcgagtatcagcccggtcttttcgggttcggtcacggtgatcggtacgccgatgaggttgccgccgcagaaggttctgtagctctcctgattctcatcccacttcgggagcggaactataccgtactcgacgtcagacgagcggaaggttgtcgcggcgtcactgaccatcgagagtgcggcgagcgcgtgtccctcggcgaagaggtttgcctgccattgtgtctcgtagacgccggtgaccgggtcgtttccgctgattatgaagctgcccttggtctcgaaatagaagttgtagagcttttcgacgagggaggcgaccttttcgccgttgactacgatcttcagagtttccgccgtgtccttttcgagaaccgggacgtcacaggcgacgagccagccgtcgttgctcgcgatc

SEQ ID NO: 2761 - DNA, 2155 bp, Unknown
  16S sequences of unknown bacteria
ggtttttatacagttcaatatcaaaattatctacaagcactctcagcaatttaatgatggtttcattgttctccattgccgggatatcccatgtctcattttccgggagttctgccagtagtttttttaccttcttggttgctgaccagaacttcaaatgtctcaggaaatcgcaatcgccgctgtaaccgaatcgatatgttccaagctcgcaaacattgccactcattcgatcttcatccggaagagtcatcactgtatagccggatagttttagttcatcatagtctactgcaaccgtgtcgtcatccatatcttttccgcgaataatgcaataaagtttttccggcgtaaaagcaagaaagtcgctgtaaaaagcagcaattgggccgttagcttcctggtcaacatcacccgcatactttgcataatatttttcaaattcttctgagccttttaagtacagcgcatctcccttggtcagttgcttatcagccattatcttgtagaagcactgagtttcctccttggggtgagtctccgtatactttttgccgccaagttctgactgcatccgaatcgcatacggttccagttcggtttgcaacagcgcatactttttgacaagccgttttgcaaactgcacatctgcttccagctgttctagattgtcccctttcatctccagattcatctggtattctagttcagaaacacaggtctcttttgcgcagtccacaaacgagtcgtaaataccaaggtattttgtaatttcctccagatctcccgcaccactgccaaaatacagatatgcgattgcatagagatttgcgtcatatggatactgcatggtataggttttcaagaactccgctatcgtgttcttatcaatgccgccttggtcaaaattatctaccagttcttcgcatatatttttctcctgctgtgcactggccagaatatccgtttctattccaagcgaatcggtatactcaatgtcaacattatccccaaacgcccggaagatcatatcaatggcccgttcgtattgctctgtatcaaacacagcttttaatttttccgcaaaggccctttgttccttacttgcatgtgcagaattcataaaagagttggcaaatcggttcaccgcagaagtcgctgctttgtttgctgtgtacagcgcatttttctgggactgtgaaagatctgataccgcaatttccagattccgctgcccactgcggagcgccgaaatatagtcgatgtattcatgacgtccctgttctttttcaggatagaactgctcatatagttcaatcatgtgctcaaacacatgcaggaaatcccggcaagattcctgagcaatctcccgatacttccaacggaaattctggattacatccggtttcacgctgcggcggcgtaggccgctcgtagtagcacgcaaagtgctttcctgcgcctccttgaatgcttgtgcaaaggtcagcatcgtttcgtaaaaatggtcaccgcaggcacccggtttgtttaaagtttctgcctgtttatccagataaaatttgcgtgcctcctgcaagatcggcttcagttcttgtgcgacaccattatacgcatcgaatgttttatcgaacacgattaccttttgcaggtagtaaaaactccgactcccatcttcagttttttcctccgcaaacctcattccatttttgggggagatattgatattcgccggatcaaaaagttccctccggtactcctcctcaaaataatccagcatcttctggtcgcctttcggtaatttgcctgttatcagcattccgagcagcagactatagacttcaggctgttttcccagccattcacggaactcttcttcggataaaccatactcatccagaagacccacaccagagatcagtgcattttccactggactgagatcatcatttatcacttctttcaatccgccatgataaactccgtccagacaggaatagtccaacgcactgacttcctcttgcagcagattcatttcatcctcttctgaatcccaataggatagttccttggaaccttccggaatcagcataccctgcaaccaccaaaccgtatttcttaggtttgaatacaattccgacttaaccatgttata

SEQ ID NO: 2762 - DNA, 20875 bp, Unknown
  16S sequences of unknown bacteria
tgccaatttcgtgggtgtttttgtgagaaagttcacattgtttggacttttttttaccatatgacgatgtatactccggttttaaacagtttcgagagcgtaaaaatgtcccagaccctttatttaaaggctctgggactgttttttgtccgaccgtgaatgttgcatgtgttccttatcgtttgatattttttcccagggtcgatttcagataccactctcgatctaaattcatcggatagaccgtcatcatcgcttctagcgcttttgaattggtatacagtgctttgtataccacatcgtcgatatttgttacgttcatgttctttagcgtttctgtaatttggtgtgtcgtcaggtgcagaccagccttgttcagctgtacctcaagcagcctgtagatcatcagggatgcatagcagatcatgaaatgcgcgatcagatgttctcgtgtccgatgtcgtgccggccttgcttcaaaatcactcttaagcagacgaaagcactcttcgatcttgttgcgctcttcgctgatcctcaatatctctgttgccttatcgttcagattagtggctaccgcatagaatccatcatacttttcttcttcgcggatccgatcctcatccaattcgtacttgtcttttgtttgtcccttctttttgatgaaccttgtgacatcgtttggtcctttcttgtatttttcgggatccagattttctaatagctttttggctctctgtatctgtccgttgcggatcgaccgctgatattccatcatctttctggagaacgtgatgatcagcttctgttccagatggcctttggccctgaccatttttttctttccgtttttcaagatcttttcttcataatgctccatctccaggtctcgcgaagcatctatgatcttataagcgcgatcctcatataaacgcttattcgaatttttatcaaactcctgcatcgttttcaaggaaacaggagaatcattggatagaagtcggtaatcgcaatcgttgaatactgattctttcaatgtgtccggcagtttctttatagactgtgtgatgacgaaggccctgccgcccatagaattgaatttgcggatattgtaggagccaaggcctgcatcggcacaataaatgaattgttttcctttaagcatgcgtatcagcttgtcttccagcggaagggcagtggtctgctcgttttcgttcccgctggtcagacacatggagagaggaatgccatcacgatccatgaacaggcccatctcgatgatcggattaggtttgtgatccttacaaacgccgtatttgcgcaagccgcggatgatctcaccggtttcctcatctatatagtcctcgtcttcctgttcgatctcgaaataatagttcgtacagtcatagaaacaggtcgatgtattccttttgacgatcttgttactggcgtcaaagaggaaagcgataaattcgtcataatgctcgctcaggatgtccatggcgcgcatgacatgttggtaatcgaaggaaggatcttcaaaataattatgcagatggagaacggtctgaagcttggagcgcggttcgatgagacgatccaggatcaggatacggcagacggtgggaaaatcaaaagatatccgatattcggaagaggtcttcataagaaaagaagagaggttgagatcctggtagatcctgttggggatgagatagccgatgtttttggcagagctcagggagaaggaagaatcagaggcatcgagctttttttgcagattgatggtaagctggatgcgagtgatgtccttttcttcgttgagatggcgaacatattctttagcataagcgagaggatcaggatgatccttgaggagctgggaatgtttaccgatcttggcgatgttcttagaagtaaccttttttccattacggataccgatctgaacgtaataggtaggatcgctgaggcgtttatcaaaatagagtttcataagagatcacctagaagaattatagcagaaacgtgcaacacaagcaacacatgcaacacaaagttttataacttgacaatacaagagaaagaaaaagcccgataaaatcaggctttgtgtgatcttgaggggtagatcagaaaatcaaaactgtttaaaacccgttcagaaataagatggtgacattttcccttaacgagaggtgacaaaatcgcttaacggcgacatcgacaaatgtttttgttgctgttttatctcagttttgatattataagtactatcagaatactctgacatagagctactcgtaacaggggttactggagtagatttgactttgtcgaggattatatcgtaattcttcgagttaatttccgatagtcccaccagaatgaagagaaagcccttgcggcttttttattggcttaaccatcataatggtgactcaacagtttgaacaatgtattcgacatcaaaattatgacattttattgattttgtaagcttgtttcattgcttgaaaaacagtaaatcaccaaatcgttggtaaagcgtttttattttaggaaagggaggatgtggcatgatcgacagcatcaaggtccgcggggcccgtgtgcacaacctgaaggcggtagatgtgaatatcccgctgaatcagatcgtcggcatcgccgggtatccggctctggaaaatcatcgctggcgctcggcgtgctgtatgcggagggctcccggcgttatctcgaggcgctgtctacctatacccggcgcaggatgacgcaggagagcaaggcacaggtggatgaagtgctgcatgtgccggcggcgctcgcgctgcatcagcgccccggcatacccggcatccgaagcacgttcggcaccgggactgagctgctcagcagcctgcggctgatgttttcccgcctggcgtcgcattgctgccccaacgggcataggcatgcgccttcactggatgtggctgccggccgagagcttgtctgtccgacgtgtcacgagcgcttttatgcgccgtccgcggaggagctggccttcaacagccagggagcttgtccggaatgtgagggaacagggatgcggtggacggtagaccgcgatacgctgatcccagatccgacgctgaccatcgaggaaggcgcggtcgcgccctggaattcgctgatgtggtcgctcatggtcgatgtatgccgtgccatgggcgtccgaaccgatgtgcctttctacatgctgagcgaggaggaaaagcagatcgtctatgacggaccggcagaaaagcggcatatcttctatcgatcgaagaatactcagcaggcgggcgagctggatttcacctatttcagtgcggtccgcacggtggagaatgcgctggccaaggtgaaggatgagaagggcatgaagcgggtcgagaaatttctgaaacgcgaggtctgtccggcctgcggcgggacacgcctgtcgcagcgggcgcggtcggcgcacatagacggccgttcgctggcggatgtctgccagatgccgctttcggcgctggatgagtgggtgcgcatggttcctgcccacctgccggaagatatgcggccgatggcagagcgcatctgtgaatcttttctgagcgcttccgcccgtctactcgaactggggctaggctatctgtcgctggaccgcgcagcttccacgctgtccaccggagagcggcagcgcatgcagctggcccgcgcgctgcgcaaccgcactaccggcgtgctgtatgtgctggatgagccttccatcggtcttcatccatctaatctatccgggctgatcaacgtcatgcatgatctggtcaaagacggcaactccgtcgtgctggtcgaccatgatacacaggtgctgcgcacggcagactggatcgtggagatggggccgggagcgggatcgcggggcggacagctgatcgcgcagggcacgcctgcatcattggctgaggatccccattcgctgatcggtccgtttctttgcgatcgaaagatattgcctgtgcgcgaagaggaggatctgttcgcgcagggaacgatccggatgcgcaccggcgccatccatacggtccgcccgttggaagtcaccattcctaaaggacggctgacggcggtgagcggcgtctctggttcggggaagacgacgatggtcctggaaagcctcgtacctggcctggaagcagcgatccatggcagggcgctgccgccgcatgtgagatcgatcgacgctccgggcatcgcgcaggtcaagctgatcgatgccgcgccgatcggcgtcaatgtgcgctccaccgtggcgacctatgccggcgtgcacgatgatctcagaaagctgtttgcgaaaagcagcgaggccaaggcgcgcggtctgaaggccaaagatttttcgtataataccggcagcctgcgctgtcctcactgcgatggcaccgggatcatcagcctcgatgtgcagttcctcccggacgtgaagatcacctgccccagctgtcatggctccagatatgcgcgggaagcggatgagatccatatggtcacgccgacaggcaagacgctgagcctgccgcagctgatggcgatggatgtgcaggatgcgctggaagcctgccaggggctgaagacgatctgccagcggctgcaggtgctgaaggatctggggcttggttatctgacgctcgccgaggagacgccgggactatccggcggtgaggcacagcggctgaagctggccagcgagatgggccgcactcagtctgatgcattgtttgtctttgacgaaccgacgatcggcctgcatccgctggatgtccgcacgctgcttgacgtctttcgcacgctcgtggacaatggagcgagcgtcgtggtcatcgagcatgacctggatgtgctgcgcaatgcggatcatatcatcgatatggggccgaaaggcggcgcagagggcggaaggatcgttgcctgcggcacgcctgcccagatccgctctgcggcagacagcgagaccggaagatacttgtaagtgctgaacacatgatcgagaacatgaatatggtaagaaagaaaggggaatcttatgggacaagcaaataacggaaaagcaacggcatcactggtgctggggatcatctccatcgtctttgtgatggggacattttacactagctggatcggtttgatcctgggcatcctggccatcatcctgggcaacaaggcgaggaaggagacgccgggcggcatcgcgacggccggctttgtctgcgggatcgtcggcacggcgctgtgcgcgctgttctttgcgggctgcatgtgcgtggcaggtctgctcggacaggcggtgacctactggcatacgatgtgagctgacgatgtatcctgagatcacattattttcgcttcatcttcagtcatacgggctgatggtggtgatcggatccatggcggccgtgctctggtgtgtcttcgcggtgaagcgtcttgcgctcgatgtcaacgtgctcatcgatgtgctgatcgccgcgggcgtaggcgcgctcatcggcgcgaagctgctgtacatcctgaccgtgctgccggagttcatcacgcatatccagatggccttcacggatccctcatttcttctggccgatctgtccggcggcttcgtgttttatggcgggctgatcggcttgctggtcagcgtgctcttgtatgtgcgcaagaacaagatcagcgcaggcggttatctgacggcctgtgtgccggcgatcccgctgttccacctcttcggccggatcggctgcttccttggcggctgctgttatggaaaggtgagcgattctctgtttgcgatggagatgaccacgctggccaatccggatgtgctgatgccgcgcatcccggtgcagttgatggaggccgggctgaatctggcgcttttcatcatcctggccgtgctgttctttcgcgcagcggacgccttccgcatgctgggcttttatctttgcgcttatggggcgattcgcttcgtgatggagatgttcagaggcgatgcgctgcggggcatatggcttttgtccacttcccagtggatcgcattgatcctgatcccgcttggcattgccatgatgtgcaggccggaccggttcggccgcgcgcttttacgcatgcaaaaaaaggagtgaatgcgtttcgttaacgctgactattcgcatcaggtacggtgtaacccagtagaatgggtcacaccgtttttttttaccgtattattgcggattggttgtcaaatttgacgatttgtttttttgacatgaatttaacctgaggcaaaattgacaacaaatgttgtcgcaaatgactactgatttatagaaagccgtgctatgataaatgcataaaagtcatggaggtgcagttatggaagcgttaaaaaccaatgtagaccattatatgaaattaaaaggaataaagaggtatagccatttgctcgtcaacatcgctcacgaattaggaatcaaaggacaagacgcgtatgtatttgcagagagagaaaaatccaacttctcaaaaatgctgaaaggagaaagaccgcttaaatatgattttattatccctttggaaaaaatattcggcgtctctttagctaggttgttgaaggaggatgcgtataaattacctgtggaaagggaaaatgttccgttcgacaaaggattcagatattacgcatatctggatgatccaaaattgtatcaagaagaattcgacttatggcttgccaaagattgtcgatctatcatgacgaaaagcgacgaatttggaaagacctttctggattatttggtggaatatcattcgataaacggggtgagatatcttcacgatgaatatggaataaaattgagatggtggcataatcaatttgaatttgaaaaaggcaaaggcacaacatgggttcagtttgaaaacgctgtggagcttgcccgtcttgttgcaagcatgaacgatgtaaaattgttcaatgatatttatgattcctattttatgtttttttcaaatgacagttattgtacagagaattgcatcttttgtcagggtgattatttagaaataatcctagacaatgacggtttgtttaattcgatatttgaaacgaaatcgtatgagtttaagctggggaatattggcaaaaaaaagaaaaaagtcgattctattatatatcactcgatcaatccgataatcaacaactgtttgagacatgccttaaagcatttggacaaatacagacaaagagcgatagatatattggaatttggaattgaacacaataagaaagtagccagcgagattgattatgcgtattgttatgttttctcaaagcttggcaaattaaaagactgccgagaagaagattatcgtgatattgtcattttggccgatgtcaacgtagaagataaagaaataggggctttgattgatcggctgccgaaatttaaaacttcacaaggacgggaactatattagcgtttagaattgaccataatttaagaacgggcggcaaacgcgattctgaagatcgtgagatcatcattttcgttcataaggcaaatgattgatcttaaggatgaacgtaaagaaagacagcgcagaaagcatgtttgctttttacgctgtcttttgctttgacaatgccgatgaagttatcgtttgatctttttcactttcgatcttcttggcgtgtgttaagcttcccctttgcggaatacgtattcttcttgaccggaatctacgttgttccttctttcgatccgcgtgtagccgcgattctgcaggaaggataccgccggcgcgcatgtgcggtagcagcggcagaggaatccctcgtagtgctcctcgaaataagtcagcagcgcgcttccgatcccctttttctggaatcccgggatgacgaagatgcggacgaccccggcatcgcggatgtaggcgccaaaaccgaggatggcgccgccttcttcatagacgacgacatcagagcgctcctgagagtatttgtgacggatgctcttatattgcttggtccaataggtgtccttgaagccataatgggcgcttctcatgctcatcagccagatatcggcaatttcattgatgtcttcatttacagctttacgaatcatactgatcacttctttcttttcagcttttcttgctctgtgccttcgcctcgaatttttctttggcgacgataaaccgttcgtgggtggcggtcccgatgacttctttctcatctcttgcagtaatgctgaaggtgaccttgcggcggtctacgccagtgaccactgcggtcgcgctgaccatcatgccctccggtgtggcggcatcgtgcgtggcatccatgcggatgccgacagacgtttccccttcatccagatatggaacaagcagctgtgaggcggccttttccatcagtgcgatcatcatcggtgtcgcataaacatctacgcttccgctgccgacgctgctggccagcatctcgtgggtgacgctggtctccttcgtgcaggaagcctgaatttcgatttctttcatctgtacccctctcattcatagaacctgtgttcattatagcatagttttcttttgtacagccacactaatgatgaaggagtgagaaaatgttctgttataaggaaaaccgttttgtcagccagacgcatgggaagagggaagatgcgggagcacagtggatcgatacgcatcctgcgggcatcagcgcgcagctggaattctcctgtacgctgatccgctgcggattcagcgtatgccgcagagaggagcgcatctcgctgtttgcgatggctgctgagcagctgagcgtgagcgagagactggccatgcttctgcatgacatgcgcggagatgacagccgctatctggatgagaccagcgacccggcgccgcaggcggcatggatcgtatcgggcggtcagggcgaagatcgcgagcggcctgcgtttcaggattactgcgggctgctcgtggaaagcgagaaggccgctaaggaattcctgtgtctgtttgaggaagcgcgcaggcatgtgcgcgaacgggaaaacgtcatcctgctggaagagctgatgaagcgtcagaaaaacatcgtcagagagatcggcaggctgaaagaaggaacggcgcggggcgaagtgctgaccttcggattgacgggcgatggtgcctgggatacggacagctccaattattttgatgagcagactccgcgctttttcagcgaacgagagatccgcaattcgtgatccattgtcttggctgcggggatgtgctatcctttggatgaaggagtgatgagcatgaaacgcagcaaatatatcgatcatacgctgcttaaggcagatgcgcaggaaggggagatcatccggctttgcgatgaggcgaagcagcatgatttcgccagcgtctgcgtctattcttattgggcgaggacttgcgctgaacagctgaaggggaccgggatcaaggtgtgctgtgtcgccggctttccctctggcgcaatgagcacggcggccaaggcgttcgaggccgcagatgcgatccgatccggcgcggatgagatcgacatggtgatgaacatcggcgagctgaaagccgggcatgcggatgcggtgcgccgggatatcgaggcggtggtgcaggcttgcgcgggccatccggtcaaggtgatcctggagacctgtctgctgagcagggaagaaatcgcgcgtgcctgcatgatctgtgcagatgccggcgcggccttcgtcaagacctcgaccggcttttccacgggtggcgcgagcgtggaggcggtgcggctgatgaaagagacgcttgatggccgatgccaggtcaaggcatccggcggcatccgcacggcaaaggacatggaccgcatgatcgaagcgggcgcagaccgtatcggggccagcgccggcgcagcattgctggatgaatgaaaacaggccgccatggctgggcgtgatgcccatgccgtgacggccaaaaaaaacaccggaactccggtgtaaagatcagatggcgcctgaaacaagactcgaacttgtgacctgccggttaacagccggatgctctacctactgagctattcaggcaattcctgattgctcatatatattagcacagagtggaagtgctggcaatacttttttgtaaaaaaaacaccggaatttccggtgtgaagatcagatggcgcctgaaacaagactcgaacttgtgacctgccggttaacagccggatgctctacctactgagctattcaggcagcgctgattgctcatatatattagcataggacgggcttcatggcaatagcttgtgtgaaaaaatgtcattttttgaatgcgggcaggagccaggtgacagaagagagaaagaatgagcgtttgtacacaagtacaggggcaatttattcgcgaatcccaccggtatatgttatactgaacatatattgatattgacgatttgcgatgaaacaggagtgatcaagatgaatattcatgaatctggagaagactatttagaggccatcctgaagctgaaacaggaacatggcacggtgcgttcgatcgacattgccagggagctcaactattccaagcccagcgtatccagggcgatggggatcctgaaggaacgcggccttatccatatagaggagcgggagatcacgctgacggaggaaggcatgaagatcgctgagcgcatttatggccgccaccgtttcctgcagaagtttctctgtgagcttggcgtagatccgcagacggcggaaaatgatgcctgcaggatggagcatgtcctcagcgaggacagctatcagaagctgaagcagttcgtcgaggagcaccgcagacagtaagtgacggtcaggtccgggaaaagatcccggacttttttttcatgtgtgcgaggggagaaacggaaaacaggcgtatcaggtaaaggaaggcaagagaatggtctgtctctgtcgaggcagacggaaaggagtgaaaggatgaaaagggttttgaaaagactgggaacgctgatgatcatctgcgtcctgtgcctgagccagtctgttcagcttccgctgcaggcgcgtcagatcgtgcctgctgaggcagaagcgaagatggaggtgaagatctctccgacggatctgatccgcagcggattcaaggtgcgggtcgagacccccaaggggctccatactgattatgacaacaagtgggtcgtcaagatgagcgaaaagagcaacaccggctatgacagctgcgtctattcacggatctggatcaacgatcagcgcgtctattgcgtagatccgcttacgaatgcggtcgacggatcgcaggattatgacgatatctcctttggcgcgtatgtcactgatgcgtccgtccgtcagaagctgtcatacatcacagcgctgggctatggctttcagggcgacacgtcgcatgagatggactttgccacacaggtctgtatctggaggaccctgcatgaatggaagcccgggcaatacccgtccatcagccatatccatgcggacatccaaaagaagatctcccagatcgaatcccgtctggcactgatggaaaaggaggtctctttccatgggacgcaggtgaagctgcatgcgctgggcgaggaggatgccgtgacgctgtgcgatgaacatggcttgttccaatggtatgttccttctgagatcagcgagggattgcatgtcgaacaggatggggatgcgctgcgcatctgggcggatcaggaaatggagacgggcaaggtgaccttcagctgcctgtatgaaaacgcctcagcgatcatccctgtcgtgtttgacagcccgacttctcaggatgtgatgacgcttggccgaccttcgccgaagctggcagaggtcagcgtggaggtcagggtcaacggcgctttgcggatcttgaagaaggatgcccaaagcaaagagacgatcgagatcgccggcgtgcagttcggcgtctatcgggcatcagatggtcagctggtcgaagtgatcgagacagatgagagcggaacggcgcagatagacgccttgccatatggcgactatgagatcagggaacataaggcgccgtatggatatgtcctgaacacagcgccgatcaaggtgagcatcggagaagatggggagcatgagaccttgccggatggaaagacgccgttgatctgcgtgacggtggaaaatgagcagacagaggtccgctttcacaagctggacgcctccacaggggcgtttctggcaggcgctgaattgcgcatctatccggaagatgatccgaagacgatcctgaagcaatggacgagcgcagacgcgcctgaggtggtgtgcgggctcccttgcggacagcggctgatcctggaagagacgtctgcgccatatggctttgcctgcagcgagaagatcgtgtttgagctcgatgaagatggccgtgtctatgtgtacgatgaggagggagaccgtcatgccgtgcaggatgcaacggtcacgatggaggatgagctggtcaagggcaggctgagctggcagaagacaggcagcctttatcagcggaatgaaaagcaggagagcgaatttgggacgatgctcacgccggtgtgggaagaaggtacgctgagcggtgcgcagatcgccatcttcgctgcagaggacatcacggtgggcggcgtgacctatgcgaagcaggatgagcaagtagcggtgctggagtccggcagcgcccctgtgcagtcgccggacctgctttgcggcaagtattattatgtggagaccaggacgctgccggggcatgtcatcgatcgtcagcgtcacccctttgagatcaaggacgatgagagcacggaactgcagctggtgtctgaccgcctgcataatgcgcatgtccgcatccgcctgcagtttcacaaacagatggaggagccgcagtacagcgagctgggcgacgcgctcgcgaacgtgcgctttgggatctttgcggtgtcggatatctgcttcagcgatggcagcatcggcatcccggccggacagctgatcagtgtaagcggcgtggatgcgcaagggatgctcgaggactgtccggatcttccgcagggcgattatgtgctcagggagctggcgacagatgagcgatatcagctgtcagaaacggaatatccatttacggtcagcttcggccaggaagatgtctccatgatcacgatcgcgctgggcgatgcggtcaacgtgctcaaacgcgggagcatagagctgatcaaggcagatgcagaggatggcagcttgctggaaggcgcgcgctttgcgctttatgcggatgcggcattgcaggatctggtcatggagggagagagcggtacggatggacggatcgtgtttgacgatctggaattcggcgattattggatcgtggaggaacaggcgccttatggctatgcgcgcacggatgacatctatcatgtacagatcagcgatgatcatcagcagctgcagctgcgcgtggagaatgaggcggtcttgagcgatctgaaaatacaaaaggtcgattcagcgagcggcgagccgatcaaggggcgcgatttcgtattcgggctgtatgccgatgaggcgtgcaagacgctgatcatgaaggcgcacgcggatcaggagagcgcaacggcagtgttttccggactgcgctatggcacctattacctgaaagagctgcaggcgcctgaaggctatcagcgatcaaacgaagtgagcaagatcgtgctggatgaagatacgccgggcgtgtcacggaccgtcttgatccgcatcgcgaatacgcgtaagccgaagactgcggcgaacagcacagctctgccatgggcagcgctttctgcaggatctatcttggcagccgcatggctgaggaggaagcatagggcgcattgacgtgccgaggagccttcgcgtgaagcgggggctttttgtcatgtccggacagcaggcgcatagaatggtaaggagcgcgaggctcaggttttgtcggaaaccgtcagggaaacttgcttgacgtaatgtggcaggaccgtagtataatgagaacaatggatgtatggaaaggaggagcaatcatgatctatacactgacactgaatccctcactggattatctggtggaaatggaaaagctgatgccggggaagatcaaccgcgcagacagcgaggaaattttttatggcggaaagggtgtgaatgtttccatcatgctgaagcatctgaacgtcgattccatcgcgcttggcttcacggccggcgtgacggcagagctgtttgagaacggtgtgcgctcctgcggcgttaccccttcctttctgcgcgtcaaaaacggttttacccggatcaatgtcaagatcctcgatgaagaggaaacagaggtgaacggacagggaccgcagccggacgccgaagagatcggcatgctgatgtccatgctggatcgtcttggggaaggcgatgtgctggtgatggcgggcagcgtgccgaagagcgtgcctgacaccatctatgcgcagatcatgaggcggctcagcggcagaggcgtgctgtgcatcgtggataccagcggaagccccttcctgcatgtgctggaggaaaagccgtttctgatcaagccgagccttcgggagctggaggagatcttccactgcccgatgaaggaaggcgtgctgctctccagcatgatcgctcttgcgcagcgcggcgtccgcaatgtgctcgtgtcatgcggcgagcatggcgcatatcttctggatgagcatggcgggttttattacgggaagagcccggcaggacgtgtcatcaatacggcaggagccggagacgcgatggtcgctggtttcctgaagggatggctgcagacttccgattatgcgctggccttcaaaagaggaatcgccgcaggcagcgcgtcagcgttctccagaggcatggcagacgcagaggcggtaaagaagctgtatgcgaaagtgcatatcgaagtgatgagagagccggtgatggaaggctgagaaaactgggaggggatctcagttttttttttcgtgctgtggacacggctcttgacaggcagatggtccgaaaaacgccatgacagagaaagttgaaatttttgacaaaaaaattgaaaaaaggggtttacaaaggataggatgtgttgtatattattagagcaaacgcggaggtggtgaaacggcagacacgctgtcttcaggcggcagtgcccacaaggcgtgagggttcaaatcccttcctccgcaccatatgcaaagcaagccttcaaacgaaggcttttctttttgtccgaaagacaaaatttgtgtaaattgtactggaaattcatttcggcatatagtataatactactcgtaacgatgccgtggtggaatggcagacacgctactttgagggggtagtggggcaacccgtgtgagttcaagtctcatcggcatcaccatttgtaaaggaagcatgcagcggcgtgcttttttttcgttcttcaccaaaccgacacataaatgagaggagaacatgttatactgataaagataaggagagatgaagaaatgaatcagaaaaagagaaccagggccggaacgatcgcgctctatgtcctagccgtgctgctgctgtgctatggcgtctatatgatgtattctgcatatgattacgtctcacagtattacgcgtatcaggggatggacatcggttctaatcttgcggaggctgtccagtacatggtctcccagtcttacctgtatctgtgctttgcgctgttgttctatgtggctggcgtcatcctgcagaagctgaatgatctgcatgcctgcctgatcccgcaggaacagccggagacagcagatgcgcaggaagcggctgcggaaaccgacaagcaggaagcagctgtggaaaacagcgcgcaggaaacggccgaggatgagccggcagccggtttcgtggaagcgagcgaagaggctgaggaacaggaaggacgtcctgcggatgaaggagaagacacgcaggaggcggaagctgatccgaaagcagaagacgaagaccggcaagaggaagacaaacaggacgaataagcaaaaagtcatatcatcgggactgacccggcgatatgactttttttgcgtttattttgccgcgtccctctcaaaataagagatgagggcgtcggtgatcctctcgcttgccctgccgtcgccgtaagggttcaccgcgttggccatagcggcgtaagcgtggggatcatccaagaggatggatgtctcgcggacgatcgagtcggtatcggtgccgaccagcttcagcgttcctgccgcgatgccttccgggcgttcggtcgtatctctcagcacgaggaccggcttgcccaggctcggcgcttcttcctggatcccgccgctgtcgctcaggatcagataggcgtgacggatgaggttgtggaaatcgtagacctccatcggttcgctgatcaatacctggctgcagccgtccaggcattcatgcgccagcttgcggatgttcgggttcatgtggcagggatagatcacccggatgtccggataagtctcgcaaagcgtgcgtacggccgcatagatctgcctcagtccctggccctgattttcccgccggtgcgcggtcagcaggaggatgcggtgcccgtccgcccatcgcagcgcttcatggtcatacgcctcgcattcggtgagcttcagcgcgtcgatggccgtgtttccggtcacgatgatctgctcttccccgatgtgctcctgcagaaggttgtcccggctggtcgctgtcggggcaaaatgaaggtcagccatgcgggagacgagctgacggttcatctcctccggataaggggaatacttatgataagtacgcagccctgcctcgacatgcccgatggcgatctgttgatagaacgcggcgagcgcggctgcgaaggtcgtcgtggtatcgccgtggaccaggatcatgtcgggcttctcatcctgcagcacaggtgtcagccgctccaggatgtcgcaggtgatgctgtgcagggtctggccgtgcttcatgatgttcagatcatgatcgggcttgatcttgaatgtctccagcacgctgtccagcatctctctgtgctgggcgctgatgcagacgatgccttgcagctggggatgctgttcgatcgcgtggatgaccggtgccatcttgatggcctccggccgggtgccgaaaatacacatgactttatacatgaggatcctccttttggtcgcttcattttatgagtccatattagcgggtatgcggcagccaaacatcatcagaggaacaagttatcgtaaagaaacggtaaagaagtgatgtgacgacgattgcttaacagaatcttaacgatatcattactgagcggtgaataaacagacccgtgtctgttggtatattctaggaagaaaagatggtgagctgatgaaggaaattaccgtgctcggcgtcaggctgagcgtgacaagcaaagaagagatccgccgtgcggtcaaggccgctgtcgacaacaggcagaagctggcgatggtcgctgtcaatgcccgcaagatcgtgcgggccgttgagcatgaggagacccgcaggctgctggatacgtttgatgtgtttctggcagaaggcgccgctgtcgtgaaagctgcgcaggagccggtcgaacggatcaccggcgtggatctgatggaagatctctgcgcgcatgccgcggatctcggtctcagcatctttttatatggcgccctcctgtccaacaacctgaaggcccaggaggtgctgcgttcccgctatcccgatatccgcatcgtcggtcattgcagcggatatgaagacgacgatgtcgtcgaacagatcaacgccagtcaggcgaacatcgtcttcgtcgccaaagggacaccggcccaggagagatggatcgcggaaaacaaggaaaaaacgtgtgcgaatgtatatctgggggtcggcggagcatttgatatactgagcggctccctcgtccgggcgccgcgctggatccagaacctcggattcgagtggctgttccgcatggtgctggaacccagacgtttttcacagctgccggagctgttccggtttgaacgaatgatcagaaaagagagaaagaagagacaggtgaatgaaaatgaaagcagagaagagagaaatcagtgtagttggactggggtatatcggtctgccgacggcggtggtcctcgctcaggcgggccatctggtcaagggatacgacgtcaatccgagcgtgagggaaagcctgagtgagggcagaatccacatcgtggaaaaccaccttcaggaagcattttccgccgtgcagcaaagcggcaatctgcgcatcaccagcgagctggagccttcgcagatctatatcctgtgcgtgccgacgccgtttttggaaggagaggtcaaacgcgcggatctcagctatgtgcgttccgcggccaagctcgtcgcttccgtgctgaaggaaggcgacctggtcatcctggaatcgaccgttccgccgcacacgacgcagatgatgagcgaggtgctggcagaggaaagcggtctgccgatgggcagcttctatacggcgcactgcccggagcgagtgctccccggccgcatcctgtatgagctcgaacacaatgaccgcatcatcggttcgttcgatccgcgtgccgctcagatgaccaaggaattatatgagacctttgtcaaggaagggcactgtttgacttgtgatgatgtgaccgcggagatgtgcaagctggtggaaaacacataccgggacatcaatatcgcctttgccaatcagctcagcgagatctgcgccgtcgcaggcatcgatgtgcatgagctgatcgcgctggccaaccgccatccgcgggtcaacatcctgagcccgggactgggcgtgggcggacactgccttgcggtcgatccatggttcctggtggagcgttatcaggaagatgcttcgctgatccatgaagcgcgagtgatcaacgatggcaagccgcgctgggtcatggaacagatggaaaagcagctgaagggcgatcacagcgaaaagatcggcatcctgggcatggcatataagccggacatcgatgatatgcgggaaagcccgtctttgcatcttgcgcatctgctgcaggaaaaaggctatgcggtgtatggctgtgagccgaattccaccgcggatacgctggagggcatcccgctgctttcgctcgatgaatgcctggatgtctgcgaccatgtggtcattgcgctgggacaccgcgaatttctgagcccgcaggcaagggcgaagatcctcagcgtcccgcattatgactgcatcggatttgaacaaggagaaaaacggtgatgcgatgaaaaagatattgatctatggggacgtcgatctgaacctgatcgatggctccagcgtgtggctggtcaatctggcacggctgttaagcatggatgaggagatcatggtggatatcctgctcaagaagcggatccgcaatgagcgcctcgtccgggagctgcgcggcatttaccgggtccgattgctgtatgtgaaaaactatatcgacagactgacggaggtggatgcgggcaatatcgtgaaggtgatcagccgcatcgacgcgctgcgggactatgcctgcttcatcatccgcggcatgggcgtgatgaagccgctgctgcattctccgctgatcgatcgggtggtgccatatctgaccgatttctgccatgacagcgaacagatcagcgatgcggaaaaagattttctgcgcacgctgtatgagcgggtgaaggtctatctggtgcagacagacgccatgaaacgctatctgcagcaggtgctgggcgtggacggcgccaaataccgtgtgctctatccgatcgtgttccctttcccgcaggctgaacgagagcgcggctcgctgatctatgccggaaagatcgcgagagactggaacatcatcgagctgttggacatcatggaagaactgaagaacagcgatccggacatcacgctgcatatggtcggcgataaggtcaaccgcgacatggcggaggaaaaagaggagatcttccgccggctcaacgaaggagagaacatccagttttacggctcgctttcccgcggcgatctgcgggaggtgatgagccgctgcgagctgggctatgcattccgttccacccgggtggaccatgacggctcgcttgaggtctccgtcaagctgctcgaatatcttcaggccggcatcccgatggtgcttcgccgaagcgccatgcatgaggagatcctcggcagcgattatccgctgtttgcggagagcgagcaggaatgcctggaaaagatccgctgggcgtttgcaggaaaccggatcgaacgtctgcgcgaacagctgaacgagcgggccgcaaggttcagcgtaccgaaaacgatcgagatgatgagggaagcgctcagcgtatttcctgagcagcgtcagcgcctgctcgtatccgggcatgacctgaagttcctgaagccgctgtttgcgcgtatgaaggaagaatatgacctcatcgtgcaggaacaaagcgaatataccgatttctcggtgcgggaggcgaagcggctgcgcgatcgggccgacatcatcgggtgtgaatggctgttgacgagcgcccgctggtattcgcgaaacgcttatccg

SEQ ID NO: 2763 - DNA, 9579 bp, Unknown
  16S sequences of unknown bacteria
aaaaccttgacaaaaaaaaaaaaaaaacttatcatgtctataatatggaaaataagcggttcttgtttaagttccgcttgtttttctcgaataagttagcttaagctaacttattcgagaaggaaattaaatatttcagtaacatcagttaaagagggaaagaatatgtcagaggaattaactcgttttcaaattcaactgctattatattttttagaagcagagccgaaaaaaagaactgttacagatgctgcaagatattttggtaaaaccaaagtatctgtaacacgcactttggattctctggaaaagttgggtatagtagagagaacacaagccagaaaaacagtgctttcacactatggaacaaagcttgctcaaaaatttcaacagcagtatcaaatagcagaaaggtacatgcaatatttagacctaaccccattacaggcaaaaaataatgctttatctgcgttacttgcaggattttcggaagaatatttaaaccgaatgcaagaacaggaagaacgcatgtatatcaaagaagtgtttgccggacgccaaaatttcagtggacaagagttgtgtgattatttgaaagatggcagctacttctttccttttgttatttatagagagcatatcaaaaatggaaacaatatttcaatgggtaacagagggtttgaacacccgtgtgaactgattgtaaaagaccatattggaactatttatcttacgataagaacagtgagcgcaccttctgccttaacaggtcaattaatggaaggtcgcatcaaatcgctttcttatcagcttaatggaaaattgacaaatgctgaacaagaaggaagatatttttgttttcctgccaaagcgcttcaatttatttcaatggggagcggccgtgatattgtattgcatggaagtgtatgtatgcaaatgcaatgtagcgtgggaattattcacatgccggaaagtttagcgatttttaccatgtttatatcttaaaatcttgtaattttaaaattttctgtttcacatgtgaaacagaaataatttcttgctatttcctatcaaatttctatcatttacaaattattgcatcaaataatggctgaaatgagctgcattttgtttcataaatgaaacaaaatgcctatttacagtatctttttgtaatgctatatttattttgctttaagaacctactctgattgagggtatttttttaaagaaaaagttagcttcagctaacctgttttgtttcttaacatggttttcgttttccactaaaaaaacgaacccaaaaatcaaaaaagcgtaggcaaagttttttcaatgaaaccatgagaaaagaaggagggttccgcatatagaggaaattgtgggttactatgttatcatcgtgagttagcttaaactaactcaaatcattctcttatggattgataggaaaaaggaggaatttaaaactatgaacagaattaggcaaagctttgtaaagcgcagtctttcagctcttcttgccttgactatggttcttggaatgggaattatcaatgtctttgcggcagaaacaggagttgaaaatcaaaatggagctgtcacttttgcggcctcatccaataaaaatgttacccaattaaacgcacctgtggaagatggcgtttactatgcaaatatcaacttaaaaaacgcaagcaatcccacacaatattctatgggtaatgcagctttgagaggcagtaccagctatctttcaaaacaacccaacgacaccgaatataaacaactgattgtcgttaaagatggcaaagctactgctttggtagaatttatgccaatgggatatatcggcatgtatggcatgcttgcagaactggaggcagtaacgcctacacaatgcactcaatttggtgtacccgatgaagattatactgcttatacatccgcaaatatcctttcatatcacaaaacacaagatggcaaggtagtatatgacagttataacgatccgaactcgcaatatgtatttgacggtgtaggcgacgactgcaaacgtccggccggatttggtcgtgaggaagaatatgtaaacatttccaatcaaccgtatgctcatctaatgtcattggatgttacacctattcaaattgaaggctttggagatacacctaccactgcttctgaatttacagttgacaacgcagcatttgtacatgtatttgtaccggttatgttctctatttctaccagcaccggtgaccaatatgcaagaatagaagtagattggaacaatttacaaaaagtgtccaatcctgaaaataatgtacagtatcaactgtatcttgcaactcaagtacaaaaaggcaattatacagatgcttcttacaatgctttacaaacagccattacttctgtaaaagaaagattaacaaatatttggccttctcaaacaattgaagtatccggttccggtattcaggcacaacctgttttaaatatggatgagcctgacgctgacgaacaagctcaattggcatctcaactagcaacagctatgaataatctggaagaaaaaggggataaaacttctttaaattctttgattacagaagcagaacagaaagtagaaactgactatactacagcatcctgggcaacattccaagaaaaattgacagcggcaaaagaagtacagaacaattctgatgcaagcacttctgagattactgctgtagtaaacgatttgcaaacagcaatggacgctttggtaaatcgtgcaaatactgacaatctttcagccttaattgcaaccgctaaagcaaaacagaatgacggttatacaactgacagctggaatgccttacaaacagcaattaccgaggcggaagctgtcgttgcaaatccggattcttcacaaagtgaaattgaaagtaaattaaacgcacttcaaaatgcgctggatgcattgattgttgacagcggcaatttggacaaaaataatttacccgatggcacttattctatttacggcgaaatgattaaaatgaatcgccaagaacattctatgagcaatgatgcaatcaaccactacattaaattgacagtggaaaatgggcaatattatttaaccatggactttaaaggtctgtcctatctgaatagatttggttatttggcagaactttcttactatgagaatggttatacgttcggcagctacggttctatcaatggtactcgtgttttagctgatgtgctaacaactcagaaaaacgatgacggcagcgatgtcatagatgaatttaatcaggcaggcggttcttccgaaggattgctatatcctgaccaagtgaagcttccattggtagcagacgctttggctgatcctgacggttacgttcctcttcatgtatttgtacctgtaatggaagatatctctgaaggaaccggagaccaagatgttctgttaaaattggattggtccactttaacagctacttctgaagacgatccgaactttaatcctgatgataaccaagagcaatctcctgcagttgatttggtagatacagcaaccggtattaaagtacatgctgatgccggtacattaccggaaggtgtaaaacttgtagtagaaccaattacttccggagctgactatgataaagctacggtttctcttatggatgtaggcaagaaatttaaactgtacaacattcatttggttgacgctcaaggcaatgaagtacaaccaaacggtactgtaacagtcagctatcaaattcctgaaggatatgacgctaataatcttgctgtttaccgtatgaatgaagacggaagcaaaacattaattaaaggcacagtagaaaacggaacctattccgtaattcaaaaaagctttagccaatatgcacttgtagaaaagggcagcacaattacagatgcacaaaatacagcaaacagccctaaaacaggcgatgttacaatgattggtgtatttagtttcatcgctttggcttctgccggcgcgattgctgttactcttattgcaagaaaacgcaaagctgaataaggagaattgatatggttaatactgcatcaaagctatttaaggcactgtgcagtatggttgtaatgctcgctttggtggcgagcattacttctatacatgtatctgccgcctcacatggcatttataccgcgacagcagcaccgcattacagacatccaaatacaggtgtgattgaagattccggaggtgaaggttctgcggtattgggacaatctatgacagacagtgcaaccgatactcatgcgcttgttgaggtagatgcaaatggaaatacatatgccacaatacgtctgaaactctcacaatatacttccaatcaacaattttatattgatactacgggaaacggttcttacacacctgtctctgcaactatcatgcaggaagattatgcaaatgatacaacggactaccgcatcaaagttcccagtgaaaataccattattcgatgcaccatgtatgtagagcctatgggacgcaatgttgtttggtacattacgttatccaatctgcagtccggttccggagactttattaccagcattaccgtaaataatacccctgtacaagaaccgacagttcctgcacaaccccaagaaccatcacaatctcagcaggaatcttctgctcctgaaaccatttcttctgaaacaaccagttctgaaactgcgtcttcagaaatcaccagtgagactccttcagaaacttcatctgttttgggaatacaagaattcgatgtgaccagtgatacatcttctgacattgtctcagaatcagacggagctaatactgcggttatttggggcgttatcggaggtgtagtcgctgtcattatcataggcggctgcatttggtacttctgtttctttaaaaagaaaaactaggaggccggtcaaatgaaaatgaaaaaatttttgaccttaggacttgctgctattatggcagtttctatggtagggtgcgtcaatcagcaccctgaagaggcaaacggtacagctgcatcttctgatgatgtaagaattgtcgcaacttctcccgctactgcagatatctgtgacagattagagcttgatttggtaggcgtttgttcttccactctcagcaccattccggaacggtacaaagatgtcacacaaattggtacagctatgtctcccgatttggaaatattgaaatcgttaaagcctgactatgtactttctccaagcagcctgcaaagcgatttgcagcccaaatatgaatctatcggagtcaattccatctttttaaatctgaagagtgtggaaggtatgtatgcttctatttcagaccttggacaaaaatttgacagggaagagcaagcacaagcattggtagatgaattcaatgcatttatggaggagtacaaaaagaaaaacgaaggcaaagaatctcctcgcgtacttgtattgatgggattacccggctcctacattgttgcaacagaaaacagctatgtgggcagcttagtaaaattggcacgcggcgttaatgtttatcaaggaaccgaccaagaattcttaaatgcaaacacagaagatatgcaaagtaaagatccggacatcattgtacgtgcagcgcatgcactgccggatgatgtagtagaaatgttcaaagaagaatttgaaacaaatgatatttggaaacatttccgcgctgttcaggagggcagagtctacgacttatcttatgacaaattcggtatgagtgcaaaatttaactatccggaagctttagaagaattacagccgatgctgtacggagaagattcataaaaaacacagtaatgtttatgaaagaatgtgtttacaaggaggacgcttgtggtaagcaaactaaaaattattttatccttttccatcacagcggtggctcttgttgttctatttctgtttgccgtaaacacaggaagtttaaaagtgacacccatagaattgttcaaaggattatttatttcatacaacgaaaatgtagcgaccattttcgatctccgttttccgcgtatctttattgcaattttgggtggagcagccaccgcagtttccggcgtactgctgcaagctgtgatgaaaaatccgttggctgacccgggaattatcggcattagctcaggagccagtttaactgctgtattaattacagcttttgttcctgctttgtattattttacccctttatttgcgtttttgggaggcatgctggcttttattctcgtatacagtttgtcttggaaaggcggactttcaccggtacgtattattttggtcggtgtagcaatagaagccatgctttcaggtattatgagcgcatttaattcgggtacgggcagcaattattccggtgtagcgagtattgtgaatgcaaatatcagtatgaaaacatgggatgatttctacacactgctttggtatgtattggcaggactgattgcttccttttttgttgccggcgcttgcaatttgttggcgttggaagataaaacagcacgttcattgggcgtaaatgttacaagcagccgcattatcatatcaattatcggagtgcttctggccagcatttctacggctatcatcggacctatcagttttttaggcttaatcgttcctcatattgccagattgctggttggaagtaatcataaattgttaattccgtattctattttacttggagcatttactttgcttttggcagatacattgggacgcaccattgcagccccatacgaaatcagcgcatctattattatggcggtgattggcggtccgttctttattatattgctaaggaggtccagacaaaaatatgcaggataatatttttaccgtaaaagacctctcatttgcttatggaaaacaaaaagttttggacgatttggcacttacgttgcatgaaggaaccatcacaacgctgattggagcaaacggctgtgggaaatccactttgtttaatttaatgaccaaaaacttaaaaccggattccggagaaatcttccttcgcgataaaaatatagcagatttgaaattaaaagaatttgccagagaagctgctattgtacatcagtacaataccgcacctatggatatttccgtggaaaagcttgtctcatacggcagaacaccgtaccataccatggggctttctccgaatgtaaaaaaagacgaagaaaaagtcaactgggcaatggaaataaccgatacattgaaacacaaacacaaggcggtatcccagctatccggcggacaaaaacagcgtgtttggattgcaatggcattggcacaagatacaaaaatattatttttggacgaacctactacctatttggatatacgctatcaactccaaattttaaagttaattcgtcagctgaatcaggaatataatctcacaattgttatggtcctgcacgatattaatcaatctttatattacagcgatgaaattattgcgatgaaagacggaaaaattattgcgcaaggacttccggaggatatcattacaccggagttggtaaaatctgtttttgatgtggaattaaatatttcaacggaaaacggaaagccgtttatcttaccaatttaaaaaagatgaaacgtcttatattaataaggcgctttatccgtaaacagacagaagggaggctactgccatgaaacagaaaaaaacagtagaagattacttaaaaaccatatacatcttacagtgccgtaacggaattgtccgcggctctgatatcgcgcaagagcaaaatgtttctcgccctaccgtctccattgctttaaaagatttagagcaggagggctatctgtttacggatgaagcgcatgaaatacatttaacaaaaattggtcaaaaaattgcagaagctacttatgagcgacatcaaaccctccaaaacttacttataaaattgggggttgaccaacaaacagcagctgcagatgcctgtaaaatggaacatgctgtcagccagaaaagctaccgcgctttaaaagcattagcagaaaaacactgaatctgcaatctttttgcaaagagaaacaggaaaaggagaattgttttctatgaagctaaaaagaattatcttcttggttgttggctgtatttcgcttgggttaggatgcattggaattattcttcctattttacctacagtaccgttttttttggtaaccgtattttgttttgcaaacagctcacaaaaattacatgactggtttattggtacctctatgtacaaaaagcatttggaatcctttgtcaagaaaaaaggaatgaccgtaaaaaccaaggcaactatcattaccagcgttacacttttaatgggacttggtttttgcatgatgttccgcgtacctgtcggacaaattattttagcagttgtatgggtatgtcatatggtttatttcttgtttggtgtgaaaacaatcaaaaaagaagatattgaaaaacaatatccgtatgttatgcaattacagctggaacatgtggagcataaaaaacagcaaaaaaaattagtacgtattttaaataaaaacgagcatctgagagcctctcttgatacttccaattttgttatttccatccgctccgaacaagaattagacagagaaaaattcatacaaacagctcagcaagttggatgtaccgtaaaacccgctgaaacaattactgagaaagaaacagtcaatacataataccatataaactaaaacgccaatctcacaaaaggattggcgtttttaatttatcatacaagaataacatatcttactgtatttcataaaccatatttccttttccgacatatgatagagtaactacatagaagaggggagagagtatggagaataaaacagattatgtaacgatttcattatcgctgcatttagtcttcgcaagactaatgaaagaacatgcctttttcttagaaaatagttttatggcaaaagacaaggtattttcagatgaagcggcataccataaaaagaaatttgaaaaattgttgtccgatacaattgcgttgagtaatggtatgctgccgcagtacctcttggaatccggttgtattcttacaaaatatacgatgcaggcagaaaaaagaacagaatctttaacgggaattcctatcaattccgctataacatttgctgaacgtgaattaataccttgcagtcatccaaacataacacccggtatcatttatcaggtaaaacgatgcaatcaatatgccattcggattttaaatggaatgattcaatttaaagagcgcatattaaaacaggttctgtcttgtcaaatggccatcagcatttatccaacttggttgacacataccatttacgaagctaaattatatcgaagttatattatgaatgctgaaacaaaatattactttaaatacggaactgcaattcaaactcaaatcagttggaatcaaattatgacagaacacgctttaataactgcgggtatgatggatccaa

SEQ ID NO: 2764 - DNA, 32456 bp, Unknown
  16S sequences of unknown bacteria
gcccaccggcagcttcttgttttccatctgcgcaacctccttcttggcggtttgcctggcatactaccataagtatgtcatctttattgtaccgcaaatttttcgccatggcaagatggcaagaggaaaacacaatcccttaaaaccaactggggtttcaagggatttttttctgtgcgccgtctaccgggtagaagttttttaggattcctcttccggcagtttcttgcgcgtgcgagaggacaaatgcttatagttatcgctcgtggatacgctgcgcccggtctgccgctcgagattttcgcgggcgtcaccggcaattttgccgccccgccgcgcggcgtccgcattttccgccatgccctgcgcgtcgtcattgcgggcgatctccgtcgttgcggcttcgctcagctccgtaaacagcagttccagcgtgctcatatggtcgcgaaggttttctgattttagccccttcaggcgtttgtattcagccggcgtcatgccaaaagcggctttgctgatttcagcggtgaggatggcataatcgctgcttttttcaatgccgcgatttttccattcgttggtgagctccgcacgggtggcgacgccgcgcgcacgcaaagcgatccagtcgtcaggatagccttttttgcgatagagatcctgcgcgcgcaatgccgcgatttccggatccgcgatttcgcggatgcgctccgcgccaatggcggccagccagcgcttgaatggttcggctttcggcgaagggatggattggatgatgcgcaagagcccttcagaattggctgcctgtattttgcgttgcttgccgtcagcagcaatcatctgaaccggggtacaaattgtaccccagttgttggagagctctggatcccgagcgcgcatttttttgatgtattgttttggatccgtactgtctgtcaaagcttttacaacatccgaaacagaaaaataccattcctcatcctgccaaacccggcggatttctttttgctcaaacagcgcaatctcgctcatggaatttgcattcctcctgttgtgtatctaatgcccacgtactttacataatattataatatttatcatatcgaaagtcaagcgctgcacgagcgctttataatttgttttggccctcatgcgctctatcgttttcaattcgaatgctttttatatcaatgctctgcaccgggccgccgaaggcgggcgtggtgcgcagaatgcacgggatttttcccaatttgcggttgcgttttacttggcgggcgggtataatgggaggaacgaagactgggggaagatgcgaatatgaaacttggcgtagtagggttgcccaacgtgggcaaatcgacgcttttcaacgcgattaccaacgcgggcgcgcaggcggccaactatccgttttgcaccatcgagccgaacacgggcgtggtggccgtgccggacagccggctggacgtactaagcgaaatgtatcatccggaaaaatacacgcccgcgaccatcgaattcgtggacatcgcgggcctggtgcgcggcgcgagccggggcgagggcctggggaacaaattcctttcgcacattcgcgaggtggacgccattgtacacgtggtgcgctgctttgaggacgacaacatcatccatgtggatggctccgttgatcccgcgcgcgacattgaaaccattgaaaccgagctgattctggcggatctggaaagcgtggaaaagcggcgcgacaaggcggcctccctggtgaaaaaaggcgaggcgaaataccgcaccgaggcggacgcggcgcagaagctgctcgaccatctcaatgcgggccattcggcgcgcacctgtccgctcagcgaggaagagcgcgaggccgtgcatggctggtttttgctcacggacaagcccgtgctctacgccgccaacattgccgaggatgccatcggcgcggacaaccccatggtgaaaaccgtggaagaaatcgccgcgcgggaaaacgcgcgcgccatggtgatttccgcgcgcgtggaggaggaaatcgcccagttgccgcccgaggaaaaggcggaatttttgcaggcgctgggcattggcgaatcgggcctcgaccggctggtgaaggcctgttacgaactgctgggcctgatcagctttttgacggcaggccccaaggaagtgcgcgcctggacgattcccaatggcttcaaggccccgcaggccgcgggaaaaatccactcggattttgaaaagggcttcatccgagcggaaatcgtgccctttgaggatctcgcccgcgaaggcagcatcgctgcctgcaaggaaaagggcctcgtacgcagcgagggcaaggattatgtgatgaaggacggcgacgttacgctgttccgtttcaacgtatagcgcggccatcgcgctgccattggggcgctgcgcaaaacgcggcgccctttgcgcgctcagacgatttttagaaaggaatccagaaaaaccatgctgacaattgccttgatgtgcgttggcattgccgcggggaagtggctgttcccccggaaagggaaaacggccaacagccgcctgcaaacggcgctcaccattttgttgatcttcaccatgggcgtttccattggccaaaatgaagatttgttgcaaaacatcgcctccatcgggctggatagcgcgctgttttgcctgctggccatggccgcctccattttgctcgtgtatttggccacgcggaaacttttgccgcgcaaaaaagcggggtaggcgcatggcggttttggcattgattgcgctgctcctgggcgtgctttgcggacgcctgggcggagaaaacgcgctgtttgcggcgctcgtttcctgggacggcgttgttttgaatttgctgatggtttcggtgggaatcagcatcgggcagcaggccggtatcctgcaaaaaatccgccaataccattttaaggcgctcatcattccgttgggcgtgacggtgggttctctcggcgcgggcctggcgggcgcgcttcttttgggctatccgctggccgaaggcgcggcgatcgccagttgcatgggctggtatagcctgggcggcgccacgattggcgcgctatccggcgggctgtatggtagcgtggcctttttgagcaaccttttgcgcgagatcctttctttttttggcatcccattgctcgcgcggtttttgaaccccgccgcctgcatcgccgccgcgggggccaccagcgaggacaccacgctgcccatgatgatgaaatacacggatgaggaaagcgtggtgctttccgtgctgaacggcgcgatttgctccgtgttggtacccgtgctgatcaatgcctgctatcggtttttgggctgatttatgcagatcgcgggggtatcaactttcagagaaagaaatatttgaaggataaaactatgcaaaaagatctgtcgcaaggcaaggtatttgccaccatgtcgcttttcgcactgcccatgctgctgggcaatgttttgcagcaggcgtacaatgtggtggatacgtgggtagtcggccggtttgtgggcgcgggcgcgctggcgggcgtcggctcgtccttcacgctgatgacattcctcacttccatcctgctgggcctgtgcatgggcagcggcgtggtgttttccacctgctttggccgccaggacgaggcggcgctcaaatccagcgtgggcaattccttcgtgttggcgctggcggtgacggcggcgctcacggccgtgcccttgctgtgcgtggacgccattgtgggctggctgaatacgcccgcggagattttccaactcacgcgcgattatctctatatcgtgttctggggcatcccggcgattttcctgtacaatttcttcgccgcctatctcaaggcgatgggcaattcccttgcgccgctggtctttttgggcgtttccacggcgctgaacatcgccctggatttgctgtttgtggccgtgttcggctggggcgcggcgggtgcggcgcaagccacggtgattgcccaatacgtggccggggccgccatcgccctgtatgtgtgcaaaaagagcggcgtcgtgcgcgatgccctgcggcatttgcgcccaagccgcgccggcttgcggcagatcgcgggctgttcggtgttcacctgcctgcaacaatccgtgatgaacctgggcattttgatggtgcagggactggtgaacagcttcggcaccaccgttatggccgcgtttgccgccgccgtgaagattgattccttcgcctatatgcccgcgcaggaatacgccaacgccttttccacctttctggcgcaaaacgcgggcgcgggccgggcggatcgcgtgaaacagggcgtgcggtgcgcgtttatcacctcgctgagctattgcgccgccgcttcgctagcgctgtggatattggcggagccgctcatgcagatttttgtcgcgcccacggaaacgcagatcatttgggaaggcgtgcgctatttgcgcatcgagggcgcgttctattgcggaatcggcctgctctttttgctctatgggctgtatcgcgcgctgggcaaacctgccatgtccctggtgctcaccatcgtttcgctgggtacgcgcgtcgtactggccaatgtgctggccgccattcctagcatcggcgtggtgggcatttggtggtcggtgcccatcggctggtttttggccgatgtcacgggcctttgcgccttgcgcctggtgaagcgcgctggactggagcattgaaaagggactgcgaaagaacttttgctgttctttcgcagccccttttgataggcttaaggcttgcaggcaaagtggaatttgccatcgcaggaatagtggcccgccacgccacagggcgcgggcgtatgcagcctgccgtcgcagccgaaatggccccggattccgcaagtcgcggggaagtgatactgcccatcgcaataatagtggttggaataggggcacagcgcgcgcacatgatagcccggcgcaccgaggtggtgcttgccgcaggcggccagccggtggcccgtgccgctgcacagataagttccgcacacagggcatagcgcgtgttcggcctcatgcccatagacctggcagccgcggtgcccgcaagcgagcgtcttgtggtcgccgtgcgccttgtagcaccagggttcgccgcactttgcgcaggtggtgtggctgttggatttggaacaggggtagtccttgccgcaggatgcgcagtggtggaggggattgcccatgcacttggtgtggcccaactcgcagtattcgctgatgggcgtgcgatgcttggcgctgccgtcgtccacctggccgcagcgcgggcaaaggttgctggccgcgtctgtttcggcgccggaaacgccatccggcgtccacacgcgcaaatcgcagccggcggcgcgagagatggcttccggggcgatgctgtccgaggcgatgaggaaggcctgcgtgccgttgagctcggcgatgatggttccgcccaggctcacgagcaggccgttgccgttcccgccaaggaggaaggccaggctggtcgctttgccattgagcgtcagggcgggttccagttgggaaaccgccgcccagaacccggcgaagcgggtttcgtacgtgccgctttcgggcgcgaaggcgttaaaggcctgcgtgccgtcgcccgcgcccagcagggcgtacgtttgcgtgccggcgtcttcaaagcagatcaaaaggaagcggtcttgcggattggccgtggtttccgccaatgccgccgtggaaaaaaggaacatcgcggccaaaaccgccgccagcaattttttcatgcggatgcacctcccaaattttggctgacacagctttgacgcggcccagcggcaaaaagttcccctgtgtaaaggccgcgtttgccgcgcgatttgtcgccgcggttttatcgattgcatttgattttcctcgtatttgtcttttacatatgcgcgctatactatgcccgtactaagacaaggaggaagaaaaccatgaagaagattctcagcatcgtattggctcttatgctggtctccgtcgcggccgtggcggaaggcgagatcaccgttcttacccgcgaagacggttccggcacgctcagcgcgttcaccgagctgttcggcatcgaagagatggttcccgaggccatcatcaccaattccaccgccgttatgatgaccaccgtgcagggcaaccccgacgcgatcggttacatctccctgggttccctgaatgagaccgtgaaggctctcaccatcgacggcgtcgagccgagcgtcgacaccatcctcagcggcgaatacaccgtgtcccgtccgttcaacatcgccaccggcgctgaagtgagcgaagttgcgcaggatttcatcaactttatcctctccgagcagggccaggccgtcatcctggagaacggctacatcccggtcgtgaccgacgaggccgccactgacgaggccgccgcggaagagaccaccgaagaggccactgaggaaaccaccgaagaggccaccgaggaagctgccgaggttaccccctatgcgagcaacatggcggaaggcaatgtggttgtgtccggttcctcttctgtgaccccggtcatggaaaagctgattgaggcctatgccaccgtgaacccgaacgccactgtcgagctgcagcagagcgactccaccaccggtatgaacaacgccatgaacggcgtgtgcgacatcggcatggccagccgcgcgctgaaggattccgagctggaagcgggcctggtgcccaccaccatcgccatggacggcatcgcggtgatcgtgaacaacgaaaacaccctgaccggtatgaccagcgagcaggttaccaaggtcttcaccggcgaaatcaccaactgggcggatctggctgaatgaaagagcgcgtaatgcgctgggtatttgcactgacggcctgtgcgtcgatcgcggcggtaatcctcatctgtgtgttcctgttcgcgaacggcgtaccggccatggcggaaatcggcttcttcaatttcgtagggggccagcgctggaagccttccagtggcctgtacgggatctggccgatgatcgtcggcagtctgtatgtaaccgcaggcgcgctcatcgtgggcgtgccggcgggtatttttacggctatgtacctggcgcgcttttgcaacaagcggctgtatcggttcctaaagcccgcgattaacctgctcgcaggcatcccttcggtcgtgtatggctttttcgggttggtggtgctggtgcccctggtgcgcgaatggctcggtggaacgggcatgagcacgcttacggcgtcggtgctgctgggcatcatgattcttcctacaattataggcgtggcggaatccgcgattcgcgccgtgccagaagcgtattatgaaggcgcgctcgcactgggcgccacgcacgagcgcagcgtgttctttgtggtgctgcgcgccgcgcgctcgggcgtgctggcgggcgtggtgctgggcattggccgcgccattggcgaaaccatggccgtgatcatggtggcgggcaaccagccctacatcccctcgagcattctggatggcgtgcgcacgatgaccaccaacatcgtgctggaaatgggctatgccacggatctgcatcgcgaggcgctcatcgccacggccgtcgtcctgttcgtgttcattctgctcatcaatgccctgtttgccgtgatcaaaaggaggatgaagtaaatggccaagcagcacgccaagcggcgcgaccccgtgagcttcgtgctccgcctgctggtgcgcgcatccgcgtgcatcgccacgggtgctctggtggcgctggtgggctatgtcctcatccaggggctgcggtatatgaagcccagcctgttcgcctggacctatacttcggataacgtgtccctcgtacccgctctgattaacaccgtcgtgatgaccgtgctggcgctgatcatttccgtgccgtttgccattggcacggcgatctacctggtggaatacgccaagcgcggcagcaagctggtctcgatgatccggctcaccacggaaacgctttcgggcattccgtccatcgtgtacggcctgttcggcatgctgtttttcgtcacggcgctgggctggcggctctcgctgctggcgggcgcgttcacgctggccatcatgattttgcctttgatcatgcgctccacggaggaagcgctgctggctgtgcccgatctgtaccgcgagggcagctttggcctgggcgcgggcaggctgcgcacggtgttcaaggtcgttctgcccagcgccatgccgggcgtgctggcgggcgtgattctggccattggccgcatcgtgggcgaaacggcggcgctgctctacactgcgggcacggccacccgcctgcccgatagcatcatgaaatccgggcgcacgctttcggtgcatatgtacgttttgtcgaatgaggggctgcacattggcgaggcatacgccacggccgccgtgttgctgatcatcgtgttcgccatgaacacgctttcggcaatggtagcgaagaagattgcgaggggatccaatggataaattccgagttgaagggctggatttgtattacggcagctttcaggcgctgaagaacatcaacctcaccattcgcgagcacgagatcacggccatgatcgggccgtcgggctgcggcaaatccacgcttctcaaaacgctcaaccgcatgaacgacctggtggaaggctgccgcgtggaaggcaatgtgacgctggacggcgaggatatctacgcgctggacgtcaacctgctgcgcaagcgcgtgggcatggtgttccaaaagcccaatcccttccccatgagcatatatgacaacgtggccttcggcccgcgcacgcacggcatgaagcgcaaaatccaactggatgagtgcgtggaaaaggcgctgcgcggcgcggccatttgggacgaagtgaaagaccggctgaagaaaaacgcgctgggcctttcgggcgggcagcagcagcggctgtgtatcgcgcgcgcactggccgtggagccggaagtgttgctgatggacgaacccaccagcgcgctagacccaatttccaccgcgcgcatagaagaacttgccatggagctaaaatcgcagtatactatagccatcgttacccacaacatgcagcaggcgctgcgcatctcggaccgtacggcgttcttcctgctgggtgaattggtggagatggacgatacgcaaaccctgttctccgtgcccaaggattcgcgcacagaggactatatcaccgggaggtttggataaatggggaattggtttcatgacgagctggacgcgctgaacacgcatctgctggaaatgggttccatgatcgaatacgccatcgaaaccggcgtgcaggccatggagcagcgcaacgcggaactggcgcgcaccattgtgagttacgatcgcgagatcgatcagaaggaacgcgaaatcgaatcgcagtgcttgaaacttttgctgcgccagcaccccgtggcgcgtgatttgcgcttcatctctgcggcgctgaaaatggtgacggatatggagcgcgtgggcgaccaggcggcggacatttccgaaatcgtttcctacatcgcgcaggagggctacatcaagcagctggagcacattccgaagatggcggaaaaggcggtgcacatggtcaagcgcgctgtggacgccttcatcaaccgcgatttggatctggcgcgcgccgtgatcgatatggacgacgaggtggacggcctgttcgatgtgatcaagcgcgagttgatcgagttgatccaccagaattccgatatgggcgcgcaggcgctggatcttttgatgatcgccaagtatttcgagcgcattggcgaccacgcggtgaacatcgccgagtgggtggaattcgccatcaccggcgtacacaaaggggagaaaatgggatgatctatgccgtggaggacgaccgcaacatccgcgagttgattgtgtacgcgctgcggcaatcgggcttcgaggcggaaggctttgaggatggttcgcggctgatggaactgcccgcgccggaactggtcatcctggatatcatgctgcccggcgaggatgggctgtccattttgcgccgcttgcgcgcagaccccgtgcgcaagcgcgtgccggtgatcctgctcacggcgctttccggcgaggaaaaccgcgtggacggctttgaggcaggcgcggacggctacatcaccaagcctttcggcgtgatggaactgatcgcgcgggtgaaggctgtgctccggcgcggcggctatggcctgcgcgtgggcggcatcgagctggatgaaaagcggcatgccgtttatgccaacgggcaaaatgtgcagctcacgctcaaggaatacgagttgctctccttcctgatggcgcacgcgggtacggcgttcgatcgcgaacaactcctgagcgaagtgtggggcatggactatttcggcggcacgcgcacggtggacgtgcacgtgcaaacgctgcggcagaagctcggtagctgcggttcgcaaatccacacggtgcgcggcgtgggctaccgcatggagggggacaggacgtgaagcgggcaatcttctggcgcgtgatggcggtggcgctggcggcggtgctgctttcgggcgcgattctgctatgggcattttacgatacgataaccggcgaactggatgcttcggtggagcgggaagcccgcatcgccgcgctgggcatgaaccaggcggcggatccacaggcgtttctagaaggctttgtgccgggcacgcgcgcaacctggatcgcccaggatggcagcgtgttgtttgatagcgaagcggacagcgcgcagatggagaaccacgcggaccgcccagaagtgcaggcggcgttgtccataggcgcgggcggcggttcgcggctttccgatacgatgcgggagcgcacgcattattttgccgtgcagctagccgatggcacggttttgcgcctttcggaaacgcatgaaaccgccctgggccgcgtatatgggattctttgggtattcgtgctcctgttcgtgggcatgatcgtgctgtgcgcgctggtggcgcgccaggccgcgcgcaagctggtggatcccatcaacggcctgaacctcgatgaccccgaggacaacgacgtatacgacgaactcgccccgctgctcatccggctttcccgccagggcgcgcacatccgcgaacagatggcgcagctggaaacgcggcagacggagttcaccgccgtggtcgataatatggccgaaggattggtgctgctcaacgccaatttgcgcgtgctggccgtgaaccgcagcgcgctcaatctatttggcgccgcgtccgattgcctgggcgaacatttgctcaagctcacgcgggatcacgcgattgcccagattgtggaccgcgccgccgcgggcgcgcgctgcgagcagattgtggaaatcgatggccgccagtatcaggccatggcgaacccggtcaaaggcggcggcgtggtgctcctgatgccggatgtgagcgagcgctacgcggcggagcacatgcggcgcgaattttccgccaacgtgtcccacgagctaaaaaccccgctcaccacggtggcgggctatgccgaattgctcgcttccgggctggccaagccggaggacgcgcagggctttgggcagaagattctcgatgaagcgggccgcctgctggtgttgatcgatgacattatgcgcctttccaagctggatgagggcgcgccggacgcgcagatgcagattgtgaacctgggcgaaatcgccaaagaagcggcggaacgcatgcgcccgctggcggaaaagcaaggcatcgcgcttgccgtggaaggggacgattccctggttacgggcgcgcgcgccttgttggaagaaatggtgcgcaacctggtggataacgcgatcaaatacaatgtggaaaagggtagcgtgcgcgtgtcggtcaaaaatggctgcctgacggtggaagacacgggcatcggcgtggatcagcaggatcagcagaagatctttgagcggttctatcgcgtggataagagccgttcccgcgaggcgggcggcacagggctgggcctgtccatcgtgaagcacatcgcgcaactccataacgcgcagatttcgctcgccagtgagccgggtaagggcacgaagatttccgtgcagttcccgcggtaaagcgcggagggacgggactgctggacaaaccgcgggtttgccaatgatcaaaagggcgggggagccaattcccccgccctttttggaggagatggttgctctcgccgctggttctataggccgttcgcttgatgctcggtaggttgcatattcatagaaaggtatattttcatttttatagcacatcaattatgatataattttaaagtgtataataaaaataagaaatatataaatgaaatgttgaatttacaaatatagcgataagaattcaaaattttttggggaattaaatggtgagttgctgttcgggtgaggcgattttgcataaaaatagaagctatggttctacctttggaattagagtgaagcgggatgtcgctgttttacttgcgagagatatcaataatgctcaaaaatttcgaaattaatccaaaaaaatttttggcgcgatgcaatcggacattgacaaaggcatgcaattatgatatattataaacgcgaaggagaaatagtacagcataactattgcgagtaagatttagagtaattgcataaaaattgagaaaagcaacggacattaatttttagattaaataaatttcgaaaaatatgcttgaggaggcggctacacgatgagggaaaattcgaaaaatttggcgggtattgggctccaaaatgccggtaaagggacactgcgaaaaaagttgtatcgccatagatattgctattttatgctactgccagcgctgatcatcgtttcgctattcgtttataaaccgataatgtattggattatcgcttttaaggactataagattggcggtagcatatatgctggcagttgggcaggcctggagtattttagggagttttttcaggacagcacagatgcatactatgtattcaggaatacgttaagttttaatatcgtaagcttgattttgagcacagttgcatcgatggcatttgcaattttattgagtgaaattcggcataaaaaactgcaacgctttattcagtctgcttccatttttccgtactttgtttcttgggtaatagcgtattctttttgccgtgccttttttgctactggtacggggttagtgaatacagtgctgatgaatgcaggaattataaaaaaaggatacaacattttgggagatccgcagtatacatttagcttgctaataggagtgaatttgtggaaggggctggggtatagcgcggttatttatcttgctacaatagcgggtatagatcaagagcaatatgaagctgctgatatagatggtgcaggacgccttgcgaaaattcgttatatcacaattccatctttggcggcaactatggcaattttgttggttttaaatagcggatggctcctttcatcgaattttgatatgttttatcaattttcaaatccgaccaatcaaaccgtaacagaagtgtttgatatgtatgtatatcggtatggattaaaattggggcgctactcgtatgctacggcggttgggatttttaaaacagtaacaagtttagtgatagtgatgttgagtaatattgtttatcgaaagacgatgcataggtccatattttagaggagtgaagtagttatgaagaagcagaaaacacaggtttctgatgtattgttctttggcgttgatgccattgtcatggctgtagttgttatatcgacgatatatccgtttatatatatggttatgcgttcgttttcgagtggatcgacatttgggaaaattttgctgtggccatccgaaccgacaactattgcctatcggatgatgattgagaaagtgaatttttttgatggggcagtaatttctatacttcgttctacgatctgcccagtttgtacaattttgtgcatttatatggcgggattttctcttgcaaaggaggacttgattgggcgaaaatttttgtcgcgatttatcacattttcaatgtacttttcggcgggattattgcccgcatatatgaacatggtaagcttgcatatgactggtacattttatgtgtatttgattccgtgccttgtgaacgcattcaatatgatacttatcaaaacctatatccaggacttgccacgttcgctagaggaatctgctgaaattgatggcgcaaatgatgcacatgtggcatttttggtagtattcccattgtgtttgccagttttggcggcggttatgttgtttgagtttgttggacaatggaatgcgtatacagatacgttgctgtacaattcaaatgtgccggagttatattctttgcaatatatgctgagcaatttgctgaatgctactttgcgggtgtctccgtcagacattcaaagtcaagtggaacgtcagcgctttaatagtgacgcattaaaaatggctatgaccgttgtcgtgtgcttgcctgtattaattgtatatcctttccttcagaagtactttgtgaaaggtattctgattggatcaataaagggataagaaaaaggaggaagaaggatgaaagcgaatttgcgatggttgtgcttgggggtaacgttgatgctggctttttctgctgtcggtatggcagaagaagcagcgcgggagcctgtggtcattaagatggttggcgacgatggttttgggaatgcctatagcagcttagagagcgaagttggacagatgatttacgaagaccttggaattgagattcagtttgttccgggcaatagcggcgatcaatttgatacggcgatgatgatgctcgcttcgcagaattggggcgactatgacattatcaataccgcgacagatgatgctactatgcgctatattgaggcgggtgcttttgtaaatttggacgactacaaggacaagctgcaaaatttttatagctattctgcggatttgattccactctggcgcagtctggataaggcaaatggtgggttgtatgtatggcaggctgggccagagcagaccgcgttggtgggcactccgctagatatcgcggtgcgctgtgatgttttggaggcctgcggttatccgcatttggacactacggacgattgggtggctttcttaaaacaggcaaaagagctattccctgaacagaacggagagcctaccgttgctatgagtttcttttgggggaattccattggtccaatggttgccacataccttgtgcggcattcaggctatcagcatccagcgaagacgacggcgatgattgatgtggaaaacgagacgtttattccattgttcaatcatgaatactgcaaggcggcgcttgatttttataataccttgtatattgagggcttaatggatccggatgcttggattgatgattttgccgagcagcaggctaaaatggatgcggggactgctttgacggtacattttaccaattggacgttgtctcaagccaatgcagcggcggatggccgaggtcaacccgagcagcattatattatatgccctattcgactgcagattgccaaagatgaagggcgcaatgtgcgctacgaatcgtatggtagcctgcgcccagacgatacgcgaggaattctagccacatcgcccaacattgagcgtatcgttgagctgattgactatctatccagcgaggaaatgtcaattcggctgcattggggtgtggaaggacgcgaatacacagtgaatgaagatggaaaaatggtgattacagaggagtttgcaaggatatacaatagcgaggagtatatggattatatggatgagaagggcttggactcgttggggcgtatgttccccaccagaacatttgctctattgagcaatggccagccctgccgcttccaggtggatcctgatttcttgatgcaaaatgccactgagacacagttacggacttaccagggaatgggatatgagaacatgttgtccccgtggaacgatagcgaggatttcgagtacattccatttgacaataccctgtatatgcaggcagtggcactggatagcgcgacagatatagccaagacggaagaaaggataatttcttatttggatacgcaaatcccattgattatcaacgccgaaaccaaagaggattttgaagcccgctatcaagagacctgcgagcaggtgttggctcttgggctggaagacgtagttgcggcctataacgccaatcttcagacgctattggcccaataatcggtaagcggacggcaaagccacatggtgtgcattggaatatgatctaggatagggctgttgtgctgcgaaatctttcgcttgcccaggcaaagaaatattctcaaagtgtttctttctgagggcctggcgcgggacgaaggcgggcaaaacctggcacagcagcccctttcaaaggagaaaacacgatgagtggaagagaacgcatcgaaaaaacccttgaaggccgcccaatagatagaataccatggaccacgattgccgacgaaaaatctcgcgaagggatgccgcaggagtatgcggaatgcgattatatatcgttttatcgcaagatcggctgcgatattttggcatttgggaaatatgcaatgccaaacgaatttcagccccgggaccctttttactataaatgggaacacacccaagtgtcgtacgaaaaagatggcgcgacggtcttagagcgtaggctgggcgggagcgtgcttacttccgcttggcgtgaagggcaccctgtgaaatatcccgtggaaacgcaacaagatgcaaaggcgcttttggaaatatggaaagcggcaaatgttttggaagaggcggatttcaaagcgagctgcgtggcagcggacgaatgtattggaaaagacggcgtgtttgcgctaaccttactgccgtcccccgtacaaatgctgatagaaaacgaatgcgggccggaaaatttttattatcttttgcaggatgaaccggctttgatggacgagctcatggatgcgatgtttgaaaagcgcaaaatagagtatgaaattgcggcccggctggcgccatttcgctggattattccagtagaaaatacttccaccacgctgattagcccgaagatctatcggaaatacactatgccgcatatggcggaatttgcgcgagtgatgcacgaaaatgggaaaaaggccattgtccatatgtgcggcttagtgaaagggctgttgcgggagatacgggaaacgggtattgacggcattcatgccctcacagagccgccgataggggactgcacattttgcgaagcgctggatgcgcttggcgagcagacgattctcgtaggcacgcttcagcctgccgtgtttcaaagtccatttgctaagcgcgaggacatttttcgatgcgtgaaggctaccttaaccaaacggattgtggaaagcaatttcattttatgcccgtgcatcgatggcttgcccacgccgctatggaagcttcaggctgtgcgggatgcggtggaattgtatgggcaaaaataggctaggaggcatagaaagaagatggcgacgatctacttaaaaaatggcggcgtggacaaagatgattttgaacagattgaaaagatatggattcggcaactgagcgagcgaggctgtgagccgagcgcgaatgggacacctgtgacgctgcggctggataagcggattgatgaggatgaatatagaatttttgcggacggaactctggtttcgggcagcaaaattggccttttggcggcgctggggcgttacttgcgcgacggttcctttgacggcaaagggggctttacaccagcgacagaagatgttgctttgaaaatgcgcagcgacatacgggggatgtattttgcaagccactttttcaatttctatcatgtggctcccatagaaaaagtatatgagattttggatagcttagcgcttcgcggctgcaatgcattgatggcttggtatgatatgcaccattatacaggcgtggatgatcctgagtctgtaaaaatgattcagcggctgaaacagattttccgctatgccaaagcgttgggtatgaagctgtgttttggcacgctggcgaatgaagcgtttagcgggacagacgaggcaattcgagcggattggcgcgcgataaatggctataaaacgccgccagtaggacattatcatgtggaaatttgcccaaatgcgccaggcgggatggaagaaattctgcgccagcggcgcgcagtccttcacgcgttttcggatattgcatttgactttgtaagtttttggccgtatgatcagggaggatgtacctgtgcaaaatgcgctccgtggggcgcaaatggttttttgaagattgcgccggagttccgcaaagttgtggaagaagagatgcccggggcgaagattttgtgctcaacgtggcggtttgacgatttcattgacggggaatggcaggcgttttatcagcgtatgcgggaagaacagtttcagttttttgcatatttattcaattattttccgagcttggaggctgtgccagaagggatccggcgcggcgtgatgcctggcgggaaaaaaatgatatcctttccggaaattagcatgcgtggcgcggtaccgtggggaggatttggcgcaaatcccatgccagcctatctagagaagaacgaacgggaaatggggaaatattatgtggggtgcttcccgtattccgaagggattttttcagacatcaataaagcgattatgctggggtttgccacgggccaatacgctaccgcatatgacattttgtgcgattatgcgaaatatgaattctgcgcaccgcagccggaagcggtggcatccttgatgtttgatatggaggaaacgctgccgcggcaccgcatggatcagcacggcgtttgccaagactatttgcggaaagaggctccagcggatacggtattccattttgcgtttgaaaatccgcagaaaattgacgccatttacgagcgggcaagggcgattgacgctcaattgccacaggccatgcgcgctacctggcgttggcgcattctatatttgcgagcggcaattgattttgaactctatcacaatgacggcgtccaaacggaaacgtgtgaagcatattaccgggagcttacggagatctattatgcgcaggaggcggattattgcgtttcgcctccgtcgcgggaagctatgcgcttaaatcgtggcgggtttctcctgtaacggtaagaaggagagaacatgacaaaaagcggagaactcgtttcagggttctccgctttccatatatggcggcgagcagggcaatccgcaagacaatcttttcgcgccgctgctgacgccagtttctcttggcgcgttatccggaaaccgcgcggattccccgaaaccgcgggcgacagtgccgtcaggcctcccaggcgccgtaataccagccggtgacgccatttttttgcgccagcaggccgcgcggggtctgccgtactacctggagcagatcgccaacttccacgcccagggcgaaatccgtagtttccgtatggtcgcgtccatcttcctgccaaatgccgtctgtggccgcccacagcacgcggcccgtggcttcgtgccgcacccgcgcgagcgcgccttcccggctcagcacgtgaaggggctcgaaataatgcacgttcagggaattcttgctctccgcctgcgcgcttttcgcgcgcactgcgggcaaagcgccgtcgtgcacgcaagcgcaggaaaacaccccgtcccgccagaggagcgcgttgagctggccgctgcgctttacgccgcaaccgccgtcgatgccgatgacgttgcggcgggggttgaaatacggcagcgcgcacggcacgcgcggccgggcgttgaccgtgggcatgtggcccacgaccacggtgcgctcaaacgccgtttcttgctggaaaaaatcgtcgcactttaggtatcggtacggatgggacgcatccagcgccgccagatctccgtgcggcaggccgccatgcacgaagaccatttctcccgcgtccagcaccaggggccgcgcgagaaaaaagcggatcagcgcgccaaagtgctccatcaccttgggatgcgccgcgcgcatggccgcttcgctgctcgaatccatgcccacgcgcgcgcacatttcgccatatagcgtgttgcccgcgcgcgccaaaaggcgctgccggtttttgtacagcagcgcgcaatcgcccttttcaatggcagaaagaatgtatagctcccaattgcccagcagcaggcgcacattttgcggcctggccgcaaaaagccgcgcgacaaattccagcaccggcaggctgtgcgcgccgcgttcgatgtaatcgccgaggaagaccagcgcgtcgtcctcgcaatagcgcacctgatccaatagcgcgtgcaagagctgaatgtgcccgtgcacatcgctgatggcgatcagccgctggccctgggccaggcgcagggtatcgatcattcgccctccggcgcgtagagaatgcgcccgcaattgtcgcactcgacaaccgcgtcttcgcccacgattttcttcaggctggcggaaggcagcgtcataaagcagccgccgcactggttgcccaccagcttggccatgggcggggacacgtgctgcttgatctgccggtagcgcagcagcaggttgggatccaccttgcgcgcctccttttccgccgtggcgcgcagggaagcgagcttttcgctatcgcgcttgaattccacgtcgtaatccttcttcagcgcgtcgaaatccgccttggtgcgcgccgcgcggatgcgcacttctttctgctgccggtcgcgcgtgatggcgtccttttgcatttttttcagttcctgctcgtagtgcgccagcgaatccatcagcttttgcaccgaagccaggcgctcttccacggcttccgccgtctggggcggatcgttttccagggcttcctttgccgcgtccagcagatcctgcagccgcgtggtctcgtcgcgcacggcttccagccggtcgagcatgccagcgacgtcatcctcgatgcgggccatgttggcctgctggtcgcgcaggaaattgcgctgcttgatcaattgctggcggttgggggaattgcgcatttcttgctcaaagcgctccgcgtccatatccacctgcatgtattgccacaacaaatccaactgcatatcttataccctcccaaaggcgttgatgatattgatttatcctgcggcccggtcaaatatcgcaaccggcccgggaattttttgcgccagggcggccaggcccacgcgctccgtggggccgtgcccggcttccagcacgcacaggccggattgcatcgcttccagcgcctcatgatagcggatttcgccggtgacgtacacatccgcgcccgcggccagggcgatcttccaaaattcgccgcctgcgccgccgcacacggccacgcgcatgcccaggggcgaaccatagagccgcacgggcgcgcgcaggcattcctccgttcgccgcgcccaatcgcacgcttccgccttgcccacgcgcaggccgccttccaggggcagcacgttgctaaggcccagcgccgcggccaggcaatcgttcatgccgccgggcgcgttgtcaaaattggtgtgcgcggcaatcagggaaacgccttcgcggatggcgcggcagagaaagcgcgcctccacctcgtcctccaccaggcgcttgcgcgcgcgaaacagtaccggatggtgcgtaaccaggaggttcgcgccccgcgcgcgggcgaaatccagcgcctcctccgtggcgtccagcgccacgacgcagcccgagacctcccgccgcgcgtcgcccaatagcaggcccacattgtcccattcttcggccagcgcgaagggaaacgcttgatccagcgcccaaagcacgtcctgcaccgtcatcgtatggcctcctcccaaatggcgagcgagcgcgccagcgcctcttcccgcccgtcgcgcccctgccgggcgccttccagcgcttttttggccacgcggatgcgaaaccgcgcgtagccctcgtaggcctgcgcgtccgcccgcatgctcgcggtacccgcgacgcgctccgcctcgctcaagcgcattgcgcccctttgcgccagcaacaacacataccaacgcccgcccgcgcgcaccacgcgctcgcgcaggatggcatagcccgcgccctgcaagaagccgcgcaactcgtcctcctccaggttgggctgcaaaatgagctgcgcatcgcccaaattctgcgcgcccgcgcgcagaatatccgcgatgttggccgcgcccatgcccgcgatggccgccgcgtccggcggctggtcaagcgcacgcgcgccgtctccaacccggaagacggcgcgatcgctaaggcccagcttgcgaatgagcacgcgcgccttctcgatggaaggcgcggaaatatcggtaaaccacacgcgttgcgcgcgtccggaaagcagcatctgcgcgcccaggcggccatggtcgcagccgatatcggcaaagcagcggcacgcgggcgccaaatcctcaatggcgcgcaaccgttcatccaggcgcaacatcaatccagcgattccttcagcttgcgcgaacggctcgggtggcgcagcttgcgcagcgccttcgcctcgatctggcggatgcgctcgcgcgtgaccttgaattcgcggcccacctcttccagcgtgcgctggcggccgtcctccaggccgaaacgcagcttgagcaccatctcctcgcgcggggtgagcgttttgagcgcgttgagcaattgctccttcatcagcgtgcgcgcggcggcctcggcgggggcgggggcgtcgtcgtccgggatgaagtcgcccaggtggctgtcctcttcctcgccaatcggggtttccagcgagaccggctcctgcgcgatcttcatgatttcgcgcactttgtcctccgaaatgcccatttccgcggcgatttcctcgggctgcggctcgcggccatattgctgcaagagctggcgcgaaacgcggatcagcttgttgatggtttccaccatgtgcacggggatgcggatggtgcgcgcctggtcggcaatggcgcgggtgatcgcctggcgaatccaccaggtggcgtaggtggaaaatttgtatcccttgcggtaatcgaatttttccacggccttgatcaggcccatgttgccctcctggatcaaatccaaaaacagcatgccgcgccccacatagcgcttggcgatggaaaccaccaggcgcaggttcgcctcgctgagccgctttttggcggccacgtcgccctgctccatgcgcttggccagctcgatttcctcctcggcggaaagcagcggcactttgccgatttccttgaggtacatgcgcaccggatcgtcaatggagatgccctcgggcacggaaatatcgatttcctcctcgggcgtgttgttgagcacatcgggttccggttccggctcctcgatgggttcatctttcacaacttccacgccaatggcagaaagcgcgtccagaattttatcaaactgttcagaaacgatctcggtttcccccagcgtttctataatttcgttatacgtcaatacgcccttggctttaccggtctcaatcagttcgttaacacgggcctgcatggcctctgcattcagcttgctcaagtgaatcactcctttcgaccggtcaaaaacgatccagttccgcgagcagcccattcagccgctccaacaattccctgcgctgtgcgccttgcgcggtggagagcgcttgtcgcaacgcggcgatctgctcttccagccggcgccggcggatgctggccaggcactgccccgccatttccagggccaccgccgcgtcctgcggcagcgcctcgcattccagcgcgcccagcgctgtggcgcggtcttcgccctcggccatttcgcccaccagctcgcccggcgttcgcccggcactcagcccctcgaagagggcgcgacacacggcgtcgtcaaaatcctcggggcacaccgtgccttcgggcaaaagattggccgctttcaacgcgactaggcgctgctgcgctagcacgtaatccggcgggctcttgggcggcgcgacgcgccggggccgcacggcgggcgaacgctccaccggcgacgcgccgatctgccggtacagcacatcgcgctcaaagcccgtgcgctgcgccacaatggccacgtaattttccaattccacggggtttttcacccgtttcaagatgccgcaggccgttagcgcgtattgcgtgcgcccttcctgcgtggcgagatccagcccgtcctgcgcgcgcaacaggcggaactcataagcgtccatgggcgcgagctgggcaaacgcctgcgcgccctgcgcgcgcataaaatcatcgggatccatgccgtctggatacagtatgacccgcgcgcgcacattttgcgcttccagaatatccagcgcgcgcaacgtggctttttggcccgcgctgtcgccgtcgtagctgatccagatttccggcgcgtaccgcgccatcaggctggcctgctcgggcgtgagcgccgtgcccagcgtggccaccacgccttccacgccgtgcctgcgcagggaaaccgcgtccatatatccctccacgagcaccacgcgcgcaatgccgcgctcctttttgagccaattcatgcaatacaggttcaggcgcttgttgaacacgatggtttcgctcgtgttcaaatatttgggctgcgcctcgcccatggcgcgaccgccaaagcccaatacgcgcccttgcgcggaaatgatggggaacatcacccggtcgcgaaacatatcgaatgttttgccgtttttgtcgaccgccaggccggctttcagcagcgtttcccgctcgaagccttgcttgcgcagctcctcaaacgtttccccccagccagccggactggcccccaggccaaaatgcttgatgtccgcgtcgttcaggccgcggcggtaaagataatcgcgcgcgctggcgccttcgctggaccagatccgccggtggaaaaacatggccgccgcgtggttggcttcgtacaccgcctcgcgcagctgcgccgccgcctggctatccgcatcgcgcggccggtcgggcaattcaaggcccgcgcgctccgccagcagcttcaccgcgtcgataaattccatccgttccatttccatcacgaaatggatcagattgccgcctttgtggcagccaaagcaataatatagctgtgcgtcggcatccacgctgaaggacggggatttttcgctgtgaaacgggcagaggccccaatagcggtggcccttttgcttcaactggacgtattcgcccacaacatcttccagatgcacccgcgcattcagctccgcgagaaattcactgaactgctgtgccatgccgcctgcccgtctcctccatctctcttgtgtacattcgcgctttagaatattcgccgcgcgccccgcggattcctgcatacgcgcgggaaaatgcgccgcaatttcccgcgcctcgcgcgccaattcaataccgtgaatataaataccacgctttgcgggggaaaacctgcacaaaacgcgggttaacagaaatttccgaaaaagtttatgggtgcgcccgcgcacggattattgtcgcccagcgcgtgtgaaaaaacgcattttagaacaaaggggccgcgaaagaacctttgccgttctttcgcagcccgccatcgccgattcatttggcgccgttagatgcccaggaacgcgccgttttcgcgcaaaacctgctggatgcggcccacatccgcctctttcacgttgacgcccgccttgcaggccaccgaggcagccacgcccgctgcctcgcccagcgtggtcacgatgggcatgatgcggtagctcgcctgcgcctcgtgcgtggaagagatgcaccgcccggccaccaacagattgtccgcctccttgggcaacaagctgcggtaggggatggtgtaatattcgccttccttaaagtaatagtggctggtgcccgcaccgtccgggctgtggatatccacgtcgtagttgcccgcggcgatggcgtccgggaagcgcgtgcaggccttcaactcttccacggtgagcacgtgctcgccgatgatcatgcggctttcgcgcacgccgatctgcggcccgctcatggtgatatccgcgttttcaaagccggggatgttgtttttgagcatctcgaacatttccagcatttgttcgcgggcttccatttcggccttggtgaggtcgaagggatccaccgggttgagcttgatcacgcgcgtggtgttgaagtgtaccacgttcttcaccgggtggaagaacatgagcacgtcctcgcgcgggttgcggatcttgccctctttttgcagcttttggtacaggggcgtgatcttatcgcgattggcgcggaacttttccatgtccacattggccacgcggaagcacagcgtcatcggctggcacagatggtcgctatcgcggcccaggcgcgtggggcagccggccatcacggccaggtccgcgtcgcccgtgcaatcgatgaaatagcgcgcgcccaggcggattttgcccgatttgcccaccacggtgaccgagcgcagcgtttcgccctctttttccacatcgcacagcgtaacgtgcaaaagcacgtgtacgcccgcttgaatcgccatgcggtcgagcacgatcttcatgtattcctcatggaacatattgccctgctgtgcgcccaggcggatgagttcttgctggatttcggcaaaaatgccctgcgaaagctccacgcgcttcttttcgccgtccaccaccaggttggtgccgttgttcatgaaaggattgatcaggcagttgcccaacgcgccgcccaaaaagcccgattgctcgcataggagcacatccaggccctgccgcgccgccgccacggccgccgctacgcccgtgagcccgccgcccacgaccacgagatcatacgtttgcatacaaaatcgcccactttctatttgcgtttgggatacgcttattgtagcgccaaagggagcgcgtgtcaatgtccaaaacgcgcccgccctgccaggccgttttggacaaaatcgacgcaaacacgcgatggacaggcgaaccttacaagcatatccaaagatgggattttttcttgttctatgttgaaaaatatagaaaactttggtataatccgaattgtacaaaagaatgagttttgcgggcagaaggggaatgctgtggaaaatagaagcgactggcgcgaagaagaatggttcagcaaagccatttatggccacctagaaggcaaagtccaccaaaaaacgcaaaatgcgcagcgcgcggcgcaagaagtggaaaaagggcgttacgaagaccaagatagttttatttcacacggagaacggagcaaggcgcagaaagagctttccgaagcacaggcgctagcgagcgcgctgtggcgcaacccttattttgcgcacgtccgcttgcgggaagaggacgaggcgcagcccgaggaatattttctttcgtcgagcgcgacgctggacaggatggaagaaattcctggcgacggccaaaacgtgtaccggttgattccctttatacgggacgaggaacgcccattttttcgcgcggtcttcgattgctatcaaaggcgcgatggagagaagatttcctacgatgtaccgcgcaatgggcaaaaggaacaacatgtttgtcagccgctgttggtgcgcaatgtaacggtgcaaagcggcaagcttcagaaagttcacacgctctattcctcgcaggcgaacgaggatgtgcaggcgcaagaattgctcttgcggcgcctggaagagaaccgcgccacaccgggcttgcacaacatcatcgataccctgcaacccaagcaatttaaaattgttaacgccgatccgggcgatagctttgtggtgcaaggctgcgcagggtcgggcaaatcgcaatgcatgatccaccggctgttttatttgcggaaaacgctggaaaaggattgggacaaggtgctttggattacgccaactcagctattccggaattatacgcaaacactgctcaagacgtaccggttggatgccatagacaatgcctcgctggcggaattgtaccggcgaacgttgcaggggtttgattcccggtttgccagcaggcagtatcgctttgaactcacggaagaatatttgccggacgcgtatttgcgcgaggtctatgcgcccgagcaaatggcgagcatcgacgcggagattcaaaacgccatatccgtgcacattaaagctgcttgcgagcagttggcgcgctctatgccggatatgagcacggtggatatcgaatacgtgcgcgaaatggagggcgctctgtcggcagaaatccgcgagatggaagcaacggagggccaagcgcaagaagaagcgcagcgcgccgcccagctggagaaggagctggacatgctgcgcgcccgggaggccgagctcgttgcgcaggaaaagcggctttgcggcgagcaggcggattttttgcgcaaaagggatagccttgacgcggctcaggcggaggagcaggactgggcggaactggtgcggcaagaagaacaagcgtacgaacgcgaaatgcgggattttttgcgggaaaccggccaggcttcgcggggggatgaaatcttgcgcttgcgccaatatacggcgctgcgccgcaaggcgatggagattgccatttctacgggggagcgcgcgcaattttttcgcgaaacgcgtgatcaactaaaggaggtcagcgaagcgcgccgcgccgaattctatgccatcaccggccggatttcgccagaaaaatgggaatgcgatcaagtgcaaaaggtgcaggaagttcaaaacgctttggaggacgtgcacgaggaaattgcgcagcgcgaggaagatctgggcaaaatcgggcggcaggaaaacgataaaaaagagccgcaaaagcgacggctggcaaggctggcgaccatgaaacgggtgcgctattatctgcgcagcatagagagcagcgtattcgagcaggaagtttggcgtgtgcacgagaaactgaaacaaaagtatggcatacagactttgcaaattgaggagcagaacggccgccggaaggaaacgcgcattctctacaaggtggatttgctattttatttgaagatttatctgtttttgcacaaaaagtaccggccaaaggcgtatcgcctgatctgcgttgacgaggggcaggatctgcacagcgcggattacgccatgctgcgggagctgtttcccggggcggttttcaacgtgtttggcgacacggcgcaggcgctgcacaccaattgcggcattcaggattggcgggcgcagacggggatcgggcagatttatacgctcaatgacaactaccgcaacacggcggacatcgtcgatttttgcaatcgcaaatatggcagccggatgcaatattgcggacaacccggcacggcgcgcgcgccacgcgtggtgggcgcgcaggaaggacggcggatgatattgcaggaaaagccggtggtcattgtgaaaaaccaacaggcatttgaagaattgcgcgaacaacttgcggttccagagcggaaactggcgtatatcgataccaaaattgacgcgatagtgggcgagaaacgcattcgctgctattccatctttgcggccaaagggctggagtttcaaacggtgttggtctacgataagggaatgacgcgcaaccaaaagatggtcgcctgcacgcgggccatgcagaaactggctgtgtgggaagcgtaaaggcggacgatggacgcgagccgcgatataagggcggaggaaaacgcatggaaaatacgcggacagaacagcgggatttgcgggaactttggtcggctgcgcgggaaactttggcggccgcgcaagaacaagcggccgcggcaaaggaatgtacggcgcgcggcgcattgccggatggcgcaatggtgcgctcgcttgtggaagctttgcaacgttatgcggcgcaatatcaggcgctgcaagaggcaggggttcccttgcagggcaacgcgcaagaagtggaggaattcctggatgcctgcgaaaagcggcggctcgaggcgcgcgtgcaggcatatttcgggctaaacgcgaaagatgcgcaggtgcaggaggcgctggaggcttccaagcacgccctggcgcggctatgcagtgcgccgcagacggcaagtgcgagtgtgctcaacccgttcgcgctggccgccgatagcgtgcgcaacggtttgcgtccgctctctgaagccgattttgaagccatcgaagccgctatgggcaagagcatcgcccgcgcagtggacaatgggagcctattttggcaggaaaacgcggtcgtggcattgggacggaaggagccgcgcgaagcacccatcccggcgattgagcccattcaggaacccgcgccgtgggacgcgctggaaggatatgtggctggcgcgagtgtctcttttgttggacaggtggaggctgcgccctcccgccaggagcttcagcggtttttgcacgaggagaaggccgccgcgcaattgctgtgcaggctggcgcacgaaaaaatgcttccgtgcccgcgccaggaagaggcttccctctggcaggcttgggaatgcctgcgggcggcgggatacgcgatgctcgccaatctgaacggcatggttgcaggccaatattgccttctcaccgggaaaggttgggcgtgctggcgggacgatgaactgcgcggcgagcttgtcggtgaagcgtattataatgaccttccggcgtttatgcggctcgacagcgcgcaatgcacagcgctactggccgtgcgcacggcgatgatctgcgcgtattgcgcggcgcggggcctggaatacgagcttgcctggcctggacacgccgagttcccttacgcggttttgcatcttgagggctacgcggtgtgcgcgggcgtttttgcccggggcgatgaaacgcgggatttggcctgcttgcgcgcctgcgcggcggcggatggcgcgaggttgatcgttttggtggcgaccgtggcggatattgcccgcgtacacgcagccctgcaattgcccgcggaagaggacgagcggctttggttcgcggtttggagcgaaaatgggatgtacgcgggcaatggcgaaaccgtggacgcacccgatgcgttttgcgcggcgagcactgcgcctcaagtgctttttcccaggacgccgatgaagttcccgctaaaactgccgcccaaacaggaatttatttgctttctttggagctgtgcggatacgttttccttcttgctcaagcaattttgccaggcaccgttttttcgtgagaaagatatgtttgcttcgattcgcagcccccaggagcttgtgggaaaaggacgcgatgcattggaacgcgaaggctacttatgtacatactcttattgcggcgaaatgtattgttgcgcagggcctttgctgaaagaatgtttgcagaattcgcaatacgttgcgattctcaagagatggtatccgcaggcaaggatacccaacacattggcggtggtggggcaacagaatatgtccatcgcaattttagatcaatatattttgcggcagaaagcatgatgatgctgcgcgcccggaaccccctttccctcggcggcatagtatgcaatgaccgccgcgtggcggtgaaaggatggatcaaatgaatatgtggaatccaaactggtggaattgcggcccggtaaaccggcccttgcccccgctgtggccgtgcccaccgtcgcggctgccggaaaacgcgggatgcggctgcgatcttacaatactcggcacggattgctgcggcaacctgatcctctgcctcaagcgcaagcgcctgtgcgaggtgaacggctgtctcacgccctgccgccggtattattagatattttatttagaccgatgtcgcgggcggggagaggaaacttccccgcccgcgacttttgaccgtactgct

SEQ ID NO: 2765 - DNA, 2745 bp, Unknown
  16S sequences of unknown bacteria
cgccgaacaggccggagtattcggattttttcataatatggatggcgtccggctccagggtgatgccaatgtaggcgccctccgtcaccgggtccgtcgtctggatcatccatttaaagccgtcgatatccacgatggcttcgttgtgcacgcccataaaggtgacggacgtcaccttaccccggagcttacccttgtccggcgcgataatatccacgtcctccgggcggatgacgacgtccaccggctcatttttgccgaagccactgtccaggcagcggaattcctgcccgccgaagctgacccggtagtcttccagcatgacgccgtcgacgatattgctctcgccgataaaatctgccacaaaggcgttgaccggttcgttgtaaatgtccgtcggtgtgccgatctgctggatcttgccgtgactcatgacgacgatggtgtcggacatactcagggcctcttcctggtcgtgggtgacgaagataaacgtgatgcctgtgtttttctggatctttttcagctcctgctgcatatccttgcgcagcttcaggtccagtgcgcccaggggctcatccagcagcagaaccttcggctcgttgaccagcgcccgggcgatggccacccgctgctgctggccgccggaaaggcttgtgacccgccgggaaaagcccgagagcatgaccatgtccagcatccggttgacgctttcctggatctgcgccttggggaccttgcgctcccgcagcgggaaggcgacgttctcaaaaacgttcagatgcggaaacagcgcgtatttctggaagaccgtgttgacatgccgcttgtggggcgggacatcgttgatgcgttcgcccataaaaataacgtccccctcgtcgggcgtctcgaagccgccgatgatgcgcagggtcgtcgtcttgccgcagccggaggggcccagcagggtgataaattcgttgtcgtgaatgtccagactaatgctgtccagcactggctccccgtcgaaggatttggagatgctttttaattcaatgatcttcttcatacacacgcttcctctgctctctcaaattccaaatggtgtcataaacatgcaaaaatatgcaaaagcgcggcgttttccgggaaagcgccaggccaaaaaagtggcatgctgccagcccgcagcatgccacttgaaaaatcattctggatgcgctcccatgagacgcttgggcactttcgcgcacggcgcggcaaagccgcaggaccaatacacaggccgccgcttaccgcagacgatacccggccagtcgctgatatgggagacaatcgaatcacaatgagatcagagtctatatagcaaagattacttttactactcttattgatcatttcacaagttcatgccccggggcactttcggttataaagtaaccaacttataaaactgagcttttaactcaatcaataaggcaacagaagttgccaatcaccacggttggtgattttcggcattcgacccggctgtccgtatggccttagccgatgcgaagaggcatcggcggtcgtggaatcttgctttggaacactgtcccaattgagatcaacaaaaagtatagcacagatcagggaattgtcaatccccctttgcgggatttggcgaaaattgtcgccaaatgcggatacggtcagttgaaatccggggaatcgtaggtgataacggtatagtaccggtgccctgcgtcctggggaaggctggcattgatcttcgcctgcagggcggcacgctcgccctgcagtgccgccgggacgacaaggtcaaaaacgaggttcgtatgctccggcccccggaccatccgcagatcgtgcagagagaggccaggatcaatggcatgcagcgtcttggtaagaagcgcacgaatctcctgcagctccgcgtcatcggtcaccaccgggtcatagtgaattgtcaggtggatgtgatgctgcgccagcatacgccgctcgatattgtcaatgatattgtggcagaccagcgggtcctccttggcgtccatctcgacgtggactgttgcaaatttttggttcggaccgtagtcgtggaccatcaggtcgtgcatcccgaggacctttttatgggctgtgacctcccgggcgacgagagccttgagctccggtgaggctgattcacccagcagcggggcaatggtgtccttggcgatgccgacgccggaccagagaataaagacggcgacagccaggccgatatagccgtcaatattgcgggagaaaaagtggctgaccaggcagcccaacaggacggcggcggtggcgatgacgtcattgcggctgtcgcaggcgttggcgcagacagtgacggattgaatctgcgtcccgacggtccggtaaaaatatgccatccagagcttgactgcgatagaacccagcaaaaccgccgccgtgagggcggaaaatgcgatggcctgggggtgaaaaattttgtcaatggatgttttggccagctccgcgccgatgagcaggaccagggctgcgacggccaggccggagagatactcaatccgggcgtgcccgtaggggtgcgctgcgtcggcgggcttctccgccaggcggaagccgacaagggtgacgatggagccggaggcgtcagagaggttgttgacggcgtccgccgtgatggaaacagagcctgccagcaggccgaccaggagcttggcgagaaacagcagcagattgcag

SEQ ID NO: 2766 - DNA, 5195 bp, Unknown
  16S sequences of unknown bacteria
tcatcgtaatagatgtcggcgtccatctcaaccaggtcgacgatgcccttgaagccggactccttaccgatgggcagctggatagccacggcattgcacttcagacggtcctcgatcatatcgagcacgttgtagaagtctgcgcccataatatccatcttgttgacgtagatcatgcgggggaccttatactcgtcagcctgacgccaaacggtctccgactggggttccacgccacccttggcgcacataacagttacagaaccatccagcacgcgcagggagcgctgcacctcaacggtgaaatccacgtggcccggagtatcgatgatattgatacgggtctggggaaactgctccttggaaccctgccagaaacaggtagttgctgcggaagtgatggtgatgccgcgctcctgctcctgcgccatccagtccatggtagcggtaccgtcatgggtctcgccaatcttgtagttcacgccggtgtaatacaaaatacgctcggtcgtggtggtcttacctgcatcaatgtgcgccatgatgccgatatttctgatattttcgagctttgtttttctcggcatatgattactcccttaccaacgataatgtgcaaaagccttgttggcctctgccatcttgtgggtatcttcacgcttcttcacggcgctgccgaggttgttggcagcatccatgatctcgcctgccaggcgctctctcatggttttctcgctgcgggcgcgggaataattggtcagccagcgcagacccagggtctgacggcgctcgggacgaacctccatgggcacctgataggtggcgccgccgacacggcgggccttcacctccaagctgggcataatgttttccatagcctgggtgaacacttccagaggatctttctcggtcttttccttcacgatatcgaaggcaccgtaaacgaccttctgcgccacgcccttcttaccatccagcatgatggaattgaccagcttggtcaccagcacagaattgtacatgggatcgggcagaatttctctcttggggacattacctcttctgggcactatgcttccctccttcatataaattatgatttcataggtactcgaaggaaatacgttttcctccgtgaatgcctgccaaagaggtttgttcattgtgtatcaaaaaacagaaaacctattcggcaaactttcatttaatcgcgggtcttacttcttcttgggacgctttgcaccgtacttggaacgggcctgcatacggccgttcacgccctgggtgtccagcttgccgcggatgatgtgataacgcacaccgggcaggtccttgacacggccgccgcggatcatgaccacagagtgctcctgcagattgtggccgatgccggggatataggcggtgacttcatagccgttggtgagcttcacacgggcgatcttacgcagtgcggagttgggcttcttgggggtcgcggttctcacagccgtgcacacgcctctcttctgaggagaaggcaggttagtggacttgttcttcagggtgttcagaccatactgcatggcgggagaattggacttaaaagtagcctgttctcttccctttctgaccaactggttaaatgtaggcataggttctctcctttctcgcaaattctatttttagcagaatattgggtaatattccgataaaaaccaaaaacacaaataaaaaatcaatcggcgcagccgtccttcaaaacaacggctaccgcagcgcccacgtcgatgccgcaggcctgcccaagcaaggccatgctttccacccggatcagaggaatttccttttcacagcactgatcctcaatgggggccagcagagccggatcggcatcctctgccaggtaaacacaccgggcctgatcggcgcgcacagccttggccgactgcttgaccccgatcaccttgctctttgtctgcaattccaaaagcacaaaaaggctccttttgctcgtagttttgacatatccgcgcaatttagaattatagcataggcgcaaaacagcgtcaatactttttctatgaatactttcttgctttttcgcgcattttccggttcttttccgctgctggagtggccattttgaccaaatgacagccggcgccctcccccgctgagcaaaccgttttcaaatcgcgcccaaatgtttccactcagaaaacaggcgcgccgtaaaaacggcgcgcctgcaacgtttggaaaatctcagaaatccatctcatccgcagaaatttctgcggacggattttgaccgccctctgccgcgtcatcctcggcaaagaggttcggcagatccatgcctacggcaggtgcgagcggttccggggtgttcaccttgtcgggcaccagcttttcggcatagctgcggtatttgcccaggccggagccggcgggaatcagcttgccgataatgacgttttccttcaggcccagcagatgatccaccttgcccttgatggcggcttctgtcagcaccttagtggtttcctggaacgacgcagcagacaggaacgaatccgtggccagggaagccttggtaatacccatcagcagctgggtataggttgccgtctgcagctcttcgccatcctcgcgcttttcgccggcggcgatgcgctcagccactgccttgttggcgtcttccacctcaaagatatccgccatggaaccggagagcagcgtggtatcgccagcttcctccacacgcaccttgcgcatcatctgacggacgatcacttcgatatgcttatcgttgatgtccacgccctgctggcggtacactttcaaaacttcctgaatcagatagttctgcaccgaggaaataccgcggatacgcagaatatcatggggattcagagcaccctgattcagtgccgtacccttggcaatcatatcgccgtcatgaatattgagtccggtgtggggcagcgcataggatctggtctcgccgctctcctgatcggtgatggcgatattggccagagagccgcggtggctctcctcaatactcacccggccgccgatttcaaccagcgtcgccattcttttgggcttacgggcctcgaacagttcttccacgcggggaagaccctgcgtgatatcgccaccggccagaccgccggtgtggaaagtacgcatggtcagctgcgtaccgggttcaccgatggactgagccgcaatgatgccgaccgcttcgccggggccgacgcgctggcccgtggccaggttcataccgtagcacttggcacatacgccgctgtgggcatggcaggtcagcaccgtgcggatctccacttcgtggatatcatgggcttccagcagcttggcatcctcgtccatcatcatatgatccttggaaataagcacattgccctgttcgtccaggatatcgcgtaccgggtaacggccgcgcaggcggtcggcaaatttctcaataatctgaccgccttcggcaatctcagaaaccacaatacccttatcgtaaccacagtcctcttcacggatgatgacatcctgcgagacatccaccatgcggcgggtcagataaccggagtctgccgtacgcagcgccgtgtcagccagacccttacgggcgccgcggctggaaataaagtattccagcacgctcagaccttcgcggtagttggctttgatcgggatctcgatggtgcggccggccgtgttggcaatcaggccgcgcataccggccagctgacggatctgcttcatagaaccgcgggcgccggagtccgccatcatgaagatggggttgaagcgatccagcccctcctgcagggcattggatacgtcgtcggtagtcttttcccactcggccaccacagctttgtagcgctcctcgttggtcatgaagcccatcttgtactgttcttcaatggccagggtacgctcttccgtttccgccagcaactgctttttctggggcggaacggtcatatctgccacggaaatggtcatagcgcatttggtggaatatttgtagccggtagccttcactttgtccagcacctcggcagccacagtgaagccatgtttttgaatggtgcggtcgataatgggccccaactgcttcttacccacagtaaaggtaacctcgtagtcaaacatgtggtcgggatccgtacgatccacatagcccaagtcctgagggatattggcattgaaaatgatccggcctgcggtggcatccaccagtttttcgcgcatgacgccgtttacttcacggcgggcgcgtacgcgaataggcgcatggatcccaatgatgccgttttcgtaggccatcatcacctcgtcctcatccaggaacaccttgcctgcgcccggctcgtcgtcgcgggcataggtcaggtggtaggaaccgagcaccatgtcctgcgtgggcacagtgacaggaccgccgtcctggggacgcagcaggttattggccgagagcatcagaatacgtgcttcagcctgagcctcggcactcaaaggcacatgaaccgccatctggtctccgtcgaagtcggcgttgaacgcggtacataccagaggatgcagcttgatggcgcggccctctaccaacaccggctcaaaagcctgaatgcccaaacggtgcagcgttggcgcacggttcaggaacacaggatgatccttaatgacctcctcaagggcatcccaaacagcatcgtcccctttatccaccttctttttagcggacttaatgttctgagccgtaccgttctcctgcaatttcttcatcacaaagggacggaacagctccagcgccatctccttgggcagaccgcactgatagatcttcatttccgggccaaccacaatcacgcttcggccggaatagtccacgcgtttacccagcagattctggcggaaacggccctgcttacccttcaggaaatccgacagggacttgagcgcacggttgttggcgccggtgacggcacgaccgcggcggccgttgtcgatcagggcgtccaccgcctcctgcagcatgcgtttttcattgcgcacaatgatgtccggcgcatgcaggtccatcagacgcttgaggcggttattgcggttgatcacacggcgataaaggtcgttgagatcggaggtggcaaagcgtccgccgtccagctgcaccatggggc

SEQ ID NO: 2767 - DNA, 32759 bp, Unknown
  16S sequences of unknown bacteria
cgccaaaacttaaagccttttcacaaactgcccggtagcggttaaattcgttttccagcttttgttttacatcttcatcggaatcttccggggtaggcaagtctttgatattttttattgaagtgtgaatgtaaatataatccggggcaaaatctttcaatgtgccgtcatcaaacatcaactcttcaaaatacctgttatatccgccgattaaaaattccggcttgatgtcatagtcaagtaagaacagttcaagtatattttttatttctccgattgttgaaccgcttaaaattgcaatttttttatcaatgaacttttctttttgcaaaagttctttttttatgcttttctttttttgcaatatgtaagcattgtcaaaaggatagcttaatacagacatatttttatctccttatattcattagtcatagtatagcacatatacaaattttgggcaaccgataaagttttaaatattctttaataaactgtaaaaaataatggcaaaaggcaaattttaccctttgcaacccttttgtcattattttattgttgaaatttaataaatttaaaagtataatagtacttgataaaaattacagacccaggtcttccagggtttttcgcaaatcgtaatcatcttggacggctataccttttctcagtaattctatatcattttccggcaagaggtgtacatatatatcgtaaacttctgtcggttcccggcaaccttgtgtgtaaacggcaactttgccgccgtattcctttacggtgtacatgggttttgtatcggtattggcgtattcggcgctttcaatcgtcataaggtatataccggcacaaatcgccgcagagcataaaacaagccaaagggaaatcagtatttttttcatatacaggcacctcactgcttttagtcttgccgaatatgataaataaatacaacaatttttaaaaaataaggcaacaggccgcaagacggcgttgcccggggtaacattgcacaatacttataccgtacagtgtaaatcttgttgcaatgccgtaaataaagataaggagtgatgattattaaaacatataatgggtcatcaaaaaccgctgccgccaaaaaggccggaacaaacggcacaaagcctgccggcagcaaaaaaacctcaaaactcacatggaaaaaagttcttacggcaataggctatcttttgtgtgccggcgttatggtgggtagcgtgcttatggttgtggtttgtatgtaccttgttaacgttacaaaaaatgacgaggacatgctcaaccttacaaatttaaagctcagcttcaccagcgttatttattaccaagaccgggacacaggggagtataaggaatatcagcgccttgacgatgttgaaaaccgtatttgggtaaatcttgacgatatgccggacaatatcaagaatgcttttgtagcggtagaggacagaaatttctataatcaccacggtgtaaactttttaagaacttttgccgcaatgattaacgagtacacgccgcttaaagtgtttggcagcaagcagggcgcatcgactattacccaacagcttgtaaaaaaccttacaaatgataaatcaggcagcggcgtaagcggcgctatgcgtaaggcaagagaaattttccgtgcttatatacttgaaaaacagtattccaaggacgaaatcttggaggcttaccttaacacaataggccttggcaacaacaactgggccggcgtacaagttgccgcaaataactatttcggcaaagatgtaaaggatttaactttggcggaatgtgcttcaatagcggtaatcacaaaaaatccgtcccaatacaatccgatagacaaccccgacgcaaacattgagagaagaaattacgctcttaaaagtatgcttgatcggggtatgataagcgaggatgattacaaccgggcggtggccgaggaattgcaccttgaccagagtattcacgaaagtagtactgtttacagttactttacggatatggtaatcgaccgggttgtctccgaccttatgacagaatacgatatgacccgcagtgaggcgacttattatctgtacaacagtggcttgaagatttattcaacggtaaatcctacggttcagtccgcaatggaggatgtaatgtccaacaaggatggcatgtatcccacaactgtgaacacaaagaaaaataaagatggcaccacaacggaacagaccccgcaagccgctatgataagccttgattacaacggcggtattgttgctgttgtaggcggcttaggcgaaaagacagagaaccgtgtgctcaatcgtgccgttgactccgtaagacagacaggttctaccatgaaacctatcggcgcttatgctttggctatcgagtatcagtatctcaactattcatcgggcttatatgatgattatgtatttatgatgccggacgaggataaacccggccagcttaaagaatggccgagaaactatgtaggcgcaggtatttactcacaggttgcagttcctcttgtgcatgccgttaagcgttctcttaatacctgtgcggtaagagccttgaagatggtaggcgttgacgcctcctatgacttccttgtaaattcactgcatatcacatcacttactgatgacgacaaggactacggaccacttgctttgggttcaatgacccacggcatttcaccacttgaaatggctgcggcttacgctatcttcggcaacggcggcaagtacactacacctcactgctatacaacggtggaagattcttccggagagattattcttgaaaaaaaggtaaacagtgtacaagcaatttcttcacagactgcttatattatgaaccgtgttatgacacaggttttgaacagtgctgacggcagaggtacaggccaaggtcttgcaacagaccgtatggaatcacggggtaagacaggtacaacatcagatgataaggaccactggtttatgggcttgacgccgtattatgtaactgcttcatggatgggctatgacgaccctgccacattgactgttagagattacagaaggcatgctccgacacgtgcatggagagccgttatgaacatatctcaacgggatcttgaatataagagctttgatgtgccgaacggtattgttgtacaagatttctgcgtcgacacaggtatgttggcaaatgacaactgcccgacaagggaaaaaggctactatacggaagacaatatgcctgatgtatgtcagtctcactgataaaaattaagacaaaaggcactctgaaaagagcgccttttagtttaaatcagttaaaattcgtataagacatacaaaatcccccgggtttaaaatccgggggataaattttgcttgtgatattaactatcagagtttaaggtgatccaaacatctgtcacctacaacctgagcttttaaaatatttgtagagccggaaacaccaaccggcacgcctgctgtaacaacaaccaaatcgccgttattcaataatttttctctttgagcagttgcgatggaaacttcaataagttcatctgtgttctgtacagaactcataagcagaggatagacaccccaagacaacgcaagctgtctgtaagatttttccgtatctgtgcagccgataatcggcaggctcggtctgtattttgaaacatttcttgctgttccgcctgttttggtaacggttacgattgcctttgcgtctatatccattgcaacagaacaagctgcgtgagaaatagactcggtgattgaaagattgtggtcataatttctgttgcgaagttcatcgttgtagtctattgtgctctctgtcttttccgcaatggcggccattgtcttaactgcctcaacagggtatttgccggcggctgtttcgcctgaaagcataattgccgatgtgccgtcataaatagaattggcaatgtctgtaacttcggctcttgtggggcgtgggttctgggtcatagattcaagcatctgtgtagcggtaatagccggcttgccggaattatagcactttcttataagttctttttgtattctcggaatttcggtaaagtcaatttcaacgcccatgtcgcctctggcaaccataaccgcatcaacaacttccaaaatttcgtcaattttttcaacgccctcggcattttccaatttggcaataatgcgcattgagtgacagttgtattgatcgagaattttctttacttcaagcacgtcttccttacatcttgtaaatgaaagggctataaagtcaaaatcattttcaatgccgaagataatatcctctctgtccttgtcgcttacaaatggcagggaaagtttaacttccggcagatttattgacttgttgtttgaaagtttaccgttattctgtacggttaggtgaacttcattgccgtcaatttcgtcaacaatcatttcaatagtgccgtcagagaacaaaactcttgtgccgacattaacatctttcgggaaatttgcatacttaactgtacatttttcttgattgcccattatttcatcggttgtaagggtaaatttatctccctctttaagggtgatactgccgttttcaaaaagacctattcttacttccggtccctttgtgtcaagcattgtggcaataggtaaaccaagttcggctctcattcttttaacaagtttaagcctgtcaaggtggtcttcgtgggtaccgtgtgaaaaattaaatctggcaacattcatgccggccagcataagctctctcattacctgaggatcgtccgttgaaggccctaatgtacatacgattttggtctttctcataataattccctctttcaaatacttaaaatgtaggtttcgttgtaactaagaatatatttcttaattattattataattattgagaaaaatttatcaatgtataatagttgcaaaaaattttaaatatgtatttttaatgcaatatgtgcaatcaaaggtaaattatgtccaaaaatactgtaaaaaattgttttattttaatgctatgcaaaacgggataaatagattataataatactacatcaaattaaaaaggagattattatgagcaaaagagtgtttttaatcgttcttgacagctttggaataggtgcagagccggacgccgatttgttcggtgatgtgggcacaaatactttgggcacaatttcaaaacaaaaagaatttataaccccaaatttgcaaaagttgggtttgttcaatattgacggtgtggaagtaggcgaaaaacggacagcgcctaccgcagcttacgcaagattgcaggagcgcagcatgggtaaggatacaactatcggccactgggaaattgccggtatcgtaagcccggaaccgttgcctacattcccggatggcttcccggaagaaatcataaaagaatttgaagaaaaaacaggtcacaaggtactttgcaacaagccatattccggcacgcaggtacttgttgattacggcgaacaggcaatggcagaggacgctctcattgtttacacaagcgcagacagcgttttccaggttgccgcaaacgaggctatcgttcccgttccggaactgtacagatattgcgaaattgcaagagagatgcttaaaggcaagtatggcgtaggccgtgtaatcgcaagaccttttatcggcgacaaagcggataactttaagagaacgtcaaaccgccacgatttaagccttaaaccaccgcgcaagacaatgatggatattttgaaggacgccggcaaagatgtaattgcggtaggtaagatttttgatatttttgacggggaaggcgtaacagaaaaaatcaaaaccacaggcaacacaaacggcatagcttttacaaaggctttgcagacaagagattttgacggcttggcttttgtaaaccttgttgattttgatatgctttacggccaccgccgtgaccctgtgggttatgcaaagcggaccagtgaattcgatgaatttttaagcgaatttatccccggtatgcgtgacggagatcttttaatcgtaaccgcagaccacggctgtgacccaggttatacaaagactaccgaccacacaagagaatatgttccttttatcgcagttggcaatgaaattaaacctgttgaccttggcacaaagcagggctttggcacaatagctgccacaatttgcgaggctttgggtgttgaacagacatctcttgacggcacaagcgtatggcagacaattaaaaagtaattgcaaattacacataagcaaattccgcaccgccggtgcggtttttgtttgctctttttgatttagtatgctattataaatggcaaagagaggtaaaatatatgaaatatgctatttttgatttggacggcactgttgtggactccatgaaatattggagaaattttggaaggtattatcttattgaaaaggggtacaatccgggggaaaacgagcttgaacgaatagaaagtgtaaattgggcaaagggcatatgcgattacttttatgagcattatcattttattttaacccctggggagctttacacctggggcatggattttatgaaacgaaagtatagcaataatataaaattcaaacccggtgcagtggagttactggaaaaactgcacaattccggagttaaaatgtgcatatgttcttccaccgattatcggcttatggaacctgccttagaaaggcttgatatagcaaaatatttcgattttactgtacattgcagagaatacggaaaagaaaaagacgacccggaaatttttctgtactgtatggaaaggcttggagcaaaaaatccgggggaagttgcggttttcgaggatgcctattattcacggagcaccgcaaaatcagccgggttttatgtggtgggtatgtttgacgaaacagaaaaaaaccaagataaaatgcaggcaatttccgaccaatatgtaacggactactcacagcttgatttttcaaagctgccggggtgatttgcggcaataaataaggtgtaattgacactttatttattgccgtttttgttatataatattattcaagagaatttttatgtattggggtgatacaatggcttataattgtctgcttattgactttgacgaaactttggtttcctttgccgaaagcgaaaaacagtgtatagcaaaagtttacaataaatacggaatacccgtaaccgaagaaaatctcaacttttaccatgaattaaacgaaaaatattggcgagattacgaaaacgggaaaatcaaaaaaggtactttggaaaaggccagattccaaaaggtaatagaaaaattcggcttgaaaaatgtttccggcgatacaatgaacaaagattacgaacactatcttaaattcagcgctgtggtaatggacggcgctttggagttcttgcaggatgtggaagattatgtaaccatagccattgttacaaacggcaccgaggacacccaaaacagcaggttgaaaatcagcaaaataatggactatgccgacggtgttttcacatccgaaagaacaggttccaacaagccggataaaaagatatttttaaccgcccttaaaactttgggaatagaaaacaacaaaaaagttttggttgtgggggataatttaaactcggatataaagggcggcagaaatgcgggtcttgacacctgttgggttaattttaaaaatcaggaaaataatacaaatatcaaacctacatataccgccgcagactttgaagaactgaaacaaattgtattaggcgaaaagtacaatatgatatttgaaaaaaagaagaaaatataaaattttaaagccggaggtttttatgcttaaagccgacacacttttttacaacggtaaaatttataacaccgtatttaaacagtttatagacggatatttttccgtaaaaggagataagtttttacacataggccggggagatgttcccgacgatttagagtatgaaaataaaattgatttaggcggcaagtgggtaatacccggtcttgtggactgccatatgcacatagaaagcagcatgatagcccctaaacaatttgcaaagctcatggtttcaaacggcgttacaaccgttgtaagtgaaccccacgagatagcaaatgtaaagggcattgacggcgtaaaagccatgataaatgccgcagacggcgcagttatggacattttctacgcaataccaagctctgtaccttccacaagtcgggaatttgaaaccgccggtgcggaaatagaccttgaacgggttaaacagcttgcggaaaacccgaaagtggtttgcctgggcgaagttatgaacactaacggtgtcctttacaatccaaacgacaaggctctgtcttttgtaaagtatttacaggagcataaaccgaatatgccgttagagggccatgtgccggcaataaagggcacccggctcaatcaatatgtgtacagcggtatagattccgaccacaccgatcacaatttggaagaatttatgcaccgtatgctgaatggggttttttatcaaattcaacttataaccgcttatccggaaattgcaaaggctatagaggaatttaatttgtacgagaatgttgcgatagtaacggacgacaccacccctgccaaccttgttaattacggccatttgaaccgtgtggttatgaagatggtagaactgggtctgccttttgaaaatgcgttatattgcgctaccgaaacaccggcaaagcgtatgcatttttatgacagaggcagaattatgccgggcaaattggcggatttctgcattttggataacaccaatgagataaaacctgtgcaaacttataaaaacggtgttcttgtatatgaaaaaggccgtgaaattcagtttgaaaaagaaaaggctttccctcgggatttttacagcactatgaaaaatccgccagtaaccgaggcaacttttgatataaaggcagagggagaaaaagtaatggtaaagggtttacaaacagtgccggacacgttcaggacaggtctttttaccaaaactttgccggtggaaaatggtgttgtggcagtaccaaacgacatttgtaagttgtttgtaattgaaagacacggcaaaaacggcaatattaagggtacgatagccggcggcagctgtaaaatcgacggcgccgttgccacaagttactctcacgaccatcacaatatcactgttttgggcaataacaaccgtgatatggctttggcggcaaataccgttgtaaaaaacggcggcgggtatgctgttgtaaaaggcggtaaggtgctggctcaatgcacccttgaagtctgcggtttgataagcgaggccaatccctttgatgtggcaaaggacgccgaaagcgtggaagccgccatgagaaatataggttatcgacacaaagaccctatgatgagcctttctaccctttgcctgcctgtgtcaatggaaattaaattgaccgacaaaggtcttatagatgttaaaaattcaaaatttatagatatattggaaaaagtaaaatgaaagaacaaaaaacaatagttgaaaaattattagatcaaaagaaaatagaacacaaaagctattcttatgacaacagtcaggcttttgacggcgttaccgttgccgaaatgataggcaagccggcagattgcgtttttaaaactcttgtctgtgtgggcaacaagggcaactgcgtatttgttgtgccggtggccaaagaacttgacttaaaaaaggccgcaaaggccagcggacaaaaatatgtggagatgataaagcaaaaggagcttttgcctctcactggatatgttcacggcggttgcagtcccataggcatgaaaaagcgttttcctacttatattgacgaaagttgtaataactttgacagcatagtattttccgcaggcagaataggcaggcaggtagagctgtcaatagctgatttaacacggcttaccggggcgcaaatcgcaccccttacaaaggaggaagaatgttaataacccttgaaaatgtgggcaaaagttacggcaccgatattatacttcaaaatataaataccgttgtaaacagcggcgacagaataggtataataggcgaaaacggccggggtaaaaccacacttttaaatatactgatgcaggttaccgataattatgacggcaatgttattataaacgataacgccacaatcggttacctaaagcagatggacggtttaaatttaaataacaccgtctacgaagaaatgcaatcggtttacaaacccgtctatgacgcaatagggcagtgtgccgaaatagaaaagcaacttgcaataactcccaacgatgaagaacttttggagaaacaccataatttgcaaaatcttatctattcaaaagacggctacaacaccgattttatgattaaaaaaatgcttaacggcatgtcatttgccgaagacgagtacggcaaaattgtgagagttctgtccggcggtgagagaacaaggttaaaccttgcaaaacttttgcttgaaaacccggatattttaattctcgacgagcctactaaccaccttgattttgacaccctcacatggcttgaagactatcttttaagctataaaggcgctattatagccgtcagccacgacagatttttccttgataaagtggcaaaaaaaatatgggagatagaggacacatatttaaccgagtaccgtggcaattacacggcttttgacctgcaaaaacaggaaaaattaaaattacagcaaaaacagtacgaggcagatatggaaaaggccgcaaagttgcaggattatgttgaccgcaatcttgtccgtgcttcaactacaaaaatggctcaatcacgccgcaaacaacttgaaaaaatggagattagcgaaaagccgaaagctccccgtgtacctttgaatttcacctttgattttgacattaaaccctatgatgagattttgaccgtagaggatttgacggtaactgccggtggcaaaaccctaattcgggatttgaatttaaatatccatcgaggtgacagactgataatagccggggccaacggcacgggaaaaactactcttataaacaccataaccggtaaaattccccctgcaaatggcaaaataaaacttggccaaggggcggtgcctgcggtttttgaccagcacataacagtgggcaattcaacggttatagactctgtttgggcactgagaccgaagtggacccagcttgaagttagaaactatttggcaaggttcggttacaggggagaagatgtgtttaaagattgtccgtccctctccggcggcgaaagagcaagactgcgcttttgcgaaatgagccttgacagggcgaatattctgtttttggacgagcctacaaaccacttggatatctatatgcgccgggccataacaacggctttggcaaaatatgagggcacaataatcactgtaacccacgacagataccttatgcagcagcttgcctgccccataatgaatgttgaggacggcaggggtgtgttctattcgtcatttgatgattttatggcaaagcacaaatccgagggctttacgggtaaggcaaaggtaaaaactgagaaaaagacggagaacaaccctgttataaatcaaaaagaggcaaggcgtatagcggctcgggaaagattgcgtgtccgtgagtgcgaagctgccattgaccgcttacaggcagagatagacggttacaacgccgatatgcaaaatccggacattacaaccgaccccggaaaaatgcaagaactgtgggaaaaaatggacagcgcaaacaaaaaaatggacgagttgtttgaagaatggacgattctaagcgagaaattagagggcaagagtaatgagtaaaaattttttggcaaaaaaatatcaggcggagcctgaggaagatattttcggctccggcggcgtaacatgggacgatgttatttacttaaatatcggtgacccggatattctcactcctaaggtggctttacaggccgcttttgaagacgcctataacggttacacaaaatacaccgatacaaggggctatcctgaactccgtgacgaaatccgcaaattttataaatcaagatataatatggacataaaagatgaggaaatctgcgttaccgtttcaggtcaaatggcaatgtggacagctttgcaggccacagttgatgccggcgacgaggtaatcataatagaaccttacttttcgccatataaagtttcggttgaaatggccggcggcgtgcctgtgtttgtccccacatatatggaggaagatttccaaattaacatagacagacttgaaaaggcggttacatcaaaaacaaagggaataatcatcaacaccccaagcaatccaagcggtgtttcatattcaaacgaaactcttaaagcactggcagattttgccattaagtatgatttgcttgtttatgcagatgatatatatacatcttttgattatgtaaaaccttttgtgcctattgcctctttgccgggtatgtttgagagaacaatcaccgtaaacagcgcatctaaaaactttattatgaccggtatgcgcatcggcaatgtagtcgcaccggaatatatcatagccgccgttaaactcatatgcgaaagcacaacatactctgctccggctatctcacagcgtgctgtaattcacgctttcaggcattttgaagaatttgagtctgatatagtaaagacatttaaggaaagagctgattacgcctacgaaagactttcaaaaatgccgtttatagatgttttgcctgtcagcggaacattctatatatacccgtctgttaaaaagagtggtttgacaggggcacagtttgctgataaactatttaacgaatgccatgtaaaggtcattccggggattgcctttggcgatagcggtacatatcatttcagaatttcctgcaccgtaagcatggaggacttgaaagaggcatttgacagaatggaaaagatgacattctgattgatagaatttaaaaattgatttgaggataaaatgataagaaaaataataaaaatagacgaagaaaagtgtacaggttgcggcctttgcgccgaggcctgtcacgagggcgccatcggcatggtaaacggcaaggccaagttgctccgtgacgattactgtgacggcatgggagactgtttgccggcatgcccggcagatgccatctcatttgaaaacagagaggctcttgcatacaatgaaatcgccgttctggcaaacaagcaaaaggaaaaagaaatacctaaattcggctatgcacagccgaagccttttgccggttgcccgggcacagcggtcaaggaatttgcccctaaaaaggagcagccgatgtttactcagggcatttccgcaacagaaagtcaaatcacaaactggccggtgcagattaagcttgcacctgtaaaaagcccgtattttgacggtgcaaatctgcttatcgccgctgactgtacggctttttcttacggtaatttccacaatgaattcttaaaaaatcacaaagtagttatcggttgcccgaaacttgaccgggtggattattccgaaaaactcacccaaattatcgctttaaatgacattaaaagcgtaaaaatagtaaaaatggaagttccttgctgtaacggtttgctcaatgccgcccaaaaagccttgcaggacagcggtaagtttattccttggcaaattgttacaatttcaaccgacggaagaattttagattgatatgaaaacttttagcaaaaaacttgcaggtgcggttatcggccttgtccgaggttgcgacggcaatatggatttggttactgccgataccgagaagattatcacagagggaattataaccgccttttacggcagtgacgaagaaatttcttcttgtattaaaaaagtacacggtgaaaagtacagaatagtgccggattgcgctgtgtgtaaaaatccctgcggcagaacttttgattacaactttaaagatctgtcattagatggggaagatgtggcttgtctgaaaatgctgcttttaaattccgttgtgggttatttgatgattttaaaagaaaaggccggaaatgtcggaatagaaaaatccgattttgccccaatttacggcgcattgtatgccgtgggcggcaaagattggtctgcggatttaattctccgcccgttttttcggataggggagaaggcgtttgaggttgtatctgcggaagaaaaattcaaaacctgcgcaaaggttttgttgacggattttgatttaaaaaaagaattttccgataccgaaaaggttaaaaatgcaaccgatgcatccggggcaatgcttatgcccgcaatatatgctttggaaaataaaacaaatatttcaagcagtcctgtaaaatacgatatttgcccggaaaacccgttgtcggcaatattattttcagcgttggcaagcgttgaggcagggaatataaccctttgcggcaaaagcgatcttacggataatgtaaaaaaatattttgccgaaaattacggcgtaaaattcagataaaagaaaaaggggtttgctttaaaagcaaacctctttttgattaccctttttgattatttatacccatagtgcttttttacggcttcaaaggtctcgtcgcttataacatgttctatcttacaagcgtcctcttcggcaattttggggtcaacccccaatttttcaaatacagcagttaatacattgtgtctttcatagattgcttttgcgtgttcctcgcccttatcggtaaagtttataaaaccgtcctcgtcaacggttatataatcgtttgcctttaaaattcccaaagcacggcttacgctgggttttgaatacccggtgtggttggccacatcaatggcacgtacctgaggcataccgcctgtttttaacacaagtatagcttccagatacatttcaccggattcttgaattttcatctgtcagcctcctttaatatttattatttatgtttacattttagcacatatttcaatatttttcaatacataccgtttgggtgaatattaaataaaaaccgccgaaattcggcggttttcacagaaagttactataacttaattaaaagccttatcaatggccgtatcaatgcttgcgtaatcggattctatatcgtcaacactttcggaattgccggaaattacaaacacaacatagttgccttttacaacaactctgccgttttctgcctgtgcggaaagaagttcgtcatagttccgctgttcaccgacgattgtagcttttctccgttcaaatgcggatttaacttcgtctgcgtgtccgtctgtggcctgtacaaccgcaacaatgcttatgcccggtgtaattgtgcagtatttgccggcgtatgcagcataactttcactgtcaatgccaagccaagcaaggtaatcttcgtcaatatcgcctgcatttgcaacaggtgcggctttttcgatttcttcggcaacggcggcaacatcataagctgcagagttgcttgcgtcatcggaagatgaatctgtatcctttttgctgcaagcggcaaatacagacaaaacaaggcaagatgccaaaatcaatgaaataacttttttcattataaattctcctttaagtttgttaataatacttaataaaaatcaaactgtggctatattataccacagtttgatctatatttgtaccgaaaaataaacttttttgcaaaattattttacaactgcggtttcagtgttgccgtcaaccgcattcttcatagcggcaacaaccaatgttttaaaattgtttgtggaaattgtggcgccggcaaccgtgtcaacactgtcggcagaaccgctttgaagaaactgatttatcaaatctttatcgtattttgccggatatgtgccgttaaagctttccatttcggttttgtagccttcgtcccggcttttaagttttgttccgtcctcgttttcggcatcataaacaacttcataaagctgaccttccgaaaccgtaacctcaacaaaatctttccaaccgaattcgtcataatcggaaaattcggctctgtatgtgccgtcctgtaactcaatcttaccggataccaggtctgcgcttgaacagcctgccatggaaagtgccgtcactgcggaaagcacaaatgcaataatttttttcattaaattcagtcctttatatctaaatattatgtaaccctacaaacttcctaagtatcataacatataaaggttgtatttgtcaaattcacaggtaaaatgtaactgaaatgttacagtgtgttcattaaatgttttaaaaaatttcacaaatatagaaacaaatacccgtttatatgattattgtcaaagatttaacccgctttcattgacttaaatcgtctgttgtgatattgtataaattaccgatttattcggcaccattacattgataagaggattttaactttgaataagactaaaaaaataacaaccatagcgcttttgtttgcccttgcaatggttttgtccgttgtggaggcttcaataatgcctattttcgccctgcctccgggggtaaaactggggctttccaatatagttgtaatgtattgtatggtgtatatgggctacgcctgcgccgccgaacttacaattttaaaaggtttgtttgcattttttacaaggggagcaacagcgggatttttggctgcgatgggcggtttcttttcaataaccataatgtttatactgtcaaaaatatttaaagacaagataaattattacaccttgtccatattcggcgctctttttcacaacatcggccagcttgtgggcacaacatttattttcggcactaagtttgtaatgtattatttcccggttttgtcaatttccgccataattatgggctgcataaccggcgcaacactgacagttgttatacctgccttaaaaagattcagataaaatttgaaatatttgttaaaacacttgaaataatttgaatattggtttatacttgttagcagtcatagataatgactgctaatgttattatcgcatattttatttgatataaaggagatgttttaatatgaacattaaaccattatttgataaggtggttcttaaagccgccgaaaaagagacaactacaaaaggcggacttattctttcttctgctgcacaggaaaaaccggatatgtttgaggttgtggctgtgggcgcaggcgcatataaagacggcgttcttgtacctatgagcgttaaagtaggcgacaatgtattgcttagcaagtattccggcagtcaggtaaaacttgacggtgttgaatacactattgtaggccaggaagaaatattggctgttgttgaataaaagggggataatctattatgtcaaagaaaattatttacggccagcaggcaagagaaagtttgcagaaaggtattgatacccttgcaaatactgtaaaaatcacactcggtcctaagggcagaaatgttgttttggacagaaagttcggctcaccgcttgttacaaacgacggtgttacaatagcaaaggaaatagagcttaaagacagctttgaaaatatgggcgcacagatgcttcgtgaagttgccacaaagacaaacgacgccgcaggcgacggtacaacaaccgctaccgttttggcacagagccttgttaaagagggcatgaagaacgttgccgccggtgcaaatcctatggatattaagcgtggtatggctaaggcacgggatgttgcggttaaagccattgtaaacaacagccaggctgtaaacggcagtgaagatatagaaagggttgccacagtttccgcacaggacagttatgttggcaaacttattgccgatacaatggaaaaggtaggcaaggacggcgtaatcactattgaagaatccaagacagcggaaacctattccgaagttgttgaaggtatgcagtttgaaagaggttacatcaccccttacatggtaaccgacagtgaaaagatggaggctgttatcgacgacgctctcttgctcatcacagataagaagatttcaaatattcaggaaattcttccccttttggaagaaatcgtaaaggcaggcaaaaagcttgttattattgccgacgatgttgaaggcgaggcactttcaacccttatcgtaaacaagataagaggtacgtttacttgcgttgcggttaaagcgccgggctttggcgacagaagaaaggaaatgttgcaggatatagccatattgacagacggcgttgttgtcagtgaagaacttggttacgaccttaaagagacaacaatggaaatgcttggccgtgcaagacaggttaaggttacaaaggaaaccacaactattgttgacggcgcaggggataaagaagaaatcaagaacagaattgcacggattaaagcccagattgaaacaacaacatctgaatttgaccgtgaaaaattgcaggaaagacttgcaaagcttgcaggcggcgtagctgttttgaaggtcggtgcggcaacagaagttgaaatgaaagacaagaagctccgtatcgaggacgctctctccgcaactaaggcagcggttgaagagggcattgttgcaggcggcggcacagctcttatcaatgcaattcctcgggttaaagaattcagcgaaacacttacaggcgatgagagaacaggcgctaaacttctccttcgtgccttggaggagccggtaagacagattgcgtttaatgcaggtcttgaaggcagcgtaatcatagataagattatgtctgcaaacactgtaaactacggttttgatgcacagaatgaagtttacggcgatatgctcaaagccggcattgttgacccgacaaaggtaacacgttccgcattgcagaacgcacggagcgttgcatcaatggttcttacaacagaatctcttgtaagtgacgaagaagaacctgccgcagctgcacctgcacggagcatgaacggtatggattactaatccgttaatatttcaaatttttaattgacaaaagactggggtttaaagacctcggtcttttttgtggttggctgtggcaaaatttgcctgtaccgcatattctaaactcagaaagggcaggtgattttatttatggccgatattttaatgataattttaaccgggtttgccgttttgggagcttggtttgtgcgggatttggcgataaaaaccgcaaggggtataaaaagcccccaaactgtaacttttataaagtacagcgaaagcgatcgggcatattataaaattttagccctgcaaacagaaacatttaacaacaaaatagtccttataggggacggagatgaaaacatatattcaagccttgaaaaaattaaaaaatgtgaaatatccgattttattgaaaatcacatatttacataaaagttatattatcatataataagtagtgacaaatgacagacggagcaaataatgaaccaaacagaaaaaatcgaaggtacaattcaatacatcacattcacaagtccggacaccggatttacagttcttgaacttgaaacggccgatgacgaaataacggtagtaggcgaaatggttggcgttgctcccggacaacaaatggtagcagagggcacatttacaaaccacccctctttcggcaggcagtttaaggcgcaaagttacgaaatcaccctgccggaagacctatccgcaatacttatgtatcttgccagcggtgcggtaaagggcataggtccggtaaccgccaaaaagattgtaaaggcttttaaagaagatactttcgaagttttggaaagcgacccggttcgtttaagtcaggtaaacggaatatcatataaacaagctcttgcaatacaagaggaatttttgcgtatatacggcatacaggacgctattgtccaccttgctcactatggattgacagcccggcaagctatatcactttacggcacttacggggcaaataccgtggaaattatgcacagcgacccgtacatcatctgcaatgcccccacgatgcttccgtttgagcaggcagatgacattgcaaataaaatgatgtttgagtatgacaattcccggcgcattgccgggggcattatgtatgtccttaaccacaacagtcaaaagggacatacctgcgtgccttttgataagcttgtggaaacggtttctgcctttattaccgttgagccggaaaaaattgaaagcggtataaggcgggagtgcgaaaagggcaatctttttaccgagattatggatgaccgtgagtttgtctatctgtcaaatctttatgtggcggagattgtgtcggcgcaaaagctgtctcttttaacacgggaaaaacccgaagaaaaaaatgttgacgagataatcaacaaggttgaaaaaatgctgggtatcgagtatgcccaaaatcaaaaaaaggctttggaaaaagttgcaaacaacaaggtttgcataattacaggcggcccgggtacaggtaaaaccacccttgttaaaggtattatttcaatgtttgaaatgcaggcgcaaacggtaagtttgtgcgctcctaccggcagagccgccaaaagattgacggaactttccggcaaagaggcaaaaacaatacatcgtctgttggaagttgtgccgggttcaaaaaacgaattgaaatttcagcatgggccggaaaatcccattaactgcgaagttttgatagtggacgaattttcaatggtggatatacttcttttcagccagcttataagtgccgttaaagaagattgcagggtgatatttgtaggcgactataaccagttgccggcggtaggcccgggcaatatattgaaagatatgcttgactccggtttgataccggcagtagaacttaccgatattttcaggcaggcacgggaaagcgacattgttctcaatgcccacgccataaacaggggggaaatgccaaagatttccggaaaaacaggggattatttctttattcccggcggcgacaacatcaatgatcttgtaagcggcttggcggctcaaaggttgcctaaggcgtacggagtaaatccttttgaagatatacagattttgactccctcaagaaaacgcaacggtggcacaggcaacataaaccgggttatgcaaggggtgttgaaccctccggcagaggacaagccccaaattgtctttaacggaataacattccgcttgggtgataaagttatgcaggttagaaacaactatgatttggagtacaccagggacaacggcgaaacggatatgggtgtttttaacggagatataggcaaaattgtttccgttgacaagcgcaataaagttttaaagataaaatttgatgataaaacttatgcctatacggcggaattttttaaccaaatcgaacacgcatgggcaatcaccgttcacaaaagccagggcagtgaatttaacaccgttatattatgccttaatgacaccccaaaggaactgcaatatcgcaatttgttatatactgcctttacaagagcaaaaaaattgcttgttgtggtgggtaagtacgaaattttggaacagatggtaaaaaatgacagaaagcatttgagatattcgggaataaaacactttttacaggaatacaatggatagattaaaacaacttatatttccgcaaaagtgcaagtgctgctttaaactcgcccgggccgacaatctgtgccggcggtgcagggcggaacttgcaaaagaaaaacgagaaagtcttaccgttgaaacaaaatttgaatttgtggataaagcctacgcttcgtatcgctataaaagcgcccggcgcaagggaatacaaaacgcaaaattcaggcggccggcatcttacctcaattcgtttttaacggatatttcccgggatattgagaagattttaggtgaaaataactttgatacggttatttcgtctccggcacacaagtcgaaattttataaaacggaatacgacctgccggaacaaatggcaaagaggatatctgaaaaattttcattgaataatcggcggcctgttgttaaaataaaaaagacaaaaactcagcacagcttaaagctggaagagagaaaagctaatttgatagacgcatttgaagtgcgtcttgacataaaagacaaaagcatattgctcatagacgatgtaatttccacggggcagacggtgtctgttattgccaaagaattaaaattggcaggtgctaaaaccgttgtggtttgggcttatgcttacaatgacggaaaggaaaattaaaaaatggcaaacacaaatgaaatcgggatagaccttggtacaaccaaggttatgatatacaaaaatgacgagggtattattttaaacgaaccaagcgttgtggcctatgacgccaacagcggcgatcctatcgcattcggtgaaaatgcctttttgatggtgggtaaaacacataaaaatatcgtggcggaatttccgcttaaaaacggcgttatctcaaactacacccttaccaaggaaatggtaaaatatttccttgataaatcatacaactcaaaggttgttaagccaaaggtttgtatctgtattccaagtgccgttaccggtattgaagaaaaggccgttatagatgcggcggtttcctgtggcgcaagacagatatttttgatagaagaacctattgccgcagctttgggcgcaggcatagatattttaaaggccaacggaaacattattgtggatattggcggcggtacaacggatattgctgttatttcaatgggcggtatcgtttgctcaaagtcaattaaaattgccggcaatacttttgacgccgaaatttcaaaggctcttaaaaacaaatacggttttatggcaggtcaaagaacagtacaaaccttaaagcacgaagttgcaaattgtatgcctactccggaagaaaatgttgtttatacggttaagggtctcaatttacaaaaaggtttgccgggtaaaatcgaaatttccacagaggatatttacccgattatcgaacctcttatcgaagaaattttgtccagcgttaagcgggttttggaggtaactccgccggaactttcaggcgatatttacgaaaacggcgtgcttttgacaggtgcaggctcaaagattaaaaatcttgacaagtatatgcaaaagtaccttaacataaatgtaaagctggctccggaaagtgaaaaatgcgttgccataggtacaggtatgtcactggctttggagggacagttggaatccggtttcagagatgtaacaccggggctttcaaaataaaaacattaaggcggctttgccgcctttacattttgtgatatggattacacagttaaaaaatcaaaaagaaaaacttattcaatatcggtaggccgtgacggcacagtggaaattaaagctccgctgaaacggagaaaaacagatatagaaaaaatacttaaaaaatattccccgtggattgaaaaaaacattgccaaacagtcggaaaaagcaaagcagggcagaaaactgacagaggaagaaattgccgacttaaagtcaaaagcaaaaaatgttttagccgaaaaaacacggtactacaagaaaatcataggggtagagccaaccggggtaaaaatcacaagcgccacaactcgctggggttcctgcagcggtacaaattcaatttgttattcttacagggtaatgcttttaagcaatagggcacaggactatattgtggtacatgaattgtgccacattttacagaaaaatcattcgacgaaattttatcgggaagtagcaaaaattttgccggattacaaggacagaattaaagagataaaaaatttttcaaattttgatttgtacggctaaaaataaatattttattaaaaacattgtttaaaatgccgatatatgatagaataaattgaataattacggagcgtgaacagatggaaaagtcacaatattgtcaactgagaaaacagtatattgaacagcagttctgccgcctaaaccatatgcaaagacaggcggtttactgtattaacggtgctttacttattttggcaggggcaggcagcggcaaaacaagcgtgcttataaaccgtatttcaaatatggtgcgctttggagacagctataacagcgattggtttccaacggttgacagcgaatatattacggcacttgaaaatgccgttgaaaataaagaaaaacttgattttgaaacggaaaaggaaatttccacaggtgcgattaagccttggaatattcttgcaataacatttacaaataaagcggcggcggaattaagacagagattgtccgactctctgggggatacagcccttgatgtaaccgccagcacattccactctctctgtatgcgcattctgcgccgtgagggagagattctcggctacggcaaggcttttaccgtttacgatacggacgaccaaaagcgtgtaatgaaagagattataaaagattttggcattgacgaaaagtttgttcggataaaaacaataatgaacaaaatttccggctacaaggacaagctgatttccccggcagaggctgaaaaacacgccaacaacaccttggaggggatagttgtaaagtgctacggcgagtaccaacgcaggcttaaagaggccaatgcaatggactttgacgacttaatttacaatgcggtatatctttttaaaaggttcccggatgtgttggatcactatcaaaacagatataggtacataatggtagacgaatatcaagatacctccactgcccagtttgaacttatagatttgctcagcaagaaatatggcaatatctgcgttgtaggcgatgacgaccaaagtatttaccgtttccgtggtgccacaatagaaaatatccttagttttgaagaaaatttccccggtgcagtaaccataaggcttgaacaaaactaccgctctaccgccaatattttgaacgccgcaaacagcgttatagaaaataatcagggcagaaaaggcaaaaccctttggacagcccaaaaaggcggcgacaaggtaaaagtctttacacttgatcgagaatttgacgaagcgcaaaacattgtaagtataatagccgaaaatgtgaaaaacggtgctaagctctccgatcatgccgtgctgtacagaatgaatatgcagtcctcggcagttgaaaatgccctggctcgcaacggcataccctataaggttataggcggtcacaggttctatgacagagctgaaatcaaagatataatggcgtatgtcaatatcgtcataaacccgtcggacaatttaagattaaaaagaataatcaatgtaccggcaagaaaaatcggtgccacaaccgtaaattcgctaagcgagctatctgcggaaaacggtttgagcatgatagaagtgctgtacaatctgcaggcttacccgcagcttttaagggcgtctaagtcattgacagcttttttggaaatatacaaaaagctggtaaaggtatatcgagaagagcctatggaaaattttgttcctcaacttataaaaataacaggctatgaagatatgcttgccgcaatggggccggagggcgagacaaaactgcaaaatatcggtcagcttatttctaacattcaggtttataaagatatgaacgagggcgcaacccttgaaatgtttatggaggaagtaagccttataagcgatatagataactatgacgaaaacgccgacaatgtgaccttaatgacaattcactcggcaaagggtttggaattcccctatgtgttccttataggtgtagaggagggcatattccccggtgatatgtcaaaatacaacccggatgatttggaagaagaacgccgcctttgctatgttggcataacaagagcaaaaaaagagctgtatatctcccatgttaaagagagaatggtgtttggccagacaaagagaccgcagccatcgagatttattgaagaaatggactcggatgtttgcgattttgaggataaaaccacaaaaattgcggccgtaatgcccaaaagcgtggctaccgtgggcagaaacaactattacggacaaaattcttcccttttttcacagcaaaaaacacaggttaaaaaaacgaccacagagaaaaaggaatatttccccggcgacagggtaagtcacaaattgtttggtcctggcacagtggtaaaggttacccctatggctggcgatgccttgcttgaaattgactttgacagcataggcacaaaaaagataatggcaaactttacacctcttgtaaagttgtaaaaagaggatattatgggaaaacttattgttatagagggacttgacggttccggcaaagccacacagtcagagctcctttgcaaatatttggaaagtatcggtaaaaaggtaaaaaaagtcagctttcctgtttatgaaagcgactcttccgctttggtaaaaatgtatctggcagggcagttcggctctcgcccgggagatgtaaacgcatatgcggcatcggcattttacgcggtggacagatttcggagctataaatccgactgggaaaaactgtataaagaaggctatatcatagttgcggacagatacacaacatcaaacggcgtacatcagtgttcaaaacttccaaaagagcagtggaacgattttatggattggctgtatgattttgaataccgcaaaatgggcatacctgcaccggatggggttatatatttgaatatgtcaccggaagtttcgcaaaaattgttgtctgtaagatacgccggcgacgaaagcaaaaaagatattcacgaaaaagatacggaatatctgaaaaaatcgcagtcggcggcaagattctgctccgaacacgacaaatggaatgtgataaactgcgatgacggtgaaaaaccttttaccatagaagaaatacaggaaaaaataattaaaaaagtaacggagattatataaatgaatttcagagaaattacaccggcagattttgatattgtttcacctatattccaaaacagcggcatggaaaactgggagcactgttttccgacggttttggtttggtcttacagatacaacatcaaaattgccatagaagaaagcacggtatttttgcgatttacagaagaaaattgcaatcactatatttatccgtcaggcaaacttgatgaaaagaaaagtatagaaatgatacttgccgatgccaaagaacagggaaaaaaagcttttatttacggtatgaacgaggataaaatgaactttttaaaagaaaatttccccggaatatttgaaataaaagaggatagagatgatgaggattacatttatctttcagatgatttgataaatcttacaggcaaaaaatatcaaaaaaagagaaatcatatttcaaaatttaaaagagattatcccgactacaaatatatctcaatgtcaggtgaaaatttgcacagggctaaggaatttgaaaaacggtggagcctggaatacgcagacgaagacaacccggatttggcagccgaggcaaagggaatagcacggcttttggacaactttgaaaaaatgaaccttatgggcgccatgatagaagttgacggaaaaattgcggcaatgtctatcgccgcaaaaataagcgatgatatggtagatgtaatagtggagaaagcacggcattcaaccgacagcgcctacgctatgattaacagggaatttgcggcggataaatttgccgattacaaatatataaacagggaagacgatatgggccttgaaggcttgcgcaaagcaaaaatgagctacttcccttatgaaatacaaaaaaaatatactgcttgtgaaatttgaggtgagctaaattatgattattcaaaaactgcttgacagcgacataagccgggcaaaaaagttgtggaacgacaattttgacgacggaacaaagggcttttgcgattttgccttttccatttgcggaaacgataatatttatatcgtaaaagaggacgaaaagccggtttccatgcttatggccgttgcccggttggaatacaacggcaaaaaaggtttttatctttattctgcttgtaccgacagccggtataggggcaggggatttatgcacagccttgtaaaatacgccctggaagacaaggcaaagcaaggttatgagttttgcgtaacaaagccggcaacagaaagtctttttgaattttataaggaaatgggctttaaaaatatcacaaaattacgcaaatgcaccatagatgtaaagagaaatctgtggcggacagccgaatttgacattgtgaccgtatctcgtttcccgatgctgagaagtaagttttatgatggaaaaattcttacctacacaaagaaggattgggaaaagtacgccgaatacctttatacttacggcggttcaacggcagaaaatgaggacggctattgcatttattacatcgaaaacgaaaagataatcgtaaaggagcttttgtgtgaaaatccactttcggcaacaaggctattacaggcaataagagaaaagacaggctgtgaacaggcggttgtgtatcttccggaaaattcaaacatcttcttcggtgagggcgcagcagaaaatgcctttgccgtttacggccttgacgatgatgtttacatcaatttgatgttggaataacaaaaaaggagaaaaattatgaaaaaattacttaccgtccttttggctgttattgtactggctttcggcgtgacatttatgtcatataacagcgatgtaaagggttcttcaaaagagggcacagagataaccgtggatattcccgagggtacttatgcctcaaaagttggggaaatactgcgggaaaacggcgttataaaaaacaaacttttctttaaattttacatcaaaactcatcctgcggacaacttacagtacggtcagtttacccttaatacaagtatgtcttacgatgagataattcaaactctcagcagtatttccgcaaggagagaaaccgttaccgtaactttcccggagggcttttctctcatgcagattgcccagagaatggaaaacaacggcctttgcaccgccgaggaatttattgatgtggcaaataacggagatttcagtcaatttgaaatttggagcaaaataaaagaacacgaaaacaagtttatgaaagccgagggctacctgtacccggatacatacgaattttataaggacgacagcgtctataatatggtttgcaaattctatgaaaattttgaggaaagaatttccgcagttgataacgcttaccggcgtatggacgaaataggcatgtcacttgacgaagtcgtaacattggcgtccttcgtacaggaggaagccggccacgaagaagatcagcctgccgttgccgcctgtttgagaaaccgcctgctgccgggttcgccttacccaagacttgaatgtaatgtttgcagttacataaacgagccgggtaactatgtttatgattacattgtggaatactacggcggagtagagaaggtgcctcggggtatgatggaagcctataacacttacgatgttatcggcttgccgccgggaccaatttcaaatccgggtataacagccataaaggctgttctctggcctgacgaaaactatgacggttactacttctttgtaaccgacgcaaagggcgtttaccgctatgcaaaaacatatcgggaacacgttgcaaattgcgaaattgcaagcaaagttaaataaaaatcaataaaataaaggaaaaataaatgaataaacctgaacttttatcacctgccggtgatatggaaagattaaaatatgcttttaaatacggtgcagatgccgtgtatttgggggctgaagaatacggcatgcgtgccgcacctaaaaacttttctttggaacagcttaaagaggccgtggattacgcaaacagcataggcaagagaatttatctcacccttaacacggtgcctacaaacgaagaagttgtaaaaatgccggaatttataaaaaaagttgcccggacaggtgtacacgcctttatcgttgctgatatgggcgttatggaaatggcaaaagaatatgcccctaatgtggaaattcatatgtcaactcaaacaggcataatgaactatgtaactgccaacgccctttataaaatgggggcaaagcgtgtggttttggcaagagaatgttcttttgaagatattataactataagaaaaaacactccgccggatttggaaatagaatgttttgtacacggcgctatgtgtatgtccttttcgggcagatgccttttgtcacactacctgacgggaagagatgccaacagaggcgagtgtgcacagccttgccgttgggaatggcagctcagcgaaaagacaagacccggccagtactatgatattggcgaaaattcttacggcagtacatacattatgaacgccaatgacctttgtatggctcagtatgtggatatgctttgcaaggcgggaatttcaagcctaaaaatcgagggcagagcaaagagcttttactatgtggcttctacaactgctgcatacagaaaggccttggattcttactttgctcatccggacaactgggtgtgtccaaacgaagttacggaagaacttacaaaaacaagccacagaaggtattccacaggcttttactttggtccggagcacgccattcagtcaactgacacatcaaattatgttcgtgaatacgagcttttggcagttgtggaagattgcaaagacggcgaaatttactgttctcagagaggcaaatttgaacttggcgcagagattgaaattttacagccgaacggcgaaaatcttaaattcactcctaagtacataatagatgaagatggtaatagtataacatctactcctcatgcaaaaatgaagtataaaatagactgtccacatgaagttgagccaatgtctatccttagaaaacctctttgattttatattcagatgcccgattttttcgggcattttttaattgggaataaactacggctaagattaaaattacaaaatttaccgttaaaactttcgccgataaatttttaacagattgaaaaattaaaaatatctccgtcacccggcaaagaaaaacaaggaaaaaatatattttgtccgatatgtgtatatttgaattttcccatttttctttcaacacaaatggcatatttattgcggaaagcaaaatcaaaattgttgatatgctgttggtaatcactgtcatattgacaatccgtgagacagacagcccaaaagccgggggaataaatccgaagaaaaatatcacacccaccgtaaaataccgaatgccgttgcggtttttaaatgacaggaattttggcaaatatcctttttccgccgccgcttttatcggcactgccgaagaagctatgccggagttcatcgttgttataatggctgtcaaaggtgaacaaatcaaaaatactctgtatggcacaggtgtaaaaatttgttttgcaacggtcaataaattgttgtattcgccgatgttcattaaacggcaggcggcaaaacctaccgtcgtatatataacccctaccgcagtattggttaaaaacattgacaagggtatgtttttctttggattttcagtttgccgaaaaaaacttaaaagagatgaaacaccttcgcaggagtaactaagcaacaccacagcggtaaaaaatccctctgtactgtttaataaaaattcacttttgccatagtttaaggggtgtttaaagcataacattgaaaaaatcaaaaatgaacacagcataatcggtgtcaccaagttttgaattttgcttattttgttcacaccggtcaaatttaaaacacaaagccgtaaccatatagcaccggcggcaaacatcccatttacaccgggaaaaataaagcctatatactctttcaatgcggccaccgcaatggcttttgagaacagcgccaaaagagaagaaactgccataagtccgccgtatttttcaccggcgcaaagggttatcatttcttgttttcctcctgtggtttctacacaggaggagaaaaatatatacggtgttaaacgcagataagacagcaaacaagcgattaaaaacgccaatcccatagagtaacccgttgcatcaaaagcggcgcctattgtgcttactatgcctgcaccgatcacatagccgatacctaaaaataaaagtcccggcagttttaatttgctttccatattttgtatcggcggtctttataaaatcggaaaaatccgccgtcctcctcatattttgctaatatatgtatattaaaaatcaaaaaaataatgccccgcagggcattactttttaatgaattttgccggaacaagctatgctttttcatcgcaattcttgtgtgtgccgcaacagccgttgtcaaacttat

SEQ ID NO: 2768 - DNA, 4125 bp, Unknown
  16S sequences of unknown bacteria
ccaccagcctggtcacttcgatgccggtccatctggacacgatcttggcgatggtctcttcattgaccgtctcctggatgagcgcatcttccttctgcttctctgcctccatgcggatctgggcctccagctgcgggatcacgccatattgcagcttggccgcttcctcataacgggcttcattctgcgcctgttccagatccaggcgcgcacgctccaggcgcaccttggcgtccttgctttcctccagctgggccttctcatcttcccatctggtgtacagctcatcccgctgcgactgcagctgggcaagctcttcgcggatgtcctcgcggcgctcgatggccttcttgtcctcttcctgcttcagcgcggtctcttcgatctgcagctgcatgatcttgcgctgcagctcatccagctcctgcggcatggactccatctcgacacgaagcgtcgcgcaggcctcatcgatcagatcgatggccttgtctggcagaaagcggtccgtgatataccggttggacagcgtagcggcagcgatgatcgcctcatccaggatcttgacgccatgataagactcaaagcggtctttcagcccgcgcaggatggagatggtgtcttccaccgtcggctcctgcaccatgacccgctggaaacgccgttcgagcgctttgtccttttcaatatacttgcggtattcgtcgaaggtcgtggcgccgatgcagcgcagctcgcccctcgccagcatcggcttgagcaggttggccgcatccatgctgccttccgtctttcctgcaccgaccagattgtggatctcatcgatgaacaggatgatgccgccctgggcgttcttcacctcttccaatacggccttcagccgttcctcaaactcgccgcggtacttcgcgccggcgatcaatgcgcccatatccagctcgatcagctttttctctttgagcgactgcggcacatcgcccttcatgatgcgccaggcgatcccttcgacgaccgcggtcttgcccacaccgggctcaccgatcagcaccgggttgttcttggtcttccgagacaagatctgaacgacacggcggatctcatcatcacggccgatgatcgggtcgatcttgccatccttgacctcttcgaccaggtctcttccatatttgctcaacgcttccacattgttttcggcgttcggagaatccatcttcatccctcctctgcgcttcagttcctcttccttgcactgcgcctcattcaagccgaaccgcttgaccagctgcttggaaatataggaacggttgaacatcagcgcgatccagaccgaagcgacgctcagatacgtctcttcatgctgagccgcccacttctctgcttcatcaaagctgcgcacgacttcctgtgtcagctgcggattcgtattggatgccctcgcgatcctgttcatctcatcatctatcaatgcaagggcctcgcgtttatcgacattcaatcgcttgaacagtccatccagtacctcatcctcaaaaatcgccttcagcagctgtatcgtatccacgctggcatggccatacgatttgcagatctccactgcacgcatcaagatctgctgcagcttctcagacatcttttcgtagttcataacgatccctcctttagcactctcttctttcgattgctaatcctattatagcaccgtttttagcactgtcaataccagagtgctaaatttcaaatttttttattttcttcttgcatttttctgaaaagatggtagaataatccatgcatcgggatgtagcacagcttggtagtgcacttcgttcgggacgaaggggtcgcaggttcaaatcctgtcatcccgaccatgatgcagggaaagcttcgaaagaagctttttttatgtttcaggcagacaaagaaaaaatttacatattcgccagatcaccgcaaaaaagcgtggcatttgccgcagaacgcggtataatatttgcaaagcgaggtatttgacatgaaaaaaagctacacgatcggcagaacgccaaaagagctcagcgcagcggtcgagatcatgatccgaaatgatttttttgatctcgagcatttccacgcaaagcatgacggcacggaagggcattccttcgcactgcgcttaagcgaagagacgctggaggataccatcttcatggatatcactgccggagaacgaacgacgctgacttacacttgcagcagcgaggatgaatcgatccccgggcttctcgcccagctgaatcagaagatctcggaagtgctggataatgcagaatataaagaggagatcgagcggttgagcgaagaaaagccgcaggaagcgcaggaaccagaaccagcgcagcgccatgacgccgagccgtccgctcccgcagctcagcctgccgcacccttcagctggtgcaaattgatcccgctgaccttgaagatcatgtccgccgtgatcctgctcatcgggctgttcttggccatccagggcgcaatgagcacatctccttattcttcattctacgagatctatccgcagaccatgacctatttcgatgcctatttcttctttgacacgctgctttcctggctctgcagaagcgcggtcatcttcgcgctcggagagatcatcgacctgctcacccacagacacagcgactgacgctgtgtttttttcagcggtttttctcgatgacgtggatgcgcggacagtctttcttattgctcatatagatgctcatgcattccgcttcacgggaaggcagcgcgctgaccacagactcaaaatacgccgcttctcttctcccctcttcatggccgggataggtcaccaggatcagcacgcctcttcgcttcaataaagaaaaggcgtcgcgcacggcggatgatgaggtgtccagccgggtcgtcaccgcatgatcgcccctggggtaatatccgaaattgaagacccccagctgcagcggttcatggatatagcggttcatctgctcgtgcccgtcatggatgaagcggatcttgtcagccccttcctttcccgccaaaaaagcgcgggcatcctggatggcctgcagctgcacatcgaaggcatagaccgtatggatggacgcgcacgaagcaagcactgcgcagtcaaagccttgtccaagcgtaaagtctgcggccgctccgccctccttcgccgcctgccgcatgatgtcatgaacgatctccaccacttttttcatctgctcaccctttccactgttttgttcccattatataatatctgcatgagatacttcaacgatatcccgatgccggtgcgcaaggtgctgcgcatcctgaatgaacatcatcatgaagcgttcctcgtcggcggatgtgtccgtgacgctttgctcaaccttgcggtgcatgatcacgatatcgccacagatgccaggcctgaagagatgatcgcgctgttctccgggcgatgccggatcatcccgaccgggatccagcatggcacgctgacgctgatcatggacgatgagacgatcgaagtgaccacctaccgcatcgaatccggctatcacgatcaccgccgtcccgacgctgtccgcttcaccaccgatcttttgcaggatctctgccgccgcgatttcaccatcaacgcgatggcgatgcatcctgacctcggcatcatcgacccgtttcacggagaagaggatctgcgaaacggcatcgtccgctgtgtcggatgtcccgcacagcgcctgcaggaggatgctctgcgcatcctgcgcgcggtccgcttttcctgtacgctccatctcacgctcgaggacacgctgcagcaggccatccgggaacatgcgcctttgctcgcgcacatctcaagagagcgcgtggccaaagagctgtcccgcatcctcatgagcgatcatcctggtctgctggcgatgctgcaggaactgaacctgatgccctggaccttcccccagctgatcccgctcgatccgctcacggacctcgccctggaccgcagccgcggcttcacgctgagccagaagctggcgctgatccacctcggcctcgatcagcccgagcaaaaggcagaggcggcgctgcgcggcc

SEQ ID NO: 2769 - DNA, 32759 bp, Unknown
  16S sequences of unknown bacteria
ctccgcgttgcggagggcggcggctttgcccgcgtcgtcgtagggctttttcgcctcgtgcgctttctttgccagcgtctgatgcggttcctctaacgtataccaataattggcgttcaccgattcgaaattcttttggagaggatagacgacctgaattttcgtttcgttctgataggcttgcagggcgaggtattcctcttcttcaagatttttgtagatataccccacctgatagtaggtgtccacgttcattttataggacgcggtgccgtccgcggcgtttttcgtatagcttttgatcgccgagcgctcgggcgtgtcctcgtttgtatagcggaattcgtaggcgatcccgttcagattgtcgaagcgcgattggccgcccgtcacgctcgtcccgccgtcccagaaacggatatgatgcgtccgattgaagtttaaagtaggttgtacggttttataatatccgtcgcggaaattgacgtcgtaatgagaaaagagggggacgacgacggcgaaaagaagctgtaaaaggataatgatcgccgccgccaccgagcttttgttctttttaaaccgccgaaaggcgtctttaaagtagccgacgggcttggtttcgaatttttcgtcgtatatctttccttcccgatgcacgaacgtaaacttttctttttcgattttgtttgtgttttctgccatattatttcttgctccccattctgatccgcggatcgatgaatccgtagctgatgtctatgacgatgctcgaaagcaagccgataaaagtataaaagaaagtgagtgccatgaaaaagttatagtctttgctgttgatagacgcgatatagagctgcccgacgcccggaatggagaagattgcctcgatgatcagagagccgctcataatgccgataaattcgcccaagatcatcggaaaaatgacgaccatggcgtttctcatggcgtggcgcacgatcgcctgtgctttggtaagtccctttgttcgcgcgaggagcatatattcgctcgtgagcacctcggaaagctccgccctcgtatacctcgtcagacccgccacgacgccgaagccgagggaaagaacggcgggaagcatggaaacgaacatcgtccagctgaaaaaggaggcgttttctctcgacgcgacggtgagcggaaaccagcccagcttaaaacagaggagatactgcaccaaaaaggcgtacacgtaagagggaacggagataaatacgaccaccagggtagagatgacgtggtcttcccacttattttttttgagcgcggcatagacgccgaagataagccccaagggaatggcgatcagaatggaatacaggttgacgatcacggtgtagggcagcttttgaagcaatacgtcccatacgttttggtttgcgtacatcgtcatcccttcgccccaattccattgggtgaagatgtttttccaaaatttgaaatacgccagcaggatgggggctttgacgtattctccgctttccgttttcacgagataccccagctgcacctgtttttcgtattgcagaatcggatcgacgccggggacccgattgatgggcgggacaggcaaaagtcttatcatgatcagacagatggacatgatgataaacagcgtcatcagcatcagaaggagtcttttgaggatatattttgccataaacgaatctcctgaaaagtggattgaggcggactcatgccccgccgccaaaaaagggcgcacgctccctttctataaaggataccagagagcgtcaactctctgatagcggggggatatccggcgatgtctgcgcgaaaatactcggggcgcgttccctccgggtgcggcgcttttttaaagagcgcttagaaaagggggacgcgctttcgcatagatacgctctaagtaaactctccgcattccgcaacaaaagagcttcggaatgcgaaaagtctttttaatctttccgcctttttaagcgggtaaatcttttcggttactttgtgtaatcgatattggatttattcaatgccgcccaggccgcgtcgtcgtaattataagtggtgaagcggatgccgccgaagtttacgagatccacataagtgtccgtgccgttattgacttttgcggagtgcagggaggctacgtttctgtaatagaggggaatggcggtgaaataggaaaggtaggtgctctccattttggcgaagacgggagtcttgaagccgatgctcagcgagcttgccgcgggcagcgtcttttttccgtccgcggatttgatggtcacgtcgcggttgttcagccagtccgcccaatttttcaaggacgccctatactcggtatattccagcgtaccctctacatccaattccatggaaacggaaatagcggaggtgtcgaagccgtattcgttctgattgcctccgcccttgggatcgtcgcagtaaacgttggaaagaatgcccatgccgttatagggagcgccgccccaggtagagaaaatcatgtccgccgtgcccgccgcgatcgccttgtaatagtcgggattgacggtcatcgtgagttctactttcccttccaaaggagtgcccttgcaggcttcttttatctgcgcgttgagataattgaacatctgcacatacacgtcgtcgctggcgtatacttgaagttctacggaaattttgtccgtcccgttgtagagcgccgacgcggagcctgcgccgacagccgcgcccgtcttgtcgtgcgtggtggcgtaagcgtaagcgtccgccatggcggcttttgccgatgtcagactgtaacccgtaatggagccgtaggcctcatccagcgtcttgtattccttgtccgcgccgtattcgatgccgtagagatcgcaaagcgcctgtttgcccgcgtcggtggagcgatagggcgtgctggcctcgggatcgaagatatacatactgttgagaagtccgaagcccgccgcgcccgcggccgtgtatttggaggcgaactcctgtctgtcgatggcataggagatcgcttttctgaaatccctgacggtgagcatcgtcttgttgatgcccgccgtttctctctttttgagcgcgtcgtaatcgctgttgatggtgagtttggtcgtgtgggactggggcgtatagtcgatataagaactgccgctgtatttttccatatcctcgctgacgagggtgacttcgtctacgtcgccgttgaggaaggacagaagcgccgtcgcctgtttttcgatcactttaatggaaattttatccgtttggaattgattttcgtgacgtccgtccttgtagccgtaccacgatttgttcttttcgaaggtcagctgcttatcgggctcgtagtaggtgaaagaatagggaccatacccgacggaagtggcgatgctggtgcagtattgggaagtgatgctggcgagcgttttgtcgggattttgcttgcccacgtccttggtgccgtcggtatagttataaatcttgttcgcttcgtacaggtccttgtgtaccagccaggtggaggacaggtaatagggcacataaaaatcgggctgcgccaaagtcttttcgagaatgacgtcgagatattcgaggccggaagccgtatcgctgcccgcctgtaaaccgacttcgccaaaatccatctcgggcatcttttcatagtaatagcaaatttccagccattccccgtcgtatccgccgccgttttcgtgcgtgaaagtatcgagaattcccataagcgtcccgtctactttcacgagtccgtcggaattgactgcgtctaaataggttttgaacgcctgattcgtgatgatgcccgcgtcgtaaaaatcctttatggaattttggggactccaaacggtaggccccgtgagattcgcatagagaaaagcgccgcccttatcggatacgcgatagtagccgtcgtcgcccaaaacgggagtgacgtaagaggacaactcgctgtcgtaacaggaaacgggcgcttcctgaccgttatagagatagtttttcgcgttatagatggcaaagtcgccgccgtaataggaatccgcacgcctgtttttcatgacggggtccagctgctgccgcatggaataaatataatcggcggccttgatgggggtatgtttggaatcgtcccaggtcgcggcgggattcaaatagatgcggaatgctttggcggtttctccctcgcccacgccgtagctgcccgcataagaagcggtgacgtcctcatacagtttttgcgtgcccggaacgtaagctgccatttccggcacccgcgcattggaagtcttgttctccgcgagaacgaaatcgaaaaagcccatggacatatatcccagaagtcccgaatcgtcgttcgtttcccaggtgtgcggattccaattgaggttgttcgtgcccgccatataggtgttgtaggtgtaatatcccttatttccgtgggaaccgcccgaagaagaatccgaaggattgtcgccgcaggctgccataccgagcgcgaatgccgcgcataacagcggggacaaaagggcgccgagtttctttgctttcatgtcattacctcctcagtctttatcgggcatcgtccgcctttttagtcctttacagggaggagaagagcggggagccgatagaggcaggaaacattcctgtctacatttttatgagataaacggagggtttttatgcgctttttatgaaaggatttttatcgtcttttcacttttctctttcccttttttaaacggcttacatagttacggtaaaaaaagatcggcttattccgcggggagtaagccgatcgggagatgtttagttaaaaaagtttcgctttgctccctgcgccgtgcgaagggatgcctgtggaaaaaaatgtaaaaatcgagaagacgaaagaagggatgggcggggaaaggaagcctttgactccctgcaaggcggagcgcattcgggcgtttcgcttgattttatgaataaggacggagcaaaggcggctttttgacgtttaaggatgcgttgacgaggggggaagggaggaggcttgcaaaaacgctttttcgcgtggatcttttcaagtcggctgcgttcaaaattttaggagcttgcaggctctcggtcttgttcgcagacgaaagaaacggcgtgtttttccgaaaatttttttaggaaagattccccgtttttatcctcggtgcgaacgtaaatgacgaggggcagggctttgacgtccgcgcagcccagcagaaaaacgctctcggataaattttcttcggcgagtttttttctcagcgttttcagcttgctttccgcgtactttcccttttctatcaaccgcatccgtatgatcatggagatccccacgcaggcggcgagggagccgaaaataatgccgcataagccgttgtaaaaggaatgattgccctcggagagggagagcagggcggtttgggtaagcacgatggaaatgagcgcggaggcgagattcgtcatcttgatggcttctaacagcggctcgtggcgccgtcgcatcgttttggcgcctacggaggcaagcgccagttcgccaaacgtaaaggcggcaatcgtgatgccgagaatggtgccgtaagaggtgttgccgctctttgcgataaacatacgggtgcaatagacgagatagacgagcgcggaaaccgctatcacgacgcccgtaagtgtgtaagcgcggttctttttatcccgcagctgcgaggcggacaaagttttctttccggcttccagctgcgtgttcaggggcacgaatttggctagccctatgccaaggctgtaaagggcgttgacgaagagaaaaaaggaaagggtaaaaaggctcagcagcgctttgcctatcgccagcagaacgttgacgggaacggacattttcgtgaaaaagaccacccgttcttctttggtcatggtaaaaggattgcgttttatcaagatcctacctcgtgagccgctttgaaggggcggcgcgtatttcgtctttttgcgcgcgtcgatggagcgcgggagaaaagagcaggctttctcgcctcgtatccatttcgttcggaagagagaaagaggcgttttatccgctcgccgcgcgtggacaggttgcggcagaaaaaagctcgttttagcggctctcccgtagcgcctgcgacatcagagagttttaaaaaatcggtgggcgggcgcggctcctcccccggaaaaagtcgttttttgcccctttttcgcgttatgcctcgctcatggggcagcgccgcccaaagagggaggaatttgcgtcgttcaaatacgcgctgcgggaaatttcggaaacgttcggatatattttcgccgccctgcgtgcgaaggaacggcggggaaaagctgcccttccgctttttcggcgcagcgataaattttccgccttctttgcggggcgttttataactacgcgtttagcgactttttcatgacggagaggaggccgttttttcgtttttatcctgcgccttgcgcgcagagtttataaatagttttgtcttaaacgtgaacagtatacagaaaaatcgtttgcaaactgcttgaaaattgttaaagaaatattaatttatttgcccgggcgaagaaaaaggtttacaaaacggtctttttcgggtatcataaagacacaggcaagggaggaagagatatgatacgtattcttgtggtggaagacgatctgaaattcaatcagattgtatgcacttatctcgacaacgcggggtatgccgccaaaggctgtatgaatccgcgcgaggcgtacgacgccatgtataacaatcttttcgatttgatcgtttcggacatcatgatgccggaaatcgacggcttcgaatttgccgaaacggtgcgcaaggtgaataaaaatattcccattctctttttgaccgcgcgcgacgatattttttccaaacagcggggcttccgcctcggcatcgacgattatatggtgaagcccatcgtcatggacgaacttctcctgcgggtgggggcgctcttgcgccgcgccaatatcgcaaacgagagaaggctggcggtagggaatctcctgttagatgccgaaggaatgaccgcgcgggtgaacgaagaagagatccccgtcaccgtgcgggaattcaatatcctctataagctgttgtcctatcccggccacaccttttcccgggcgcagctgatggacgaattttgggagatcgacagcgatacgggactgcgcgccgtggacgtttacatcacaaagattcgggacaaattttccgcctgcgacggctttcagataaagacggtgcacggacttggctacaaggcggtcctgaaatgaagaaacggaataaaaggggaaagatctcccgcttttcctgggcggaatatataggctccctggtctgtttcggcgtgcttgcggcgcttcccgccttcatttacggcggaaaagatgtgatcgtggaatcgcggaggtggatcgtatggtacgtcctttactgggcgttgatcgcgggcatattctgcgcggtgacggcgtatcagaagcgccgcgtattcgataagcccatgaaaaagctgggcgaagccgcccgcagggtagccgaaggggatttttccgtctatctcgaacaggaacattccctcgataagatcgattatatagataaaatgtacgaggatttcaataaaatggtggcggagctcggctctatcgaaacgctgaaaagcgatttcgtcgccaatgtttcgcacgagatcaaatctcctttggcggtcattcaaagttatgcgctcgctttacaggacgagaatctcgcgcccgagaagcgcagggaatacgcggacaccatcgcgttatattccaaaaagctcaccgacctcgtgaccaatatcctgcggctgaataagctggaaaatcaggtgatagagccgaagatagaaaccttcgatctgtgtcgccagctttgcgaatgcatcatctctttcgagaggcggatggaagaaaagaatatcgaactccacgtggaaacggacgattgcgcatatgtgcaggcggacgagagtatgctggaaatcgtctggcacaacctgttgtcgaatgcggtgaaattcaccgagccgggcggaaaaatctctgtttttcaaacttccgacgaagagagcgtcaccgtcaccgtcgccgatacgggctgcggtatgaacgcggaaacgaagaaacggattttcgataaattttatcagggggacacctcccattccggcgagggcaacggcttggggctggcgctggtgttaaaggcggcggaactgacggagggcgccgtcaccgtggaaagcgagtcggggaaaggctccgcattcaccgtgcggctcccgctctgcaaacgctctgagtcaaacggctaaaatcgattttttaaacggcttttcgcggcgcgagggccgttttttcaaatttaacaattcgcaaacataatgcaagcaatttgcaaataacgacggggtataatcggggtataaaaagcaaaggagataaaaaatgatggaaaatgcgaacaacaatgaatttatcggttacgagtacaaggaagtgaccattccccgctcgatggattccgtttatacggacggttacgccaatttcgggtggcagccggaaggctcctccccgaccccgtctgtcggcaagatagtcatgaagtacaagcgcaacagaaagctccgcaacaaggcggaaatcacgaggctgcaacgaaaattcgacgcctgcgccgaagagatacaggcgatggaacgctccaaaaagtctacggcgtcccttgtcgcctatacgctgggacttatcggcacggcgtttctcgcgggggcgacattcgcctaccttgccgagatgatcgccctgtgcatcgtgctggcaatccccggatttgcgggatggatttttccctatttctgtttcgtcaagctccgcgcctccaagacggcaaaactcaatcctctcatcgagaaaaaatacgacgaaatgtacgaaacctgtgaaaaggccaacgcgttgctggcggaatgattcctttaaacgcgcggctctgtgcggatgacaatctatttaaaattgtcgaattaagatattttgagtgaagccgatgtcctcggcttcttttcatcccgaaaaataaatttttcattttctccgcccgcatttggaaacagcgttcgctttttttcggtggggagggatcttaaaaaacggaaagtatctgtcttttagctctctattcgctttttttaacaaaagacggcggagtttgaaaatttttcctcggcgcgcgtgcgccgtacccgcttgacggcggagggaaaactgtgataaaatatgtttcggaaaaggcgaaaaattcgcccggaaaggaggacgccgtgcctgaattgcccgaagtggaaaacgtaaagagaaaacttgctccgcgccttgcgggacggacgattttaagcgccgtcgtccataaacccgtcgtcgcctatcccgcggaggaaagattcctcgcggcggtgcaggggcgggagatcgcggatacgcggcgccgaggcaaatttttaattctccttttcaaagacggcggaaaaatcgtcgtgcatttaaggatgactggcagactgacggtaaacgcgcctcaacaaccgccgcagccgcacacgcacgtcgttttttatctgtcggacgggaacgaactgcgctttgccgacgcgaggcgtttcggacgcgtctggctgatagaaaagggggaaaaagacgtgtatacgggactggaaaaactgggcttggagccgtttgacgaaaagctgactcccgcatatctcgaaagcgcgtttgcgcggcgccgcatcgcggtaaagcaggcgcttttggaacagaccgttgtggcggggctcggcaatatctatgcggacgaaactctgtacgacgcaaaaattcgtcccgacaggagcatttcttcgctgagtcgggaagaatggcagcggattgtcgaaagtatgcggcgggtgctcgctgccgccgtcatcaagcggaacgcgtccgcagggccggaatacagggaagaggcaaaggcttacggcgcgccgtttcagcttcgcgcctacgggcatgaaaatcgtccgtgcggaaggtgcggcgagtttatcgtgcgcgtcaggataggcggcagaagcagtttcttttgtccgaattgtcaaagagaatcataagaaacggaaaagttcaaaggacggaaaacgctgtctgcgctttccgtccttttattgaggaaacaagggcaaattttgcggcggctttgtaaaaacagtcggccgtgtcaatggcgttttaaacttcaagaatcggtggctctatcctttaaaaagtccgtggggagcggagaaacaggactgcaagggaaaggaagcgcgctaaaaacaaaatcaagaaaagtgatttttaaaacaaggggagagcaagcgtcgtgcgatgcccccaataccctcacggggaagaacagcgttcggcttataggaatgcgtcaaagttaaaaaaaggcgggcgcgagggaaagcataaaaaacggcgaggcaaaaaagaactttccgaacgcggacggcttacttgtaagcgggcggcgaagcgcctgccgatactcatgcctttcggcgcgttgattcccgcttttgcggggagcgttttcctttccaaagaaagaaaaatcaaagcttttcccgtaaccgttggaggaacaattctcccgctttggaaaagacggtatattttttccaggcgatatcgagatgggattccagacgcggcgcgaagggacggaaacagaggtcgctatcccctgtcgtattgacgagcttatcaagacaaacggcgtagccgattccttcttccaccatcaaagaggcgttatagatgaggttatacgtcgccacgacgttcatcttttccccgcccgcgccgaaccaagcggaaatttcatttttacacatggtatgacgggaacgtatcaaaggcgcgccctttaaatccccgggggaaacggcccgcttttctgcgagcggactgtctttgcgcacgagtacgccccacacgtctgtcaggggaagccggagataattgtacttggataaatccgcgggttctatgagaatcccgaaatcgataagccctttgtccagccgctcggtgacgtcgcaggtatcgccgctgaaaaggtgaaatttcactttcggatgctccgcctgtatctcctttatcgtgcgcgctatcagctgcatggcgtaagattctccgccgcctatgcacacgtccccgcaaatttcgtcctgcggcgaaagcagctccgtttccgtcttttcgtaaagctccaaaatctcttccgcgcgtttgcgcaggaggctgcccgcgtccgtcagtccgatctttctcttgccgcggatcagcagcgactgtcccacttcgtcttcgagattttgcatctgccgcgaaagattcggctgcgtgacgtgtaaaaattccgccgcgcgcgatatgctctcttcccgcgccaccgctaaaaaatatctgagtacccgaaattccatgtttcttcctcccgcattcagtatatcagattttaccatgcctgtcaagcataatttattataaaatataagtatttgacatatgaaatcaattgatatataatagcatcatcgggaggcgaaacatgacggacacaagccaaacctctttcagggaaaatctaacggacgcgggctgctgcgaggaatcgatacgtctttgcgaatcgctcaggagagaggggaagaccgcggaacttttgaaatttttgacggagcagagaaaacggctgctcgacgctcttcacagggaacaaaaacaaatcgactgtctggattatctggtctgcaaagtaaggaaagaaacgcttttgaaagagcgacaaagcgccgatccgggcaagtcctgacgggaaggcgggtttgttttccgaacggaaaaactcaacgggagtttcgcggggggaagggcgcggaaagggagaatggaaggcgttagaagcgcgaggactgacggcgcggcgaaaaacggaataaaaaaggagaaggttattcgtgcggggcgggaatcgggcgaaaaggaaagcgaaacttaaacattccaagccttcgtgcggatgagaggggatgcggacggaagagaaggagcaaaaatccgcgggaatatccgctcggtttcccgcgggacgggtactttgaaaacggaagcgggaggaaagattcgtccgccttttgtgcgggaagtcgaagggagtttgtaaaccctgtcgatgctatcgggaaatccaaaaaacaaggagatataaggaaatgagcaaaaaaatttttatcgtgtcgtccacgccgagaaaaaacggaaactcggatattctggcggaggaatttgcccgcggcgcaagggaagcgggacacagcgtggaaaagatctgtctgcgggagatcgaacttaaattctgcacgggatgtatgtattgccatacgcggggcacgtgtgtgataaaggacggagtggaaacgctccttccccgcatcgcggattccgacgttttggtgtttgccacgcccgtctattattatgaaatgagcggtcagctgaaaacttttttggataggatgaatcccctctacgggcgggacaatcgctttcgggaagtctatctgctcgcttcggcggcggatacggaggcgagcgccatggacggcgcggcgaagggcgttcagggatggatagactgcttcgacggcgtggtcctcaaaggagtcgtgcgaggcacgggggcggaaaaggcaggcgacatccgtgcgacaaatgccgtgaaagcggcgtatgaaatgggaaaggccgtctaaaaccgtataatctttatgtgggcgaggcggcaaaaggagttgtcttatggaaaaacgactgaaaatcgaaaacgaaacttttgaagaggaacgcgcgctctatcacgttaaggacgcggacgtggcgttttgtcgcttcgaaggcgcaaaggacggggaatccgccatgaaagaggggcggaatttgaacgtgcgaagctgtcattttgcgctccgctatcccttatggcacgtcgaagggctttcgatgaaagactgcgaaatgacggacacctgtcgtgcggcgctctggtacgacgacagggtaaaactcttcgattgcaggctcggaggcatcaaagcgctgcgggaatgtcggcgggtcgttcttgcggggtgcgaggtgcgttcccccgaattcggctggaaaagcgcggacgtaacggtgcgggattcgtcgatagagagcgaatacgcctttttggaaggaaaacgcatcgcggcggagcatttggaattttcggggaaatattcctttcagtacgtcgagcaggcgacgattaaaaacagccgcctgcataccaaagacgctttctggcattcgaaaaacgtcaccgtcgccgattctctcgtcgagggggaatatctcggctggtatgcggaaaatctcacctttatccgctgccatatcaaaggcacgcagccactttgctattgtaaaaatctaaggcttatcgactgcacgatggaagacgccgatctcgcgttcgaatacagcgacgtccgcgcgcagataaagggaaaaatactgtccgtcaagaatccgatcaagggcaggatagaagcggacggcttcggggaaatcatcctttcggacagcgtacgcaagacgagggcgaaaatcgtggacaggagccgcggcgagagcggggaagaggtgcgacaaagcatataagagcagggcagggaagaggcgaagaactttttttaagtttgtcgttctctttccgaaaaagaaatttccgtcaggaaagaatcgaagaaacaaggagataaaacatgaaagcatttacggcgtatatccctacgcgtctgttgttcggcgcgggaaaactcaaagaactgcatttgcaaaaaatgcccggcaaacgggcgctgctcgtcctttcgcgcggaaaatccgcgaaggagagcggggctttgaaacggacggaggaggaactcgcggcggcggacgtttcctatgccttattcgacgagatcgaggcgaatcctttgaaggatacggtgatgcgcggcgcggcgtgcgcgcggcgggaaggctgcgatttcattctcgccctcggcggcggctcggtgatggacgcgagtaaagcgatcgccgctatggcgaccaatgcgggcgacgtatgggattatatttccggaggcacgggaaaaggcaaaacgctcgaaaaggatcccctgcccctgatcgccgttacgacgacggcgggcacgggcagcgaagtggatgcgtggggcgtgatttccaatcccgaaacgaacgaaaaaatcggtttcggcggcgacgacagactctttcccgtcctcgccttagtggatccgcagctcatgctgacggtgcccccgcaatacacggcttatcagggcttcgacgcgttgttccattccacggaagtgcatatcggaaaattctcgaacggcgtcagcgatatgttcaccaaggcggcgatagaggcgatagccgcatacctgcctcgtgctgttgccgacgggaacgacttggaagcgcgctcgaaagtggcgttcgccaatacgatgagcggctatgcgatggtggtggcttcgacgacgagcgagcactctttggagcacgccatgagcgcgttccatcacgagcttccgcacggcgcggggctgatcatgatttccaaggccttttacgggcattttgccgagaagcacgcctgcgacgagcgaatgatagaaatggcgcggctgatggggcgcaaggatgcggacaaggcggaggatttcgtcgcggcgttggcggagctgcaaaaggcgtgcggcgtggacgggctgaaaatgtccgattacggcattcgccccgacgagttcgaaaagatggcgattaacgcgaaagaaacgatgggcggtttgttcttggcggatccctgcccgctttccgtcgccgactgcgtgaagatctacgaaacatcctaccgttgagggaaaaggatatgggcaggatattttcgctgatctttgtcctttcgctcctcttcggtgtcgccgcctgcgcctcggaaagttctctctcggaggaacttcccgccgatagcgaaggggaatcctgtaagtccgcaattcctcagctttccgattcccggtgggagcgggaagaaacgctgcgaataacggtgaaaggaagcgttttcgaggcgaaactatataaaaacgaaacggcgcaggctttcgcctctctgctgccgttgacgctcgaaatgagcgccatgcctcacgagaaatacggttatcttccctcccgcctgccctcgtcggcaaagagcgtggagagaatacaggcaggagatctcatgctttggggaaacgactgcctcgtcctcttttacgaatccttttccacttcgtacagttatacgcccgtcgcgcggattgcagactgcgagggacttgcggaagtcttgggaagcggcggcgcgccgattgctttcgcgcttgaagggtaagcggcctcgtcttttttaggaacccttttgatttcaaagaggtttacgggcgggacaggcgggcgcgggtatcgcgtttcccggtttcgcaagtgggattttattttttggaatggcagagtccgcggatcgcggcgccgggataaaaacgctgttctgcctcctcccggccgcaggttttcccggctcgtcggcctgcggaaaaagaaaacggcgatggaatgaccgaatggaaaacgcctcggaatccgaacgaaagaagttcggcgcacggggcgtttttttgaacgcctgtaaaaaacgggcatggattgtcctttcgccgcatatatttgtcccatgacaaccttgaacgaattgaaagcgggcgaacgcgcggaagtggtgaaaatagaaacggacaaagacgtcaaagaacggctgaaaatgttgaatatctttgtcggggcaaaagtacgcatggtaaagacggcgttttttaaaagtacgtttctgatagaggcggacggcgtgcgggtgggcatgagaaaaaatcccgcggagaaaattttggtcgtgaaattgtcggaagccggggaaacggaggagatttccgcttcggattcttcaaagaggagggcggaaaagtgaaaattttactgatcggcaatcccaacgtcggcaagacgacgcttttcaacgcgctcacgggcgcgcacaaccgcacggggaattatcacggagtcacggtgggggtcagcgaacgcccctcccgttttcccgtcctcggcaccgtctgcgacctgcccggactctattccctcgacgggttgagcatggaggaaaagctcgcgggggattacatagaaaagcaaacgggggagtatctcgccgtacaggtggcggacgcggcgcatttgaagcgttcgctcaaactgacggaaagcctgctcgcccgcggcatccccgtcgcgctcgcggtgacgatgtgcaggcaatttcgcgcccgcggcggggagatagactgcgccaggctcggccgcgcgctcggcgtcaagtgcttggaagtggacgccctgcgcaaaaagtccgtgaaagcgtttgcggagtcgctcggcgcgttcttctcctcgctgccccgctatcgggaaacttgccgcctcgcgggctcgaaaggaacgcgtttcggggatttcttcccggaggaaaaggaaatctcgacagacgggacggaaagggacaaaaacgcgggcgcgggggcaaagagagagcgcaaggcggctttgaagccgggaaacgccgcgggaaaagggtctgacggggcagcagatgaaacgcggactgccgcgcggaaagaagtccgaaaaacggaaggatacgttcccgcggattctcgggcgaacagactcaacaggctctgtctgaacggatttttcgcgctgcccgcctttttcgttctggcggggctggtgtttttcgtcacgttcggaacgggaatgccgggagattttttaaagacgctgtttgaggcgcttatcgagcgcgtggcgggctttgcgggcggggcgatagattccccgatcgtgcgctctctcgtgtgcgatggcttaattaaaggcgcgggaagcgtgttctcgtttatcccgcagatcgcgctgatgtatttgtttctcgacatcctcgaagagagcgggtttatgtccgctttggcgttcatgacggacggtctgttttcaaaaatagggctttccggacgcgcggcgttttccgtacttttggggtacggctgtactgccgccgccgtcacctccacgcgcgcgctcgaagataagagcattcagcgccgcgccgtttccgcgctctatttcgtgccttgcagcgccaagctgcccgtgtatctgaccctgctctcctccgtgttcgagaacacttttctcggcgcggtgatcctctacgttttggggacgggaatggggctggcggtggccgcgtttttaaagaaagacgacagcgtattcttaatggaacttgccgatatctgcgttcccgacatacttttcgtggcgaaaaagttgctttttcagatcagacagtttataataaaggtatctaccaccgtgctggtctttacgctcgtcgtatggtttctctcctctttttcctttgcgggagcggttgcggcggaggacagctttctcgcgcacatctgcggcgctttgaagtatgttttttatccgatgggcatcaccgattggcgggcggcgttcgcggcggtgagcggcatcatcgcaaaggagaacatcgcggggatgatcgccgtgctctttcccgagggcttcgccttttctttcccctccgcctgcgcgtaccttacctttgtggcgctcattccgccctgcgtgtcggcgatcaccgcctgttcgcgggaattggggcgcaaaacggcgtgggggtatgcgggaatgcagacggtgttcgcctttgcctgcgcctatctcgtgtatttcctcctgacgggcggggcgggcattttactgacggtgctggcggcgttcggcgcgttcgttttcggcaggtggctctacaaaaaaatcaataagaaagaaattcggaaaagaaaaacgtgaaagaatttatggcggacagaccgcagactttaaaagaatttaccgacaatacctatgcgcaaggctcttttttctggcattatctccttaaaaacagagagatcaaggtaaacggaaaaaagacgggagaaaacgtgccccttgcggcgggggacagggtggaatattatctttcgccgaaacaggaagaaaaacccgccttttatatcgtttacgaagacgaaaacgtgctcgtcgccgacaaggagagcggcgtcaactccgaggcggtctttgccgccctttcgcgggaaagggaatgttattttctgcaccgtctggacaggaatacgcggggactgatggttttcgcgctcaacgcggcgtcggaaaaagaacttttaaaagcttttcgcgaaaagagcgtggaaaaaatttatcatgccgcctgcttcggaacgtttaaaaagcaaactgacgtcttgaccgcgtatctgaaaaaggacgaaacgaaggcgctcgtaaaagtcttcgattcccccgaggcgggcgcggaacggatcgtgacggagtatcgggtgctgaaacgggaaaggggctatacgttgacggaggtcgtcctgcatacgggcaagacgcatcagatacgcgcgcatctttctcatatcggctgtcccgtcgcgggagatacgaaatacggcttcgccgaggaaaaccgccgttttaacctcgcgcggcaatgcctcgtggccaaacgcctgcaatttcatctgacggaaaggctcgcttatttaaacgataagagtttcgtttcccgtttcgacgcggatattttcaacggttgacgaggaaaaaagcgaaagagattcccgaacgcactttgccgtttactccccgtcgtttgccgctcggaaaacgcgcgcttttttggagcaaatgcaaaaagtttaagtccgtttgtccggaaaccgggattgccgagcggaacagatcttctgcctttcgaaaaaagacggcgcggaataagaaaagtcatgcgctttgcggcgtagtcggaaagcatcgccgtttgcccgcttttttactctgcaaaatacaaaatcgcaaacgcttcgcggaaagtttttcccgcgggcgtttttttcgtcgccgcggcggaacgggcgcgggggattttttccacacggctataaacgccgtccgtttgaagaaaaaacgggcggaagaaagggcgggcgttggcgaccgtccgcatcgttaaaaggaattttccgcaaagaaactacggcggctctcttttaaagttaacgtcagttaaaaaaattttgaaaaataccgccaaaacgcttgacaacggattatgaaagtattaaaatatgaatagttgttcatatatttgaataaactgaaacagaggaaggaaatcatggtaaaggaaaactgtaattacgaaagcgagcatgaggcggcggtattgaaggcaaaggaaactatgccgagcgaagaaaatatcgggagggtgtgcaacacgttccggatcatcggcgagccttcccgcatgaaaatcgtccttgccctgttgcagggcgaaatgtgcgtgtatcatatcgtcgaagcgtgcggcggaacgcagagcgccgtcagtcatcaattgagggtgctcaaagacaatcgggtgatcaggtccagaagagaagggcaaaatatattgtactcgattgcggacgaacacatcgtaaaaattatcgagatcagcgaggcacatctgaactgcaaattggaggactgatatgaaaaagacgttacagctcgaaggtctggactgcgctgcctgcgcggcggagctggaagaagaaattgcaaagacagagggcgtaagcgcggcttccgtttcttttatgacgcagaagttaacggtggagtgcgactcggaaaagacgcttgccgccgtcaaagagaaggcgaacggttttgaggacgtgaaggtggtggaaatgcggtctttgaaaaagacgttgcggcttcaaggcttggactgcgccgcctgtgccgccgagctggaagaagaaattgcaaagacagagggcgtaagcgcggcttccgtttcctttgtccatcagaaattgacggtggaatgcgattccgaaaagacgctttctgtcgtcaaagagaaggctaatcattttgaaaacgtgaaagtggcggaagagatcgccgcggcggagagcggaaagagagcggacggaaaaattctgctccgcctcgaaaatttgcactgcgcggcgtgcgcgatggatctcgaagacgaacttaaaaaaatcaagggcgtcaaagaggtgcaggtggattttataacgcagagcattttgctggacgccgaaaacgacgacgcggcgagaaaggtgatcaaggcggcgggacgctttgaaaaggtgaaagttctgaacggcgataaggcggtcgctaaaaaggaaacgcatctgaaagaaattttgcagatcgtcgtcgccgccctgtttttcgcgccgggatttatactcgaacactttatagacggaaaagccgcgcagatcgcgtcctatgttctgtttgcggtcgcctatttcacggtagggtatcccgtgcttatttccaccgccaaaaacatcgcaaagggaaagattttcgatgaaaatttcttgatgacggtggcatccttaggcgctgtttgcttaaaggaattcggcgagggcgtcgcggtcatgctcctctatcaattgggggaattgctgcaaggcatcgcggtgggggcttcccgccgttcggtatccgatctcatggatttaaagagcgaaactgccacggtcctcgacgacggagaacagaagagcgtttctcccgaaagcctcaaaatcggggatatcgtcctggtaaaggcgggcgagaaggtgcctgcggacggcgtattgctgagtaaaacggcgtcgctcgacacgaaatcgctgacgggcgaatccgcgctgcgcgatgtcggagagggcggagaactcctgtcgggctgcataaacgcgggaggagtgttcgaaatgaagattgcccgcgcctatgaagacagcgccgtggcgaaaatactcgatctcgtggaaaattcttcctcgaaaaaagcggcgccggaaaaattcatcaccaaatttgccaaatactatacgcctgtcgtctgttgtctggcggcggcgatcgccctcatcgtccccgttgttttggggcttgcgaacggcggcggatacggcggctacttccgccgctggataaatacggcgttgaatttcctcgtcatttcctgtccctgcgcgctgatcatttccgtgccgctcacgtatttctcgggaatagggagctgtgcccgcaacggcatcctcgtcaagggcgccacatatctcgatacggcggcgaaagttcgggcgattgcgttcgataaaacgggtactttgacggaagggaactttgccgtctgcggaaccttccccgcggacgggatcggaaaggcggaacttctggcaatcgccgcggcggcggaaaaagactcctctcatcccatcgcaaaggcctttgagggcgtggaaacgggatatagggcggaaaacgtccgcgaagtcgcggggcggggcgtcagcgccgagatcggcggcaaaaacgttttggtcggcaatgccgcgctattgaaggaaaacggtatcgcggcgcccgaggcggacagcgcgtatactcaaatttatacggcgctggacggcaaatatctcggcagagtggagatcggagatcggctccgccccgaagccagggacgccatcttagaactgaaatccctcggtatacagcgcaccgtcatgctgacgggcgacagccgcgcccgagcggaaaaaatcgcggacgaagtgggtatgtctgaggtgaacgctcagctgctccccgacgagaagctggaaaaagcggaacttctcaaaaaggacggcgccttgctgtatgtgggcgacggcatcaacgacgcgcccgtaatggcggtggcggactgttcggtttctatgggaaaattgggcagcgcagctgccgtggaggcgtccgacctcgttcttatttccgacaacctccgcgcgattccccgttgtgtgcgcatcgcccgaaagacgagaaaaatcgtcaccgaaaatatcgccttttccatagcgatgaaagtcgctttcatggcgttgggcgtcgccggcgtcatgcctctctggctggcggtgttcgcggacgtaggcgtcatgctgctggcggtgctcaactccctgcgtatgcgcttgaagatcaggggagaaggagtttgacggctccctcgtcgtggcggataggcggattaaaagccttagaaggggattttacgggtaaagaaatgtatttagaagagcagggcgtatggataagaataggatccaatagactgtctttcggccgggcgggtacgaaaaaaatatcggggcacgcataaactttttattcggcgcaaagaagcggcgatagtcgccggcttcggcgtttaaagccgacaggtttatcgaaaggatgacaaagcttttcggcgggaaaaaagtttccgatattttgccgtccggagcgataagttccatttataaccatagacttcttagttttttaatattttttgcggcaggcgtttcgacggcgtctgccgtttgctttttttaaacggatgtgatataatggcgaatatgaaaatcggaatcggaaaaacgacggagaaggacgcgcccgcggtggcggagatgtacgggcagggacgggcgtttttacgcgcggcaggggtcgatcaatggcaggacggctacccggatttgacggacgttctggcggatatagaggagggcgtttcctatcttttgacggcggactcaaaagcggcggcaagcatggcggtgacggaaaacgagccgacgtacgaccgcatttacggcgggaaatggctgacgggagaagaaaagaactatctcgcggtccatcgcgtctgcgtggacgattcgtttaaacgcaagggattgacgaaggttttatacgatttcgcggcgacgttggcgaaggaaaagggaaaattcagcctgcgcgcggatacgcacaaagacaatagggcgatgcgggaggcgcttaaaaagaacggcttttgcgagtgcgggagaatcttcctcgaaagcggcgcagaacggattgcttacgagaaaattttaaatagggaggaggcaggtatgcgacaagcgcaaaaaaagagaatcgtagtggcgacgggaaatccgcataagctccgcgagattgcggagatatttccggattttgaaatcgtttcgcaaaaagaagcgggttttgacggggacgtggaagaaacgggctctacgtttgaagaaaatgccctgttaaaagcggaagcggcggcgcgtgcgctcggctgtatggccctcgccgacgacagcggcatctgcgtggaagcgctcggcggcgctcccggcgtatacagcgcccgctattcgggctgtcacggcgacgatagggcaaaccgcctgctccttctcaaaaacatggagggacagaccgaccgcagagcgtactttcaaagcgccgtggcgctcgtctgtccggacggcagaaagacggtcgcccaagggcgcacttacggaaaaattctttatgaggaaacgggggaaaacggcttcggatacgattgtatcttcgagagcgacgatctcggcaaatccttcggcattgcgtcggcggaagagaaaaatgccgtttctcaccgcttccgcgcgcttcaaagcctcgcggaaaaactcgacggggagctgtaaagggcgcggctatgaaaactttggtggtgttgtccgatacgcacggacacaaagagggcatcgagcggctgacgggactttttgcggaaaacgattatattttgcatctcggcgacggagcggcggatatgcgcgacgtcataggctcctatcccgaaaaaacttacgtctgccgcggaaactgcgatttttttcccgccttgcccgaaggagaattggaggcggagggagtcaaaatctttttttgtcacgggcataaatatcgcgtgaaatcggacttatccgaactcgcccgggaagcgaagcggcggggctgccgcgtcgctttatacggccatacgcaccgcgcgctcatttgcgaggaggagggcgttctcctcgtcaatcccggctctcttcgttttcccgccggcgagggcggcagctattgctatctgaccgtaaacggatcgagcgtctatcccgtgcttgtgggagagtctttctattgaggcgcggacaacagtcgttttcctttcccgcggagtgaagcttggagaatagagaagaacaaaagcctgtggagaagagagcctttttgtcaagaaacgactaaaacgaaaagatgcatttttcgtttcgagatacctgggcgctttcgtttgaaaaatcgataaactgccgaacggaacttggaacgcaaagaattccgttcggttttttgttataaaagtggttttataatgcataaatgcataatatttccgaataaaatttataattcaaaaatcaaatcgcatctatctaaaaattagatttattgatatttttaaaagtacaaagaaaaaattatacgattattttttaagcgggttcctgaaaaaggcgctgcaatcgggaaaatatatagttaaggaaaaggaaacaggagcagcggaacaaaggacaaggggagaaaaagatttgtgaacgcagagaaaaaagtgtgaagccataatgataacttattgaaagtataagtattttttaatctttaattttccgaaagtgcctctgaatccttttcttttaaacaaaattgttgtataataaaagacaactttatagcggggagaggaatttttcccgacttgctgtaagggattttaaaaacaatgcgtttcgacaaggtttgccgtttcgtttcgcccggcaggatgacaccatccacgaaagtcacggccgcataaagcggagaaaagcgttcgttagggacgcggtcagcgcgagaggatgaggcgttgcggggcgctcccgcagcggcgtttccctcccaaacggcggatttgccaaagtattcggggcggggagcagtcttgaaagaatcgtttgtttttatctcgtgcgtttgttttaaacgcacagacatctattcataagattttggaaaaattacattgcgacaggcgcgggagccgaaaaacaaaaattcctttccccgaaaacggaaaggggcatcggaagggggagaaaagcctgtgcaagcaatgcaatgaccgaagtatttttcaggtcgtaccgcaaacaattttccgcgggatcatcccgtaggaaaatttttgtatgtagatttatttttaagcggttaagttttgagaatcacggattttacaaaaaagccacaaaaaaatccgcgtgtttttgactgaaacggtacaaaaacaagtttaaattaacatttaagtaagtgcttttgacaaaaacgacaatcataatctgacaagagcttatttaaaatataaatcagacaattttttaacggaggctattatagtgaaaactaaggcgaaaaaagttttgctctcattgatttctctcgcattgacgggagccatgggcgcgacgattgtcctgaccgaaccttccaaacagaaggccgcggctacgacgaccgtccggggctcgggcgatgcgattgacgtcacggagcaataccgcgaccaattgagtacggaacaattcatcaacaaggatcttgccgtaaacgcgcagacgctcaatgtaaaaagcgacggaacgagaaggatcattgtcgaattcgaatccgattctcttttggatacttacctcggtgatacccggttgcagactactttcagggattttacttcttacataaacgccgcatccggaaaacagtacgcttccgcactcgaaaaggaacaggtttccttctttaaagcactggataaaaaggcgttcgattaccaattaaggcatacttatacctcgctgctgaacgcggtatccctggtggtggacgacgaagacgtggcgaaagtcgaaaagatgtcgggcgtcaagagagtcgtttactcggaaacttacgacgttcccgccgtcgaggcgacgacgaacgtagtcgacgtttacagcacgggtatctacaactcttccagcgtcaactataagggcgaaggaatgttggtcgccgtgctcgatacgggcttcgacaggagccacaacgcgtttcaggagatgccctccgtccaaaagatttctttgagcgacgtggagagcgtcttcgataccctcgaagccgctacttacggggaagaggtgactgccgaagaactctattacaatcccaaagtgcctttcgcgtacgactatgcggacggcgacggcgacgtattccccaagagttctcagcacggcgtgcacgtcgcgggcatcattgcgggcaaggacaacaccgtgaccgcttcggacggcgaagcgtttgaaaacggcgagaaattcctcggcgtggccccgaacgcgcagctgatgatcggaaaagtcttctccgataaggacgacggcaccgattcgggcgcggaaacggacgatcttctcgccgcgctttccgactgcgtggcggtcggcgcggacgtcatcaatatgtccctcggctcttcctgcggtttctcccgggaagaggataacagcgcggtcaacgccgtatacgacaaaatctacgcggcgggcatcaatctcgtcgtggccgcctctaacgattatagcgcggctttgaacggcgcttacggttccacgaaccttacctctaaccccgacagctccaccgtcggctccccgtccacctatgtgggcgcgctctccgtcgcctccatttcgggacagaaatctccgtatatggagctggacgacggcacggcggtatattataacgaatcctccaacgccgccagcgtcaagggcgatttcatggaagagcttttaaagggcgcccaggaaaaaactttcaactacgtcgtcattcccggttacggggaagctcagaactatgcgatagagagcgtaaagacggaactcgccaaggggaactgcatcgcagtggtcagccgcggcgacatttcctttgaagacaagcagaaaaacgcgttcgacaacggcgcggtgggctgtatcatctataacaacgcctccggtaagatcagcgcctccctcggcaccggcaaaaaggtgcctacctgtaccgtttccgcggatatcgggcagatattcatcgccaatgaaaaggggacgattaccctcaataaaaataacaaagcgggtcctttcatgtccgacttctcctcctggggccccacgaacgatttgaaaatcaagccggaaattacggcgcacggcggggagatcacttcttccgtcgtcggcggttacagcatattcagcggcacctccatggcttccccgaatatggcgggcgcggtgacgctgctccgtcagtacgtttcggaaaatttcggccttacggggacggcgctttccgaccgcgtcaatcagcttttaatgagcacggcgaccatcgtttacgatgaaaacgggcttccgtactccgtcagaaagcagggcgcgggactcggcgatatcagcaaagccagcagcacggacgcctatatttacgtacagaacaattcgaaacccaaactggaactcggcgacgaccccaagcgcgcgggcgtctatacgatggagttccacgtttccaatacttcgtccaagacaaagacctattccatggaccttctcaccatgaccgaaagcgtttccatcgacgggatcacggttgcggaaaaagcgtatatgctcgacaacgcgcaaaagtctttccgcgtcaacggaaaagcgagcggcaagacgctcactctcgcggcgggcgcggacgctacgatcagcgtcacgctgtctttgagcgcgcaggacaaagagtatctcgacaaaaatttcaaaaacggtatgtatgtggagggcttcgtcaccctgacggacaaagattccgcgggcgtcgatctgtccctgccttatctcgccttctacggcgactggacggacgcgtccatcttcgacaagagcgcttacgaagtgagcgaatccaagcacgatacgagcattcccgacgaagaaaagacgattgcggcgatttacgaatccgtcgccatcggcaaatacggcaagaacaacgtcgatttttatctgcctctcggtcagtacatctatacggtggatgaaaacgaaagcgacagcggcgtcctttccagcgtcgataaaatctcggtgggcaactatgaatacggcatttatgaattttacgccatgtatttcggtctgctccgaggcgccaaagagatgaccgtggaagtgaagaataccgtcacgggcgagatcatcaagagcgaaacgctcaacaatgtccgcaagagtcacggctctactccgtcgtttaccacgctggaaatgagtccctatgagctcggtttgcagaacaatactcagtacagcctcgtattcgaggcgaagctggattatgacaacggcaagacaaagacggaaaaacaagaattttccttctacgtcgattatcagtcgcctattatttacgagagtcagttccgttacgagtacgattcggaggataaccgccacgtctatctcgacttatatctctacgacaatcattacgtgcagagcgtacagctgtttacgctgcccgataaggacacgctcgattatctgaccgattatcccattcccgtcaaggacggcacccgcggcggaatcgtgaaggtgacgcaggaaattaccgactggatggataattttgcaaacgcttacggcgagtataaaaattacgtgggcgttcgcgtggacgactatgccctgaacggcgccgcttacatcgttcccatcaagacgacggaagtcgattccatcggcatcaattatacttacagaaccgaggcggggaaagacgttacgaaatccgtcgccgacgggcagatccttttgcagccgggacaggagcttaacctgaccgacgacttcggaaaagtgatcacgacggagggcgaaacggtagacgccgatttcagcgtcaatatgctcggatacgcaacgtatacctgcaaccatgtggacgaacacggcgctacctgcggatatatatataatgaaagaaaggggctcacctatcaaaagggcgaatattattacgacgcggcgactcaaacggtgaaacagaaggcggcgacggaggaagatgccgcttatcccgcctacacgctgtttaccgatatgatcgcggaaccgatcacggataaaaaggcgcccgcttccaaacatttcgtctgtccgcactgcgggacggaagtgacgtttacttacaatacgaggacgaataagatcgttcctaccacttacgacaagacttcgcaggatccgttggtcgaagactacaaatggtcgacgagcaatcagaaggtcgttatggtcgaaaacggcaagctgtacgcggttgccgtcggcagcgctaccgtcaccgtgtatgcggaagcgggcaatacgactttctcctttatggtaaaagtgcagggggaaaaagtcgataagaaaatcaccaaaatgtcggtcggctcttacgacgacgtcacgctgggcgtttcgagagaactcagcggcagtctgctttcgatagactgcggaacgatactcgatctgtatcccaagttcccttggtacgtcagcagcgtcagcgatttgcagtggacgtcgcaggattccgaaattgccgaaatcacatcgtcctctaacgcttctgcgagggtagtgtgtaaaaagcagggcgtcgtcagtatttatctgagatccaaatcgaacacgctgaacgcgactctcaccttgaatatcggcatcgaatacaagctcaccagctattatttccatgaatatcacggcgtaggatacagcgaaacgtatattgacaaatacactgaaaatcccaccttcgattcgcgcaacatactcgtcattcccgcgaatctcggtatcgtcaatatgggctatatcaccacttcgagaaacggtccattctatcagaacaaaaatctcgacaccgttgtggtgcctcagggcgtaacgactttgggcatcaactgttttgcggattccacgctccgccgcatctatctgccttcctctttggagtcgatcgcctataatgcgttcagcaattgtcccaatcttcaagaagtatattggtacgacgcggacgaaaagagcgacagcggcatcgtatacgacgcggacgaaaatacttacaattgggataagttctatgccaatgcaagcgcgaagtgttccgccaaaaatctcgtcgtcggttccaacgcattcaattcctgcgccaaattgaccacttttgacttctccaaagtgacggctctgtacaccggcgccttctcgggctgcaaacttctgacaagcgccgatctcacaagactgagatacgccaatgcggacgttttctcgaactgtacggcgctcaaagaggtttctctttccgaacatacgacgttaaacgccaatatattcagcggaacgggcattgaaaagatcgactactacgcaagcagcgtacccgcttcggcttttgcggggacgaggtctttgcaggaagtcgttttccacaacgatttgcagtccgtcggtgaaaaagcgttctataactgtatcgcgctcaaaacggtaacgtttgaaggctcgtgcgtttccataggcgcgtctgcgtttgaaaattgcagatcgctttccgaattcaccgttcccgagggagcggaactcctcggcgcccgcgcgttcgcaaactgcaagaatctcgtgactttgtacgtggatcccgagtccgacattcaggacgtgggagccgacgtctttgccggcagcaatgccctcaaaaagatcgaaatcgcgggatcgggaagcagcgaccgctacaacaccgtttcttacgataacggcgtgcacaagatgctcaccgacggcaagggcacgcgcgtcatcctcgtgcctcccacctatcagctggaaacgggagaagacgatattttctatgtgcccgattccttctccgcgaacggagaaaaggtgacggctatcggcgctcaggcatatgccaacaacgcttctctgaaaggaaaggaagtagtgattcccgaggggatcaccagcatcgggctcggtgcgttccagggcagcggcattacgaaagtagtcattccctccacggtaaaatctatcgccgcctatgcgtttgcgggatgttcgaatctggaaacggtggtattcctcggcgatatcgaaacgattgccgatcacttattcaacggatgtacttctttaaaatacatacagcttcccgactcggtgaagagtatcggcgattatgcgtttgccggctccggacttgcttctgtcgaaatcggcgcaaacgtcgagagcatcggcgtcgcttcgttcgacagctgtgaaaatctgacgagtttgacgttcgtatctcagacgaagctctcttctatcggcgaaggggcgttccgttattgcagcgctctcaaatccctgtcgatggcggacagcgtcaaggacatcggagcgtatgcttttgccgactgttcttcactcaccgatttgtacgtttcggcgggagtcgaaaaaatgggggcatatgcattcagcaacgatttgcttctcgtgaatgtcgaattcggcaaaggcgccaaagtcgtaggggattatgcgttctgcacgccttacggcgaagaaggcttctacaaccaaaagaacctgaaaaacgtgaagataccctctacggtagaatcgatcggcgtctatgcgtttgcgggaaatatcgcgctgacggagatcgatctttccggcgtcaagagcatcaatgcggcggcattccttggcacgtccgccttgaagagcgtcaagctgaacggctccatggaatatatcggcgcgggggctttcctgaacagcgccgttgaaaacatcgatctttccggcgtcgaatatttcgattctcagtgcttctcgggcacgaatgtcatcgcgggcgagtttaccgatgctctcgtcatcggggccaatgccttctataactgccgcaatatcaaagaagtcaaccttcccaatgcggaatatatctattcttcggcattctttgcgcctacgaaagtcaataacgcggagtcgaccggcac

SEQ ID NO: 2770 - DNA, 3398 bp, Unknown
  16S sequences of unknown bacteria
cttccccgcaggttttatacccgaccatcgtgtcaagctgaaccgagtgaatgctgttgaatatgctcttctcaatatcagggttatcctttttcagcgcctttatcaggttcttcgtctcaagccgcttcgaaacgccctcgttcgcggcgctgttttcggtgaagcggcaggcgcagcgtatgaaatcgaggttattgtacctcgcccacgagattatatcatcttctctcaccatgtagagcggtctgatcagctgcatcccctcaaagttcgtcgaccacagcttcggcggcatcgcctgtatctgcgcgccccagaacattcccatcaccgtcgtctcgatgacgtccgaaaaatggtgcccgagcgcgatcttgttgcagcctatctcccgcgccttattgtagagatgcccgcgccgcattctcgcgcagagatagcacggcgatttcccggcagcgttcgccacgtcgaaaatattcgtctcgaatatcgtcagcggtatgtcaagcagcttcgcgttatactcgatcttggcgcggttctccgcgttgtacccgggatccatgcagaggaaagtcagctcaaacggcacgtcgctgtgctcatgaagcatctgaagcagcttcgccataagcatcgaatccttgccgccggagatgcacgccgctaccctgtcccccggctcgatcaggctgtatcgcttgaccgccgtcgtgaacgggttccatatcgtcttcctgtattttttctgtatgctgcgtttcgcctgctcgtgcggctcgaaatgcctgtttccttcgctcatttcagatgacctttcatttttgatcgcctattacagcaataggctttattattatactccagaagccttcaaaaatcaatacacaatttgtaacaattaagtccgacggcggtttttttcacgaagtctattgattttcagcgcgaagagtggtataatagaagtaactgaaaattatcaggaaaggattttttaccatgataaaacacatagtctgcttcaagctcaaggatcctacccccgaggcgtgcgagaagtgccgcgaggttctcctctcgatgaagggcaacgttccgacccttcgcgggatagaggtcgggatcgacttcatgcgctccgcgcgctcctgcgacgtcgttctgctcgtcgacgtagaggacaggaacgccctcaccgagtacgaccacgacaagtaccactgcgagatcgtaaagacccatatgcacgccgtctgcgcgtcgagcacatccgctgactacgagtattgatttttagaaacgaggttttataatatgcagcatttcaactacgaccatccgtcggtaagatataccggccgcttcgggcgctcagccggaatggcagcgacagcttgcggctcatattttgaggtcgccttcaggggatcttatatcgttctgttcttcgacactgatttcatgccggatcagcatggtcatgtctatctcgagcttgacggcggcgccagattcgagtcggacatccagaagtacatccgcgtcgacgcgagggctgacggggagcacacgctgaaggtcatttacaagtcgaacgtcgagatgaaccagcgctggtatcagccgctgaccggcaagatggacttcaccggctacgacgccgaggacgccgggactctcgctccggacaacagaaagactatagagattgtcggcgactcgatcaccgagggcgtgctcattgacgcgttcaggaatcctttccggaacgaccagtcgaacagaccgttccaggacgacgtcaccgcgacctacggctggctgacagcagaggcgcttgaccttcgcccgttcatgatgggctacggcgcggtcggcaacactcacggcggatgcggaggagttccgaagacggcggacgcttacccgttcaacttcaacggctcgccggtaacatatccgtcctgcgattatatcatgataaaccacggcgcgaacgaccgcggacactccgattacctgccggagtatgagggtgtcctcgatctcatccgcgggcggaaccctgagtcggtgatcatcgttctctctccgttctgcggcgcgtttgacgatgatctgccgggatttataagggattacaacgaaaagcgcggagacagcgtcagatatatctcctctcacggctgggtaccattagatccgctccacccgctgcgcgacggccacgccgagatcgcgaagcgccttattcccgagatgaagaagatcatctgacatatccccgtccgattccggacacgcgaaaacccgaatacaccgaaaggcggagccgcatcatgataaaataccacatcgaagacgagaacaacagaatagtgacgatcgactccttcccggacaacgataagtgctggatacagatgatcgacccgacagacgacgagctgcgtgagatcacgatgcgctttgacctgccgatggaggcgtgccgcgccgccctcgaccttgacgagcgctcgcgtatagatatcgacgacaattaccgtatgcttctcgtgaacataccgacccgtgaggagacgagcgaccgggagctgtacacgacgattcctttgtcgatgatcctcgccggaaacgcgataatcacgatctgcccgaaggatacgcatatcctgcgcgccttctcaaacgggagcgagcgcgggtttcatccgtcgatgcgctcgagatgcgtgttccagatactctacgctacggcgagacgatatctcatatatctgcggcttgtcgaaaagaagatcgacgcggtcgagctcgagttcggcaggatgcagaagaaccgtgagcttctggagctgatgaagcttcagaaatcgcttgtctatttcacgaccggtctgcgctcgaacgaggcggtgctcgataagctggtgcggaccgacgttgtgaagaaatacgaggaggattcggatcttctcgaggatgtcatagtcgagaacaagcaggcgatagagatggcgaagatagacacggagattctctcgaatctgtcgaacacctttgccgccgtgatctcgaacaatctgaacgtcgcgatgaaggttctcgcgataataacgatagtgatggcgatcccgacgataatcttctccgcctacggaatgaacgtgataaacatcccgctcgaccagaatccctacggcttcccgatcgttatcgcgatatcggtgatagcgagcctcctgacgatagtcatcttctcaaaaatcaaactgttcaaatagcaaaaaaaccgctgattttgtgtcagcggtttcttttttcgacgcactatgtctgatgtggcagagccttcaggcgactgtagccgaaaatttgactatgcc

SEQ ID NO: 2771 - DNA, 3894 bp, Unknown
  16S sequences of unknown bacteria
ccccgcgtccaactccaccgcgcgaacattctaatgccactactaaggcttatgcgtacccgcgcgactggtctgttcaagtgggcgacaccaatagaatatggtgtaaagcgaactccaccgcgagccggaactcacagaggtgcggcgtttgagcctctctgtgcgccctccgcgtaggagcagccctcgaccgcagtcgatttaataaattcgaaagggcgaagctctttcttcttctctactttcttcaaagaaagtcaaaactcaatatcatccagcgtaaccgccgatttcgccgccgaggtgtctacagagggagcggaatccctctcgtcagccggcgctacgcttctcttcaccttctccatgatttcggagaacgagtaccccgggttcgagtatagcagatcgagcagcgtcacatagtcgcggattatctctctcggcgtgataagctcctccgctccctcgcgtaccatcgaggacgataaaaacgccttcatctccccgtcagttatccgcggctcccacttgtggtactctccgtgaagcgcggtcaacctcatcacaagcgcgtatagctcagcgtccgataaccgccttaaacgaatcacgggctgcatcagagaacgaagctcacccgagccgaagctgtcctgcaaacgactgcgcaaagcctcgtagctgaataatccgcgccgcgtgtcctctaaaaactgcggagttccgccgaagattatgatcagccccggcgctcttccctgcatcgtgtcgttgaacatcgcaagtatcttctcgtagttgttctcgcgggagattctgttcggtatcttgtacaggttcacgcattcgtcaatgtatacgcaaagtcccgagtaccccgcaagccgcacgaacgccgtgaacagcttcagatagtcataccagttctcgtcgtttatcacggtcagcgagcgtattccagttgcctgccgcgcctccgtcctcgtgccgtactctcccctcagccacttaaggcaagccgattcgtgcatatcgtcgtcagcagtccacgcctcgtagtacgcacgcagaacggacgcaaaatcaaatccgccaatgtccgactcaagctcgcgcagattcttcattatccgcttgccgaattccgctgagtattcttcactgtctcgcgagtatccgtcggcttcaagctcactgcctatcttcgtgaaccacttgccgagtatcacgggtagcgcgccgccgtcgggagaggactttaccgcaatgtttttcatcagctcacgatatgtggcaagaccgcttccgtttccgcccgacagctttctctcgggagaaaggtcgcagtccgccgtaacaaatcccctgtcgagcgcgtaccctctcgagagctgtatcaggaacgattttcccgagccgtagcgtccgatgatgaactttgtcgcaccctcgccgtcgcgtacacggtcaagagtagtcgtcagagcttcgatttcctccgttcgtcctatcgcaatgtacggcgcgcccactctcggtacaactccgccggacaatgacgagagaagcgtgccgagaatcctgcgcggtacctttacttcatccattcttcaatatcctccctgtaatcctctataaacgtaaaatcttcaagtataacgtcgcctatgatgtcgaggaagtacgtgttcaccctgtcctgcgcttctccctcgtagtacccgctctccttcgcccactcgcggaatcttccctccagtgccgccatagcagccgagcgcatgaagtccatgtcagcgccgttatcgccgttatcggcatcagtcgggctttcttcttcctgcggattttcttccttattatctgtattatcgccaacagcggtgtcgtatatgtcgcttgatatctcgccgtcgagggaaacctcgctctcttccgcagcttctcccgattcggcaggcttttcttcatcctcgcttgccgtcagccgagcagtgttcgcccacgacagtctctcaatttccgccgccgcgtcaaagtcgaagccgcttgtctccgcttcgtagtttttgagatatccgtcgggcatatacatctcgtcggcaggctttttcaccttttccctcggcatgagcggcgcgaaaaatgagtccacaatcgcggtcgtccactcgtcaagggattttacgccgagctttgcctttatcccgagtgagcggcgcagtacgttttcgctgtatttcacgagagaagtaacgtactccctcgtctcgatgccgcgcaggaatgaggtaaattctatcttcacgcgcttctttttgtccgacgagactgcacagccgatgaacgtgtccacaacgatcttgtagctcttgtcgcacgcgaatatgcccctcttctgctttaagccttcgtcaagcacagccgacactgcaagagggatgtatctatcgtacttttcgcggttctcgccgtagtattttgacgcggagaaaacgtagtcggagtagcagtctataaatgcacgtgctgcaaggttcagcctgttttcttccgacagcatcgcgtcaaagtagtattccttgaagtgtgccttcgccgctatctccgagatgtgcgaaaaaatctcgtcaggaagcggcaggtcgtttatcatgcagaagtcctcgagccattcgcacatatacgagtcgagccgcggcatcctctccctgtacccgagccaaacgttactcagcgcacgcgcgatttcgcacttgtcgacggagccgaggttcagcagctcgaagatgtaaagcatgacgtaagcggagtcgcagtcggggtgttcgccgtgtctccagaactcgcggagccttcggtagtattccgtctgcgcgcccgtcatgtgtgagtactgcggaacaagggagtaaaactgcgcaggcttaagctcctcgtcgggtctctgcggctttgcgaggtggcttttctccgcgtcaagggcgaagcgcgtgtaaaaatccgtctcccccgaccagctttccaccgttattttcgagatgagcgcgccgtgctttgcgtaaactttaggcggttcgacgggcggcttatgcatcggctgaggagcttgtctcacgggcggctttcgcttgtaggaggacgtgcggtactgcggcttcagcgaggtgaacggattcatcgtctgagatgggtagttctcacgcggagggattttttcgcccatgcgggttgtgctgtcattctcattatctgatgaaacatccgccggagtgagggagctttcggacaaattcgggcgttcgtactttcgctccttcggtgagccgaggtcccagaagtcgtcgctaccgtgctcttcccgcctgtccttcgcgcggactactttatcctcggtcgagagagaatcggaggtcacggtgacggaactttcgtttgaattcgggaatttcggttcggggcgggagtctttgccgtcggcgttttttcctgcggggaagataacggaagggtcaagaccgcgcctgagcagttcctccgctattttgcgccgcacacgctcggcaatctcgcttgatttatcgttatcggtcatatccgcgcacctccgaaaacattagttcttatcataccattatagcatgaattttttacggtgtcaataggaaatggcgcaagcgaatttggttaagcttagacttcgcctaagaatctttctgagaaagagcgaagccattttctctaccttagacgactatagccttctaagagacttccctctgtaagtttcacttaagatttaaatgagaaaaagtagaaaagacttacgtcttttgatttattaaatcgactgcggtcgaaggctgccactacgcgtggggcgcacag

SEQ ID NO: 2772 - DNA, 8499 bp, Unknown
  16S sequences of unknown bacteria
aaaacgcaggaacagctcccgcagatcgtttacgccggttttgttcgtcatcatcggttcctccaactattgattttctttggttttgaacagcggaacagggaaaaacatgacaaaaaaagcgcctgccccaactataggggcgaagcgctgctccgcggtaccaccctaatttgctttttctctgaaaaagcatctcagtcatccgctaacggggacggggcgcgccggtcatcccggcgaagctcggaagtggctgcccggcggcgccaaacgacagggtttccactcttccccgctcactgcacgcacgctctgccggactcgtttcgtcatcgctcacaaaaataaattcttgatttattgtaatcaaaaacacctgttttgtcaatcgggattgacaaaaaaagctctttttattatgataatggctaatgatgccatgaaggtatccttccgcttcaggcggagttatcacatcatggcattcgtgcgccttttcggcccgaatcgccgaaaggggttttttcttatgaacaaaaaacaggagcgcttttctcctgtgaaaaagctggtactcagcgccatgttcctggctctgggccttgtactcccattctttacggggcaaattccggaaattggctccatgcttttgccaatgcacattccggtactgctgtgtggcatgatcgtaggcggcccctggggactgctgataggttttttatgtccgctgctgcgctcggcgctgttttccatgccgcctccttacccgactgcggtttccatggcgtttgaactggcagcttacggcctgatcagcggtctgttctaccgtcggctgcgcagcaaaggagtcgccggcatttatctctctctgattgccgccatgctgttgggccgcgtggtctggggcatcacacgctggattatgatggctttcggtacacagttcagcatcgcgctgttttttgtcggcggcttcaccagcgccgttcccggcattgtgctccaactgatcctaatccccatcattctggccgtgctgcagaaagcgaagttgatcgaatgaacgaaacgcgtccactccttctggatctttacgcacgctatcccaaagcgcgcctgtccgattatgtcaagctgctctatcaaagtgaattcggctgcgggcattttgcgccggatgacgcagagggatacgccctgctgctgcaggaactggaaacggcccgccccggtcagcacctgatggaaaaggtgggcggcggctattggcgcgtttacctgagaaacgctgaggagcagggcgccgcgccggagacactctatgccatgttccgggaaaccgcccggaatggccacggttcccgggagcgcttccgggccaagcttcgggaactggaggcgctgtgcaaagaaggtctccttcccttttcgccgggaatttttcagctgtattggcttaattatgaagccgccgggttgccggccgtacaccacagccagcagtaccggcatgcctatctcccatcttaccgcgtgatcgcagagaattttgcccgtttttttgaattgttcctgcgcatcgaccgaatactgcgccggacggaaagtcctctgctcgttgccattgacggtccctgcgccgccggaaaaacaactcttgcagctcagttggcagcctgctatgagtgcagcgtattccatacagacgatttttatctgcgtccagagcagaaaacgccacagcgtttcgctcaagccggcggcaatatggaccgagaacggctggccaccgaagtgctcgacccgctgcggcggcgcgaaaccgttctttatcggccctactcctgtaaaacgcagacggtttccaacggttcttacgtatcattccggcggctcaacattattgaaggatcttattccctgcatccggatctgcgcaaatattatgatttaaaagtcgttctggacattgctccggagcaccagtggaaccgcctgaagcggcgggagagccagaaaagtctggaacagttccgcgaccgctggatccctttggagcagcagtatgctaaagacacaaaactgatggattgcgcggatctgtattatcctttctgattttttctggagcaggcaaaacgcatccaaacgcagatactgtgcgtttggatgcgttttttatttttttattgaaagcgtcctcagaagcggttccagttcccgcagcgctgcgatttcatgatccggaaccggcccgttttcgcgcggcgttttcccgggatggaaccaaattgtaccgatccctgcattctttccgccctgaatgtcggaactcaggctgtcgcctacgatcacagttttctgccgctgcaaaccggggatccgggcaaagcatgcttcaaaataagccggattgggcttgtcaaatccgatttcctcagaaataaaaatatcccgtacccattgccgcaggcccgcgctcccgatgcgcccctgctgcaccgaagcagtaccattagtcacaatgtacagtccatagcacggcgccaacgtcttcagaacttcttccgcgccttccatataataatggccgatacagcagcgcctcatactgccgcgcggctttcttcactgacacacgaatgtcaaattcgtcaaacaacaatgcaaaccggcgcagcttaacctcatgccgggtcagcttcccctgctccagcagtttccactgtgcacggttgatcgcgttgtaccgccgcagcatctcctccggcgcgtagccgcaaagatgcagcagcgtttgacgcagcgcttcatgttccgcccggtcaaagtccagcagtgtattgtccaaatcaaataagaccgtttcgatcaaaacccgttcctccgttgtgttatttggcagacaagtccaccgcatggcggacgatgctgcagggcggcacaggccgcggcagctgcatccggaacaccatctgcggattgcgcggctcttctattggcagcccgtcctcatcttccatcaaagggacagttatggagaaaggccgcagatccgggccgacgatctccacctcattccctttggcaaatttattgcgcagcgaaagctttgcccagcctgtttcatcacaggaaagcacaatggcgcaaacttgccaggtacggatatagcgtgcgctttccgtatactgccccggctgaccgaaaaagaaccccgtagaatagtgccgatggcttacatgctctacctcgtcccgccacaccggatccggcgcctcgccgcggacagcagcgtcgatgcaatggcggtaagcaccggtgacgatcgccgcataataggcagacttggcccgcccttcaattttgaaactgtccaccccggcggccatcagttccggaagatggtcgatcatgcacagatccctggagttcatgatatacgttcccttttcatcctcatatacagggaaatattcaccggggcgcttttcctccacaagcgcgtattcataccggcagggctgagcgcatgcgccgcggttggaatcccgcccggtcatatagttgctcagcaggcaacggccggaataggacacacacatcgcaccgtgaacaaaggtctccagctgcagagaaggcggcgtcttagcccggatttctgcaatttcttccagcgtcagttcccgcgccaggattacgcgatctgcccccagatcgtgccaggcacgcgccgcctggtaattgacaacactggcctgcgtgctgatgtgcttcggtacatgaggcgcatactgcctggccaatgcaagcacccctacatctgccacgatcagcgcatcaactccatacgcctccaacgtcgccagatagtccggcagccgggccacctcgtcgttgcgaggcatagtattcaccgtaacatgcacgcgcacgccgtgggcgtgcgcaaagcgcaccgcttccttcatttccgtttccgtaaagttcccggcaaaggcacgcatgccaaaggttgtgccagccagatacacagcgtcagcgccgtagagcacagccaggcgcagccgctccagatcgcccgcaggcacgagcagctccggcacggaaacgggaagcggcgcatgcgccgcttcccctgttttcaaaacctgccaatttgtttgtgtcatagttcgtctctcaattcttcagggattccaggaaattcaaatgctcgcggtacgtcttgaagaagtgatgcactccatcctcgcccagggcatagaagtaataactggtattgtctggatacagagccgagcggatcgaggacatgccggggttgcagatcggtgtgggcggcaatcccttgtttttataaaggttatagggactgtcgatctccttgtcggcatcggtcagcacctctttgtgctcgcccagcgcgtagagcagtgccgcatcgatctgcagatagcccgctgtttcgccggaattcttcaaccggttgcggatgaccgaagaaatttttgtgccgtcgctgccgtcggtttccttctcgatcagagacgcaatggtgatgatctcgtccattgtgtaacccgaatccgaaattgtctggcgcagctcatccgtcatcttattgtcgaaattgcgcagcatcttgttgatgaccgttttcgcatcgccgccgctataaaactgataggtatccgggaacaaatacccctccaaacggctggcatcgcctttttccttgttggcaaggaaatcgtaatcatagtcttcgttggctgcagcctctgttaacgcttccaccgtattgacgtttttctcttcaagcagctcaaaaatctgctgcatggaatatccttcggggatggttacattcaccgttttgcgggcgccgctgcgggcgctcatcgcggtgagcaaggcgtgataatccatcgaagtattcaactcatacgtcccggccaccacttccgtgtctgaaagcgaactgtacagcagaaacaagcctctatagttgatcagcccttcctttttcagggatttggacaccgatccgagtttctcgccatccgtcaccacgatctctgccgagtgatcctttttgttcagagccaaaagatcattacacatcagccagcccacgccggccaaaatagcggaaatcaccaggatcgtcacataatagcctgccccggtgccttttctcttcggcggcttgcgcgggtgcttcctctgccgcggcggcgcttcacggcggcgcacctctccgctgtcccagcgcatagtgttatcatttgtaaatgttttgtttcgttcttcctgtgccaagtgtatcatcgcctttccaatgtatcctcacggccaggccgtccttttacgtcttttatttatttttgtggtcaagtttcatcttgcaggaaacacgcataggatagttcagattcaaaaaagtgaggtgaacgtctctcatgtgctttgaaaacaactcctgcctgtggctcatcattatcatcgttctgatctgctgctgcggctgcggctcctcgtcctccagctgctcgtgcggctgcaacaacaactgtggctgcgggaacgacacctgctgctgctgagcggcacgaaaagatcctctcttttacataagatggctgcaacaggcaaaacggggcgcttcatgcgcccttttttgctgcccttacgatcgcgctgcgcccgtttttccctttttgcccaccacatggaccaaaaacagcggcagcttcatcatacggccgatccggctgggctgcttgagcagacggtaaaaccactccataccagttttcgaaaaaatttcgggcgcacgctgtaccacaccggcaaaaacatccagtgaaccgcctagtcccagcagaagatgcgcaccggtggcagtaccgttatgcgccatccacttctcctgtttcggcgcgcccaggcacacaaagaccacgtctgccatgcttgcgcggatgtcggccaccacagtctcgtccttttgaaagtaaccgtcgtgggttccggcaatcgtcagccccgggtatgtttcccgcagtttttccgctgcctgctcggcaatgcccggctttgcgcccaacagataaagcgtttttttctcctgtgccatcttttccatcaggcgctcagcaaattcgatgccgggaagcttctgtttgaggggcgttcccagaattttcgcgccataaatcactccgattccatctggaatgaccagatctgcgctgttaacggcaccacgggcctccgcatcttcgcggcagatctctacaatctccggattcggcgtgaccacatagtgcgctccaggctcgttcatcagccgaaccccctcgtccacagcctcttccatcgtaaaattatcaaatccgacgccaagaacgtcgatccgtttttcattcattggtttgttcctctccaaactctccgcaccgcgcaatggaattctttttctgtctgcacagcgctgtcagcgctatcttatcacagaatttccattctgtccagaaatagagcggattccctgcgaaaaggctgtcctctgttcttgcattttttgtttctttttcgtataatagcgaagttagtcaaaaaaagaggaagggttttcattcatggataccaaacaaatcagaaacacacttcttttggccctgacggcactggtttggggttctgcattcgtcgcccagagcgtcggcgccgagcatgtcggtccgtttacgtttctggccagccgcagttatttgggcggtattgtgctgctgccggtcatcgccgcgatgaatgcccgcagcaaacgcagttccggcgtttctctgctgcccaaaagctccggcgataaaaagcggctgctgctgggcggcatcagctgcggttttttcctgtttctggcttccaccgcacagcaaatcggtgtgggcgctaccactgcggcaaaagccggtttcatcacctcgatgtatgtactgatcgttcccattctgacactttttatgggccgcaaagtagataaaaagatctggctgtgcgtcgtactgggcgtaattggactgtaccttttgtgcatggtcggcgagttctccctgagccgtggcgattctatggtactgctgtgcgcattcctgttttccggccatattctgatggtggatcatttttcgccaaaaatggacggcgtgcagctgagctgtatccagttctttgtcacagcactgctgtccaccatctgcatgcttttgtttgaatcccccaccgttgccgatctgcaggctgcggcactgcccattttgtacgcgggtattctcagctccggcgtaggctatacgctgcaaatcgtggcccagaaaggactcaatcctactatcgccagcctgaccatgtcgctggagagtgtattcagcgcgctggctggctgggttcttttgggtcagggtctgtctcttcgggagctatccggctgcgcgctgatgtttgccgccatcgttttggcccagctgcccgacagcctgttccgccgcagaaaagcggacgatgccgcgccggccagtccccccaattcctgaccatacagatgggaggttgtccttatgctgttttttgatctggatggcactttagtagattcttccgggatctggttgcagatcgacttggatttcactgcccgtcgcggcctggcccacacccaggaataccacgatttcgtgattcactccaccgcccccgtcgctgcacagttcacaaaagactactaccatcttcccgaaagtgcagatgaaatcatagccgaatggtccgcacaggcgctggaggaatatacataccgcatcgaagccaagccccatgtgcacgcgtacttggagcagtgccgccggcagggtgagcctatggccgtgctcacatccagcgcaccggaattatgtcgggccacgctgcaaaaaaatggtcttgcctcgtatttttcagatctcttttttgcacaggaaatggggatggagaaacgggaggcggcgctgtttcgcgcagcggcacagcagtgttcggccgcgccggaggaatgcacgctgtttgacgactcgccggtggcctgccgcggcgcaaaagaggccggcctccgcgtcgtgggtgtgttcgattccatttttgcgcaagacgaagatgcgatgcgcggtttgtgcgatacctacatttacgacttttcagaacttctatcctcaaagcaaccgcctgtccccagaaccggaaaataaaccaaaatttgacccggctggccatattattggccagccgggttttctgctgataccgtaaaacgatcaacgctgatactgcgcccagtcaggatttacattcagcgctgtccagcgctcataaacttcgcctttgcgttcgtaggtgtggctgttcgtcgcttcctgcaccgccaggtaataccaggctcccggaagagca

SEQ ID NO: 2773 - DNA, 15730 bp, Unknown
  16S sequences of unknown bacteria
gttattaacatcataccatatttgagatgaattttcttctttttttgttacctatctattgtaccataacatctcgataaaccgccgaataagcgtttttgattcataaagtaaagctcccgtatttttatatgggagctttggtgaagacaggtggacttgaaccaccgaccccctgcatgtcaagcaggtactctaaccaactgagctatgccttcatctaaataaaaaatggtcgaggtgacaggacttgaacctgcggcctctgcgtcccgaacgcagcgctctaccaaactgagccacacctcgatgaataactattaaattgtagggaagtatctcgcggtgattacccagccgcgccgctacgcagcttacacttgcggtgcccaaaattttccgctcctttgaagggagcaaaattttgaccgctgcgacttttcgcactcgctgtatcttccgcaggaagcgctcgtgctcaaagctaccaaactgagccacacctcgatgaataactattaaattgtagggaactatctcgcggtgattacccggccgcgccgctgcacagtatatatgctgacagctttttaattatatactctgtcgctgtaaatgtcaatatatttttttgaaaaagggcaaaaaaccgtatttacctcagaaatacggaaaaagcggcgcggtatgtcccgcggagcgataaaatttgcaaattttttgttatcatattgattggcggcaatcggagacacataatacaggtaattaaaatgaacgtataagacaaatgaccggctttgaaaacattagaaagaatttcggattcggatgtatgcgcctgccgatagtgctcggcggctgtcggtcttatttcgcccgtaataagctttctcataacctctgcagtatcttccccgcggcttgctttaatataatcccaatagagcagatacttggaaaaccgaaaaggattcaagactgtactatgagagttatatcagaaaaatcgtcacgcggtgattttgcaggcgtcacctataaagcttaagcacttgctcggttctttgtactgtcatatcccgcagccgttcgggggataatacctttaccctgtcgccgaagcttatcacccaggaaacgagcgcgtcggaaagcgctgcacgtaccgtgaagcaaaattcgtcatccgttacctttttaataaagatatcctcaccgaagcggtcggcgacctgctcggttatttttttgctgcagcaaagctctatttcgcacatttcgccgccgtgcatcccgaaaagcttcgaggtatagtcgggggtatcgaaacggtcggtatattcgctgacctccgaatagtgccgctgcggcatatcggttatttcaaccttatacattctgtcaagccgcaaatgaagcagattatcatacttttcgtaattgcctataacatagtaatgatcgtcctaccaggtcagcgcataggggcttataagcatttcttttttctgcttttctatgcttctgtcgggcgagagtacacggtttacatattcaaagcgtatcttctttttatcggctattgcgcggcttattttatcaatactgtaaaatatctcttcgttgacagatttggcgcaggaggaaaaataaacgcggctttctcttttctgtgcctgataacgggaaacaaaggagtcaagcttttttacaagctcccgcgttttcgccgcacttataaagcctgcggtacgcaccgcgtccgcaagcagatagatctccggctcttcaaactcgcgtgaggctaaaaaccagcccctcggcgatgccgaacgcacaatgtccgccccgtaatcgataagagcggatatatcggcgtaaaccgatttgcgctcggaggatatcccctgagaatcaagaaattcgcatatatcctttgcggtgacggggtgctcctcatcgctttcgcgctttaaaaaatccagaatataaagtattttcaaacgctgtccgtgcgtttttgccataagctcaccttttcaaaaaattcctcatagttcatcatgttattcataacatccagcatggcagaggacgaaagtgtttgcggcagtcccaaaaagcttaaaaaatcacggcgcatatcggcactgttcgctctgccggaaagccccgatgaaaacatatcgctcttggtgattttttttcgctcggcgctgcgttccgccgaaactccgcatctttgcagcgcttcggctattacctcgggggacattccctcaacgcccaaaagcccctcctttgaatatttcgccttacgccgttccttgcccttaagtgccggaacataaacatttatgatttccgtattccccaaaagctttttgagatatgcgcggataaccgctcccgcactgtcggaatcggtcatcacgataacgcccttatccttagccgctgcccgtatcagcgcggctttttcgtggcttttgaatatgcggaagccgtcggttggaattatcagcgcgtcaataacattttcaagcgtaatcttatcatatttcccttcgactattacgggtcggtcaagccttatcaacgctttcaccctttgctataatatatatgagccgcaccgtcagctgctcaagcaccgttctgggatctgccccgaaggatttgagctgcttatcggcagcgagcagcgcctcaaagcttaaggcgagccttttaaaatcgaattttgaaaggctttgcgctgcgcggtcaagcacgaattcgcgtcccttatagccgaattccgccgcgatttcggaatttttcattcccttttttcggcagacgaatacacggtacagatcgacataagcggacgacacggtgtataatataatcatcggctcaaggcgcataaagaaaagctcgtcaagggttttcatcgcttcgcccgcgtcccgtgaaaaaatatgccgcgaaaggttataaaccgacgcttcgaccgtcttgaccgaaaccaactcaacatcctgccgcgttatagtgccgcccggcagataaaagcatagcttgttaagctcattctgcagggtggaaatatcctctcccgccgtttcaacaaggtattttgccgccgcaggctcaaagctgcagccccgcgacctcgcgccgtcggtcagcattttaacaagctcgggtattctgcggtggtttaagagcactgcgcacccgccgcccttttcggcctttgaaatcagctttttgagtcttgcgctttttttcgggtcgggggctaatgagtcaaaccatataatgaagaccgcgtcctctgcgggagcggagacaagtgatgacagcttttcgaaatcatttgcgccgcagtgctcaatgtcgtaatcgcaaagcaccgcgcactttttgtccgacattaagggcagctgctccaaaaagtcgtatatgtcctgcagggagctgtccgctccgaagcggctgtaattgaagatatcatccttatcggttatcagcgagcttattttatttacatacatacgcttcaggtagtcgtcctcgccgagtattatgtagaccggcgccaaggccccgctcttaatttggcttttcagtgcgtcttcgtatatcattgccatctgaatttcctgcccctttcacttgaaattttacggtacatttcattgagcttaagtcgatcaagatgccttttaaaggcgaacagcgcggctactaccgaaattattatcagcaatgacgcgtaaaattcgggcgtcccaatatccgacaccgcaaacggcaaagagccgaaaaggtttataatacggttgatataggcggctgtaaactctgcggctatgaacaaaagccgcgtcaggtacgggaaaatcaaattaagcgcaagcgctacggcggaaatttgcagggcaatgcctgccgcagcgtctatcagcaaattagtaaataccgaaacatttgaaacatacccgaaggtataaattgaaatcggcagtgtgaaaagcgtggcggcaagcgttaccagcaccgcagaaaaaagggtgaacgcaatgtcggttttcaaaagccggttatccttaataaatttaaggcagggcatagccaccgaaactattccgagggtggaaagaaaggacagctgaaacgaaatactgaaaacggtgaagggcgagatcataaacagcagcgccgccgctcctccgagcgaattttcggtagtattatcccgttcagacaaaatgctgacagcgagaaaaagtgagcagaagcctgcgcggagaatggattttgtaaatccgcacacggccgccataaaaagcacggttgcaagcattgtaagcgcccgaaggtatttgttgtaaaaatattttttaacggcaacggcggtaagacccactattaccgacaaatgcatacccgaaaccaccataacatggctgacgcccgcttttttgacatttgcataaaattcatcggtaaaatatgatcggtcgcctattgttacggcggtaagcgtagccgcctcgtcacggctcattgcggaaaacagggtattctttatatagctgcggacatttcttatcttttgcagcacggggtcgtcgtttcctttttcgaccctgatatcccgaagcttgccgcgaagaaatatcccctccgaataataggatcttttctgcgttcccaatgaaagctgcgacagggaaacggtcgcttgaatgcgattgccgtattcaagcggggtgaggctgtaatcggtgcaaataagctttgtgccttttttgagggtatcgcagcttgtcgcttccaatttcacggtgttggcagtgccgtgtttttcgggctcgctcactacggtgaattctccctttgcggcgcttccgtcaagccctgaaagctctgccgcgcgggaggaggttaaaagaataccggctgccgtaacagccagtataaacgcaactaccgtttccgcgggtcggcggagataaagcgatacaaaaaacagtattataaggacgattccgcagaagaagactgccggcggacagtaaaatccgactatgcacagcacggcagatacagccgcgcaaagaagcatgggtcgttttttaagataatccgccataatatttcatctcctttttataattctttttgcagagttcaaaataaagacaaaatttttatcctttgttgctataagacagagcgcatatatcgcaagacccgccactacctgcgatgcggtgcagattataccgtccgttacatatgaaatcgggtaaacggctgcaaacattattgccgaatagattaaatatcttatattatcctttaaatatcccaaaatatttatattcttacgcacaaagcagatttgaactataacaaccgtaaattcggcgcaaacggttgctgcggacgcccctattgcgctgaatttcggtataagcagaaggtttaacacaaagtttactgccgctccgcagatgaccgataccgtaaacgcagtctgccttttcgacggcagcagaaactgcttgcctattacggttgaaagcccaatcgccaatataatagggcagatcgccatcataagcggtcctaccgccgcatatccgtcgccgtagaaccaaagcaccagattatttgcgcatgctgcaagtccgaacatcatgggacaaccgagcataaatacaaatttgaccgaattgcccatcatttccttaacttcttcgtctctttggttagcaaaggcatttgtcattgcgggcagcattacaacgcccagagaagttattaactgcatcaacgccttaacaatattctgagaatatgtgtaatacgccacattatcgatattgcttgaaagtttgcctatcatagttttatcgagaatcgtatatacctcaatcgcaatctgcggaacaaacagcgcaagcataggctttatatacaaagcgactgatttcagctccggtctggctttaaccagatactcgggcagatatatccacagcgaaagattgccgagcagcgttggaattgtaaagcaaaacgcatacttataaaggtcggcgggagatttcacaaaaataaagatcagaactatgctcacaatcttgaaaatagtgtttcttatcactattttcccgaaatcctccataccctgaaaaaaccaggttatatcaaacgccgtggaaataagctctgtaaccagaatcagaaaaaccgtctgataacgcctgacagagaatgtaaatatcagataaattccgatagtaataactaccgtaaacattctgagtattactatttcgccgaatatctttgaacgtttttcgggattttcctggtaaaaggctacttctctttgcgcaaaaagcgcgctgccgagcgttccgaacaacacgaagtacgccacaaccgaatacgaatagttgaaaatccctaccgaggttgctttaagcgtacgcgcaagatacggcgatgtaataagcggcgttaataccagtaaaatctgataagccgtattataaatataattttttacaaccttaccctttgacacttaatttccccgctgttccgtgcagaatttatcctcgcattttttcagtgcggttttaagataatagcctttttcaagctttccggcaattctgtttacattttcaagcatttttttatactcttcatcggtcactgcgtctattttatccttaatgtcattcaatgaatttacacagatacccacattttccttttctacaaagcgcgccattgccgcttccttccaaatcactacgggtatacccgcaacaaggtaaagcgatgttttatgaggattgttgtatctgagataatttccggtttcaccgttgcagccgtcggcgctgtcgccgtcccatatcagtccgaacttaccgtcaatgatttcgggtattttttccgacgggaaagagccgttatactttatttgcgtattttccgcgttcccgccgtaattcggaccgtaaagattgaccgaaaaaccgttttcaagatgacttaaaaggtatatataaggacacttatcacgtcttaaatttccggcaacaataatgtccgctgtattttctccgggctttttttcgggaatttcaccatctgtacggtaatcgaatatttcaagcggtatcagcctgttttcatcaatgcctttttctgagaaagcctttttcataagctcgttatgaactataagcagatcggaatttgattccataaaatcaaattcattttgcgtatttttatccgaccataagctgcctcttaaaaattccgcatcgtgaataaccgaaataatactgcacttttttattttcttcaacaatttaaggcactgttccctgccagcctgtcggttatagaaaggattttgcaggagcaccacggaatgtctcctaattctgaaaaaagccccgatccaatacggaagcggtttaaaatatttgaaagccctttcaaaaacagacatacctttcaaaatatggcacttaataacaaccggttcatatcccgattgttctgcaaaatatgcaacgtcctcacgcgctttacttcccgcatgctgaaatttttttgtctgctctactatctggtatttattcatattgcaaaaagtgtcctttcccggctacgtcagcctatcctatcaacaaaagcaattacatcacgttcaaaattactgttaagggttttaatcttttcaacataaggcgcaaagagcttgttatattcttcatacttttcaagcatattctttgcaagctccgctattttcgcatatgggtgtgtttccatattgaatttaaaatcctgcgggataagaatatctttatcgttttttgccgcgcccctgtcggaagtaattatattgcagccgcaaagcgccgcttccttgacgagcttctcgggtcccgggaaaaacccgaaatcaagatagacctttgaagttagcaatgcttctctgacctgcataacggtcataccctttatcggtataaattcagtatcggggcacagcttttttattttctcaactacggcgggcgcatattcctccgcacctttgcccggattatatgcaatttgattttttttcggcggacgttctgaattttcaaaatattccgctctcactggaccgtcaaggtacatcatatccgattccttaaccccatgctcacgcagatacccggccacatattcgcagttctgcgtgtggagaattccgcccatatcaaatttaaaatgttttttattctgcagcagatcgcggatatagtaaagaggaaacgccggccacgggaacctgtttttcgggtaaatatatttgcagcgttccaaaaaagtatacttctcttccttaatgttccttaaatagtgataaagggaaagccacactatcactttatggacatttttaaattttctgagataataggtgtgtgtttcgggcgtgcaaagtacggtgttttgcgtatccggcacattttcgatacttatatagtttacgttgaaatttttaaacttttcttcccgaacaaattgtttttgaaaataagcgacatatgccttgcagcaggtacagccgttgatcttatcaacaatctgatgtatcgcctcgggtcctccgtgcgttccgcgcgcacacaaaaaataaatttcctttgccacagcaataactcctcttacttttcaaaagatgatttttccggcagtttcttttcaaaaagctcttgcaaaaaaccttgttccttttgaaaatcgtagctaatatcatcgtcacttaaacatacggttttgtatttactgttcagtattgcgtcctgtatttcattatcatctttgcctattgagaaaaattttccgcgctctttcccgctctgaatgatattcccttttgcaaactgccaatatctaaaaacccactgattaacatcctcgttattgcgaaatttatgagagcaggtttcatcaatcaattcgttttcggcattccatacatctgtaagtgtggattttaaaaacggctgcggcaaatgcggattatcaaatgccgaaaagccgttgaccggcagcatatataaatttttaagcgctgctttcggcgctttaaaggaaaaccagatatttttgtttttcttcaccgtttcctttttgttgaaatgcttgtttatcacagccatattattaccgattatatggtcgattccgccctcattaaatctgaggggcacttcggtgacattatccaccggtttcccgtttttaaaaaagtcttcgggagaacagtaaccggtaagaaataaatcgtcattaaaataaacgaattgatccgacaaatcatttatgcggtgcatattcagctcaattgggtgcgaactgaaaacgggcagatactttccgggtatataatcgctgtgttttactatattaagttttgggtttccggtattgagccagccgggtacatgcccccatgttataaaatgaatctttctgatccacggcgcatatttttcaacgcctctgaaccaatagggcagaagaccccaatcacggtaacggtttacattatcatccgtgcccgtaccgggtctgtatttccttttctcagcaagccattcttcatcgcttccgtccacccacggaactacaatatcaatattacttatcatcagaataagtcctttcgctgattaaaaaagccgataaacgcccaagcagataccagaatataatagtattaggggaaaaatggaaaaacataactgatgagaacattgccgccgctgccagagaaatgggaattgacaacattaaacacacataatatttatttcccgagcttataaatgcgaaatttttgaaaactaccgcaataatatatattacaaatgcggcaacacttaaaaaccctataattccgtttgaaattaaaatatttaaaagctcgttgtcaagcgtggtcatatatccgaagtcattatttactatatatgtctgcggcatattgtctctggcataatcggtaaatccgcagaatgaaagaccgaaaataatattatgcgccgaatttttgtatacctcaactccgcttttccatacatcaaaacggcggttgcttacatcatctgaaatatcatacccgcgatctatgatattatctttattatctttattttcgtcacttataatacctgaaacaaagtttacggtattattggttatatttttaagctctctgacactgacaaaggccgcagcggcaacccctatcgccataacaaaggataacagcttcagaatcagttttttatcctttatcatgttcagtaccgcacaaagcaggaacgacgcaatactgacagacaaaactaccgcgccggtacgcgaatccgaaaaaattatgtacattaaatgaatgaaaatcagaacaccgaaaacgattcgcttccaaacctttttatagcttataaacgcaaaaataagcattgttattgaaaccgcacaggaaaccgcgccgttgttcggatttataaagacaccccacaggcgtccccagacaaaccccagattgtactgataatttgtgtccttcgcggtatttgttattccgacacccataaacaaaagtataaagctcgcaataaccgccagcgttgtatacgaaacaaagactacggaaacaaacccgatatcagatttgcagctttttgtgctttttttcttttcgcaggtaaaaagtattaaaaaatatattacccaataaacgcaatagataatgttatttttaaaggaataatttctgtttattacggtggataatccgattgtggaaagcacggcaattataataacggtctcgggcaccttgaaatattccttcagattcaaaagccggtaagccagaatcacaaccgaaaaaagcatagccgcccacattatcggcgttattattctgtttccgtatgttaaactgttagaaccgagtatagcatatatcaaaaaaacagaaataaaaattttccgtgcaaaatcctttttcttttcatttaaacatatattctgcaattgaattctctccttggttttaaacggttatattttatttttcttcaaaataactccgtaaatctttctccgccgaagacggatgactaatatcatatcctgcttttgcaacttcgctgcgcatatctgcccgcctaaagtccttatatcccgttataacgtcaacccaatcggaaacaggctcttccaggcttaaaaatttcacatttccggtgattgccgtttcgggcgatatacagtcggacaaaacgcacggaagtcccgaagcctgcgcctcaatcgcaactatcggcagaccctcataaaatgacgggagaagaaaaacatcagccgcacttaaaaggcagtcaatatcgtttcgtctgcctaaaaaaaagatatttccgtaaacgcctttttctttcgcgtaattatgaacttcatcggcaatttcaccgctgcccacgcttaaaagcaccgaattttcagcagcctttaaaacttccgcaaatatatcaattagtccgaacggatttttttgcggtgataatcttccgacatgacaaatgacaaatttattttctattcccagttctttacgttttgcggcgcgcttatcttcagaaaagctatacttcccggcgtcaatcatattcggaataatttccgcatgccttttgccgaacataaacccggccgcaacccccgagcaggcgtaccttttatccgtgaaaaggttaagaaaaggtctgcacagcttatgaagtctgattttatcggtatttccgttatgactgtgcgttataacctttcgccgcaaaagccatggaacaacctcggttattgccgcgccggcgtcaagaatattaaaataaacctttttatattcgggatgactgcgaagtatcctatacatctgacgcaaatgcccgggcaggcttttgctttttgcgggaatataataaatttctgaaccgtacgattttatttcatcggcgtatgctattgtcggaaaatccgttacaaaatcaaaaacaatttttcccctgtccgccgttcgcagctgattcataagatacatttcaattccgccgggattatctgtcattccgtacaccaaaatatgctctggcaataatttttcacccctgtaacagcatttcaaaacgaattatcttcttacggcataaacgaattttcccaaaagcaaggctattgtgccgttgtgattgataatagcccttttcaatatcccgaaaacaaaatttccgctgtccgaaccgggcagcagcgatgagtaaagcggcatattgcagacctcttcaaaccatttttttctgtctttcgcattcatatccgaaagcggattgttattccgcgcaagcgcggaaagcgtatatcttaacaagcggccggcaagaatatttccggtttcacggtctgaaattttattttcaatgcaaaattcatacattgatttcacgcgcttatagctcaattcaaaataatcctttgcaaatctgtttgttatgctgccgttaactcttttaaaataatgataaccggcgctgtccagcgttgcaaggctgccggcatgccttataaaatcaagattaaagaaataatcctcataaaaaacagaatcgcagaatctgatattgttttctcttattatcgatgctttataaattgaattccactgataaccgaaaagcgtgtctctttcaagcgccgttgcctgtttcgctatctgttccctgcctttatataatccggcggcaggaattatccgattagacgacatatgcttgcctgcggcgttataatactcctcagtaacgccccacaccacctcgtcggttccgccggcggtcagggcgtatgcgctttcataaagcccgggttcaatataatcatccgcgtcaataaaggttatatactccgccccggcatgagctatacctatatttctggcattgccggcaccgccgttttcttccagaggtataacacgcagacggctgtctttttccgctgtttttttgagtatttcaaggctgttatcctttgagcagtcgtcaatacatataagctcaagagccgaaaaagtctggtccaaaacgctttttacggcggtttcgatatattcggcggagttgtacaccggcataataacgctcagcaacggtttttccattttatctccccgccttcagctttgcaaaggtctttgtattgcccgattttaccttggaaataaccctgccctccaaataggtaagcccggcgttattccactttatcggcagcagcattattttcatatattttgaattcggctttgcggtcttaacggcatttttaacgcggtcggtagagattatgcgctttatctccgcttttttctccttaggggaaagcgggcagttgcggtttgtaacattttcaacgcagcctattatgcgctcaatatatctgcgcgccagaaattcgcgaacctcgggagtatcaacgccccaataggcgaaaagctcctccatccagccgttctcttcctcgcgcttgtcgtacatatcactgcggtatttcgcggtctcgctttcggcgcgcttgcgtataaagtggtagaacttgtccgacagaacggaaacccgctcaacatcgcgcacaacgcttaaattaaaggggaagtcgtcccaaaacgtctgcgggaaatagagcttattttcaagaatatagcttgataaataaagcttgttccacggggtgtaaagcaggtttttatcaaaaagcgcatacgcgtttttgcgaaattcctctttggtaccgtaaaccgcggcggggcagacctgctcctgcgtgaatttttcggtatcactgtaataggtgtcgatataatagcccgaaaccaccagctgcgaatcgttcttttcggctgcggcaaccatcttttcaagcatgtcgggctctgtccagtcgtcggagtccataaagtacatatatttgcctacagccttatcaatagcgacattgcgcgcgctcggcgctccgccgttttccttgtgtattacctttatgcggggatctttcgcggcatattcatcacagatttcgccgctgcggtcctttgttccgtcgtccacacagaaaaattcccaatcggtaagggtttgcgcctgaatactttcaatcgccttgcctacatagtcttcaacgccgtataccggcattattacgctgactttaatatccgccaattttatttcctccgaatatattttgttagattataacactgatcattatttttttcaagcattacagcagcctgtccgcaagactcaacgcttcctccacggtatcgtccatgtcaaagtacttatattgcgcaagtctgccgccgaaaagcacattttccttttcggcaagagcggcgtattttttgtaaagctcattgtttttttcgttatttaccgggtaatacggctccataccctcctgccaatcggcaggatattcgcgcgttacgacggttttcggctgcgtgccgaaattgaaatgcttgtgctctataacacgggtatacggcacctcgcgctcggtgtagtttacaaccgccacgccctggtggttttcttcgtccaacacctctgtctcgaatttaaggctgcggtattcaagcttgccgagactgtatgcaaaatattcgtctatcggtcctgtgtaaatacatttatctgccgtttgcagataattttcgcggtcggcaaggaaatctgtgctgagccgaacctccgcgccgtttagcagcttttctataagctctgtatagccgccgcagggtatgccctggtagcggtcgttaaaatagttattatcataggtaaatcttaccggaagacgctttattataaacgcgggcagctcgctgcaatctctgccccactgcttttcggtgtagccctttataagctttgtgtaaacatcgcgtcccacaaggcttatcgcctgttcctcaaggtttttcggctcgccctttatctcggctctctgcttagcaagcacctccgccgcctgcttaggagttgaaatgccgaacatttttgaaaaggtgttcatattaaagggcatattatacatttcgcccttgtaatttgcaaccggagaattcacaaagttattaaattcaaccaagcctgtcacataatcccaaacccgcttgtttgaggtgtggaagatatgcgcgccgtatttatgcacgtcaataccctcaaccttttcggtgtatatatttccgcctatatgcccgcggcgttcaagcacgagtacctttttgcctttttttaccgcctcgtgagcgaataccgctccgaacagaccgctgcccgcgattatataatcgtattttttcatacagtgctttcctttcagaaatgtattactgtgttattttaccacttttcccccgatattacaagtggtattattttaaccgggatatatgagtgtacagtcgtcaatgataggttacacttttctcaaaaaaatatgatgaaaactacattgagtaagactttggatgtttggaggagccgaaggcgac

SEQ ID NO: 2774 - DNA, 17952 bp, Unknown
  16S sequences of unknown bacteria
ttttcagccgatcatgcttcccatgtcgtagaagccggcgggtctgtccttcatgaagagggcggcgcggatggctccgacggcgaagacttcgcgggaggcggcgctgtgggagatcgagaagatttcgtcctttccggcgaacattatctcgtgctcgccgacgatggtgccgccgcggatcgagctgatgccgatttcctgcggtttccgcggttctcttcttgacgcgcgctcgaaggtgtattcggcttctttgcctctggtttcggtgacgatgtctttgacggcgtcggcgatcatgagggcggtgccgctgggggcgtcgagctttttgttgtggtgtttttctatgatttcgatgtcgtagccgtcgccgaggacttcggcggcgcgtttggcgaggctgatgaggaggttgatgccgagggacatgtttctggaccagaagaccggtaaggtggccgcggtgtcctttatcagggcggcttcgttgtcggtgtgacctgtggtgcagatgactaccggaaggtttctctttttcgcgaaggctaagagcgggcggacggcggagtggtgggagcagtcgatgattacgtcgatatttgcgtcttcggggatttcgtcgaagttcgcgtagattggggtttcgcctgcctgcgggtttatgtctactcctgcggttattgttgcgttgtcgttttcctttgccgcttgcctgattgctgtcccgagccgtccgttcgcgcctgagactaagatatttgttgttccgttcatttagtggtgtttcctttattgtttgaagtttttgcggagcttttttcaaaaagcgaccgttccccttaatctataattccgtggtttctcagtgctgtggcgagccgttctttgttattctcttccatttcgcagagcgggagtctcatttcgtctgcgcagagacccattaagcccattgctgtttttaccggtacggggttgacttcgcagaagagggcgtttatgagatcgaggtatttgagttggagggcgagggattcttttgtttttccttcgttccagagggcgacgatgttgtgggtgtccttcgggactacgtttgagaggacgctgattacgcctttaccgccgagggagaggatggggacgatctggtcgtcgttgccggagtagatgtcgagggagttgccgcaggcttcggcgagggcggctacggcgcttatgttgccgctggcttctttggcggcgacgatgcggtcgtgctttgcgagttctttgtagacggggagggagatgtttacaccggttcttgaggggacgttgtagaggatgatgggtttgtttgtggcgtcggcgattgcggtgaagtgcttgatgagtcccttcggggtggctttgttgtagtagggggtgacgaggagcaggccgtcaactccgacttcgcaggcgtactttgagagtgagatggcgtagtcggtgtcgtttgagccggttccggcgattacggggactctgccggcggttttttctacgcagaagcggatgcattctttgtgctcttcgtcggtgagggttgaggattcgccggtggtgccgcagatgactatggcgtcggtggagttttcgatttgccgctctatcagggcggcgagggattcgtagtcgacctggttgtttttgaacggcgtgacgatggcgacggcggctccggtgaagatggtggttttttgtgtgctcatgggtgattcctccgaaaataatagtaaaggtttgtgccggtatggcgcgggaaattgtgtatcccgacaaagtttgccgtccggcggcgaaaaacaaaaaaactggttgaaaaccagctatccgtgtactataatatatatgaggaaccacaccggccgctgtggtgtgacgactgatgttacggtgaagcgatgaatgttcgtccgctcatgatatttcagtagacaagatagctctccatcgcggcgtgataccacgatgacagttgcacggctgttaacgcgtgcacccagaccgacatgacccgctcattccggtcttcggcatgaaccgcctttcggaacgcgtcggcggtccgcggggacctgttcgttcttacttttcggtaaatgcgcctctatcaggacaagaaagcgaatcgctctctgccttatttatatgatagcacatttttccgcgcttgtcaaccccgttcctcaaaaactttcaaaaaacaaggagcataattctgtgcaatgataacaaacgagagaataaagacggatcttaagacgaaggatttctggtacgacctgccggaggagctgatagcgcagcacccgagcgaggtgagggacatggcgcgcctgatgacggtcgaccggaaaacgggcgggatcgggcaccatatcttccatgatatagttgatatgctgaaccctggcgacgttatggtcataaatgactcgaaggtgattcccgcgcggctttacggcacgaaggtgagcgaggggcacgcgcacgtcgaggtggtccttctgcgccagcgttcgctcgaccattgggaggcgctcgtgaaccccggcagacgcctgaaacccggcacttccattgtattcggcgagaacgaaaacggtgagccgcttctgacggcggagataaccgagattctcgagggcggcaaccgtatgcttgagttttcctatgaccactcgaagtatacgatatatgacatactcgataagataggtaatatgccgctgccgccgtacatcacggagaagctcgaggacaagagccgctaccagacggtttacgcccgcgaggagggttcggcggcggcgccgacggcggggctgcatttcacgccggagctgcttgacaggatacgtgagaagggcgtcgcgatagcgccggtgatgctgcacgtggggcttggcacattcagaccggtgaaggaggacgcgataggcgaccatctgatgcactcggagttcttctcggtgacggaggagtcggcgagagtgataaacgagcgccgcgccgccggagggcgtatagtggcggtcggaacgacgtcctgccgcacgctcgagagcgcgtcggacgacaatggaatcgtccacccgatgcaggcggacacggggatattcatctaccccggctaccgcttcaaggcggtcgacgcgctgataacgaacttccacctgccggagagcacgctcctgatgctcgtctccgcgttctcgtcgagggagataatgctgagggcgtatgaggaagctgtcaaggagaggtataagttcttctcgttcggggacgcgatgttcataagctgaacggggcagaaatattatcagcaaaaagtattgacaatatcacgatatcgtgatataatataagtgaaatagatcagtagaggtatattgcaatgcccattctatcaagattttacggaatagtaatccgtatgtattttctgaaaagcgagcacaatccaccgcatatacacgcgatatacaatgacgatgccgcggcaatagattttatgacaggtgaagtcattgacggacatctcccggataaggctgtcgcaatggttcgggaatgggtaagtcttcatcgcggcacactgatggaaatatggaaaacgcaggaattccacaatattccgccgcttgaataatttttaggagggtaattacttatgtttcataaggtaaaaaccgtttccgctctttccgattatcgcctgagcgtacagttcgcggagggcgtgacaaagatatacgacgtgaagccgctttttgacagaataccagttttcgcggagctccgggatccggaaaagttttcccgcgtgtctgtcgacaccggcggatacggaatcgtctggaatgatgagcttgatctgtcatgcgatgagctgtgggataacggtgtccgtgtaagtacgccgttcgacgacctgatggctttcagcgacgcgaccgcgctgtggggactgagcgaaagcacacttcgtaaggcgataacctacggcaagctcgtgaacggagttgacgtctgcaaattcggcaaacagtgggtcgtctctgtcagcgcgatgaagcgtgagtacggaagctcagagtctgtcccggaccagcacgccaattgacaaaaatgactgacacgaatcagtgccgcctgaatcccccgacgccgtcacgcccagcgcggcggcgtcttttctacgtgcattccccacttgacaaccgccgcgaaataagttataataagtatatgagttttacaaaaaagaaaggtgagaaaatgctgccgccagtgatagccgtggtcggaccgaccgcctccgggaaaaccgccctcgcgatagcgctcgcgaaacgccttgacggagagattatctcctgcgactcaatgcagatctaccgcgggatggacatcggaaccgcgaagccgacaaaagaagagctcgcagccgccccgcaccatatgatagacgtcgccgacccggagaaggatttttcggcggcggattacgcgtcgatggcgctgccgatcgtctacgacatactctcgcgcgggaagctgccgatattctgcggcgggacgggtctctatctcgacgcggtgctgaacggcgggagctacaccgacgagggcgccgccgacacgaagccggatgaaaccctgcgcgcttcccttctcgcggacgcggagcgatacggcgctgaagacctctggaagcgactgtcagctgttgacccggagtccgccgccgcgattcacccgaacaacataaaaagggtcgcgcgcgccctcgagatctacctctcgaccggcagaacgaaaaccgagaatgaccggatatcaagagagcggacgaagccgcgcttctcatatgccctcctgatgccctcccgcccgcgtgacgagctttacagccgtatagacctgcgtgtcgacatgatgttcgccgacggtctcggcgacgagataaagcgtctgctcgccgggggaaagctcgtgcgcggcacgacggcttcccaggcaatcggctacaaggaggttctcgacgcgctcgacgccggtcttccgccggagtccgcctcggacgcgataaagctcgcttcccgccggtacgcgaagcggcagctgacgtggttctcgaggaaggatcatcttttcccggtcgatatgtgccccgccgacctgccggatggcgcggatgattccgctaaatttgaagttattgtaaataatgcgctgaaactcttaacgtttgacgcgttttgtgatataattaaagaatgaacggaagtcgatgaacggcacagctccattatagctgtagaatatatattgcgtaaatggaaaataagacaagaagcggcaggtcgcgtctcgcggaccttgtcgtccatatcgcgacgatagcggtcgcggcggcggcgctggcttatctcgggtatcactttttcgagggcttctccgccgatatcgagactgagtacgcgacgctcgtgaccgacagcgacgtcgtcccgctcgacgcttatataatgcgctccgagtcggtgattttcgccgcgtccgcgacgtccggacacagcgtcggctatgtcttctctgacgggacgaaggttcacggcgggcaggtcgtcgcgaatatttacaccggcgacggttcctcggacgaggcgatagtcgacctcgaccggcggatagacctgcttgagtcctcgaacctgaccgacggcatgacgtcgtccgacacatatgtcattgactcgaagatacagaattattattacctgatacatcagtcgacgctgctcgggaattactcgaacctgacaaagcgccgggacgagcttctgacgctgataaacaagcggaggatactgaccggcgtgacgacaggctattcggacagaatcgagagcctgaccgccgagcgcgcgctgctgagcgccggtcaggacacgatcgcggagtcggtcgaggcgccctacgccgggtatttctactcgacgaccgacgggtatgagtcgacgttctccgcgtcgaaggtggagagcctgactctcgcggagttcgacaagatgctgtcgtcacagccgacacgttacagcgaccgcgcggtcgggaagatggtgtcggatttcaactggtatatagtctgcgagacgacgcgcgacagtctgaggtatttcacgaaggggtattcgtactacgtgaatttcccgtacaacgacgatatttcaataaagatgaccctttcgaacgtcgtgagcgaggttggttccgaccgtgtcctgctggtccttgagaccgaacggataccggaggatttcagcttccggcgcatgcagccggtcgagcttgtcaggtcgtcctacacgggttaccgcgtgccgatctcggcggcgagacttgtcgacgggaagcagggcgtgtatatcatgatcggaaacacgattgagttccgtgagatagacatcctgctcgagatggacggctattatatagtagccgaacaggacccggtgaacgacccggattacgcgtcgaagctcggtctttacgaccagatagtcgtcagcggaaagaacctgtacgacgggaaactcatatcatagaggtttttgtaatggatgatcacttagtaaatgatgaagacagattcgcccccgaaaaggtgcgtgagcgtttcgcggactcgcgtgcgcgtattaccgcggcgagcagagcggcggggagacccgaaccgaagctcgtcgccgtcacgaagacggttccggttgagacgataaatttcgcgatagagaacctcggcgtgacgacgatcggcgagaaccgggtgcaggagctgctctcgaagtatgattcgctcgcttccccgccctcgggtgagaaattgtcggtgcatcttatcggcaccttacagaagaacaaggtgaagtacataatcgataaggtcgacatgattgagtcggtggattcgctgtccctcgccgcggagatcgaccgtcaggcgaagaagcatggtctgacgatggacattctcatcgaggtgaacatcgggcgcgagccgcagaagggcggagtcatgccggagaacgtcgggaagcttatatgcgatatgtcgtctctttcgtcgctgcggctgcgcggactgatgaccgtggcgcccaaatgtgacaaaaaagaagactatctgaaatatttttccgaaatatgttcgatttttcttgacatttcacggaaaatgccgcataatatatgtatgggggattctgtgcccggagaaacggggacggatagtggtcatatcgacctctccgtcattgacacattgtcgatgggcatgagcggcagcttcgaggaggcgatcgcctgcggttcaaccgagataagactcggctcgaccttgttcggttcgagaccgcctatggcgccggtgaatgatcccccggacaaagcggatcagacttgaatttgcaaatccgctccttgatttctataaaaggagcgtgtcgcccgatgggcgtgatatccgcacggcggataactataaagggaaaaagccaataaaatttggaggattagtaacatgggaatctttgacaaactgaagcagggtatcgaccccgagagcaatcaggactacgacgagcaggacgcttacacccagcagatccagaacgatttcggcgacagccagatgtataaccagaacacccagcagaactacggtccggttgaccagaattacggtcagacccagccgcaggacgccggaatgcaggtgagcggcagctcgcttgaacttaaggtcgtgaagccggagcgtttcgacaacgtcccgcagatcgcgaaccaccttctgaaccgccgcaccgttgtcctcaacctcgaggagacgaacaaggagacggcgcgccgcctgctcgacttcctgtccggcgtcgcttattcgataaacggcaacctgaagcgcgtcgcgaacaatacttatgtcatcacgccctgcaatgtcgatgtgagcggcgaccagctgaagcagagaccggcgaagaccgagaccggcgacctctacaacaacgagatataatctcaccgggagatacggaacgtgaccgcttttatttacgttgtaacgaagctcgtcagcgtctttctcggcgcggagcagcttctgatgatgttccgggcggtactttcgtggctgccggtcgacgaggattcgaatatatcgaattttcttttcgctatgaccgagccggttatctacccggtgcggatgcttcttgaccggttcgaggggcttgacgagtttccgatcgatctttcgtttatcatctcgttcatgcttctgagcctcgtgcagatgcttctgccgacattcaggtgaagccgatgaccgatatcaacagaatccgcgcgatgatgaccgacgaggagagattcctcgtgtcgaacgcgcgcgacatctcgtcgagggcggcggacggcgttttcgccgcgaccgggtttctttccccgcgtgagaggacgatatttatgtcgttcggaatcggtcttgaaccggcgccggtaattgctgacgacgcttcggacgcgaagatcggtttcccgctcgcgaggcttgccgcgcgggacgagatcgggtttttctggggcggatacccggaggctgagaggacgctttactgtgcccttcccgcctacgcgctctattcgctcgacgccgtgcagaacggcgactacacggcggttgtgacgctgtccgaactcgccgcgctcgcgaaggacgagctgtcggagcttatcgttccgcttttcgtgaaagcgagcggctacgtgtcactgacgcacagggatttcatgggcgcgctgctggggctcggcatcgagcggagcgttctcggcgatattgtgctgactgataacggagctatagtgttcgcccaccgcaagatcgcggattttatccgcgctgacctttcggaggtcgggcgggatcacgtgaaggtgtcggcgcttgattataatgatgtttcggtgccgccgcgcgcttttgagactctgacagggacggtggcgtccgcgaggcttgacgccgtggtgtcggagatcgcgaactgctcgagggagacggcgaaggagatgatccgccgcggtcttgtcgagcaggatcacttccctgcgtccgacacggattctccggtttctgccggggacgtcatctctatccggcacgatgggcgcgttaagggtggtaagttcattatcgattcctgctccgagctgacgcagaaggggcgcgtgcggctcagcgtcaggaagtatatgtgacagtttgtctgtgacaacgggcggttgaccgctataccccgggacgatgttccgaaagaaaggactgatagaatgctcccaccgcatgagctgaaaaataagacgtttacgaagtcgatgcgcgggtataatcccgtcgaggtcgatgaatatattgagttcgtcattgagaagtacacggagatttaccgtgagaacgacgagctcgagaggaagctgaagaccgcggtcgcgcagcttgacgagataaagggcgacgaggattcgataaggagcgccctgatcgacgcgaagcgcgcggcgtcgaatatccgatccgaggcggaggaccgcgcggaggcgataatccggagcgcgaagtcgagctgcaatacgattctggcggatttcaacacaaagatcgaggagggccgcgcggcgcttgtcgagctgaagcgggatacgattgatctgaagcgcgagttgttcgacaggtattcggagcatataaagtatctcgacaagctgaccgagggcattgagcgggatgagattccggagacggacgagctgcgacatgaggctgtgatgtcgcttaagaagtcgatatctgaggcttattcgacgaaatccgctgagcggaaggcggagcgtaagcctgagccggagcctgagcccgaacctgagacgtacgaggagccgacgcctgaggaggcggagtctgagtatgagactgagactggcgaggctgacgcggatacgactatggtgtttactccggcgcatgctgaggacgcggcggatgatatgccggttgatcaggtcggtgacattgttgaggctgacggcactgttgtgtttgaccggattccggatgagaattcgacttccggcgagggtctgacggtgaaccgtgagccgcttgatactaagcgcggcgggtctttgaaggattcgataaaggagcttaaccgccgttataaggcggaggatgattcggacgtgataaatactccggacagtgacgttgacgacgagggttatctcgatttcgtgaagtcggtgaccggaaagtccgacgagaagaaggagaaggatttcgatatgcttttctccgacaataagaagaagaaataaaatttaatttcggtgtcgcacctgcttcatcttgagcgttatattttgtttgtataaagcttgggaaaaaggaggggggtgcaggggggagggaaaacccttctcgaagggttttccctcccccctgtgagcaaacacctatatgaaaggaacaattatgccacaggactattcaaaatcgcttaatcttccgagcacagatttttcgatgagggcaaatctcccgcagagggagcctgagatcgggaaggtctggaaggacgaggatatttataataagatgctttctaagagggagagcgagggagcgccttcgttcatacttcatgacggacctcctttttctaatggtaatattcatatgggcacggctatgaataaggtgcttaaggatataatcaataagtcgaaggctatggggggttatcgtgttccgtacgttccgggatgggataatcatggaatgcctatagagtcggctattataaagaagagtaagctggaccggaagaagatgtcgattccggagttcagggacgcctgccataagttcgcgcaggattacgtggatatccagatggcgtctttcaagcggcttggaatacttggcgattgggataatccttatcttacgatggatcctttgtttgaggcgcgcgaggttaaggtcttcggggagatgttctcgaaggggtatatttataaggggctgaagccggtttattggtgcccgcatgatgagacggcgttggctgaggcggagattgagtacgcggatgttccttgtacttctatttacgtgaagtttaaggttaaggacgataagggtaagttcggcgcgcttgatctggcgaatacgtattttgtgatttggacgaccactacatggactctaccgggtaaccttgctattgctgttcacccgcgtgagaagtacgtggcggttaaggctgcaaacggcgagacttatattctggctgacgctctggctgacgctaccatgaaggcggcggggattgattcttatgagcgcgtggctgagttcaggggtcaggattttgagttcatgacggcgcagcatccgttccttgaccgtgacagtgtgctgctctgcgctgagtatgtcactatggattccggtactggatgcgtgcatacggctccgggcttcggcgcggacgactatcagacgttccgtcgatataagatggatatcatcgttccggtcgacgaccgcgggtatcagactgctgacgccgggaagttcgccgggatgtactatgaggattcgaataaggcgattcttgacgaccttaaggagtccggcgcgctgctggcttcggaggagattgttcactcgtatccgcattgctggagatgtaagcatccgattatattccgcgctactccgcagtggttctgctctgtcgacgctttccgcgctgaggctgtgaaggcctgcgacgacgtcgagtggattccgtcctggggcaaggagcgcatgatttcgatgatcaacgagcgcgctgactggtgcatttcgcgtcagcgtcactggggtctgccgattccggtgttctactgcccggattgcggaaagccgatcgcgactaaggagactatcgacaggatttcggatatcttcgctgagaagggttcgaacgcgtggtttgacatgaccgcggaggagcttctgcccgagggcttcaagtgcccgcactgcggctgtgatcatggcttcactaaggagaccgatacgctcgacggctggttcgactccggttccactcatttcgaggtgctcgaggagaataacccgctctctaagtggaagggtatgcgctggccggctgacctctatctcgagggcgcggatcagtaccgcggatggttccagtcttccctgctgacagctgtcggcgctaagggacagggcgcgccttatcgtcaggttctgacgcacggctggactgtcgacggcgagggcaaggcaatgcacaagtcgctcggcaatacgatcgcccctgaggagatcatcaagaaatacggcgccgaccttctccgtctctgggtcgtttcgagcgattatcaggttgatgtccgcgtttccgacccgatcttcaagcagctctccgagacctacaggaagatcaggaataccgctcgaatcatcatggcgaacctcggtaagaacggcgaggatttcgacccgaaccgcgatatgctgccggtatccgagctttacgatattgataagtgggctctggcgcgtctcaacagactcgtgaaggagtcgctcgaggcttataataagtacgatttccatatcgtcatcaagtcgatctcgaatttctgcaccgtcgatatgtcgaagctctacatcgacatcacgaaggacaggctttacgtcgagaagaccgactcgaaggagcgccgttcggctcagaccgcgatgtatatcatcctttcgtccctgacgagactgctggctccgatgctctcttacacagccgaggagatctggcattcgatgaagcatcaggattcggacgacacgctgagcgtgttcctgaacaatatgccgaagtatgatcccgcgctcgatttcgacgggattgaggctcactacgattccctgttcgagctccgcgacgacgtcatgaaggcgcttgaggtcgcgcgcgccgacaagctgatcggcaagtcgctcgacgcgaaggtcacgatatttgcctccgacgacgaaacgatgaaggttcttcagagcttcggcgaggatgagcttgaaacgatattcatcgtctccggcgtgaagctcgagaagggcgaggcggctgacggctcgttcaccgactgcgtaaagctcgcgggtgtgaaagtcgagcaggcagacggcgtccgctgcgacaggtgctggaagtacacgaccgacgcgcgtgaggacggcgattcgcacctctgcccgcgctgcgctcatgtccttggcaagtaattgatgaagagactgttctggctgatgatcacggcgctcaccgtcgtgatcgatcagctcacaaagcttctcgcggtgaagttcctgaagccggtcgacactgtcccgctgattgagggcgtgctgcacctgacctaccttgaaaaccgcggagcggcgttcggtatgctgaaggatcaccgctgggtgttcatggtgacgtcgacggtagctgtcatcgcggtgctggcgttcatgatggcgggttataagaagtactataatcccctgctcttcacgggtctttcgttcatagccggcggcggcatcgggaacatgatcgaccgtgtggcgaacggatttgtcgtcgacttcattgatttcaggctgataaatttcgcgattttcaacggcgcggacagctttgtctgtgtcggcgcgggacttgtcgtcatctacgttatcatttcggacatcaaggcgagaaagtccggtaaaagcgccgaataacattcatcccatccgcgcgcccgcgtggatgggtatgtttgtcgataaaggagagaattatatgacaattgaagagactgatatcggcaagcgcctcgacgtcttcacgtctgagagaatgtcagtgacccgctcggcggcgcagaagctgatcgaggacggcttcgtcacggttaacgacaaaaagcccgcgaagaactacagactgagagcaggcgacgagttcgactgcgagcttccggagccggttccggcggacgccgtcgcgcaggacataccgatcgacatcgtctatgaggactccgacctgcttgttgtcaacaaaccgcgcggaatggtcgtccatcccgcccccggaagcccggatcacacgctcgtgaacgcgcttctctggcacgtgaaggatctctccggaataaacggcgttgtccgccccgggatagttcacagaatagacaaaaacacgagcggtcttctgatagtggcaaaaaacgacgccgcgcacctcgccctcgcggagcagataaaggctcacagcttcgagcgcgaatatcaggcgatcctcgtcggtcgtctgaaaaacgattccggaatagtcgacgccccgataggcagaagcccgcgcgaccgcaagaaaatggcgattgtccccgacggacgccccgcgcggacgcattaccgcgcacttgagtatttccgcggcttcacatatgccgcgctgaagctcgagaccgggcgcacccaccagataagagttcatatgtcctccctcggacaccccgtcttcggcgacgagacctacggcggcggtcacacgaaggcggaacagaaaatgtcgctcggcggtcagtgcctccacgcgaagtcgataggcttcatccacccgacgacaggagagttcctgcgcttcgactcacctctgccggaatatttcgaaagaacgctcgaactattgaaacgcgaatactctgaataaaaggattataaaaatgaaattctcagacaccgccatagtcaccgaccttgacggaaccttcttcaacacaaaaaccgaactcgtgaagcgcaacctcgacgcgatctcctactacaagcagaacggcggtctcttcgccgtcgcgaccggacgcgtcccggaaatgctcggcattctcgaaccgatgatgccctccctcgcgaacatcccctgcatcaactgcaacggcgccttcgcctatgattttcaggaaatgcgcccgtacaacgaaattttcatgaacgccgacaaagcgaccgaactcgtaacgctcgtcagcgaagaataccccgaagtcggtgcccgcctctcctcaaagaacggcaaatacatcatccacagaaccagctggaccgaacccggcggcaaaacgatagcctgcctcccggtcgaagaagccccccgctgcggctggtaccgcatagccttcgacggtccctgcgaccaactcgacgcgatacgcgaaaaacacgaaaaagaattctccgaatacttcgatttcgtcaaatcctgcccgacaatctacgaattcaacgacaaatcagcgaccaaaggaaccgccctcgtccgcctgaaaaaactcctcatcgacaccggcagagcgacagaaaaactgaaaatatacgccgtcggcgactacgaaaacgacctcgatatgctccgccacgccgacgtcccctgctgccccgcaaacgcaatagactcagtaaaaaaaatcgcgaaactccacgtctgccactgcgacgacggtgccatcgccgatgtgatcgacgctatcggaaaaacaaaataatgtcagaggagggggaagacccattttaaggaaatgggtcttccccctcctccgacacctcctcccctatcccccaaacctttttatacaaacaaaaatggtgccccttgccggagcaccgttttattatttcgcggatttcttcgccttacgcgcggcttttttcgcttccttctccgccttttcggcttctttcttcgcggcttcctccgcctcctcctcgggagtcgggataacggcatccatcgcctttatcgcgcactcgatcatcgagtcgtccggctcatggacagtgatatgctgaagccacattcccggcgccgaaatgatcttcgtcagcagattgtcatgccgtccgcagaactttatcagctcatacccgataccgaccgtaagcggcagcagcgccagctttatgacagtcctgagcaccggattcgtgaccgtaatgaacatcgaaataataattccgaccagcagcataagtatcatgaacgacgttccgcacctcggatggaatctgcgcatcggtcggatattctcaaccgtcagcggcagcttcgcctcatagcagaatatagtcttatgctccgcgccgtgatactggaaagtccgccgcatatccttcatcaggcacatcgccgaaacatacccgacaaacaggattatcctgaacagcccctcgaaaacgctccgtatcgcccggtggtcaagcgacggagccgccttcgcgataagcgcgaacagctgcgccggcagccatatgaacagcgcgatcgaaagcgccactccgagcaccgccccgagcgtcatggcggcgctcatcaggaagctgtcctttttcttttccttctcgttcttctctttttccgcctcttccggcatggaaatctcggcggagcgcatcaggcacttatagccgaccttcatcgagtcgacaaaattgaatatgccgcggacgaacggcgtcttgtggagcttgtcgtcatgaacggctgtcgggaagatttcgaggacgattttgccgtccgggtcgcggacagccattgcggtgcgcttcggaccgcgcatcattataccctcgatgagcgcctgcccgccgatggatgtgtaatttggtttttcttttggttctttcaattgtatgcttcctttttgagtgttatcagtggtcgtcgaagtcgagcgggacctcgtgcgttccgtccttcgagacgtagtgccagcggatgccgaggtcgctgagccagccgcgggtgacgattgtcttccacggtccggtgtcgtagccgcgtccggcgttgttgtcccagagccagtcgggggtgcaccagaggcagtagtcggggtcgatggcgtcgtagacttcttttccgacgccctgctgaccatggtgggcggtctggacgtagtcggctttgaggagttccttcggggtcccgttgagtagatgttctccgccttctttcccgaggtcgccgaggaagattacgctgcggccgcctttgttttgcggacaggcgtcgaggcggtagacgacggatgcgttgtttatgcggttttcggtcagcgagaggtcgggttctctcaggacggtgagcttcatatcgggaccgaactcaaaggtgtcgcctttgtggacggtggttattgagcgaccacgttcgtagagcatggcgtagagtttttctacgctgtcgcttttggtgtcggggtcgccggaggagttgatgaagtcgaggggtgggaagttcgcgtagatggtgtcgatgcggatgtcgtcgtagaagcgttcgagggtggagcggagtgcgccgatgtggtcgctgtgcgggtgggtgaggaaccaggcgtcgactttcccgccgagttttttgatataggtacagaggtattcggcgtcgcaggtgttgccgccgtcgatgacgatgaggtggtcgttgctgataatgataaaggacatcatctgaacctttgactgagaggtgagcatatatagggttgtcatgttcggatcctttcgtgcggtcgttatataatattattatacactttttttctcttaatgtcaatagaaaacgccctcttctccattaaattaacaattaataataaagtacttgatttccgtttttgtatgtagtataataatgtataaagttacttggaaaagggggg

SEQ ID NO: 2775 - DNA, 32759 bp, Unknown
  16S sequences of unknown bacteria
gaataaaaatagacactctgtggaatgatgacctctattcccactcgattgtggcgacgggttttggcgagaggtcgtagcacacccgattgacgccgggaacctcgcggaggatacggtcggtcacccgatggagcaccggccaggcgagttcctccacctcggcggtcatggcatcgacggtattgaccgcccggagaatcaccgggtattcaaagctgcgttcgccgccccgtaccccgacagaccggaattccggcacaatggtgaaatattgccaaacggtcttgttcaggcccgccctctggaactcgtcccggagaatagcgtcggattcccgcaccgcctcgagacggtccctcgtgatggcacccaggcagcgcacaccgaggccgggacccgggaagggctggcggtacaccatgctctcgggcaggccgagagccaggccgcaggcccgtacctcatccttgaagagctgccgcagcggctccacgagctggaactgcagatcgtccggcagcccaccgacgttgtgatgggacttgaccgttttgttggttttcgtgccgctttccacgatgtcgggataaatggttccctgggcgaggaactcgatcccctccagcttccgggcttcctcctcaaatacgcggatgaactccgctccgatgatcttgcgtttctgttccggatcggccactcccgcgagcttgctgaggaaacgctccgatgcgtccacatagacgaggttggccttcatccggctgcggaaaacctccaccacctgttcgggctcccctttgcgcagcaggccgtgattgacatgcacgcaggtgagccggtccccgatggcacgaagaaggagcgcggccacaaccgaggaatccaccccgcccgacagggccagcagcaccttcttatccccgacctgcgcccgcacctgctcgacctgatcctcaatgaaatcggccatattccagttggcctcggctccgcacacatcgaacacgaacgcgcgcagtgtctcctgcatcgctccggcgtcctccggccaggtgtccaggctcgggacaccggtaacctgggggcaatccacggccagaaccggcaggccgcaggtcagcagctcggacccgacgttcacggtctccccggttccaccccggttggggccgccgttgaggattacgccccgcacgttgtcgagcgcgcgcagctgggccagcgtcaggtcgtggggatagatttcactgtaaacaccgagcgcacggatcgcccgcgctgtcgcggtgctgtcccggcttcccaaatccaaaatgacgattctgtcctgtttcatgctggttctcctttatgttgatttctccggcgacggcgggaggggagaggcatgcttttccgcgcagtcccggcagtagccatagatctgcaccacatgatccgtcaccacgaagccggccgtgtcggcaatttcctgttccaaacgggcgagcgggcactccggcagatcctgcatccggttgcagtcccggcagatcatataatgccggtggggatgttcccccgaggggctgtaaaagctttcgccgttttccagttgcccgcggacgacctcgccccgttcctgcatcatctccaggttccggtagaccgtcgatatcgccaggttgggctgctccttacgcgccatccggtagatttccgcaggagtgagcggtccggcggactgttccagaatggacaggatcagccgtttctgccgcgtgctgcgcgttttgaccgccatagggccccgcctcctttaccctctattgtatccgggggcggggggcctgtcaacctttctcaccgtccccgacggtaaaaggggagtccagcaagccgtcccgggacaacttgacctccaagacctggatatcggtcgccacatccagcgcatcggcggcaaacaggccatcgagctccttttcaaaggcctttaccagcacttccgccgcctcttcgatctctctttttgtacgggtgacggaggcggtctgtatcccgctcccggtcaggtcggcataggtttcgaacagcttgaccgaagtcggcagataatagttgaagaatgtccgcacctgcgtcttctgctccggtttttcctccgccgtccgcaggatagccccagataactcctggatccgcgccgcggctcccgacagctccagagccgtcggcgtcccgcccagctcggccagacgggcaagcggctcccggatccccgcccagtcgggtttcttcggagcggcggctccgggcggagcggaagcggcggaagggacgctgcccacccggttggacaacacgagggaggggacacggtttttgattgtcatcgtcgcatcgtaaaaggcggggtagtcgtaaaattccaagtaggtccggtccgcgccggccgggctcagcagccgctgcccccgtacgagcgtcaccatgcggccgggctggccggaggtgggaacctcgagttcaatcgccgtaatatccgaaaaagggatggtgcagtcggtcagctgatgccgcttcgtcacacggtttttgtcccgtatgatccggatttcaccccggacggtatccagttccagccgggcaccggacgctttaaaggtacgtgccatctcgccactctccattccccttcatgatatcatgccccaaagcgggtttcaatgggtatttcgcggctggcgcatcgcacggagcacctcctccaggatccgttcctccctgtcggccagattttgaagatacgtttccatcttctggacgagatgctccggctttttgagcccgcaatccaggctgatgttgtatttcagcgccatctctttcaggagggccgcctgttcctccacctgctcatacccgagcaggacgggcttgtccggcagaaaaccctgttccatcatatattgaatccgcatccacatcagctttttgtgatcccacaggaaataaaaataccgcaggtccagggctcctgccatttcccgcaccttctcgaggtagcataacagatatcgctgcgcctttgccccgaagagcaattcctcccccgaatactcatgaggatcgccgtatgtttgtgtacaagggcgggattccagatattcccggatacggaaagcgcaggactccggatcgaacacagggacaaatgccggattgcatcggtaaaaatcgatcgttatcttttccctgccgctttcggcgagggcgcgcagataatccgaaaaggggatttccagttcctcataccgccgcgtgtcgctgtaggcggcggagaagagaagatgctgttcccggctgtatccatacaggcagtaacagtgccggaaatcccaccggcgatagctgctcgtatggggtacgtaccgttcattgaattccccgtacacataatacccgcggcggagcagggacaggatggcctgcagcccttgatccgggtcggcgacttgctcgacgggcagttccataaaataatactgcatggctccctcatagacccccatccaatcggtggcgatctgttcgaaccggctgtagtcccgtctggcaccgatggcgatatattggttatacagccatggccagggcgggttttcctgagcaaacaggatgctgagcagataggcataccccagatagccccggataggcggggtgtaggtaaagggatttttcagaacagagggttcatgcatccggcgtcacctccttcagtaaggccgggagccatcgtttttccatctcgatcaggtctcccagatgcttatggcaccgggataccccgtcccggtcccgcgttttgttccattcgcggacatcggccgccacctgacaggccagccggacggcttccccatagccccggcagacggtctcattgccgccgcacggcgagcgccattccaacagcgcccgcacacgtcgttccatcagctgtttgtgttcggccaaaaaaccgaacaattcgggatccagcccctccgcccggccggcctgttccggaagatgccggtgaaggtgttccaatgcctttatcccgcacgcccagtcatcctgtgaatatccctcagcggtgccgctgagatacgtttcgattccgcgtatgcatcgatatgggtcaaagcgggggataaacgcgggattcatggagaaaatgtggagcgctaaatccggcagttccgcgtggagggtcgcttccaggaaaagggtatatgggacggcatagcgggtatacggctccgaccgggtgctcccgaaaagcgacaaggtgcggcgaatgggatcaaaccccgtgatcatatagctgttcagctggtccttctgtctgtacgccggtttttcccgtatgtatttttcattgaagacccctaggataaattgcccgtgggaaaggatcgcggtgagcagcgtccaaagggattccttctcctgcgcaaattccggaggcaggcggtaccggtggtacttgaacaccccttctgcggtatacatccagtcgtattcggctttgagcagagagtagccgcttcgttcccccacgaccgtgataaactggccgagcagccaagggtcgaagcggtcgtcccgggcatacaggatgctcagtggaaagccgtaggcgggatacgccttaacgggcggggataaagtaacgggaagttccatggacagacctccttgtatggttttacagtcggatggcgacgtgtgcagaggccggccagaggctctttcatggagaccttcctcggccggaacacccaaacaaacggtaaacgaggaggggccacgtgcccggaattttggttgccataaatctgcagatggctgaccggtttcctcagagagccgagacccccatagtctgaatggttttctaagagaattgtatgttttttgaacatgacaatcaatgagaattggaggaaagtcgtatctggacagataaaaaagcaaaggggcaccgcagcgcccctttgcttgatgaaatatgggatttacgcttcttcttcaaaggcatccttgcccacgccgcagaccgggcaaacatagtcttccggaagatcctcaaaagccgtgccgggggcgatgccgttgtcgggatcgcccacctccgggtcgtatatatacccgcataccgtgcaaatccacttgttcatactgacactccttttctttcatatccagtattgttccatcccgtccggtataatatacgggcggaatgccggaaccactctgtccgttcccgtgaaaatatgctataatgggaaccaaaaatagggaaggggatttttcacatggtccatcatcctgccgacatgccggtggagaagaggccccacatgagaggcggcgagggtatcatcgccctgcaggccgcgttttcgccccgggatcacgcctcgcccgtgcggctgttctcccgcatcacgattcctgccggtgggtctatcggttatcacatccatgaacaggaggcggaatttttctacgtcctttccggagaagggatgatggacgacaatggcaccccggccgccatcgccgcgggagacgccacagtcacgcgggacggggaaggccacggcgtggtcaacaccggatccggcccgttggaactgctggccgttatcgtcaccggataaatcccgggataccccgatgaggccactatacacgtgcggacgggaaaattcaagcccttatttgtaaaaaattgggagcccctcggtatgcggcccatctcggcggcaggagtggctgccgatttctggccggaagcccgtcagcaaaccggcagcggggatccgctgctggtttgtcatgcgggtgccgtcgtgacggtaatctcgaacgacagggtggtcagcgggtcgtcggttatctgaatctgatccggggcaatatacagaagaaagggcgtaaactcatcgggagggagcacgacaccgtcctccaccgcctcagcgtatccggcggcgatcggtacgccgtccccattcgccaccttgatttcgatcgaccgcatctgctgggccgcccccatgccgttggagaggctcaggcggatggccatatgcccgtcgttggtgtagtacgcttgggtaaccgcgctcttgacgccgtcgggcgatatctccggcacggcgtcgggctgttggaagaccgtcgccccgttccgggggccttttccatcgtccatagggggcagataggtggcggaacagcctgtcagcgccacggccccgatcagggcggcgagcagcacgccccatatccgctttttcatcgtctcccgctttccgttccgatctttataaccatagtatacccgatatccacgcgggagtaaagaggcgggttatgtaaacgctcagacggtcgaaaaagtcgaaaaagagaagtcgacggcccaaacggccgcggggagttcaggaaccctgttttcgaggacatgtgcctcgaaaacaccccttataagcgacaaagggcggaaacacaccgtgtttccgccctttgtcaagagcagggtgatactggcggccgccgtgatccggcgtccctgtccagcagcttgccggccttgccgacaagctcatgctgtcccgcaaaacgggaaagcggcggttcagaacatgccggtgacattgtcgacgagctcgccgacgttccgcagggccttgcccacatttttcttcaggctttttttcccatgcatggcacggcttccgaccgcgccggcgatgcagccgacggctacgcccatgccgacgcctttcatgaaccccataacgccttttgtcatgactccaagcactcctttcaactgcgggattggtttccgcttttttagcatatccgccgcgcctgccatttttcccggaacttcttggaagaggattcggacttttttacggggccgttgcataaaaccgctgtattttccatatggtataggtggaaaatccccatttcgggcgatccttgaaggaaaaaggaacggattttccggatcgttcgtcaaaaacaggaggaaacaccatgaccaccatcagccgccggggaatggtccggctggtcagctatacggcagccctcgtcgtcgccctgtccgttgcggcggccggcggatacgcggcggccaaccggtatcgcaccaccatcgaatacggctatcaacgcgcgctcggcgagcttagcgaatatatcagcaacctggacatcaccctgcagaagggccgctacgccacgacggaaaaccagctccagggcctggcctccaaattatggagggaggccggcagcgccaagagctgcctggagcagctccccctcgacggcggagagctcggaggtatccataagtttctgtctcaggtgggcaatttctgcatgtcgctgagtcaccgggtatcggacggcggggagatcacggaggaggaaacggcggccctccaaaagctctccgcctatgccggcagcatgacggtgcgcctcgcggagatggaggcggggctgaacaccggggccctgtcctttggcgaggtatcccgccgcctgcaggaggacgacccgggcggagccgctgtgcccgatttgcagcagagcttcctggaaatggaggaggagctggcggactatcccaccatgatctatgacggccccttttccgaccatatctaccagcagcagccccgggcgctcgaggggcaatccacattccccgaaagctttgcgcggaatgcgctgacacagctcagcggggtgagcgaaatccgcctcgccggagagacgggggggagcatgccttgttatcagtttgccggagacagctttacggccgccgtctccaagcaggggggcaaggtggtttatttcctccattcccgcccgctcggggaagcgaagctttccctggagcaagctctcgaaagaggggacgccgtcatgcgggaatcggggctcggggagttcgcctaccgctattacagcctgaacaacggagtccttgccatcaactatgccgccgtgcaggacggcgtcatcctctacccggacctcatcaaaatcggcatcgccatggatgacgggcagctcgtcagctttgacgcgaacgggtatctgatgaaccacacggcccgcgtattgcccgcggcctcggtgggtgaagccgaggcgcgcgcccggctgagcccccatctgaccgtccagggggaggggcgtctggcgctcattcccacgacacagcagaccgaggcgctttgctatgagttttcctgcacgggcgatccgggcgatggctctgaagagcccgaccgggtgctggtctatgtcaacgtgcagacggggctggaggaacagatcctcattctgatgcaggacgatctgggtgtcctggccatgtaaccgcgcccaggccggcatttgtcacgtttaacagaaacggctctgcggaattttccgcagagccgtttcttctagacggtgcgcgccgaaggccacgggcggcgtaagcctgatcgggaagccacctgttttgtataccgccggactacggcacgcctcatgccggcccgatacggacgctcagcgcggcggagagccattcctctccggtcagggcacccggctcaaaggatacggcgatatacacgccccgctgtccgtcataggagaggatggccggtttcatccgcatcggcgcgtctgccatcctgccttgccactcggggccggtgtccttgaccatctcccggcagacggcggtggaaccggcctctgtctttgccacaacgcggtaatcgttgttccagttgtccatggatccgagcatcagatcggcatagatgctgacgtaatcggtttccgcgtccagcgggccggccgcgtcgacaagtccgaaatccgccttgccgaccaccttgccgccgctgacgagctccatctccgttgacggcgccgccccccgcgcgggcctccgggccgtccatccctctgggagcgccatttccagtgcaaacggttcggtacggaaaagcggcgaatcctccgtattttggcctcccggatccggcggaaagacgatccgagtccgggaagaccgttcagcctcgttcccgtccggttgagttccgcccggcatgctttccgcgtccgccgttccgcccggctggctacccgcaattaccggcccgcccggcgtggcttccgggaccgaagcggtcttgccgccccgtttgccgcatccgctgacggaaaccgccagcaccaggcatagcagcgcatgtccgacatttcgacctctcataatagacccctctttctaaattgttcaaacgaccgcgcggcggccggcacacccctccttttccataaacaacgccacgctctataccttccggttcatccaattcccgctgccaaagcgcagataggtcatcaaaaaccgcacaaactgatcggacagcagccccagccacgcgccgaacagccccagccccgccggatagcagagcagccagcccatcaggggacggacagccagtacgctgaccagcgacaccaccgcggtgaacaccgtatcccctgcgccgcgcagacagcccgaaaagaccacctgggagatttgcaggaacacctcgaccatcatcaccatcatgatcatccgtccataggacaagatggccggatcctccgaaaacaggccgaatatccgttgccccagagtgaggaaaatcaccgacaggccgcaggcgaacaacagtccgcaccgctggcagacgttgccgtatacccgggcgaggtcgggccggcctcgcccaaggctctgcccgaccaaggcgaccgaggctaccgacagcccgtccccgaaggagaagcagatgctcatcagattcatcccaatctggtgagccgccatcgggatggtgccgagcctggccacgataacggcgaaggtcatgaagccgatccgcaggaaggcctgttcggccagggtgctggagcctatgttcgtgatcgcccccaccgtggctttgtcgaagccgatttttttgacttcccggatgcagatgaaattgtcccggtggagcatcgagaggatgctcagcgcgcatccgcacaccgagccgatgacggtggcgatcgccgcgccggcaacgcccagggccgggaagccgaaatgcccgccgatgagaagataatcgaacacgacgttgaccaggttggacaccagattggtggttagggagatccgggtattgcccgcgccccgttgggcggcgttgatcaccatggagacgacgttgaacgccataccgcccatgacgatgcggaaataggtgacggccgggcggtgggtatcgggctgagaaccagccagatggaggatcgggtcggcgaacgccacgcacagcgtactgaccaccaccaacagcccgcccgtaatcagcagcgcctgctggagcaccttgttcgcgctctcgcggtttccttcgcccttccgcctggccacgatggccgacaccgccacgttcagggaaatgaagaccgccaggccgatgaatttcggctgggtcgtcagtcccaccgcggcgatggcatacacgccgagggagctgaccataaaggtgtccaccatccccaccaggctgaccaggaaagattccatgatggacggccacgccatgcggacggtacccgacaaaatatcccggtcggccggcagttctcccaaaaccggctgtttccggaggattttccgcgctgaaaagagaaacaagaccgcaccgtctttctgaaattcaggatacctccagtataccgcgatttcggccgttcggcaagagcacggcaccggagtttaccggcggactctatgtacggccagggcatcgccgtataaccggcgatgccctgtttacgcggattttccagagggaattcccgtctgtttttattccttgaggagtcgttccacggcgtcggcagcaggctccatctcctcgcacaccacccgctcgatctccccctcgtcgcacaagcgggcgacatcggggttcatgggcaagcgggtgagcagcgggacgcccatttccgcggcggcctgttccagcccctccggggttccgaacagctcgatgcgccggccgcagtccgggcagacggcatagctcatgttttccaccatcccgaggaccggaatggacagcatatccgccatttttttggcttttcccaccaccatctgcaccagggactggggagtggagaccacgatggtcccgtccacggccagggactggtagaccgtcaggggcacgtcgccggttcccggcggcatatcaatgagcaggacatccagttctccccaggccacgtcggtccagaattgggtgaccgcacccgccaggatcgggccgcgccagacgaccggctggtcctcgtgttcgagcaggaggttaatggacatgaccttgatccccatggcggtctcttcgggcaggatgcccatctcgctgccccgggctttgcgcttgatgccgaaggcccgcgggatggaggggccggtgatatcggcgtcgagcaccccgaccttcagcccacggcgggagaggaggacggcgagcattgcggtcacggaggatttgcccacccctcccttaccgctgctcacggcgacgacttttttgatgctgctgaactcccccagtttggcgtgaggatcccgttcggcgcagttttcctgacagcttccgcagtcgtgtccacaagattcgctcatattgtcaatcctttccgaaatgatgccgcgtgcaggattcccggtcccgccggacagggccgaggacgcaaaaacgagcggaaatccgtccgccctgtgatagtatacgccaaaccgttccgaaaatcaagggaatggatcgacaactcggatttccctgtgtatatccaaaattgtggtggatcccccgccgcgccccaatatttccaggatgaggaggatttcctctatacacggaaagtccgggacatttctgttggacacgatcagccgtatctgttccaggacggccacgcaggtcatatggacatgggcggcgatgcgggggagttcccatccggcacgcctctctccgtgaaatctcgatcaggatatctttcaaaaattccatatggtcccctcctatgctattttaggccaaattgccctattgatttatagggcaatttggcctttctgaaatgaagcttagagggaattgttatgacatttaaataatctattattcagcggttacgggttcgggtcggtttatgccggacaggacggcggtgggctacccgcactgcccggctgcttccttcccggatcccttcccgtttgaggacgtaccggacggtgtaccgcaggatcctccagtccagccggaaggacaggtgccgggcataataccggtcgtaaagcgctttgcggtagatgggcagttcgtctcgtccttttatctgggcgaggccggtgatgcccggccttacccggtctgcctcccactgcgcgcgcagatccaatagtgtctgttctgtcaggacgaccggccgcggccctacgaaactcatatcgcctttgagcacattccagagctgaggcagttcgtccaggctggtctggcgaaggaaccgccccactggggtgatatagcggtcggcctccatcaattcggcagtggctacgtcccgcggggcgctgcggtacatggtccggaacttatataaagtaaatggacggctgtataaacctgcacgtttttgtttaaatattacacctccggccgagtccgccgaaatcgccagcataatcacgagaaaaagaggagataataccaccaggagcagggccgacgcaaaaatatcaaaaaatcgtttccaaaaccgggacaaacaggcatcacctcctcgtgattttctgtccatagtatgcccggacgacgttcttgtccgtcaagcgattgatggataatcgtgaaatactttccgattatcaataaatatagcgtgcggaaatgcatcccttatcgacttgagatcgcaaaaaatgatatagtttgtacaaaaaagcgaagaggcggttgtataaagatggcgttaaccacagacttcgtgagagttacaaaaatgaaacttgatttttgttcaatgagatagtataatgcgttcaacagagcgtagtgggacgctttctgtgattttgatcgcttacttctgacgatagactgcttgtatagtcccctttggaggaggcaacattatgcagaaaattgtaccgctctccggttacgcggggagcgcgaaaaaacaaaaacgggtttatgcgtttgtcaaacgctcttttgatatcgtggcgtccctggcggcgctgttggttttatcccccctgttcttggtggtctcggtcatatgtgcgctcgacaccaagggcaagccgctgtttgtccaacagcgtatgggccgtaacaatgtaccgttcctggttttcaagttccgtaccatgaatgtggcggctccccgcgaggttgccacccataagctggaaaaccccgatcagtatatctcccgcgtgggggagacgctgcggaaactgagcatcgacgaacttccccagctcatcaacgtcctcatcggcaatatgagcattgtcggaccccgcccagtcgtcctcaccgagaccgacctgatcgccctgcgcaagcgcaacggcgcgaattcgatccgcccgggtatcaccggcctggcgcagatcagcggccgggacaacgtcacgatcaaggaaaaggcgtggctggacggcgaatacgctgccaaccgctcggtcttgctggatctccggatcctgttcaaatcggtggggtatgtactgaaatccaagggcatctgtgagggcgcgaatccccgcatttccacttgcagggaaaagaccgaacggtcggcctgattaggatgaaaaggaaggcgtctgccgtgtggcaggcgcttttttaatgtccggacggcccttacgggttgtcttcgaggacggaagggcggaaagtcccggttctacgggaccatcaggaccagacgcgttgatacggtttagtgggcatgacggatgcctgaagcttcagggggggcggctcctcctgcgtttatcgcggatacaggggaaaacggcggaagggcctccgcagaaaggaaccgggctggacatcgggagccggttcttaaaataccatacggaagggcttgcctgccgcaaccggttgtgttacaataatcggtaattcatcaggctatcggaatcagcccggcagcgggcgtttgggaggagatccgtcatggcggaacgaaaagaactggcgaaaacctatgatcctggcgaggtggaggaccggatctacgatttctggatgaagggcggctacttccacgccgaggtcaatccggataaaaagccgtataccatcgtcatcccgccccccaatatcacggggcagcttcatatgggacacgcgctggacgagacgtttcaggatatcctgatccgctggcggcggatgcaggggtatgaagccctgtggctgcccggcaccgatcacgccgccatcgccaccgaggccaagatcgttgccgccatggcggaagagggcgtgaccaaggaggatctcggccgggacggcttcatggagcgcgcctgggcctggaaagaaaaatacggcggccggatcgtggaacagctcaaaaagctcggctcctcctgcgattgggaccgggagcggtttaccatggacgagggctgctccagggcggtgcgggaggtattcgtccgtctgtacgaaaagggcctcatttatcggggcgaacgcatcgtcaactggtgcacccactgcaaaacctcgatttccgacgctgaggtggaattcgaggagaaagacgccttcttctggcatctgcggtatcccatcgccgatgagcaggggaatcccaccggcgaatatgtcgagctcgccaccacgaggcccgaaaccatgctgggcgacacggcagtggcggtccatcccgacgacgagcggtaccgccatctggtggggaagaacgtgattctgcccctggtgaaccggctcatcccggtggtggccgatacctatgtggagatggatttcggcaccggcgtggtcaagatcacccccgcccacgaccccaacgactttgaggtggggctgcggcatcacctcgaagtcatcaccgtcaccaccgaggacgggcacatgaacgagctggccggaaaataccggggcatgaccctggccgcgtgccgcaaggccgtggtgaaggatttggaggagcagggttatctcgtcaaaaccgagcccatgaagcataatgtcggctcctgctaccgctgccataccgtgatcgagccccgggtgtccatgcagtggttcgtcaagatgaaggagctggccgggccggcgatcgaagcggtgaaaaagggcgagaccaaattcgtgcccgagcggttcgacaaggtgtattacaactggatgaacagtatccgggattggtgcatctcccggcagctctggtggggccaccggatcccggcctggacctgcgccgactgcggagagatcgtggtcagccgggaaacccccgcggcctgccccaaatgcggcggcgcgcatcttcatcaggatgaggatacgctggacacctggttttcctcggccctgtggccgttttccacccttggatggccggacgaaaccccggagcttaagtacttctatcccaccgataccctcgtcaccggctatgacatcatctttttctgggtggcccgtatgatgttttccggtctcgagcaaatggggcaggcacccttccataccgtgtttatccacggcctggtgcgggacgcccagggccggaagatgtccaaatccctcggcaacggcatcgatcctttggaggtcatcggccgatacggcgccgacgcgctccggtttaccctgtccaccggcaacagcccgggcaacgacatgcgctttatgcccgaaaaggtggaggcgtcccggaacttcgccaacaagctgtggaacgccgcccggttcctgttgatgaacctggaagggcatgaggcggcccccgggcttccaggcaccctgacgctggacgagaaatggatcgtctcccgctataactccctggtgtccgccgtgaccgagaacctcgaaaagttcgagctgggcctggcggtgcagaaactgtacgatttcatctgggacaattactgcgactggaccattgagctgtgcaagtcccggttgtccggcggggacgaggccgccgcggcaaacgcccgccgggtgctgctgtatgtgatgcaggggcttttgaagctgctccatccctttatgcccttcatcaccgaggaaatttggcaggcgctgccgcacgagggggaggccctgatggtttccgcctggccggtgttcgacccggctctctccttcccggaggaggagaaggaaatggaacggctgatggaggcaatccgggccgttcgcaaccggcgggccgaaatgaacgtcccgccctcccgcaaggcgcaggtgtacgtagagacggcctttgcctccacctttgccgacggagcgccgtttatgcagcgcctggcctcggcgtcggaggttcttgtgggctccggcttcgatctgccgggggcggtgagcatcgtcacccccgacgccaccatcaaaatcccgatggacgagctggtggacagggaggccgaacgcgcccggctgcaaaaggagcgggacggcgtacaaaagcagctcgacggcgtgctggccaggctcgaaaacaaggcctttaccgataaggcgccggaggccgttgtggcgggggcccgggagaacgccgcccggcttcgggataaactgcatctgctcgaacagagcctcgcggccctgtcttgaggaaaaacggaaccgggggttggacccggttccgtttttgcggtgagggagaccaaggagggaacgcggtatgcgtttggggattctgggatacgggcacctgggaaggacgctggcgtaaaggcctggttgtgacgggagccgtccggacacaagatctgcgaatctgcgcgagatcggggagaagccgccccgccgcgcgggaaaagggccgcagcacggtggagaatcccggaggggcccggcgagccttgatatgcgggttccggctgccgccggcatgaaaaatatggatggatcatacgattatcccatgggatggcataagaggcaaagaggttgggacaataaacagggatgccgccggccggtcaaaaagaatttacattcggacggttgcattcagcgcctatctattgtaaaataaactcatcaagtaggaagaaagccgagggaacagcacatgtcgaccacgttggaaacccgctacctggacgggttcgtccgggaccatgaatggagcgccatacagccccaggtgaccgccgcccacgagctgctgacaagcggcaagggcccgggaaacgattttttgggctgggtggatctgcccgtcaactatgacaaagaggaatttgcccgtatcgaggctgccgcggcccgcatccgccaggataccgatgtgtttattgccatcgggatcggtggatcttatctgggtgccagggcagccattgaatttttgaaatcttctcattacaacgcgaagaaaaaggacacccccgacgtgtatttcgccggcaacagcatcagctccacggcgctcagcgagctgctcgagctgtgcgagggccgccgggtgtccatcaatgtcatttccaaatccggtaccaccaccgagccggccatcgccttccgggtgttccgggagtatctggaaaagaccgtcgggccggaagaggcgaaaaagcggatatacgtcaccaccgataaggcccgcggcaccctcaagggcctggccgaccgggagggatacgagacttttgtggttcctgacgatgtcggcggccgattctcggtcctgacggcggtggggctgctccccatcgctgtggccggatgcgatatcggcgccttgatgcggggcgccgccaaggccagggaggagctccgcgacccggatatcgagaaaaacgactgctataaatacgcggcggcccgccatatcctctatcgcaaaggccgtgcggtggagatgatggtcagctacgagccctgttacaccatgatgaacgaatggtggaagcagctgtacggcgagagcgagggcaaggacggcaagggtctgttcccggcctccgcggttttctccaccgacctgcattccctcggccagttcgtccaggacggcagcaacgtcctgtttgaaaccgtggtgctgctcgacaaggcgcagcgggagctcgaaatcggccatgatcccgaaaacgtcgacggcctcaatttcctcaccggccggaccatgtccgacatcaaccggaaggcgtttgaaggcaccgtcctcgcccacagcgacggcggcacgccgagcctcgtgctccatgtccccgccgtgtgcgaggaggagctcggctacctgatctatttcttcgagaaggcctgtgccgtttccgggtatatgctcggggtcaaccccttcgatcagccgggcgtggaaagctacaagcggaatatgttcgccctgctcggcaagccgggatatgaggacgagcgcgccgctttggaaaagcgtttgggccggtgagaaaacgacggcagaaaccgctcatttgcggttattatataggtaggaggaaaacaaaatgatcacgcttatcctcggaaaaaaagggtccggcaagaccaaacggctgatcgacatgtgcaacgcggctaccgcggaatccaagggcaatgtggtgttcatcgaaaaagacagcacgctgacctacgatatcagtcacaaagcgcgtctggctgttgccgatgaatatgggatcaggggcttcgacagtttctatggctttatcgccggcatgtgcgcaggcaactacgacatcaccgacatttttgtggattccacgctgaaaatcgggggcagcgataccgataagctcgcctctttcattgaaaaactcaaggagctttcggacaagaccgagacgaatctcgtgctgtcggtgtccgcagacaaggccgacatcccggcccggatcgcggaattcgcggtggaaatctgacgacagcctacacaccggaggacgggaacggccgcgccgttcccgtccttttgcggggaaacggcaaaggatgggacaaaatgggcggcttttttgaaacgcatttccataccatggaagtcagctcctgcgggcgggtgcccgcggcggaaggggtgcgccggtaccatgcggcagggtacgacggaatcgtcgtcaccgatcattataccgaaggttttttcggtgatatgccggcagatacatcctggcgggacaagctggaccggtatctcaccggctggagggcggcccgggatgcgggcggggtgctcggcatgaccgtcctgctcggcctggagctgcgctttgccggcagcaataacgattacctggtctatggggccacgcccgcgctgctcgaggcgcatccggcgctgtataccctctctccggaggttttctcccgttttgcaaaggaaaacgggttgtggtgggcgcaggcccatccctttcgtcccggcctgacccgctgtccgccctcctgcctcgacgggctggaggttttcaacgggaacccccgccacgacagccacaacgggctcgccgctgcttacgcggaggagcacggcctgacggctatcgccggttcggattatcacgagctccccgacctttccggtaccggtgtgcgctttcacagcgaggtgaccgacaaccgcacgcttctggaagggctgcgttccggcgcttttgatatcgtgcggggggccgtgccgccgattcggtgaaaaagtggttgacaaacctgccccggaccgatataatattctgcgtgacactcgaggtggattatgcttttgcaactcaagcccttgttcatgggccaaaaggaatccctgcccctgcattgcgagctggatttgtcggagctcgtgatcgggggatcccatccgttcccgcatcctgtggtggtggagggggaagtacgggtatccgccgacgtcgtcagcctgcgggccgaggcgcgctatctgtttgaaggagcgtgcgaccgctgcctgcgggacatccgctgcgaacggcttgtgccggtcgagcatattctggtgacctccctgaataacgaggacaacggcgagtttgtgctggtggacaactatcagcttcctctggacagcctggtggaagcggatttgatcctcagcctgccgtcaaaggtcctttgccgcgaggactgccggggcctgtgcccccactgcggcaaggatcagaacgagggcctgtgcggctgcaagccgcaggccgccgatccccgtctcgaggcgctgggacagtggaatcactcgtgatggagtaggcttcaagtaggttgaaggaggtgctgacggtggcgatagtacccaaaaggaaacattccaaggcgcgccgggacaaaagacggaacaatgtctggaagatcgaggctccggcgctcgtaaaatgctcgaattgcggcgaatacaagcgtgcgcatcgtctttgcggcaattgcggctattacaacggcaaacaaatcgtcaaaaaggacgcctgatatctgggaggaaccctgttggatatcaggaatcgtgtggtgccaaaatggagggtgtaacctgcaaggggttgcgccttctatttttgtgacggggaaaggaggacgcccgatggcggtgacgatcagcggggtggtgccgggcagtccggcggcccgcaaatccatccggcctggggaccggctgctggccctcaacggccacgaaatcgcggacgtgctcgattaccgcttctatctggacgagccctgcctgaccgccgtgatcgaaacgtcggagggaaaacggcgggttctccggctccaccgggacgccggcggggaaaccgggctgaccttcgccacctacctgatggacaagcagcaccgctgccggaacaaatgcgtattctgctttatcgaccagatgccgcctggtatgcgggagagcctgtatttcaaggacgacgacagccgcctgtccttcctgttcggcaattacatcaccctgaccaatctgaccgaacacgaggtgacccggatcctcgagatgcacatcagccccattcatgtctcggtccacaccaccaatcccgaactgcgctgccggatgatgggcaaccgttttgccggggagagcctgtccctgctgcggcagtttgcggaagccggcatccgcctggagtgccagttggtgctctgcccaggttataacgacggggacgagctgatacgtagcatggccgatctcgcggccctgggggatgccgtggaaagcgtggcggccgtgccggtggggctgaccaagtatcgggaagggctcgagcccctgcgtctgttcacgaaagaggaggccgcggccgtgatcgacgcggtcgaagcctttggcggccggatgctggcggaacgcgggagccgggtgttttttccggcggacgagttctatttaaaggccgggcgcccgattcctgaggcggcgttttatgaggatatggcgcagctcgaaaacggcgtgggcctgaccgcgctgctgtttaaagaattccgggaagccctcgccgcctgtgaggaaaccccggagggcacccgcatgaccattgccacgggcgtggcggcggctccgctgctgcggatgcttattgacgaggccggaaaaaagtgggataatctgcatgtggatgtcatggcggtccgcaatgtgtttttcggggagaccatcacggtggcggggctcgtcaccggaggagacctgatccggcagttgaaaggccggacggcgcctgtccttcttattcccgacgcgatgctgcggcatgaaaaggaccgctttctcgacgatgtccagccgggtgacgtcgagcgggaactcggtgtggagctgcgggtggtgcctgtcgacggggccgccctgctgcaagagctgctccgctgaatgaaacgggacaatccggacagaccaatattatctgataaggagggacgcgtatggcaaggcccgtcgtcgcggtcgtcggccgccccaacgtgggaaaatccacattgttcaacaagcttatcggccagcggctgtccattgttaaagacacgccgggtgtgaccagagaccgggtcttcgcgccctgcgagtggagggggcggacgctcctgctcgcggataccggcggtatcgagccgaaaaccgatgaccagctgctccggcagatgcggtatcaagccgagctcgccatcgagcaggcggacgtcatcgtcctggtcaccgacctgcaggcgggcgttaccgcgagcgatgccgacgtggcggctatgctgcaaaaatgcggcaagccggtggtgctgtgcgtcaacaagtgcgaccggatcggggaagtgccgcccgaattctatgagttttacaacctcggactcggagatccggtggcggtctcctccgttcacggaaccggcaccggcgacctgctcgacgcggtgtttgaacacctgccgccgaagggggcggaagaagagacgggcgatgccgtcaaggtggcggtcatcggcaagccgaacgccggcaaatcctctctggtcaacgccgtggcgggagaggaacggagtattgtttccgatatcgcgggtaccacccgggatgcgatcgataccgaggtcagcaaccggcacggccggttcgtgttcatcgacaccgccggactgcggcgccgcagccgggtggatgacgcgatcgaaaaatacagcattttgcgcgcccagatggcggtggaacgggcggatgtctgcgtcatcctcatcgacggagtggagggcttcaccgagcaggacagcaaggtggcaggccttgccctggaggcgggaaaggcctgcgtggtggcggtcaacaaatgggatgccgtggaaaaggacgataagaccatggaccggatgcggaaaagcctccgggaggacctgagctttatgtcttacgcgcccatcgtgttcctctccgccaagacggggcagcgcctcgatcgcctgttcgaggtgatccggtatgtcaatgagcagaacagcatgcgggtttctaccggtatgctcaacgacgtcctggccgacgccacagcgcgtgtccagccccccacagacaaggggcggcggctgaaaatctattatatgacccagccatccacccgcccacccaccttcgtctgctttgtcaaccgggcggatctgttccactattcctatcagcggtatttggagaaccagctgcgccagaccttcgggctggagggcacccccgtgcgtttcatcgtgcgggagcggggggagaagggcggggcgtccaaatagcggcccgcccgccgttcttcgcctgcgggacatctgcgccgcgaaccatccgtttttgaaggaggcaatcccattgttcatggaattcctgaaaaacagctggttggccctgctgctgaccatggcggccgcctatctgctgggcagcgtcaattccgccatcatcgttaccaagattttcgccaaggatgacatccggaggtacggcagcggcaatgccggggcgaccaacgtgctccgttcccagggcaagctgccggcgctgatcaccaccgtgggggatttgctcaagagctttctgtcggtcctggcgggcggatggctgatggggcatctgcagctttccgcgtcgcccgtcacgggcgtacaggggctggacgggatgatgctggtcggccagtatctggcgggttttttctgcatcatcggtcatctgtatcccctctatttcggtttccggggagggaaaggcgtgatgaccaccttgggcatgatgctcatcctcgattggcgggtggctctgatctgcctcggattttttattctggcagtgctggcctggcggatggtgtccctgggctcggtcatcgccgcgtccctgttgccggtgtttaccttcgttttccggatgttcgtcgatcacaaggcggacgagacggtgtggttctgcaccgcgatgtccctgctgattgcggcgattttggtcatcaaacatattcccaatatcaaacggatcatccacggaacggaaagccgcctggggaaaaagacgtcataacagaacgccggaccgctcctgacgaagcatgtcacggcatcttagcaaggctgcagccattttggactggaaaaaccgcccgcagattccactgcgggcggtttttcaaaagcatgcaggggcggttttcacttcccctcgacatggtcctcaccgtaaaggttcaggcggaacaaacgggattcgtcatccatattcttgcaggtaacggtggcctccccgatgtttccccagtcgatagcgctggacagggcgagcagctgcgtcaaacggctcttcaggttgagcacgtcgccgtcaggggttttcagatatacatcgcctttggcggtggaagcgaactccatgagtttgttgaaatcgaaattgtgaatttgcagatcggccatgattttcagactcctttcagaggcaccccttccggaggcctatggttctggtccctgctttttattatatacaaagattgccagattatcaacaagcaaaactgccgaactttgaatgggagcaccatctattgtggtatatatttacaattgtcatgtcaaataaatgtacaacttgcatatttttaaacagtgggttcttctaccgatttctcgcacaaaaatagacaaaccgcatggttttaacaaaagattcacaatttgaatattgacagaaggcatggggaatggtagagtatagatgttagcactcgaagtgcaagagtgctaaaccctgacactgaagcccgcctcctgtccggccgcgcggccggtgatatagaaaggaagatggtcatggagctgggtgagcgcaaacagaaaatcctggccgccatcatcgatgcgtacatccaaaccggcgagccggttggctcaaaggcgcttgtggaaatgctcgataacgcggtgtcctccgccaccatccgcaacgatatggcggatctggcggcggccggctatctcgaacagccccatacctctgcggggcgtatccctaccgccagggcgttccggctgtatatcgactccctcatgcggcggcagacactgtcggaaaaacgccgccgggaaatcgaggatatgctggccggggctgcgggcgacccggagcggctcattgaggtggcctcccaggcactggccgccgtcaccggttgtgcggcggtcaccaccacccctgaccagcagggttccaccattcgccgcatcgaagtcatgcgttccggttccaggagcgcggcgctgctcctgatgaccagctcgggtgtgctgcgcagccgtttgtgccgttttgagtgcgaggccgacggcccgctgctcgatcggctgtcgaaaacactgaacgcggagtttctggatcagcctctcgcagacgtcgggctggcgcaggttcagagtctgctggtcgcgcttggggaatacggcctggcctgtgccccggcgcttacggctttcgtggagctggttcaggattcggccgaggcggaggtgctcctttccgggcagctgaatctgctccagcatcccgactacgagctggaacgggcccgttcccttctatccttcctgtcacagagggacctgctcgccagtatgctgaccgctcattcgggcgggctgcgggtggtgctcggcagcgagagcccgcgccccgagctggacggctcgagcattatcatcaccggatattcccagggggggatggcggacggttcgatcggcatcatcggccccctgcggatggactatgccgcgacgattccccagattgaatatttcgcgcagacggtcagccggctgttgggagaactgaacaaagacggctgacgccgcggagaggatgttttgatatggacgaaaccaagacgtacgaggagccgaagccggctgctgaggccgaagaggctccagcggccgctgaagccgcaccctcggagggaaaaccggagaaagccaagaaggcgaaacgggagaagcccgagaaagacgatgcccggctgaaggagctccgggagaaactggagaaaaccgagcaggagcttggcgagaccaaagatcaatatcagcgcatgctggcggaatacgccaattacaaacggcgtaccgagcaggaaaaggaacagctcggccagttcagccgaggcgaaatgctcaaagccctgctccctacagttgacaatttggaacgggcagcagctgcgcctgacggagaagagtacaaaaagggcgtggatatggttatccgccagttccatgaggaattggccggcctggggctcgaggagatcccggcggagagccagcccttcgacccggaactgcatcacgcggtcatgcgggaggatgccgacggcgtcgagcccgacacggtcacggaggtattccaaaaaggatatcgctataaagggcgggtgctgcgtcccgccatggtcaaagtggccaactagcctgtcccggcctatctgacatgagccgcatcccgccgttcatccggcgatgcaatatatgggattacaacatctggaggtaataaatatggcaaaaattatcggtatcgaccttggtacgaccaactcctgcgttgcggtcatcgagggcggcgaatccgtcgtcatccccaacgcggagggcgcccgcaccaccccttcggtggtggccttcaaaaaagacggcgagcggattgtcggccgggtcgccaagcagcaggctgtctccaatcccgaccggacgatttcgtccatcaagcgggagatgggcacgggttataaagtgaagatcgacagcaaggactatactccccaggaaatctccgccatgatcctctcgaagctcaagcaggacgcggaagcctatttgggcgacaaggtgaccgaggcggtcatcacggtgccggcctatttcaccgacgcccagcgccaggccaccaaggatgcgggcaagatcgccggcatggaggtcaagcggatcatcaacgaaccgaccgccgcggccctcgcttacggtatcgacaaagaaaaggaccagaaggtcatggtctacgatttgggcggcggcaccttcgacgtgtccatcatcgagatgggtgacggcgtccaggaagtccttgccaccgccggcaacaaccgcctgggcggcgacgatttcgaccagaagatcgtggactggatggtcgcgggcttcaaggccgataccggtgtggatctctcgaacgacaagatggcgatgcagcggctgcgggaagccgccgaaaaggcgaaaatcgagctgtcaggcggcctttcgagcaacatcagcctacccttcatcacggccgacgcgactgggccgaaacatctggatatgaccctgtcccgtgcgaaattcaacgagctgaccgcgtcccttgtggaggccaccatgggcccggtcaagcaggccctgtccgacagcggcctgtcggcgtcccagatcgacaaggtcctgctggtgggcggttccacccggatccctgccgtgcaggaggccattcagaaattcatgggcaaagaacctttcaagggcatcaaccccgacgagtgcgtcgccatgggcgccgcgctgcaggcgggcgtgctcggcggtgaggtcaagggactgctgcttctcgacgtcacccccctgtctctgggcgtcgagaccatgggcggcgtcatgaccaaggtcatcgagcggaataccaccatcccgaccaaaaagtcccagatcttctctactgcggccgataatcagccctcggtcgaggtgcatgtgctccagggcgagcgggaattcgccaaggacaacaagaccctgggcgtgttccatctcgacggtatcgccccggccccccgcggtgtgccgcagatcgaggtcaccttcgatatcgacgccaacggcatcgtcaacgtcagcgccaaggatctcggcaccggccgggagcagcacatcaccatcacctccaacaccaatatgtccaaggaggacgtggataaggcggtcaaggaagccgagcagtatgcggccgaggacaaacagcgccgcgaggcggtcgaagttcacaacggcgccgatcaggcggtgtaccagtgtgaaaaggcactgaccgatctcggcgacaaggtggaggaagccgacaagaccgagctgcaaagcaagatcgaggctctcaaagaagccaacaagtccgacaacatcgaggagatcaagcagaagcaggacgatctgatgaagaagttttacgaggtctccgaaaaggtatataaggccgcggcgccgcaggacggcggcgctcccgccggtgatggcacgacgcctcctccggaaaacggcggcgacggctattacaacggagaggttcattgagccggccggagatgaaaatttcggattgcacttgtgcaaagagccagccggggatccggctgactctttgcctgtgtctggatggagtggtcacacatggcggataataaacgcgattattacgaggtgctcggcgtcgccaagggtgcctcagaggacgagatcaaaaaggcgtaccggcagatggcgaaaaaataccatcccgacctgaacccgggggataaagaggcggaggcgcgcttcaaagaggtcaatgaggcatatgaagtgctctccgattcccagaaaaaggcgcggtacgaccagtatggccacgccggcgtggatccgaatttcggtgcgggcggatatcagggatacggcttcgacggtatggatatcgacctcggcgatatcttctcctccttcttcggagggggcggtgcccgccgttcgaatcccaacgcccccaggcggggcagcgacgcgtccgcctcggtggtcatttcctttgaggaagcggccagaggctgtaaaaagcaggtggatgtccgtttggtggacacctgctccgattgccgcggctccggcgccgccaagggcagcgcgccgaagccttgcccggcctgtaacggcaccggacaggagcgccgccagcagcgcacccccttcggggttatccaaacccagtcggtctgttcccgctgccgcggaaagggaaaaatcatcgacaagccctgccccacctgttccggcaccgggcaggtgcgccgcccctcttcggtggggatcaatatcccggccggtatcgcggacggccaggtgatcaccatccggggcaaaggcaacgcggggacaaacggcgggcccgcgggcgacctggaaatccaggtcgcggtccggccccatcccgtgttcgaacgggagggatacgacgtccactgtgagctgcccctgacattcgcccagatggcgctgggcgcggaggtgcaggtgcccacgctcgacgggaatgtgccttacaccgtccgggagggtacccagcccggcgagactttccgcctgaaagggaaggggttcccttacatcaacggacggggacgcggcgacgaggtggtccgggtgacggtcgaggtacccaaaaacctgacctctgagcagaaaaagctcctgcacgcgtttgaagagtcgctcggggacaaaaactatcaaaaacgccgcagctttttcgataagctgcgggacgcgttcaactgaaaacacgaggacagagaaagaccggcgggggaaatcgccctttcccccgccggtcttatccgtccccgccggcgctatcttcataaattcttcccttgtatttacagggtgaaattggtatactgtcggtgtaacggggcacacccaatctgctaggaaaagaggcggcgtatgaaacgctttaaaggcatcgcccagtggctctccctgtttctgctcgcggtggcggtcatcgcggtatacaagaccttcgacaacatcgtcgaaatcggggggttcttttccaagctgatggggatcctcagcccgtttgtcatcggcttcggcatggcgtttctgctctatggcccgtgcaataagatcgaagggctgttccgccgttccgggaagccgatcatgcataagctggcccggccggtgtcggtggtgatcgtctatctgctactcttcgggctgctcaccttaatcgggtatctggcgctccccgccctttaccacgcgatcatggacttcgtctcggcggtgccgggatattataacaacgtcatggcattcctggccgaatataccaaggagggcggcctgctggaagatctgcacctggaggagcggatcaaggacatctacacctggatcagcagccagctgacggccgaccggattttctcctatttccaggggatcctcaatttcaccacctccttgctggatatcttcatggcgctcatcatctcggtgtatatgctgctcgggcgggaatccctgatccgggcggtcaaggctgtggcggggctggtcatcaaaccccggggcatgaccttctgcagcatctacgcccataagatcaccaaaatcttttacagctatttctacagccaggccatcgacgcctgtattgtcggggttcttgccaccatcggcctgctcatcgccaggctgcccaacgcgcctgtgctcggcatgatgctcggcatcatgaacatgatcccctatttcggggcgatcatcggcggggtgatctgcgtgctggtggcgctgctctccggcaacatctacggagcggttttcgtcgcgatctacatccttgccatgcagcagatcgacggcaacatcatccaaccccggattgtcagcaattcggtgggaatcaaggcgatctatgtgttgctggccatcaccatcggcggcggcttctttggcttctgggggattttcctcggcgtgccgttcatggccatggtgcagatgctcgtcaaggatttcatcgagtatcggaaacgccaagaggaacagaggatcagcgcggggaccgcatccggaaacggaatcccgccagaggagaacggcgaatagggggagcacgtcatgcggatacggcctttcctccgatccatacggctcgagcgggaggaggtaccggatttttcccggtaccccttctctattccagccctgggcagcctggacaccctcgagttccacgaaaaggttaccttcctcgtgggggaaaacggcagcggcaaatccaccctgatggaagcggtcgcggtcgtgtgcggtttctgtgccgagggcgggggacggaattttcagctcgagacccgggccacccattccgggctgtggcggtatctgcgggccgaaaacggccctctttccccgcgggacgggtattttctccgggcggagagcttttataatgtcgcgtcttatttggaggatctcgacgaaggctatccctttgcctcgcatatattggatatttatggcggcagcctccacgaatgttcccacggcgaaagcttttttgccctgctccagaaccgcctggggcgggacggcctgtatctgttcgacgaaccggaggcagctctgtccccgctgcggcagatggcgatgctctcccgtctgcatcagcttacggaagagggctgccagtttattatcgccacccattcccccatcctgctcgcctacccacacagccggatctaccaactggatgaaacggggataagggccatatcctatgaggaatccgccccctttcaactgacccgccgctttttgaacgactaccgcaggatgaccgcggagctgctggacggcccccgggggaatgacgaaacatcctgatgccggaaggagcaagggcctgtgatactggaacgtatggatgcgtttttcgattcccgcctggatggatatgaggagcatcaactgacctgtatcgaatccgcgggaattttctatcccttcaccgcctcgctgctgcccatggcggccggctgcgaggtgctcgacctgggatgcggcaccggcctggagctcgacgcctatttcgaacggaaccccgacgctgccgtgaccggtatcgatctggcgccgggcatgctggaaaagctgcgcgccaaattcccgaaaaagcggctgaccctcatccagggctcctattttgacttgcccttcggctccggacagttcgacgcggcggtttcggtggagtctctgcatcatttcacacaggagcagaaaatcccactgtatcggaaattgcgggattccctgaagcccggcggatattttatattgaccgactatatggccggcagcgaggacgaggaacggttgtgcttttccgagttttcccggctgaaacgggaacaggggctgccggacggcgga

SEQ ID NO: 2776 - DNA, 9597 bp, Unknown
  16S sequences of unknown bacteria
gacgtaggagacaagggcggcataattccggtcgccgtagatctccggctcccgcagccccagcaggttcaggttcgggccgttcaggatcaaaagcttcattgcagcacctccaaaagcttcgccagcgtttcggcaagcgggccgtcattttccacggtataagcagcgaaggccgcatagcggtcccgccgctgggcgtagattgccgccgcgctcatttgctgggagatgggccgcccgctcaccggcagccggtccagcggccgcttgacccagacaacgcgcccattttgccgcagcagcggcgcattttccggccgggtgacgcagccgccgccggtggcgatgaccgcgccggagcctttccccagctctgccagggtctgcgtctccagcgcgcggaaggcagcctcgccgtcgcagcggaaaatctccgggatgctgcggcccgtccgctgctccaggacggcatccgcatcgtaaaagggacggcccaaccggtcggccaaggccttgcccagggtcgtcttgccgcagccaggcatgccgatgaggacgatattctgcatctgccccgccaggctgcgggtgatgcgttcgatctcgctgtcagcaatggcgcggccggtgaagagctccgcggcccgctttgcctgggccaccagcatctcaaggcccccattgcaggcgatgccccggcgctccgcctgaagcagcagtgctgtgcgggccggattataaatgaggtccaggactccctccagccgggggaacccggctaggtcaagcggcgacgcaccattgttcgggtacatgcccaccggcgtggcgttggcaatgatctgtgcgtcggcatggcgcgccagattttgataattatccggcccccggcgggagatgacgacggcctcccgcgcccccaggtcccgcagggcctgctggacggtcaggctgacgccgccgttgcccagcaccagcgccttttttccggcgatggcaaaatcccgggccagatagcaaaagccgtcgtaatccgtgttatcgccataccagccatcggcgcggcgcaccagggtattgacgctgccgatgcgcgccgctgacggagacaaggccttgcaatacgggatcaccgcttttttatacgggatcgtgacgttcatcccggccaactccgtcatgcgcagaaacgcatccagccgctccggcgcgacctcgtagaggtcgtaggggtaagacgccagctgtgcatggagctgtggagagtagctgtggcccagcttctcccccaaaaggccgtagcgctgcatcagatgacctccgaatagctgcccaaatacttgcactcctcgcacaggtcgcccagctcgcagatgagctgtacgaattcatcggaatagatggaggtctccagatcgaaatagaacatgaattcaaaatcccggtccggcagcgggcggctctccagcttctgcaggttgatgcccagggcatacagccgcgccaggaccttatacagcgcgccggggcgatggggcaggatcatcatcagcgtcgtcttatccgcaccgggataaatttccggcttgcgggagatgcagataaagcgggtgtggttgttgccgttgtcctgcacggtggattccaggcactgcaggccgtagagctccgcgcagcggtaggacgacagcgccgcgacgtcgctgcggtccgactgggcgaccatcgccgctgcctcggcagtattttcgcagcaagtgacctttacatccggcatggacttgaggaaatcagcgcactgggcaatggcctgttcgtgggaatagatttcccgaatctgggcctttttcgtattgggcttcgccagcaggcagtgattgaccttgatgcgggtggagcggacgatatagaaattgtgttcgatcatcagatcatagacctgcttgacagagcccgccgtgctgttttcaatggggatgatgccatactcgcacagcccgctctcgatggcggagaaaacgccctcgaaattcttcacatacatcacatggggattggcaaagattcgctcgcaggccatggtggagaaggagccatcgacgccctggcagacaacctgtgccgactttggaaacagcttcggcgtattctcgatagcgttgtgaatcagctcatactgctccgttgtattggccaccaagcggctctggtaagaacggctgagctcaaacagcagggagtagaggacccgtgtatagtcctgcatatccggccgggctgccgccgagacccgcgccagcttttcccgccctctggccgcgtccagtaccggcagatggttttcctttttgtagtcggcaatctgcccggcaatatccatccgctgctcgatgagctgcaccagttggccgtcgacctcgtcgattttttctctgagttcctgcaaattcatagcgcttctccttccaataatgcatcatataccgcaactgccgccgccgcctcaacacaaggctgcgcccgcagcacaatacaggggtcatgccggccgtggatgaccagctccgcttccgcctgccgcgccaggtccacgctgcgctggggcagcgcgatggacggcgtcggcttgaaggccacccgaaatatcaggggcatcccggtcgtcatgccgccgaggatcccgccgtggtggttcgtttttgttttgacaacgccgttttccagataaaacgggtcgttgtgctcacttcccgtcaggttggccgcgtcaaagccgctgccaaagtcaatgcccttgaccgccgggatgccgaaggccgcctgggcaatacggttttccatcccgccgaacattggctcgcccagccccaccggcaatcccgtgacgcagcagccgatgacgccgccgacggaatcgccccgggccatggccgcctccacagcggcgtccatccccgcctggtctgttttgccgccgatggcgagaatctccgacgtgacggcgatgccccgccgctctaaaagctgcaggcaaatgccgcctgcgatgcacagcggcgccgtcatccggccggagaattgtccgccgcctgccacatcgcggctgtcgccgaagcggcacatagctgggtaatccgcatggccggggcggggcacgtggcgcaggttgtcatagtcgccgctgcgagtattcgtgttataaatgacggcagtcaccggtgcgccgcaggtgcagccaccggccaggcctgcgataaataccggcttgtccgcctcacgccgggtcgtcgtacctcgctttctgccgggggcgcggcggtccagaaacgcctggagcttagcttcgtcgatcgaaagtcccaccggcagcccctccatcgtcacgccgatggccggggcgtgggactggccgaagatagtaaagcggaaccgcgttccgtaggtgttgctcatgcctcttcctcccatgcgatctgcccgcccaggctggcaaaggcctgccaaaaggccgggtaggatttttccaccgcctgcgccccccgcagcgtgaccggcccggtgcagcgcagtgatgcgatggcagcgctcatggcgatgcgatggtcgccgcagctgtcgcagacgccgccgggcagacggtccttgccatagatctccaggctgtccgggcccgccacaccgctgccgcccagtgcttcgatcagcgccagggtcgtggcgatgcggtcgctttcttttaagcgcagacggccgatgtccgtgaaccgggttgtccccggtgtccctgcagcgacgacagccaaggcggggattaggtccggaatatcccggccggggatcgtcgcgtttccttttcggattgccgccagggcgccatgcacgcggcggtcgccctgcttcgacgctgggtccagaccggtgcagtcgatctccgcgcccagggcgttggcgcagagccagaaggccccgccggaccagtcgccctccacctgcagcctgccgggactgcgataacccccgggtgcaacggtgatggtatttccctcccagcgcgtcacgacgccgaaacggccaagggcctggcaggtcatttccagatagcccgccgattccagctgaccggtcaagtcgatccgcccgccgcccagaagcggcagcgcaaacagcaggcccgtgataaactgagaggagatattggccgccatggtaaactggccgcccgccaggcgtcccgtcagccggattgcatccggctggggccgtgccagagcgatgccgtgacggcacagctcctcccacaggggcgaaaggggccgctccggcagccgccccgccaggcggaaggtgcaatccgcgcccagggccgccgccaccggcagcaggaaccgcagcgtcgagccgctctcccggcagggcagcaccccgccgggccaggctgcccgaatgggcatgacccagaagcttccatttttatattgtatctccgcccccaaggcccgcagacaatcggctgtggcgtcgatatccgccgagcgggccgggcaaaggatctccgtctgcgtatccgccagagccgcgcaaatgagcagacgatgagcctgggatttggaggacggcgcggccactcggccggagagggcatgcggtgtcaggatcgccagcatcgtcacagccccgctttcataaagtctttcagtgccgcaacgggcatattctccaaccggcaggcgccaatgcgctccggcacgacgacgcggatcgcgccgccccggcgttttttatccgccagcataacgccgcacagagcagccaacgggtacgccgtccggtccggcaaaccaaatttttgcaccaccgcgccgatgcgccccgcacaatcggtcgggcagatgccccgggcgctggccgcccgggcgaccgtcgccatgccgatggccaccgcctttccgtgggcgacggcaaacgcgctgcacgcctcgacggcgtggcccagcgtgtggcccagattcaggagctggcgctggccgttgtcaaattcgtcggcggccacgacatcccgcttcatctccacgcagcgggtgatgacccgctcccggtcaaacgccaagccgtactgctccaaatgtgcaaacagcgcttcgtcgccgaggacgccgtatttgataacctcagcgcagccgtcggcaaagatctcctccggcagggtctgcagcgtatcaggatcgcacaggacgagacacggctgccagaaggccccggccaggttttttccggcgtccagatcaatggccgtcttaccgccgacggaggagtcgaccgccgccagcagcgtcgtcgggacctgggcaaaggcgatgccccgcaggtacgtcgccgccgcaaagcccgccagatccccgggaacgccgccgcccagagcgacaatggcatccgtccgggtcaggtgctgctccgccaggaaattcaaaagcttcagatacgtcgcggcgcatttggactgctccccatgggggaaggcaaacgtgcagaccgcaaagcccgcctgcgtcagcgacgcttccgcctgcgcgccgtagagggcctggacggtatcgtccgtcacgatgcagacccgctcccccggcacctgcgcccgcagcagcaggcccagctccggcaaaatgccgctgccgatgtgcaccgtgtaattccgggaggctgtcacttcgatctttttcatcgcttatcaatctctttcttccgcattctgccatcgtccagcagctgccggaggcggggcgcgtccgccgacgcaatggcgtcgcggtactggctcagggctccaatgagcccatccagctcccgcagcaaatactcgccgttttctaaaaacagctctgtccacatatccgggttcagccaagcgacccgggtcaggtccttatagctgccagcggaaaagcccttgtgctgccccgccgtcgggcttttgatatacgcgttggagacgacatgggccagctgcgacgtgaaggcgatcatctcgtcgtgcttctccgccgtcgtgacggtgatgctgccgaagcccgccggggccagcagcgctttgatctcctccaaaaacgccatgtcgtcgtaccggggcgggacgatgaccatcggcgcgccgtggaagagattgctccgggcgtattttaaccccgaattgtgcgttcccgccatggggtgcccaccgataaatgtaaagccgtagcgcgcggccagggcaaagcccacctggcagatatgccgcttcgtgcccagacagtcgatgaccgtccggcccgccaggcacggggccatctcctgcagccacgcctcgctgccagccgggtaggctgccaggaggatgaggtcgcatgtgctgattttttcctccgtcaacgcgccgtcgatgcagccgctcagggccgcgaattcctgggttacctggttttggtccagcccaaagaccgtatgccctgcctcatgatacgccttggccatggagccgccgatgagccccaatccgacaattccgaccgtcatgcgccgatgacctcccggatgcgcaggacctgcttggcaactgcatcaaactggtccggcgtcagagattgggcgccgtcgcacagggcgtgcatcggatcgttgtggacctcgatcataatgccatcagccccgctggcagcaatggcgttggccatcggcgcgacaaggcgcgctttgcccgtggcgtggctcgggtcggcgatgaccggcaggtgcgtcagctcatgcagcactgggatggccgagacgtccagggtattgcgggtgaaggtctcgtaagagcggatcccccgttcgcagaggatgatcttttcattgccgccggacataatatattctgcgctcatcagcagctccttcagcgtcccggcgatgccgcgcttgaggaggatcggcttatccgtcttgcccagggcccgcagcagctcgaagttctgcgcgtttcgggcgccgacctggatgatatccacgtcgtcgaacaggtccagatgattgatgctcatgatctccgagacgatgggcaggcccgtctcccgtttggcttcggagaggagcttcaggccgtccgccttcaggccctggaagtcatacggcgaggtgcggggcttgaacgcgccgccccgaagcacattggccccggaggccttgacccgcttggcaatgtcgatgatctgctcctccgtctccacggagcacggcccggcgatcatgcagaaattgccgccgccgatcttgacgctgcccaggtcgatgaccgtatcgtccgggtggaatttccggttgcactttttatagggttcgctgaccacctgcacattggagacaatgtccaagctctgcagcagttccttatcgatcttgctcgtatcgccgacgaggccgaggacggtatagtccttgccttcggaaatatgcacctccagttcctggcgttccagccaagagatcaggtgctctctttgctccttggttgcgttgggtttcaatactgcgatcatacttcattcgctcctgtgactgattttttgccgctgcctgtgcggggcaaaaagaaaacgccgcacagtctgttctgtgcagcgcccgaaggattcaaatacatgggattttatttttctgcagcacaaaacactattactttgtaataaagtaataggtaaaaaacttgcctgcagaaacaaaatgcatcatgcgatttgatctcctttcctgatttaacactaaactagcacaaaataacccgcttgtcaattcccagcgaaaaattttttacgcagccgggaaaccacggctgggctccgctaggctcctcagaaattgatattatccgtctccagggcggaaaggtcaaaggaaatggacttggcagcctccgtcaccagcttgaccgcctggtcaaactcccgccaggatgcaccgcgcatggcgctgacgatgctgatagcgtaccgggcgcggcccgtccggtcaaagatcggcgcgccgacagattgcagaccggtgttatactcgccccgctccacggcgtatccccgctgccggacctcctccagctgggtcttgagcgaatccatcgactggatggcctggggcgtatagggccgcagggcaagcttttccagcacgcgccgctgctccagctccggcataaaggccaggatggccttgccctgggtcgtgcaatgcagtggcacactgctgcccgcctcggcgcagacctggaagccctcattcggctcagcacaggcgaccagcagcagctcatccccgcacagccgggagagatagaccgactcctggatcgtattgacgatatgcaaaagccgcggccgcgccagctgcactccctgccaggagctgctgaccttgccgcccaaagccatcaggcgatagcccagccaatagcggccgtccgcctcgctctgctccacagcccgcacctcccgcaaagagaccagcattgcgtgaatcgtgctcttggcccagcctgtcatatgggtcagctccgtcagagagagcggccgcccggcagcccaaagctgattcaggaggacaaaggccttttccacggattgtacttttttcttctgctccggcataccggcaacccctttctgtgcggcggcgaggggatcgacgcccgcataatccagcgcggcgcagcgccgcgcgacatattttccagcaaagccgccgcattagaccgggcggccgccccgatagcccaggtcataggaaatagccgcagccgattccatcaaaagcttgagcgtctcgtcgaattcattccaggccgtgccccgcatcacgccgacaatgctgatggcatagcggcactggccgttgccgtcaaagatcggcacaccaatggactgcaagcccacctggtactcgctccgctccagggcgtagccccgctgacggatctcctccaactggccccgcagcgtctcccaatcctggattgtccggggcgtgtaggcgtgcatgcccttgcgctccagcattgccttggccgtagcctccggcaaattggccagaatgaccttgccctgagacgtgcagtgcagcgggatgcgcgtgccctcctccgtcgagacccggaagccctcgctgggctcagcgcagaccgccagtagcaggtcgtccccgcaaaggcgcgccagataggaggattccttcgttgtcgtcacgatatgcagcaggcgcgctctggcccgggagatctcgctccaggaggagttgaccgcactgcccagttcaaaaagatggtagcctagccggtatttgccgtccgtctcgttctgctcgatcacccgggaatcggtcatagaagagagcatcccatgaatggtgctcttggcccagcctgtcatctgcaccagctctgtcagtgccagcggccgccgggctgtccaaaagcagtccagcagtgtgatcgctttttcgatcgaatgtacttttctgccctgtgtcggcatcgtcacatctcacctctctatcggcttgcaaaatcggtattattatacataatctgtccgtccc

SEQ ID NO: 2777 - DNA, 32759 bp, Unknown
  16S sequences of unknown bacteria
gcgaccccagcgccgcgcagagcgccatcgcccccaatgccgccgcgccgaggagaatcgcgccgccccggcgcaggcgcaggcgcccggccagcaacccaagccccggcgcgagcagcgccgccagcgcgtccaccggcggatagccaccggagatgcgcggcgtcaacgccacagccgccaggaacgccgcaaccaacccgccgagcagcggggccgcccagcgcgcatccaggcagagggccgcagcgcccaatgcgccgcccagggccagcgccagcagccggctcgccagcgcgcctgccccctgcgatgcggtctgcagcacggcgctcgccgcgcccagcgccgcgaggagaaccagcgcccccacgggcgccgccgggcgatgcgcctgccggatctgccgcgcgagggccttgggatcgcccatggaagccacggcgcgcgcctccgcctcctccggcggcaggccctgcgcgcgataggcctcggccgcgtcgtccatgtggccgcgcagctcgcgttccagggcgtcgcgcgctcgccccggccgcagggaccgcagcgcggcccgcagaaacgcctcccgctcagggctccggaacatgctcctcccctcccagcacgcgccgcatcgcggcggcataggtcgtccacgcccgcttcttctcctccagcgcggcgcggcccgcctccgtcaggcggtaatagcggcggggcttgcccgcggcgctattcccctcgtaggactccacccagcccgcccgctccatggcgtgcagcagcggatagagcgtcccggccttgaggtggaaggcgttctccgaccgcttctccagcgcctcggtcatctcatagccatagaggtccccctcccgcaggagctccagcaccagcagcgccatgtccccggagagcaggcttcggtccgtccccatcgcgcatccctccttatatcgattatctatatatagaatacatcggctgtcgatccatgtcaatccccgcgcaacgttttttctttcctctcgttttgaagaagagagaaccatttgagggggcgatttccatgagagagatcctgccaaacctggcgctctggcggcgcgtgcaggaggcgcaccggggcgaagcgcacccgcccaggcgcacgggcgagcagttggccgcgtaccttgccgcgcgctatccgacggagcgcctggacgacgcgcacttttcggaggtggtcctggccaacctgcaggaatccccgtatgcctcgcttccgctggagccgcgcgtgcgggccttccgcgtgcggcgggaggcggccggcgcggcgctgtacgcgcaccgggaccgcgcggtctacggcgaaacccccatcctggtcggcattgagctggaaaccggctttgtccactgcgaggggagcgacgagctgcaggaggagctctttctctaccaggggctgagcgaggcggaatgggagaatccctttctcgcctggcggatgctcacccgctgttcgggatgaggcgcgtctctttccgcctgttcgcgcgcctgctgtggctgggcatgctcctgctggcgtgcgcatacctcctcctcctggaggtatccgtgcgccgggacgtgctcctgcccacggtctacgacgcggtgccgggcgtcagcggggacacgcagttcgcacttgcgcccatcgactccgaggatgcgctccatagttacgtcagtcaggagggacggcctttcctgctaagacaggacatcctactctcgcgcctggcgtatttggagacgccgccggacttttcgggcggaacggtcgccgacctctgcgacgcggtggaggcggtgctggccgacccgcaggccgacgtcgaggcggcgctcggccgggatcgaaaggaggcagagtccctccttgccgcgctgcgggcggatgctccgctgctggagatgcaggtcctgggatttttctcctatccctcgggccttgcgggctgcgcgctggactgggacggcgagccggtgctcgccttccgcggcacggacgacctgcgcgacgcgctggacaacttcctgctgctgcccttcaatctctccgcgcagtatggggatgttcgcaagctgctcgccggatttccggaggcggagcggatctggctggtcgggcactccaagggcgggcacaacgcgatctatgcggcgagtatcgacgcgcgctgccgcgcggtggggttcaacgcgccgggctttggcatctttctgcgctggtcgcagctgcggggcctggaccgcggcgtgaactacgtgctcaacggagacgtgtcggggttcctgctctttcacctggagcggcgggtggtgctggactcctccgccctgccggtcgagggcgccaatctcttcaccgcctggcaccgattggacagcttcttccccatcgacgacctccacgcctccgggcgcatccacatgctctcggtggcggcagaatggatcacgcagattttgtggctcgtgctggtgttcctcgtgctgtacaaactcctgctgctgggcgtgcgccttatgagtgcgccattccgcctgctgctgcgcaggcaggcgcgcgcccgcgcctaaaagcgcaaaaagagaaccggaaaggcaagacctttccggttctctttttgtgtgcgctcagcgcgcagacctgtgcagccacgtcgggatgcccacgatcagcacctcgccgacgagccagacgagcacgaaaaccgtcaccaggttttcgcccgcccaattcgcaatgctctgcaacatctgcatcccctccttttccctcattgtagaaaaggaggttcaagatcgcgcaagcgtcctgttgcgcctgtgttaagcggacccagctgcgcgcttttttagtccaggacctcgaagaacagcatgcggccggggaagagcggcacgtcgaaggcgtactcggtctcctccgggatgacgctggtcgcgtcgcccttcatgccgggcttgggcagcgtgcggaactcggtaaacgtgcggccggtctcgatgtcgcgcaggcccttgcaggcgccgcggaccacgacctgcacggtgtcggccatcgggcggtaggaggcgatgccgtagacgttgttgtcgtaggcgaagaagttgatctgcgcgtgggcgccgacgtagacgcgctggcccatgctcaggtgcttgttcatcgcgcgccagacgatggcgggcagcttgtagaggtccgcgaagttctccggcacgttgaggaggaacaggcggccgcggccgtagttgtcctcggtcatcagcgggaagttgtcctcccccgccaggatcgtgatgtcggagtgggtggcgttggtcttgtagttcaggacctcaaagagcacgggttcgtcgctccttgccacctcggaggagacgtagttcgcattggagaccaggaactctttgcccaggacgtggcggtgggtaaggcgcgcgctggtcatgtccttgatgcccttgtcgtaggtctcgtggaagaagccgacggtgacgacggcgttgccgcccttgcgcacgaaggcctcgagcttgttcatgatgtccggatcgcaggccgaggactgggtcagcagcacggtcttggcctggtcctggaagtacggggagggctcgacgttcagcccgccctggccgaggtagttgtagagctggtcctcgccgtcggcgtcgtacggctcgtaggcggcgacgcccaccgggttgccggcgcggccgactaggtcgtcgatgcggtagagctcctgccccagcggcggcagggcgggggaatcgacgagcacggagaagttgaacagcatcagctccctggcctttgccagcatcgtcaggttcgcctgctccagccagcggctcaggttgtccgaggagccgccctggtcgatccagccgccgccgttgcggccgggcgcggtgttctccagcaggcggatgatggaataggactcgtagcgctgcaggtgctgcggggaatagcaggcggtgcgggtctcggtgccggtgtagatcatgtcgaagatgtccttctgcttgccggggttgtagccggtctcctggtagctctcgtaccagttcgggtacttgatgatgaagtgcatcttcgggttgacggaccgggccaggtccacgatctcgtgggagaactcctccatcaggcccaggcggtagtccttccaggacttgtcgcccttggcctcgatgcacatctcgcaccggcaggcggtgaagaagaagtcgtccaggatgatctcgtcaaacacgcccgcgagctcgcgcacgatgcgcttgtactcctcgcggtggcggggatcggtgtagcagaacgtgtcgtaataggagggcttgcgctgcccatccacgagctgggtggacgtgatgccgcccgaggtctcgatgccgttcttctcgaagagcgccttgacctcccgcaggcgctggggcaggatgtccaccacgccgcggtggttctcgatgtagaccttgtccagatggatgtacttcttgaagtagtcgattccgcgctggatctcggcgtcgtccgcgtccttcaaatagtaggcgtagacataggccgcgatcttgaagttcttgaacgcttccatggcaaccccctggtttcttttctgtatttggcaaatgccgcatttagcatagcacgaaatatcctccctgtcaaattgcgcgccctttttgttaaaatcctgcaaatcgcttgcgcttgactgcgctccaaggtttatcataagcaaagatccaagctgaattcgggaggtgtttttgcatgaagacctataccattggccaggccgccgagcgggcgggcttgagcgcggatacgctgcgctattacgacaagcagggccttttgccctttgtcgcgcgggcggaaaacggctaccgcgtctttaccgaggaggactttgcctggctggacaccatcgcctgcctcaagggcacgggcatggagctcaaggacatccgcaccttcattcgctggtgcatgcagggcgattccacgctgcagaaccgcctggacctcatcctcgcccgcaagcgcgaagtcgaatcccagatctcgcagctgcgcgggtacttgaacaagctcgagcagaagatcgaccactaccgccaggcgctgaacgccgctcacccggcctgagcgcatcttcttcccccccttgcgcgcaattccccttcccctgcctcttgcaaatgtcctgacatattggtatactgatagggaaaaaacgacgaaagcggagggggattcgcatgccatccaacgtattgttcgcacccatggcctacacgcgctacgaggccagccagaccctgccggagaagttctcgcgcctgctggaaaagagcggcctgggcgacaaggtgaacggcaagtccgtggccatcaagatgcacgtgggctccgggatcacctattcgacgatcccgccggtattcgtgcgcaagctggtggacttcgtgcacaagcacgggggcgactgcttcatcacggaccactacgtctaccgccgccatccggaggagcgcggctacacggagagcaacctgggctgcccggttctggacgactgcggccacctgggcaagtacttctacaccaaggaggtcagctacaagaccttccagcacgtggatgtcgcgggcctgatccacgacgcggacttcctgatcgacttttcgcacgtcaagggccacggggcctgcggctttggcggcgcctgcaaaaacatcgccatgggctgcgtcacggaccgcacccggcacgagatccacgccctggagggcggcctcgtctggaacgaggagaagtgcgtgcactgcggcaagtgcatcgacgcctgcaaccacttcgccaattcctttgacgaaaacggcaagtacagcgtccgctaccaccactgcaccatgtgccagcactgcctgaaggtctgtcccgtgggcgccatcacgctggacagccacgactatgcggacttccagacgggcatggcggtgtgcaccaaggcggtcctggacacctttgccccgggcaacgcctactacatcaacgtgctgacgaacatcacggccctttgcgactgctggggcatgaccacgcccgccttggtgccggacatcggcatcatggcctcggaggacatcgtcgccatcgagcgcgcgagcctggacgccatcaagatggaggacctgatccccgcgggcgttccggccgggatggagctctccggccacggccacctcttcgagcagctccacggcaagaacccctacatccagctgcaaaagttggaggagcagggactgggcacgcaggaatacgccaccacgatcgtaaagtgatccccgctcccccaaaacgcaacgagaaaaaggcaaatgccagcgccgcaaatttgcattcgcggaatgcaaatttgcggccaccttatttccaggagggaaaaaacaatgaaaccgctgatccaaccaaagcgattggcaagtggggagaaaattgccaccgaaagcccttgtcacggctgggccggagatgtggagacaaaatggaaatacgatttgggcgtttcgcgtttgcaggaattgggtcttcaggtcgtggcggcgccaaactcgctgaggggctccgcgtatttatcccaaaatcctgcggctcgtgcagacgacctgcagtgggcctttgaaaacaaggagattcgtgcgattgttgcgaacgtcgggggggaatgacagcatgcatccgatagcggatccgtctgggtggcatgcatacagcaaaaaatggtttctcaaagcattgtttgatgcgtcccctatcggcccaatcgagccctcgcccgactggacctttgagccctccgatccggttcatcgggaaaagaagaaggcctattccccaaacagcggttatgaaatcattcagggcaagggcgttgcaaccgggcgattgatcggcggccacacagggattctggagctggagggaacttgtattgcgctcacagcagaagagtatgagggggcaatcctgttcatcgaagacattcccgagttttttgatgaaaagggtgtgtgcgttttctttgcgtatctggggcaaaaggggattttgcagagactaaacggaatcatccttggcaaggcgaatgagaattgttctttttcgggaagagcgcaggtcattcggcaaatcgtttccgaaaaatacgcctgttccatacccatcgtgtatggactgaattttggtcattcctcccctatgtttgtattgccttacggcgcgcttgccgaaatcaactgcgagaagcaaaccttttcgattttggaaagcggtgtacttgcataattccggtagtagactgaaaacttgataccccataagcaatgcggagcagcgcttacgctgctccgcattgcttatattgcatctcccgcgttttttacgctgtgggcgcgccctttttcgcaatcagcggaagggcttgacgtcgcgcacggcctcggcggggtcgatgcgcgcatcgccgttgtcgatgtccaggagcgcatagcggtcgttgcccatccccagctccttcatgtaggtgagctggcgcaggccgtgccgggactccatgcgctcgaccaggtcgtggtgctcctgcggcttcagggcgtagacgaggtccacgctggcctggtccgcggcgaggatgtcgagcgaggccacgatgccgatgttgggcgtgacaaccggcgcggccccgacgccctcgcagtcgcaggaaacggacatgttccgcagcacgttgacaaaggtgatgtgcccggcgaagtggtcgacggtggcctttgcggactcggtcatgcgctccatgaattcctccttcccgatgctccacatgttggcggagccggggatggtgtggatcatggccttgccgacgcggccgtccgcgcagccgatgccgatgttcttgcacgagccgccgaacccgccctgggcgtggcccttgaagtgcgtgagcacgaagagcgagtcgtacttggtgatgtggctgcccatgctcatgtggtcaaaccacttgccgcctgcgacgggcaggtcgaccgtcccctcctcgtcgaggatgtcgaccgggcagaacgtccagccgttgacctcgagcgtcttcctgtggtcggcggtggtgtagcggtcgccggcgtagtaggtgttggtctccacgatggccgcgccgggcaggtccttttccaggagcgcctgcacccagggccgcgggatgatgttggggccgtgctgctcgcccgtgtggagcttgacggccaccttgcccgccagcggcgtgcacacgcgcgcaaagatcctgcgcagtccctctgccgacaggtcgcgcgtgaagtagaccacggactccgcgcccgtgcggtccgcatacgggatgtacttctctccgccctttcccgggacgggtttttccattgccatgattcctcttcctcctttgcgctgtgccggacgcgcatcgccgcccggaccgttttctttagcatacaccttggagcggacacaatgtcaaggcctttcccctgttttttgcgcaaacgaaacgaagaaggccctctgcggcaaatgggctcgcccgaagggcggggccgtttgccgcggggggccttgtgcgacggccggggctccccttgcgggagtcccggccgtcgcgcacacgtcgagggttgctggggtggggcggggaacgctatcgcgccgcgcggacgtcctcgaactcctgctggatctcctgcgagggcggcgcggtcaccagcgaggccacgacgatgcacaggcaggagacgaggaaggcgggcagcagctcgtagatgtcccaaatgccgcccaggggccgcacgagcaggttccagatgaagaccatcgcgccgccgctgatcattccggcgatggcgccggcgcggttcatgcgcttccagaagaggctgaagagcatcagcggtccaaaggtcgcgccgaatcccgcccaagcaaagctgacgatggtgaagatgacgctgttctcgtccagggcaatgacgatggcgatgagcgcgatgagcagcagcgtcacgcgcgagacgaggagcacctgccggtccgtcgcctttttgtgcagaaggccctggtagatgttcttggcaaaggccgaggccgcgatcagcagataggagtcggaggagctgatcgtcgcggcgaggatgcccgccatgaccaggcccgcaagcaccggcggcagcaggttggtcgccagcaggatgaacacgttctccgcctcggaggaggtggtcagcgccgtgggatacagcgcccggccgacgatgccgatgaacaccgcgaccgccagggagatgagcacccagaccgtcgcgatgcggcgggactgcgtgagctcccgctcggagcggatggccatgaaccgcagcagcacctgcggcattccgaagtagccaaggccccaggccatcatggagacgatgctcagcgcgccatagggctgcgcctcgccaaagaggggcgcgccgttttccacctgctgcacgccgtccaccgtcacgggcgaggccaggccgaagaattcaaagaacccggggatggactgcgcgttctccatcaccgcggaggggccgcccgccgcgatggtcgcggtggtgacgatcacgatcagcgccacgatcatcaccagcgcctgcatgaagtccgaggcgctctcggccaggaatccgccgatgagcgtgtagagcagcacgaacaccgcgcccacgatcatcatggccacgtagtcaaacccgaagagcgtggagaagagcttgccgcaggtgaccaggcagctggcggcatagaccgtgaagaacaccaggatgaacagggctgcgatggtcatgatgaccttgcccttctcgtggaagcggttggagaagaactccggcagcgtgatggcgttgcccgcgcgctcgctgtagcggcgcagccggcgcgagacgatcagccagttgacatacgtgcccaccgcaaggccgatggccgtccaggccgcgtcggccaggccgcaccaataggccagccccggcaggcccatcagcagccagccggacatgtccgaggcctcggcgctcatggccgtgacccacgggcccagcgtgcgcccgcccaggaagtagttgtcggagctcgcgttggagcgccgggcaaaggccaagccgatgccgatgaccgccagcatgtacacgagcatggtgattgcgatctggatcgcgtctcccatagggacccctcctctatcaatataaaaaatcgcggggcagactgcgggggattttcatccgccgcagctgccgccgcgttgcggagccgttggttagcgcaaagttattttgcggccttttccttcttttcgccgatgctcagaaggaggttgagcaggatgccgaagatcgcggcgcccgcaatgcagggcacctggatgccgaagaagggaatgttgccgccgaaggcatagttgccgccgatgccgatgaccatgatggaggcgatgaccgcgatgttcttcgaggagaacatatccaccttgtggtcgatcatgatggcgatgccctgggccgcgatggcgccgaagaggtagatctccaggccgccgatgaccgccagcggaatgccgtagatcacctggatgaggggcgtaaagaagctgaccaccatggcgatgatggccgcggcaacgagcaccgggaccgagaagaccttggtgatggccatggtgctgatgttttcgccgtagttggtgccggccgggccgccgacgacgcccgagatcatgtcgcagatgccgtcgccgatcaggttgcggtccagcatatccacgaggctgtagccgagcttcttgcccttgcggcgggccacgtcattgacgtagatgtccagctggtacatgtgcgccgtggactcggggatggtggcgatggcgatcggcatgatcgccgcggccgccgtccaggagaccttgggcagggagaaggcgggcacggcgaagatcgagccgtccccgagcttccacagggaggcgtccagcgccgcggcgggcatggcgcggaacaggttggcccagtccaccgcgtaggcgatgccggccaccgcgcaccccgtcagcgcgccaaggagcagcggcagctgccccaggaagcccttgaggtagcgggaatagagaatcgtggacacgagcgtcaccagcgccacgacgatccaggccgtgctctcggccgtgacctccgtcacgttcgggatggcgtcggagagcgcgttgcccgccagcgtcaggccgatgatcatggccaccgggccggtgatggacgccggaaggatggtctccaccgccttgcggccgaagaagcgcaccagcaggcccgcggcgatggacacaaagccggagaggatgatgccgaactgcgcgtactggatggcctccgtgggcaggatgccgtccaccttggcaaagccctccgccgcacacatgctggcgatggccgtaaggtaggcaaagctggagccgtagtacagcgggatctttcttcccgtgatcaggatgaagcacagcgtcgcaagtccgctggcaaagatggtcgtcgaaacctggaaaccggtgacgagcgccacggtgacggttgcggggaacatgacgatgacctgttggatggcgtacaggatcagccgaatccagctcggccgctcctccggcaggtagcctacttcggatcgaagttctttcatgtgtgagcgtcctctcctcttcttgctttgagacgcgccttttcccgcccccctgagccggggagctttgtgggatggggcgtttggtctcaattgttctaattatagacgatcaaagggggagtttcaacactttttcccaaaatttcgctcagtcccctggaaatgcgccgcgttctgcgttctgtgcaatttttcgcaggaaattttgcgaatacgccgccgcacgaggcggcaaaaaaacaaaaggccgggaaacgcggagtttcccggccttttttggtgcgcctgacaggattcgaacctgcggtctcccgagtcggagtcggacactctatccactgagctacaggcgcgcttgaaagcctatacagtatagcacaattttcccgcgagctcaaggggggcggggcaaaaaatcccgtgcgttttttccgcccccgctcgcccggggccctagagcaggatgcagatcatgccgccgctgccctcgttgatgatgcgggaaagggtctcgcgcgtcttctgctgcgcgtcctcgggcatgcgcatgagcttgccggcgaggccttcgcgcacgaggtcgtgcagggatttgccaaagatgttcgtgctccagagcttggcggggttgttctcaaactcggaaaggaggtagtggaccatgtcctcgctctccttctccgagccgaggatggggttgacctcggtggcgatgtccacgcggatcatgtgcaggctgggcgcggaggccttcagccgcacgccgtagctgccgccgtggcgggtgatctcgggctcggcgagcgtcagctcctccatggccggggcgacgaggccgtagcccgtggtcttgaccgattccagggcgtcggccacgcggtcgtactcgcgctttgccgcgacaaggtccgtcatcatggccatcaggtgcgcgtcggagcggatctcctccccgcagcggcggctgagcacctcgtagaagaggccctcccgcaggggcaggccgagcgtgatgcgcccggttcccaggtccatgtcctcgacaaagggcgtcctggcgtcctccatctcaaagcggccgatcatgcggtcgatgtcgcggacgtgcgcaaggtcctgtccgctctgctgcacggccgaaaggatcgcctggggcaggtcctcgtcctcgggcagggcctggacccaggtgggcaggtccacgatgacctcgcgcagggggaactcgtagagcacggtgcgcagcaggctcgccaggtcctcctgcgtcaggtgcagcacgtccagcagcagcgcgggaacgtcgtacttctccgtcaggtcctccgccaggcgccgggcctccggggaatcgggcgctacggagttgagcacgagcacaaagggcttgccgctgcgcttgagggcggagaccgccttctcctccgcctcgacatagccgagccggtcgattccggagaagctgccgtcggtcgtgacgaggatgccgatggtcgagtgctcgccgatgaccttgtcggtgcccacctcggcggcctgggcaaaggggatctccttctcgaaccagggggtgcggaccatgcgctgcgtcccctcctcgtccgcgcccaacgcgccctcgaccatgtagcccacgcagtccacgaaccggaccgagaggtcgccgacgccctccatgtccagggagacgggctccgcgggcacaaagcgcggctgggtggtcatgatgctcttgcccgagccggactgcggcacctcgtcgaccatgcgctccttgcggtagctctcggggaggttgggcaggaccatttgctccatcatctgcgcgatgagcgtggacttccccgtgcgcaccggccccaccacgccgatgaacaccgtgccgtcgcaccgggtggcaatgtcgcggtatatatcgtatcgttccatgaatgttccctcccgtacacatcaggttgttccagcgtatgcgggcggaaaggggactagaaccgggtttgaggctcacaaagctcgggaatgcgctctgcgcgcacccggccaagcagcgcgcacagggcggggaagccggcgcgcaggcgggcctccagcgcgtcggcgtcggcccgggcgcgcgcggcctccgcgctggagacgaggcccgcgtccacggcggcgcgcagctccgcctcgtccaggcggaagacgcggccgtccggctcggccaccacgtcgaggaacaggtcctcaaagtgggaatccgggccgttgagcgcgttgccgcgggtgatgtcgaaatagagctgctccagctgcccatccggccggaagaaggctgtgcaccaccagcgctcgccctgcggcgcgagctgcagccagtcgtacccggcgccgcagagcatgcgctccccgtccatcaggggcacctgcacgcggtccacgcgcagcagcgccgcgacgccctggacgccaaagcccgcaaaggggccccaggcaaagcgcatctcccagccgccccaccactcggcgcggcggagcgtctttcgcttgatctcgatgggaatccctcctcttctgcaaaaaaggcgcgccgcggggagaaggactctcccccggcgcgcccaatggggctttacttggtgccgaagagccggtcgccggcatcgcccaggcccgggacgatgtagccgtggtcgttgagcttctcgtccacgcaggcgacgtagacgtccacgtccggatggtcgcggcggacgcgctcgatgccctcgggcgcggcgatgaggttcatcatgcggatggacttgcagccgcggttcttgatgaaggagatggccgcggaggccgagccgccggtggcgagcatggggtcgagcacgatgaggtcgcgctcggtgatgtccccgggcagcttgcagtagtactccacgggctcgagcgtctccgggtcgcggtagaggccgatgtggcccacgcgcgcggcggggatgaggcgcagcacgccgtcgagcatgccaaggcccgcgcgcaggatcggcaccacgccgatcttcttgccggcgaggaccttggtcttgcaggggcagatgggggtttcgacctcggcttcggtcagcggaaggtcgcgcgtggcctcgtaggccatgagcatggccacctcgttgaccagctcgcggaactccttggagccggtgttcttgtcgcggatgagagagagtttgtgctggatcagcgggtgatccatgacgaagatcttgcccatggtgtgcactcctaacacagttttatttgttgtacttcttctcgatttccgagatcatcgccacgcgcgcggcgtggcgcccgccctcaaagggcgtggacaaaaaggcgtccacgatctccatggccaggcccggtcccaccacgcgctcgcccatggcgagcatgttggcgtcgttgtgcaggcgcgtgtacttggccgaatacgtgtccgagcagacggcgcagcggatgccgggcaccttgtttgccgcaagcgagatgccgatgcccgtgccgcagagcacgatgcccgcctcgtactggccgctggccacggcctctgccaccttctgcccgtagacgggatagtccacgcgctccgggccgtagcagcccaggtcctcgaactccacgcccttttccttcaggtgctcctcgacgaggagcttgagcttgtaggccgcgtggtcactgccgattgcaatcattgtcgattccccctcccttttgcctttcagtatactccaaattccgcgcgggcgcaaatcgtttcgcgccttggaacggcgcgtcagtcgttggggctgtagacgcggcggatctcctcggcgtgcgcgggatacaggcggatgagcagcaccaccagcgcgagctcgatctggtccagggtcttcagatatacgtccgcgtccccgccgaaggggtcctcgatgtcctggtcgcgcccggcggcgtagcccaggagcgtatgcgtcttcttctccgcctccgggcagagggcgagcacgcgcgccttgtgcgagcggcccatggtgagcacgaggtccgcgtcctcgatcatggcgcgggtgagctggcgcgcgctgtggttgaacaggtcgccgccgcgctcggcgatgaccgcgcaggcgccgtaggaggcgggcatgccctcgtcggcgtccgtgcccgcggagaggacctctaggtcctcgatctcgagctgctcggccatgcggcgcaggagctcctcggccatggcggagcggcaggtgttgcccgtgcagacaaagagtacgttcatgcgcgatcctccttcgcatcgtccaggcgcacgacggtgaagcccgccgcgcgctccacgcggttcatgaccgcaaggcccacgccggcaaggtccagcccctcggcgtagacgcgggtatagcccttctcgtccgcggcgcgcagggcggcaaagaggttgtgggcgtagtcctccggcgtgctgcccgccgacagcacgggcacctccccgtacaggccgcggttcttctccaggcagagcgcgcaggggcgcgcgtcctcccgggcgtgggcgcggacataggcgccgcgggccgcgtccccgcccaggaccacgacgacctgggcccggggcgcgtagtgccggtgcttaaggcccgggctcagcgccttttccccctcgggcaggggctccatgacgcccttgcccagggccaccggctcgccaagggccgcctccagcatctcgcgggtgacgccgccgggccgcagcagcacggccgggccgcggctcaggtccacgaccgtggactccaggccgacctggcagggcccgccgtccaggatgagcgggatgcggccctgcaggtcgtggagcacgtgctcggcggtggtggtgctcggccggccggagaggttggcgctgggcgcggccaggggccggccggtcgcgtcgatcagcgcgcgggcgacggggtgcacggggaagcgcaccgccacggtgtccagccccgccgtgacctccgcagggatggcgggcgccttctccaggatcatggttaggggcccgggccaaaaggcggaaaggagcttcttcgcgcgctcgggcacctggcgcacgacgccggggagctgggaaaggtcgctgatgtggacgatgagcgggttgtccgcgggccggccctttgccgcaaagacggagagggcggccttgggattcgtggcgtccgccgcaaggccgtagaccgtctccgtcggcatcccgaccaggccgcctgcgcgcaggatctcgccggctaggcggaggttttcctccgtcgggggacagattcgggtttccatgtgtgttccttcccttctaacgcggcgcggctcagccgatgtcctcggcggccaggcgggccgtctggtcggcaaagatgagggcgtccagcagctcgtccatgtcgccgtttaagaactgctgcagcttgtagagcgtcaggttgatgcggtggtccgtgacgcggccctggggatagttataggtgcggatgcgctcggaccggtcgccggagccgacctggctcttgcggaaggcggagacctcctcctgccgctcctgctgggccttgtcccacaggcgcgcgcggagcatgcgcatggcctgctcgcggttctggatctggctgcgctcgttctggcactggacgacgatgccggtcgggatgtgcgtgatgcgcacggccgagtccgtgcggttgacgtgctggccgcccgcgccgcccgcgcggtaggtgtcgatgcgcagatcgttcgggttgatctcgacctccacgtcgtccacctcgggcatgacggcgacggtggcggcggaggtgtggatgcggccgccgctctcggtctccggcacgcgctggacgcggtgcgcgccgctctcgtacttcaggcgcgaatacgcgccctggccttcgatgcgcagggagagctccttgacgccgcccagctccgtcaggttcgcgtccagctcctcgcaccgccagccgcgggcgtcggcgtagtggccgtacatgcgcgccagctccgaggcaaagagcgcggcctcctccccgccggtgccggcgcggatctccaggatgacgttgcgctcgtcgttggggtccttgggcagcagcaggagctgcaggcgcttctccagctcctccttgcggggctcgagctgggcgatctcctccttggccatctcgcgcaggtcggcgtcctcgagcatctcgcgggcgcccgcgaggttgtcgaccgtggccctgtactcgcggtaggcggccatcagctcctccatgtccgcgtgctccttcatgagccggcggaagttgtccatgtccgcgaccgtctccggctgcgagaggcgcgtctgcagctcgtcgtagcgcgcggccagcgcctcgagcttttccatcagattgaccatgccgcttcttctccttccatcgttgggtttcgctgcgccaggaccacgcggtccaggccgttcaaatcgcgcaggatcttcgggttccagcccgaaaagagcgcgcagaccgcctcgccctgggcggaaccgatctccatcagcagcgcgccgccgggcacaaggcgcgcgggcgcttccccggccaggcggcggtagaagtccagcccgtccgccccgccaaagagggcgagggccggctcccgccggacctccggctgcaggttctccatgtcctgcgccgtaaggtagggcgggttgcaggtgatgagcggaaagcgcaggcccgcgggcagggcgtcaaagaggtcgccttcgtacagcgcgagggagacctcgttttgccgcgcgttctcccgcgcaagggccagggccccggcgctgatgtccgtcgcggtgacggcaaggccacccaggcgcgccaacgccacggccaccgcgcccgtgcccgtgcacaggtccagcgccgtgcgcgcgcccaggcgcctgccctgctccagcgccgcctcgcacagcagctccgtgtcctgcctgggaatcagcgcgcgcccatccaccacaaagggcaggcccatgaaccaggcccgccccaggacgtactgcaagggctcgccggcggcgcggcggcgcaccgcggcgaaaaacgcctccgcctgcgcggcgggaacctcgtccgcaaggcgccgcgccagggccgtgcgctccgcccccatcgcgtcggcgagcagggcgcgcgcgtcccagtccgcgtccggcgagggaaggagcgccgcccgcccgcggcgcagcagctccgccgccctcacgagatcgcggccgcggtcggccccgccccggtggcagagcctgcctcgctggcagtgttggggtccggggcggcgcccgcctcgggagcagtgtctgcttcaggggcggcgccgggttccggggcggcatcggccgcatcaggttccgggtcctcgccaaggccgcagatccgctcctcctccggcgtcagggggatctgcgcggccagcttcatggagacgatggcgacctcgagcatgtcgctcgtgggctgcagggcggtcaggcgctgcagctgcatgccgggccagcgcagcacgcgggtcaccggcgtgtcgtgcctgccgaggtactgcagggcctcatagctcagcccggcgacaaagggcagcagcgcgatgcggatcaggatgcgggtcagcgggttgttgtccaggccgaacacgccggcgacggaggtgaccaggatcgagacgatcatgacgatcagcaggaacgccgtgccgcagcgcgggtgcatgaccgggtacttctcgcagttctcgacggtgagctcctcgtcgtgctcgtggcagtagacggtcttgtgctccgcgccgtggtacatgaagacgcgcttgatctccttcatgcgggtgacggccccgatgtagccgaggaagatgctgatgcgcaccagtccctccagcaggttgaccagcagcaggtggccgggcagcacgcggttgagcagcgaccccagcagcgagggcacgacgaagaacagccccaccgccagcacgatggccagcaccaccgcgcagaagatgacgatgtcgtcctggctgcgcccggtgacgcggctgagccacttctcaaaccgggagggttcctcctcctccacctcctcgcccatcatctgggccgagcgggtgatggtgttcatgcccgtgacgagggactggatgaaggccgcaacgccgcgcaccacgggccagcccaggaccttgtggcgcttggacagggggacgaagtcctcgacatgggtttcgattttgccgtcggccgggcggcgcacggcgatggccaggcgcgtcggggcgcgcatcatgacgccctccatcacggcctggccgccgatgtagaccttttcttccttctttggatgcttcatcgtttctcccttctgcgggcaggcgcagcgcgcggcccgcggattggacgtagggcgttttgccctcgtttttctatataccccaaatgggcaatcgcatttcgcgaaaaacacgtgcttcctagaaaaaaaagcgcagactggcgcgccaatctgcactttctcttcgcattacatgccgtagcgcttcttgaagcgatcgacacgtccgccagtgtccacaagcttctgcttgcccgtgaagaacgggtggcacttggagcaaatttcgaccttgagctcgggcttgaccgaaccggtctcaaacgtattcccgcaggcgcagcggacgatcgccttgccgtacttgggatggattccttccttcatgttatctcacctctttcaaaccacagtcatgtctgtgcgttgataacatcgacagcatatctagcatagcatacgcggtgcggaattacaagccgtcatggaaatttaacagactcatccctcgatcgccgcgcggacctcctcctcaaagtcgtcgcccgcgccccagtcgaacaggtcgaacaggccggtcttggttccggcgctggcggcaaagaccttcggcaggcccgagaggttgtccaggttcacgcagagcgcgcagtggttgccggcgcgcaggaagtacttgtcgaacagcagcgtgacgcactgcgcgccgtccggcccgcgggaatcgctctgggcgacgagctcggcggaaaaggagccgttcacgatcgcatccgtcacgcggcgcgcggcctcctccacggggagttgggttctcagtgtcaaagccatacttcttctcctcctatcctcttgcgcacaaggatagcgcatcgccgcgcgcgcgtctgcactttctgctccagttccgcgcgcaggcggctaaaacgtcgcattctgcgctcactcgaacagcaggacgcccagcgcccgataggtggcccagtcgacctcgtggctcgcgggaaggcccttgtccgccttaaagcgcagcagggcggccttggtgtactcgccaaagacgccgtccgggatgccgaagaggtagcccttctggatcaggcgcgtctggacctcgcgcacgtcgctgccgcggtcgccgggcaggagcgtgcgcaggcccccggccacgccgccatacgccgcccgctcgatgagcacgcggctgcccaccggcacgcgggcatagagctcctcgacgtccgcgttgtgcatccggatgcagccgtgggagacggccgagccgatggaggcgggcttgttcgtgccgtggatgccgaaggtgccccaggggcagtccagctgcaaaaaccggctgccgaagccgccgccccagtccgcggccttgcccgtgatccggaacacgcccaggggcgtcggggtgtcccgcgcgccgaccgcgcagggataggtcttgacatgccgcccgtcctcgtagagggacagcgtctgcacgtccgcatccacgatcagcagcgttccctccgcgcccgcgggcgcgccggacttttcctccacccctccgcagagcgcaagggcgatcaccacgagcgccagcgccgcggcaagccgctttcccacgcacaactccccctttcaagggagtgtatgcagcgcgctagggccggatgtccacgacctcgataccggtcagcgcgcgcttgatgagcgcctcgccgtccaggagcgtctcgctctgctcgagctgatcgacgcggggcttggtctgggggtggcggggggtgaagatcgtgcagcagtcctcgtagggcaggatggaggtctcgtaggtgccgatgcgctcggcgtagtccatgatctccgtcttgtcaaagccgatcaggggccggaagaccggcagggagcacacggcgttcgtgcaggtgaggccgtccatggtctggcttgcgacctggccgatggattcgccggtgaccagggcctggcagcgggtcctgcgcgccacgcgctcggcgatgcgcatcatgaaccggcgcatgaggaccgtcagctggctgtccgggcacttctggtagagctcctgctggatctccgtgaaggggacgatgtgcaggcggatggggccggcgtaggcggacagcaggcgcgcaaggtcgatcaccttctgcttggcctgctcggaggtgaaggggaaggagtggtagtggatgcagtgcagctgcacgccgcgcttggcgatcatgtagccggcgacgggcgagtcgatgccgccggagagcaggagcatggccttgccgcccgtgcccacgggcatgccgccgacggcggggatcttttcgacgtagaggtaggccctctcgcggatctcgatgctcagctcgtgctcgggcttgtggacgtccaccttgaggccgggatgggcgctgagcacgcggtagccgacctcctcgttgatctgcatggagtccagggggaagcgcttgtccgcgcggcgggcaacgcacttgaaggtgccggtgcagttctccatcagctcgatcgcgcgcgcgcagatgacctccatgtccttttcgcactcgacgacggggctgacggagtggacgccgaagacgcgcgtggcgcggcggatgacctcgtccatgtcctggatgtcccgcaggaagatgcggccctgcgtcagctccagggtgcagtccgtgccctccagggccttgcgcaggttgcgcacgagcgccttgatgaagaagttgcggttatcgcccttgaggaagatctcccccatgcggacgagcaaaacggttttcatagttctctctcccttattccaacgcttcagaaaaaagcggattcagcggcggcggaacgcgcgcagaaggtttacgcaccggccgatggcctcggcggtctggtccatctcctcctgcgtgttcatcgggcagagggagaagcgcagcgcgccgtcgatctcctgcggggtgcggcccatggcggcgagcacgtaggacttggacttcttgtgggaggaacaggccgagcccgtggagcagagcacgccctcgccctccagcgcgtggagcagcacctcgcccttgacggggaaggtgcagttcaggatgtggccggcgttctcctccggcccgttgaggcgggcgtcgggcacggcggcgcggatgcccgcccagagccgcctgcgcaggccggccatgcggcccgcggggtcgggcagggcgcggaaggcgcgcacggccgccagcatccccgcgatgccgggcacgttctccgtgccggagcgaaggcccccctcctgcccgccgccaaagaccgtgggcattaggtgcacgccgggcgcgacgaccagggcgccgatgcccttgggcccgtggatcttgtggccggagagggtatagaggtccacgccctcgcgcgccatgtggatcggcacgcgcaggaagccctgcacgccgtcgacgtgcaccagggtgcgcgggttcttctccttgacgcggcgggcgatctcggcgatgggcatgcgcgcgccgacctcgttgttgacctgcatgacgctgaccagggccgtctccccgtccacggccgcaacgagcgcgtccacgtccaccacgccctgcgcgtcgacgtccgcataggtcacgcggcagcccaggcgctcgacctcggccatggtctccagcaccgcggggtgctcgaccttggtggtgaggaagttcccgctgcggccgcgcagggcgcgctgcgcgccgaggatggccaggttgtcggcctcggtgccgccggaggtaaagaacacctgcccgcggccgcccacggcggagaggatttcgcgccgggcctcggcgaggatctcccccgcgcgcatggcgggcgcgtagagggaggaagggttgaaataggtttcgcgcatgcaggcggccatggcctcgatggcgctgtcaaagggccgtgtggttgcgctgttgtccaaatagatcatcgagcatttccccttcctggaaaagggggagccgcgctccccctcaaaagaacgatttccgcgcaaaaaaagggacgggcgtccctttggcgcgccttcagtatgccacactttggccgccgcgtcaatcgcgctcccgccgcattttgtcaattttgcgaaaagcccttgcaatcggggaggcttcatgctaaaatacatttgttttgaactgcattttccacctgaaggaggtgtttgtacaatgggaaagatctgtgaagtctgcggaaagggcgtcatgtccggcaaccacgtcgcgcactccaagaaggcgacccgccgcatctgggctcccaacacgcagaaggttcgcgtggtggtggacggcacgcccaagtccatgttcgtgtgcacgcgctgcctccgctccggcaaggttgagcgcaacgtgtaatacccactgaaaaaaacacggcccaaagaagccgtgcttttttcgttttggccggttttccgctcactttcggcagatcttgagcgcaaggagcgccgcgcccgcggcgagcagcacgacccccagcgcgcacaggagccacgtgggcaggaaacagaacagcagcagcacgagccccgccatgcacagcacaagcgcgatcgccggattgcacatcgccaaaaacacctccgcattctccctgcaaagagggtatgcggaggcgttttgcttcatgcctcaagcgggaggatggaagtgcagcaccagcgcccagcccttgtgcacgacaatctgcgcctcgggctcggtgagcacgttgctcacgcccaggggatggccgaactccacgtcgcagtggtccagcgggtagaacaggcccgagagggagagctgcagctcctcggtcatctgcaggacggagaggagctggcccggggttccgcgcacggtcaggcggtcgtgcacggcccaggcggtcatgtcctcctgctcggcgcgggcgcggatgccgttcttctccaggtagatcagcagctgaaagttcgccatccagtggtcgatgcggccgccgcccgcgccgacgaagacgacctcctccggccggcgctcgagcaggtagcgcgcgcaggccatgccgtccgtgtcgtccttgatggcggggtagacgatgtggggcaggttttcgcgctccatgtaggcgatggactccggccttgccgagtcaaagtcgccgatgacggcgtcgggccggacgtccgcggcgatggcggcgtccaggccggaatccgcgcagaggaggaagtcgctctccgccgccatcttccgcaggaacgccgcgcccggcgcacagccgccgagcacgaccagcgcgcgcctcatgccgtttggccgcgcaggacggccatggcggcggcggggtccttggcgccaaagagcgccgagcccgccacgagcacgtcggccccggccccgcgcaggagcgccgcggtggattcggcgacgccgccgtccacctccaggcggatctcgcggccgctgccgcgcaggagctgcgccgcctcgcgggtcttttccaccgtcgcggggatgagcttctgcccgccaaagccggggttgacggtcatcaccagcagcaggtcgatgtcgtcgagcacgtagcggacggcgtccaggggcgttgcagggttgagcgcaaggcccgggcgcgcgccgaggtcgcggatgtgccgcagggcgcgctgcaggtgcggcgtgcactcgccgtgcacggtgaggaacgtcgcgcccgcgcggacgaaggtctcggcgtagcggtccgggtcctcgaccatgaggtggacgtccagcggcagggaacagaccgcgtgcacggcgcggatcacgtccgcgccaaaggagatgttgggaacgaaccggccgtccatgacgtccatgtgcaggaaatcggccccggcggcctgcatgcggcaggcctcctcgcccatgcgggcaaagttcgaggcgagcatggatgcggaaattgcagtcataccttctcccccatttttttcgatcgttgtcgggttagctgtagcggcggtcccacttttccttgacctcggcaaagagggcggcgtagcgctccaggcgctcgggcgcgatctcgccgcgctgggcggcgtccttgacggcgcagcccggctcgctcaggtggcagcagccgtcaaagcggcagagcccttcgtagggctcaaactcgggatagaacgcgcggaggtttgcggggtcctccgcgtccagctccagcaggctgaagcccggcgtgtccgccaaatacccgcccgcctccagcggcacgagctgcgccttgcgcgtggtgtggcggccgcgctcgatgcggctgacggagccggtctgctgcccgaggcccgggcagaggacgttcatcagcgaggacttgcccacggccgactgcccggcaaaggcgacgatgcgcccggcggccagctccatcagctccggcacgccctcgccggtcccggcgttggtgagcagcaccgggcagcgcgcgccgcggtactgcctggcgatgtcgcaggcggtgtccagggcaaggtccgtcttgttgatgacgagcgcggtctcgatcccggccttgcgggcgcgcaggagcaggcggtccgccagcagcaggtccggctgcggggccgcggccgcgaccgtgacaaagagcaggtcgacattggccaccggcgggcgcagcagctcgctggacctaggcaggatctcctcgaggaagccctcctcctccgcggggccgggcggcgcgaagagcacctcgtccccgaccatggggctgatgcgctgcttgcggaagcgcccgcgcgcgcggcagacatagagctgcccctcgctctccaccgtgtagaagctgccgattccctgtaggattcttcccttcattcctcgtcctcctcgacgcgcaaggtgacggtgtcccgcgcggcctcttcgtcgttgacaaagacgatgagcgtcttttccccgggggtctcgctctccaggttgagctccacctccagcgtcccgcggtcgcagttcatggtgctgacctcgcggtagaagccctcctcctggaggaagatggtcacgaccgagtcgtcctgctcgatctccagcgtcagcggataggtgcccgtggccatgacgagctcccgggcgacccagatctccaccgcgtcgccgctgcgcatctgctggccggcctccgggctctgggcaaagaccgtgcccacggcgacgcccgtggcgctctcctcgtggatggtgcccagggtcaggcccgcgtcctcgatgagggcctgggcgctcgtcaggtcctcgcccacgacctggggcacgctgcgcagcagcggcgggtcgctgatggtgaggttcacgctctccccgttctgcaggacctcgccctcctgcgggtcctggtggaggaccgtgtcgcgcgcctggctgctctcctcgtcgcggaagatctcgccgacctgcaggcccaggcgctggagcgcgcgccgcgcgtcgtccagggacaggcccacaagggcgggcacctgcgcgctctccgggccggcgctgaccacgacgctgaccgtgtcgccgctgcgcaggctgctgtcggcctcgggctcttgggtgaggatggttccgggcggctcctcgctgtactgcgtatcgctcacctgcaggaccaggccgatctccgcaagctcggccgccgcgccgtccatggaatcgcccaggatcgcgggcacgaccgcgagcgtctgctgccggtgggcgatgccgatgcgcagcagcgccacggccaacaccccggccagcaacaggcagagccccgccagcagcagccgcaccgggcggatgcgcccttcgagcacggcgcgggcgcgcttcttgtcgcgcgccgcctcgcccttgccgtcgtcctctccgtcctgcggggggagcgccttgtttccgtcgacaaacccgccctccgggtagaccagcgccagggagaggtcgtcgtagaagtcgcgcgcgctctggtagcggtccttgggctccttgcggatggccttgaggatgatctcgttgagcgcgggggtgacgttgcggttgcgctcgcgcgggggcgtgggctcagcgttcatgtgctgcagggcgatggcgaccggcgtatccccggaaaagggcagctcggccgtgaccatctcgtagagcacgacgcccagggagtagaggtcgctctgcgcgccggcgggctcgccgcgggcctgctcgggcgagaaatagtgcacggacccgagcaccccgttgtccccgccgccggtgatggtctgcgtgtcgctggtctttgcgatgccgaagtccgccagctttgcgatgcccttgcggtcgagcaggatgttctggggcttgatgtcgcggtggatgatgtgcgcgtcgtgggcgatctgcagcgcggtgcagatctggcgggcgatggtgatggcggtatagttgtccagcgcgccgtgctcctggatgagggacttgagtgtcatgccgtcgacgtactccatgacgatgaagcgcgcgccgttctgctcgccgacgtcgtagatgtcgatgaggttctcgtggctgacggcggaggcggcctcggcctcctgctggaagcggcgcacgaattcgcggtcctggttgtactgctcgcgcaggaccttgacggcgacggtgcggccgctgcggaagtcgtaggccttgtagaccacggccatgccgcccttgccgatgacctcgcccagcagatagcggcccttgaggcaggtacccttcatcgctccgcctccccttccaagcgcgcgacgaccacggtgatgttgtcgcgtcccccgcggtcgagcgccaggtccaccaggcgctcgcaggcctcctgcggaggggattccgcgaggatgccgcggatttcgctcgtctccaggtagttgctcaggccgtccgtgcaaagaaggaacacgtcgcccgggcgcgtgtccacgtcctgggcgtccacggcgacggtgtcgtccgtgcccagggcccgggtgatgatgttgcggtaggggtggtccttggcctcttcctcggtgatctcgcccttgcgcacgagctcggccacgagcgagtggtcctttgtgatctggtagacctccccgccgcgcatcaggtagcagcggctgtccccgacgtgggcgagcatgacgtgcccctgcatgaagtagaggaaggtgagcgtcgtgcccatgccggagcggctcaggtcctcgtttgcggcgcggtagatggcgcggttggcctggcgcacccaggagacggcggtcttgaccgagatgtcccttcccgcggccttgcgcgcgctcaggcggatggcctcggcggccatggagcttgcgacctcgcccgcgcggtgtccgcccatgccgtcggcgaccagggcgagggaatccccctcgggcacgaggtagctgtcctcgttgatggggcgcacgcgcccgcagtgggtctttgcggcgacggtgatggcggcgttcatgcgagcgttccctcctgactcaggtgcttgcggcggagctggccgcaggcgccctggatgtcggcgcccatctccctgcgccgggtgacggagacgccccgcgcctccagccggcgctggaaggcctcgatgcccttctgcccgggggcggcgaggttgcgctccgggacgtcgttgagcgggatgaggttgacgtggcacagcagcccgcgcacgaggtccgccaggcggtccgcgtccgcaagggaggtgttgaccccttcgatgagcgcgtattcaaagacgatgcgccggccgaccgccttgacgtagtcgcggcaggcgcgcagcagctcctccagggaataggtcttggcgatgggcatgatgcgctggcgcgcctcgtccgtcggggcgtgcagggagatggagagcgtgatgggcaggttttcccgcgccaggtcgtagatgcggggcaccaggccgcacgtggagacggagacgttgcgcaggctcaccccgatcccctccggcgcgctgacaaggcgcaggaagcggatcacgttttcatagttgtccagcggctcgccgctgcccatcatcacgatgttcgtcacgccgcgcttgtccttttcggcgtgcaggcggttgacggcaaggacctggcccatcatctcgcccgcggtcaggtcccgcacgcggccctcgagcgtggaggcgcagaacgcgcagcccatgcggcagcccacctgggaggagatgcagagcgtgttcccgtagtggtagcgcatgagcacgccctcgacgaggttgccgtcatggagggaaaagaggtatttttccgtgccgtctttttccgaacgcagggtcttaaggatcgtcgcgcccagggcgcggtgcgttccggccagcttctcccgcagcgcggcgggcaggttgcgcatgcccgcaaagtcctcgcccttttgcagccagccatagacctgcttggcgcggaaggccggctcgcccgcgtccgcaagcacctgcgcaagctccgcaaggctcagccccatgaggcagtcgtccatctggttctcctcccctcttctgtgtctagttttgaatcggttccttcttcttcaccagccgcgcgaggaagaacccgtccatgtggtccacgtgcgggtagacggtcagcatccccccgcgggcctttgcggcaaactccgccgggagcaggcccgccaggtccccgggggcaaactccgggtggtccgcaaggaaggcgcgcacgttgttctcgttctcctcgggcaggagcgtgcaggtggagtagacgagcgcgccgccgggcttaacgtaccggcagcaggcgtccaggatctcccgctgcatccgggaaagggcgtcgatgccgtcctgcgtcacgcggtacttaatgtccggcttggagaggtagtccccgaggccggagcacggcgcgtcgaccaggaccgcgtccatgcggccgaggtcgccctcggcgaggacgcgcgcgtcgtggacgcgggggcggatgttgtccaggcgcagccggcgcgcggcgcccgcgatcagctccacccggtgatcgtgcaggtcccatgcatatacacgacccgcgccgcccatgcgttccgcgatatagcaggtcttgccgccgggcgcggcgcaggcgtccaggatctgcatgccgggccgggcgcccacggccatggccgcgagcatggagccctcgcccatgacggagtagagcccgctgcggaagcccgggtgctgcgcgacgaacccgccgcgcacgcggtaggcgccgggcacgcggcccttctcccaatccaggccctgctgcgtgaggtaggcctccagctccgcgtccgtgcagcgcgcggcgtttgcgcagatggtgacgtcgctctcccggtggcggtactcgatcagcgcgcgggcaaagtccatgccgaagtccccggcgaacttgtccaccagaaagcgcgggaaggaatagcgcacgctgaggaactcccgctcgtcctgcgggtaggcgatgcgctccggctcgcgggcgatggcgcgcagcacgccgttgacaaggccggccatgctctcgcgcttaaagcgccgcgtcagctccaccgcgtccgagcagacggcgtttgcgggaatcttgtccaggaagacgagctgataggcgcccatgcgcaggatctcgcgggcgacgctctcctcgcaggggcggtccatgtacagggacaggatgtggtccaggcagagccggttctccagcgtaccgtaaaagagctcggtcatcagccttctgtcgcgcgcgttcaggtgcgccgaggcgatgcggcgcgtcagggccaggcccgcataggcgtccgagttctgcacgtccatcagcgcctccagcgcgacaaggcgcgccggggcgatgggcgcggggcgcgccttgccgtcccgccttgcggggacggagggggttccggggcggcgggttcttttttcggtcattctctctctcctaagggcgcgccttggcgcatgggcttgccgcgcagatagtcgcgggcgttcattctcttggacccgggggcctgcagctccaggatctccagcgtgccttcgccgcaggcgacaaagagcccgcccttggcgtcggcgcgcgcgaccgtgcccggggcaaggccgctgtcctcctcgtgcgcgcgcgcggaccagatcttaaggacgccgctgggcgtctcggcaaaggcgccgggccaggggtagaggccgcggacctggttgtgcagctcgcgcgccgggcgggaaaagtccatgcggcccagctccttgtcgagcatggggtagtagcttgcggcgctctcgtcctggggggtgcgcacgagcgtcccggcctcgagcgcgcgcagggtccgcaggagcgtttccgcgccgatcttcgagagccgcgcggagagctcctcggccgtctcctccggcaggatgtc

SEQ ID NO: 2778 - DNA, 19331 bp, Unknown
  16S sequences of unknown bacteria
tggccaaccgactgaaaaaagctgcgggatttcatgtgattgatgccggcggagaggaggcgcggccgtgatcgtgtttggaatcaccggcggtaccggtgcaggcaaaaccagcgcgctgcgggtgcttgcagagttgggagcctatcttattgactgcgatgcgctgtattatgaaatgctgcgccccggaacggcgctgcatgaggacatcggcacagcttttgggcgggatatgtttgatgcgtcgggtgcgctgaaccggcagaagctgggcagccttgtgttcagcgcgccgcaggagctgcagcggcttaacggcattatttacagccatctgggggcggagatcgatgcgcgcctggcgcggcagcgcggcgcacgctgtgctgcggtggatggcatcaatatgctgcaggcccgcgccgccggtgcgttccagtgcgactgtatggtgggcgtcatcgcgccggatgcgctgcggctgcgccgtatcatggcgcgggaccacatcagtgaagaatatgccaaaaaacggattgacgcgcagcccggcagcgatttttaccgggagcactgcgatgcggtgctggaaaacgtatacgacagtacaacagtgtttgagcaggcggtcaaggttttttttgaggatctgctcagcctgtacgaatccaaaaaggagaaggaagaccatgtctgaacacaaaacaaaggcggaggcgcttgtttacgcccccgaaaatggacacagccgcgtgaatgcggcagaagaggaacgctgcacgcagtattgcgaagggtataaacagttcctggatgcaggcaagacggagcgcgaatgcgttcaggaagcggtagctctggcggagagagctggattccgcccgttggtgcgcggtgaaacactcgccagcggcgacaaagtgtaccgtgttaaccgtggcaaggcggtgtttttggcggtgattggagaaaaggggctggaagaaggcgtacagatcggaggcgcccatattgattctccccggttggacctcaagcctctgcccctgtatgaagacagtgaactggcctactttaagacccattattacggtggcatccgcaaatatcagtgggtggcggtaccgctggaactccacggtgtggcggcgctgaaaaacggcgagacggtggaagtgcgtatcggctgcggtaaggatgagccgcgtctggtgatcgaagatctgctgccgcatctgggtgcagaacagagcaagaagccactgggagaggcaatcccggcggaaacgctgaatattctggtgggcagtcagccgcttcagggagaagaaaaggatgcagtgaagcgcaatgttctggtgctgctgcatgaaaaatacggcatttgcgaagaggatctcatttctgctgaactgtgcgctgtgccggcttatgaggccatggacattggcctggaccgcagcatgatcggcgcttatggccaggatgaccgggtgtgcgcctatgcggcgctgcgggcgctgctggatgtcgggcaggtccaaaagacagcggtgtgcctgctggtggacaaggaggagatcggctcggtaggcgtttcgggtatgcagagtgcggccttcgacacctttatggccgatctctgtgcggcctccggtacgcgccgggatgtgtgctatgagcattccttctgcctgagcgccgatgtgaccgcggcttacgatcccaatttcgccgaagcctatgaaaagcgcaacagcgcccgcttcaattacggcgtaggactgtgtaaatacaccggcgcccggggcaagagtgaagcttcggatgcatcggccgaagtggtggcccgggtacgccggatgctggacgccaacagcgttctctggcagatggcggaactgggcaaggtggattatggcggaggcggtaccatcgcccagtatatggccaaccgcaatatcgataccctggatgcaggcgtgccggtactgtccatgcatgcgccctttgaaactgtgtccaagctggactgctatatgacttacaaagccatgaaggcgctgtacgaggaaatgtgattcgaagcacaaaagaaagaaaacgtcccgcggctgtttcgcggggcgttttctcgtttgtggacagttccctttttcagcaaattatgctatactaatactctacatactaagatatctatcattcgcacaggagtgtgcgaaccgaagacatcggagaggataccgtttatgaacttgatcaattcacagagtttatacactatcattcagcggttgaccattttgggaaaggacaaatttatcgaggaagaagaggcgcgctatgctcgccagatcgtatctctggcggatgagattgtggaaaacgatatcgagttggtgctgttggctggtccttcgggcagcggaaaaaccaccacagcccataatctgcgcaaagaactgatgtgccgcctcatgggcgaagggcattatgtctattgcctgagtatggacgattggtatatgtctgccgaccgctacaccatgccggtggacgaagaggggcagcccgattatgaatctccggattgcctggatgttccccgtctgaatcgggatttgaatgatttgtttgcgggacgggaagtgagtctgcccacctataactttatcacccgccgctcggtggagagcggtgcaaagatcgaattgaaaaaaggagatgtggtgatcatggaggggctgcacgccctgaatcccatgatccattttccggacgacacgctgcgcagtctgcgggtgtatgtatcccctgccgatgtgattgtggacgagacgcgggggatggagctgagcaatcaatatatccgcctgtgccggcgtatttaccgcgaccgggatcagcgcggcagctcggaagaggaaacgattgaaagaagccgcagcgtgaatcggggtgagcggctgtatattgccccctttttaaacaacgtgggcgtttggcgcgtcgatacgctgctgggctatgagttgttcattcatcgccgggagctgccggaggagaaggaactgcgggtggttcccctgtctaaaattacccggttcgatattccggagggttccattctgcgggaattttacaaagtgtaagaaacgattaaaagaaagggggagtgcgctgtgccggagcttttgtgcccggtctgcggcggtgtgctgacgcagggagaaaaagcggggatttgttcgtcgggtcacagctttgaccgggcgaaaagcggttatgtcaatctcttggtggcccgccaaagcggtgcgcagcatggggatgacaaggagatggtgcgcgctcgccgtgcctttctcgatggcggctggtatgcgccgctgcgctgcgcgttgtgttctgctgcggtgcggcatgcaccggcggaggatacggtggatctgctggacgcgggctgcggcgaatgttattataccgctgcggtggctgcagcgctgcgcacagcagggaagtgcgtcggtgctgcaggcgtagacatttctaaagacgccctgcgctggggcggtaaacgcgcaccggatctgcagttggcagtagccagtgtgtttcgcctgccggtggcggcgaagagctgcgatatcctgctcaacgtgtttgcgccttttgccggagaagaatacgtccgggtgctgcggccgggtggtgtgctgctgcacgccgctccggatgcgatgcatctgtgggagctgaaagaggcggtgtatgaaacgccgtaccgcaacgatgccgcgccgccggtccaggtcgggctatcgctggtggaagaagaacacatcagcgcggtgctgcacctggtgcggcacgaggatattgcgaatctgttccaaatgacgccctatgcccataaaaccggtccggccgatgcagcacggctggatgcactggatacgctggatgtcacggcggcctttgtgctgcgggcgtatcggagggactgaaatgggcggtgcacgggaaacgggaaggcatgcggcagcttacgctgcggcactgtgccgccggaaagcgacgagcgcggccaactatggaaagacttttctcaaatgggccgtgatcgcggcctgcattgggctggtgggcggcctggttggtgcggcgttccatatgagcgtgaatgcggtgacgaccctgcgtggtgcgcatccgtggctgctgtatctgatgccgctggcgggccttctggtggtctgggtctatcgcgtcacccaaatggaggggaaggggaccaacgacattatccattccatccactttggggagaaggtacccctgatgctgacgccggtgatttttcttgccacggtgctcacccatgtggtgggcggcagcgccggccgcgagggggcagcgctgcagatcggcggcagcatcggctgccaggtggggcggctgttccggcaggacgaccgcaatgtccgtgtagctactatgtgcggcatgagcgcagtatttgctgcactgtttggtacaccgctgaccgcggcggtattcgcccttgaagtacttacggtgggcgttttttactatatggcgtttatcccctgtcttatcgcagcgctgacgggttacggcgtttctctgctctttcgtttgccgcccacgcgctttgccattttggaggcctttgacctttcgccggcgggcgttttgcagattatggcgctttcggtgctgtgcgcgctggtgagcattgcgttttgtgtgtccatgcacaaaacggagcggctgctgcagcgcaagttggtcaacccctatgcccgcgttttgctgggcagcgcagtgttgattgttttgacgctgctgtgcggcacagactataacggcgcaggaacggatgtgatcaccgcggccatgggcggcgcggcggtgccctgggcctgggccttgaaaattgtgtttacggccctcaccataggctgcggcttcaaaggcggtgagattgtgcccgccttttttatcggggcgacattcggatgctttatgggagggctgctgggcattccggccagcttcggtgcggcgctgggtatcgtagcggtgttctgcggggcggtgaactgccccattgcatccctcattctcagcgtagaactgttcggcgctggggagctgagctattttgccattgcctgcggcgtcagctatatgctttcgggatattatggcatttaccagagtcaggaaatccgctattccaaactgaagccggaaaagatcgaaatccatgcaaaataacagcacaatggaacgatttcgcatacacctgcgaaatcgttccattttcatgcagtgggattttgccagctgtgcaaattccaatgtgaagcagcgcttttgagatgttttgttggatggtgcgttctgggtttttgcgcaacgttttgaacggatgcgtttggaatacaaaaaggaaaaaaggacgcttccgttaggaatcgtcctttttttctttgtcgcgcttttcggctgcgtgccgtttgggattggagggaaaccaacctttatgaacgcgctcctcctgctcgtgcagttctttgatgctccacaggcaggtgacgcccaagacgcccagaaacagcgagcacaatccttccgccaggagagaagcgatgagacatcctgcgcccgcagtgaaaaacgcgggccagatttttttggaaaaatagtattcgcaccagattacgatgggatggaatatgccaatcaataacagcgcagccgcgcccaccaagattccttcgaaatgcagcggcatccgtgttaccttccaggaaaaaccgtacgtccgctcattttcgaccgatatcggtgcgatagtgggcatcctggaaagaaataccctccactgcgtgatatgcctttgcgatggcgctttccagatcgtccgccgtggcagtcacgcccagcacacgcccgccgttggtgaggtaagtgccctcctggaacttggtgccagcgtggtagatgaacacatcctcgtctacgctgtccaggccgctgatgggataacccttctgatagtccatggggtaaccgccgctggccatgacgatacagcaggcggcgccgtcgctccatgttacattgagctgatccagtgtgccgttgctgcaggccatcatcacatcgaggagatcggttttcaagaggctcagcacgggctgggtttccgggtcgccgaagcgggaattgtattccaccaccttggggccatcgggcgtcagcatcaggccgaaatagaggcagccctggaaagggcggccttcggcggccatggcttccaccgtggggcggaagatcgtgtccatgcagacctgggcaatctcgggggtgtatttgggactgggggcaaaagcgcccataccgccggtattggggccttcgtcgttgttataggcccgcttgtggtcttgggaagagagcatgggggaaaggtgtttgccgtcggtaaaacacagcacggacacctcaggaccggtcatgcattcttcaataaccactcgggcgccggcttcgccgaactttttatcacccatcatggaacagattgccgcttccgcttccaccaccgtctgggctacgacgacgcctttgcccagggccagaccgtccgccttaacaacaatgggcgcgcccatctcgcgcacataggcaagggcttcattcatatcagtgaaaatttcatatttggctgtgggaatgccgtattgtttcatcagatttttggaaaaggatttgctggcctcaatgatggcggcgtttttgcgaggaccgaaagcgggaatgcccgcttcggccaaagcgtccaccatacccaaggccaggggatcatccggggctaccaccacataatccacgtcgtgttctttggcaaagagcaccatggcggggatgtctgtggccttgatctccacgcattcggcctcggcggcgataccgccgttgccgggcgcgcaccacagtttgtccagtttggggcttttggccagggcgtgcacaatcgcgtgctcccgcccgccgccgcccacgacgagtacgttcatatctgatttcctttccgctttcgcaggaattccaggggggaggcccctctggttttgccgataccccggcaaaagaagcttcatagatctccaataggggttcgccttcgatatgcaaaggcgagggagattcgaaaggagagaatgcgctctcgtttcggcagatcgccttagtggtggaacagccgcatgcctgtgaacgccatgacaatgccgtatttgttggccgtttcaataacattgtcgtcgcggatggaaccgcccggttcggcaatgtactgcacaccgctcttgcgggcgcgctccacattgtcgccgaaggggaagaaagcgtcggagccgactgtgacgccgctttgggtggcgatccaggactttttctcttctgcggtcagcacttcgggcttgactttgaacgtattctgccagacaccatcggccagaatatcctcatactcgtcggaggtgtagatatcaatggcgttgtcccggtcggggcggcggataccgtccacaaactgcagtcccagcactttgggatgctggcgcagataccagttatcggctttgttgcccgccaggcgcgtgcagtggatacggctctgctggccggcgcctacgccgatggcctgcccgtttttcacatagcacacagagttggattgcgtgtatttgagtgtaatcagcgctacaatcatgtcgattttagcctgctggggcagctctttgttgtctgtgacaatgttggagaggagttcttcatctattttgaaattattgcggccctgttcaaaggtaatgccgaacacgtccttgtgctcctgttcggcgggtacataatccgggtcgatttgcaccacattataaccgccctttttctttgttttcaggatttccagggcttcatcggtgtaacccggggcgatgacgccgtcggagacctcgcctttcagatactgagcggtagcggcgtcgcacacgtcggacagggcggcccagtcgccgtaagagcacaaacggtcggcgccgcgggcacggatataagcgcaggcaatgggggaaagctctgcgccgtcgtccacgaagtagatctttctatccacatcgctcaaaggcaggcctacagctgctccggcaggagatacatgcttgaaagaagcagcggcaggaaggcctgtggcttccttcagctccttgaccagctgccaggagttaaaggcatcgagaaagttgatgtagccgggtttgccgttgagcacggtaataggcagctcgctgccgtctttcatatagatacgggacggcttctgattggggttgcagccgtatttcagttccagttccttcatgggaaagcacatcctttcatttgaatcaattttccggcggggtaaagtgctcccgtcgaaaaaccccctttttatcacggcaaaacgctgtgccgacaggggtgttcagcaagggcagaatatccgggtcgttgttgcagatggtattgagggcataaatacccgcatgatcgggatcgttggtgtattccggggattcgtctccggcgaaaaaacgccagccgctgtcgggatagtctgatgacggttcttcgcggtaacaccagcccacacggcagccgtccactgtgatgcggtcgctggcgatacagccgaccgggccgtcccaatcgcgcagcaacgggcggatatccgcggcgggaatagcgtactgcttgcccgggggcgtataccacagtccgctgccccaggcagcttcattgctgagcagcatgccggtgagattcatccagagcgccgcgtcctgttccacttgggcgttgtcggccccgtggcggaaatcccagtagaatgcgccgcacaccagactgagggcgtagtccgtccaattttcaaacgtagcggcttgctggagccaatagtcggccagttcgtccagttcttcccgccgaagcaggccgcaggcatagccggcgcgcaggtggcccatgcattcgctgatgtcccagcccaggaagccgtgccggcccagaagcgtatagaattgggcggcaaaatcccgggcattacagaaccatgcccgtccgccttcgttcagttcttccagggcaaacgcagggcggttttcccagaagctttcaaaatccagatagttttcgtggacacggatctcccggttgcagaaatcccgcaggctttccttatcggtgatgccgaacacggttttcaaatgggcgcggcaggcggcggcctgcgcctcgccggcgcactgcggcagagtcgtaaacacgtcggaaccggcttcagacggtccggggatgccgggagttttacgcaggacggcaatgccgcacagcaaagcaagaaaggtttcgcggctgcagggcgtgccgggcgggggcggatagttttgcgtcagggtctgtgccagtgcaggcaggggggtctggacaggatgaaaatcccgcagagcgctgggatctgcttcaaacggcctgcgcatggcgatcagacgtttttgttgtagatgcgggtttcactttcgctgctgagcaaatggatgtaacgcacaaaaagggacactttgttctcttcgttgagcgcgttccacagcagttcgccgaaagcgtcgatcttgcccgtgatctgtacgggcttgggttcgccctcaaaagagggcaggggatctccgtcgcccatgtaagtggaaacatagcggccctcaccgggtgtgggattgtcatagccgaagaaatagcggcagcaacaggaagggtcgccccgatcgcttttcagaatggacagagcatatgtgccgtccttgtgcatcaggcccgaaatgcggggggtgtagttgggcgcgtccggctcaaaggcgcgggtatgcaggcactgggcgaaggtttttccttccagcaggccgtcgcggatggtgtcggtctgatcgccgttggtgacgatgatggtgccatcctccaggcagcgcacgggatggtaaatgatcagggaaggatcttcgagtttgctggcgtcaaaggcctcggtctggatgccgtcctccgtttcgatgaacacacggttgcgggaattggcgctgcggcccatgatccaataggcgatgactgcgttttcattgtcggcgctgcggcccaggataatgccgcggccgggatagctgttgttttccagttcctgctggatgtcaattgttttcatctctggcgctcctttttattcagcttgatcaatgcgtacaatgcggccttccacatgcagccgtccctggcagaacaggctgactgcctcaggcagcagtttccactcggcctgttccatcacgcgcttttgaagaatttccgccgtatcgccctcttcaatggccacggctttttgcagaatgatgggaccggcgtcggcttcggcggagacaaaatgcacggtggcgccggtcagtttcacgccgtattccagcgccttttcatgcactttgagtccgtaaaatccgtcgccgcagaacgaaggaatcaaggcgggatggatgttgatgatgcggttttcataccgttcgacaaaggcgggagagaggatatagaggaatcccgccagaacgatcagatcggcgttcaattcagacagcttgccgagcagcgcttcagtaaaggattcacggctgtcatagtccttgcggtttacgacatggccgggcacgtttgctcctttagcccgttccaatgcaaatgcgccgggagtagaggagacgacagcggtaattttgccgttccggatctcaccgtgcgcttgggcgtccagcagggcctgcagattggtgccgccgccggacaccagtacaacaatatttttcatcccttatttcaccatgacggcatcttcgccagttgtgatgatgcccagacggcagactgtttccccttcttcgcgcagcaatttcagcgctttttcagcatcgtctgccggcagggccaataccatgccgatgcccatgttgaaggtattatacatatcgcgcatggggatctcgccgacttcggagagcagtttgaagatttcaggcagctcataggaagaggtgtcgatttctgcggttagtccttccttcatcatgcggggcacgttttcatagaagccgccgccggtgatgtgggagataccatggatggacagtccttcgtccagcaggcgcagaacggatttgacatagattctggtgggggtgatcagcacttcgcccaaagacttgcccagccggtcgctataacggttgagtacatcgggatcgcggtcaatgttgaacaccttgcggatcagggagaagccgttggagtggcagccggaagaagccaggccgatcagcacatcgccttcggccatatcgctgttgtccagcatgcggctcttttccacgatgccggtggaatagccggccaggtcgtattcatcttcagcatacaggccgggcatttcggcagtttcgccgccgatcagggcacagccggcctgcttgcagccttctaccacgcctttgacgatttcggcggtgcgctcgggcacatttttgcccatagccatgtagtccaggaaaaacaaaggctttgcgccgccgcagatgatatcgttgacgcacatagccacgcagtccacgcccacggtgtcatgccggtccatgagataggccagcttcagcttggtgcccacgccgtcggtgccggaaaccatcaccggctcactgtagccgccgggcagctcgaagcagccgccaaagccgcccaaagtgccgattacgccggggatataggtggattccaccatgggcttgatgaggttggtggattcgtagcccgcggtcacgtccacgccggcggcggcgtagctgtcgctcttggaaatgctcattgaaaatttctctcctctcttgtctgggaaggggagattaagcgccgaacacccggcgcataatctcctgataggcgtcctctacgccgcccatatcgcggcgaaagcggtctttatccagtttctcgccggtcttggcgtcccacaggcggcatgtatcggggctgatttcgtcagccagtacgattgtaccgtcggacagttttccgaattccagcttaaagtccaccaaagtcacgccgacttcggagaaaaagcgtttcagcacatcgttgatccggaaggacaggccggtgatccggtcgatttcctcctgggtggccaaacccaaagccaaagcgtgataatggttcagcagcggatcatccaaagcgtcgcacttgtaggagaattcaatcgtgggctggggaaacacgataccttcctccactccgtagcgggaagcgaaatggcctgcggaacgattgcggacaatgacctccaggggaacgatggaaaccttcttgacgagggtttcccggtcgctcagttcttctacaaaatgggtggggatgccttcccgttccaacacctgcatcagatagttggtcagcttgttgttgatcacacctttgcctgtgatggtgccttttttggcgccgttgaaagccgtggcgtcatccttgtagtccacgatcaccagatcgggatcgtctgttgcaaatactttttttgcctttccttcgtagagttgcgcttgctttttcataaaaccccttcttttttgcagtgcagaatttatttggcaaagaacaattcggacagagtcatggggtccacatactggccgtctttgtaaacgcgcatgttgccggaggccacttcgtcgatgagcattaccttgccttcgggatcataaccgaactcaaacttgatgtcgtacagcaccagacccttttccttcaggtcatctgccacgatctgggtaattttctgagtcatgtccttgatgtcgtcatactgggcatcggtcataacgcccagagccaccagcgcgtccttggttaccagaggatcgcccttttcgtcgtttttgaacgtggtttccacataagcgggcagatcggcaccctcttcaatatattcgccgtaacggcgcaggaagctgcccacagccttgtggcggcagatcacttccaggccgtgaccgaacactttagcaggcaggacttccatggtggtgttttccaggtcggcgctgacaaaatgggtgcggatgccggcggcgttgatcttttcaaagaaataaacggacatgcgcaggttcacgtcgcccacgccgtcgatggtcagacccacagagttttcgccaggatcgaacacgccgtccttgccggtgcagtcgtccttaaacttcagcagatagttgccgttatccagtgcaaaaacatccttggttttgccggtgtaaaccagtttcttttccataataaaattcctccatatattatgaatttttaaatgatcgaaatgcaaatcagcggtgcgggcggatcaaagttctgcctggagttttgcgtccttggctgcgatttgggcggacatggaagcgcgggccgcgtccagttttgcggccagctccgcatcggatacggccaggatctgagcggccagaacggcggcgtttttcgcgccgttcagcgccacggtggctaccgggatgccgctgggcatctgcacggtggaaagtagagcgtccaagccgtcaacggctccgcccttcatggggataccaatgacaggcagggtggtattggcggcaaaagcgccggccaggtgtgcggccatgccggcggcgcagatgatgacgccaatgtcgttttcccgggcggaactggcataggcggcggcttccaccggcgtgcggtgagcgctgagaatgtgggcttcataggggatgccgaagtctttcagttgctccacagcagctttgactacgggccaatcgctgtcagaccccatgattacggcaacttttttcatcaatgatgtcctccttcaatcgtctgtaaatggatattgatgcgcaggaaacaacaaaaaagcgcagaccgcgcggcgcggtctgcacttgtagggcatcatgcgtggatggatgcgggcatgaagcggccatgtgcccggcagagaatccgaaaagacgagtacatggcgttccctcctgcgatgaaagatatctttatcatataaaaaacaaaagggaaattcaagcgttttttcaatgttcgtgtacctttacaatgggaaaagaaaaaccatgccggcttttgtccatatttgcgcgccgtttacagcaggccggtcttttctacctgatgctcaaagaaattcatcagccagataaccggacggcgcagcacaatgccgatcagcaaagaaatgggaatgtagattgcgctgacggagagcagatatgtcatatagttgtttccgtacataccgccgatgcactcgcgcatggcattgatgcagaacgtgaagggcatgtaggggttgatggcctggaagaattcgggcagcagctccacggggaaggtgcccccggcgccggcgacctgcacgatcatgatcaccacggcaatggccttgcccacgtctttgaacgaaacggtcagggtatacatcatcagggagtataccagtgcggcgaccagaccgacggcgatgaaacgcagcgggtacaggcactggatccgcagcagaaagagatcacccagacagatgatcagcccctgcagcagcgccacggcggcaaacaggcagtagcggccgaaatacgccacggtgggagggatatttcgaagcttttcgtcttcttttacgttggttttcaaaatggagcaggccagaaggccgcccacccagattgccagaatgctgtagaagggggtcatggcagacccgtagttttccaccgggtatacatgtttggtggttagttccaccggagaagccaggaattctgccacagtatccggattttcgcgaaccatatccaacagtttggcaaaacgctcgtctttttccacggagttcagatcattgagcagggcatccacatcgctttttgcattgtggagcagtgtgccggactgttgaagggcggcgatggagtgttccaaagaaccgtctacaccggtcagtacgttgttgatcagaggcagatcctgattcagcgttaccaacaggccggcgaggtcgtccaggcaagtgtaaaattgattcagggtatcgtccagacgcggggatacggtattttgatactgctccctgaccgtatccagatcgctgcgcagcgccttcaaatctcctcgcagggtggagagctgagaggtaggcagcgtgccgtctctgcgtatggtgtctgcggctttctctgcgctgcggctgatcccgcgcaaatcatcccacaatctgtccagtacggacaggtagggatcaattgcctgcttgagattttgttccaggttgccgctgaaagaaggtagcgggaagcctgcatttttcagatcgttgaccacagtatcgaatcggtgagccatagacagaaggctgttttccatgtcggcgagaaaagcgcgggtgcgctttaccgtatcggatgcgctgccggcagcggaggaaacccgatccagtgcagcggctgcatcggaggagatcccctccacgtcgccaacggcgtcttccagatcgtcgcatatggattcaacactgtccgcgacggcatccatgttgctctgcagcgcatcggtgagggcgctggctgtggcgtcggaagcgccggtcagagcgcgcaggctgcccaaagcagttaaactgtcctggatagtggtgccggtatccggcagtagtgcctgtgccgctgtggtcagctcttgagcggattgagcggtttcgatcagcaggtctactgcagaagaaaaatggtcgatatcctggctggttttttccagagaagatgtgatatgctccacaatagagtcttctttttcttccagcatgctgtctgttatattcaatacatccagaactacagcggaaacggtgttgataaattgttcattgatcgtgctgcgcagcgtacccataccggtggtggtgatttttgcggcaatggcgtttttcttttcgttgctgtaatactcgatggcagggcgctcggtattgtcggtgatgaatgtgacaatatcctctgtgaagctggcggggataatcaccgctgcataatatttgccggattccacgccgtcgcgggcctctgcttcgttggtaaactgccagtcaaagttttcatcgccgtgcagactttcgatgacacgctcccccatattgacgctgacgccttccacttggtatccggcgtccttgctggcgacagctacccgcaggtttccggtattgccgtagggatcccagttagcataaatattgatccatgcgtacaggcttggaatgaatgccacgcccagcacaatgatcagcgccacggggcggcgccataaattgcggatatcccgtgcaaagatccggaataccatgggaatatcttcttttatcagctggacaaaaggatgcatatgtggagctttcataaaatcctccttatcaaatgaaacaaaaacagccaggagccaaagtgcggtctcccggctgttgcgcgcagttcagggcacctgcaaaagcttgcgcatcgtatcggaattgtgttgttcgatatggcgcagacgctccacgccctctttcagtgcggttgggtctgctcccaatgccagcgcctgatccagcttggcgcaaaggctttctgtgctgagccgggacagatcctcgtacagttcctgtcccatataggacagaaaagcgctgactttgggatcgtatactacgccgaccagcggcacaccctgtccggcggcaaaaatcagcccgtgcaggcgcatcgagatgaccgcttgcatgcggctcatcagtcccagcgtcagctcggtggacaggggctggcggaggatacagggcgtttcctccaggcaacgggccacttgatcggcggcggcgccgtccgagcggtggttaatggagaaaaaaaccggggtaagcccatgttcgcttcgggcgtagcgcaccgcagcagcgaacactggagccttttctgcgaagccaggccaatcccgcagacaaatgccaagataagagccgtggggcgtgaggccgttttgctccatcatgcggtcgatatctgcttcagcggcacgctgcagcgtcagcgcggggtcagaagctaaaacgatttcaggattcgttacgccgaagcgctggagttctttcaggctggaatcctcccgcagtgtaatggcgtccacgcagccgttgagcgttttccgggtgagggcaatgtcctttggatgcttgaccgggccgatgccgcagccgtacatcagcaccttgcagccgcggcgtttggccatgcgcagggtgaagagataataccataaactgcggcgggacgttacgtcctggatcagactgccgccgccgttgatgtagagcttggtgcgtcccatcaggcggtaaatggcaggcaaatcaaacatatggagagagcggacaccgtggcacaattttgtttcctccgggttgcgggagaggacggtgatctcctcggcaggggctacggtacgcacctcctgcaaaatggccttgaggatgctctcatcgccggcgttgcccaggccataggagccgcagatcacaatgccgctgcggttattcacttttcgctggcgttgtttttccatggctggtcgttcctcgcctccgctgcagcggagcatgtcataatttgaaagtggcagattagagcggagcgggaatcaaagtcccagaatggcgcggatgcgcgcagaaatctcggcgttgtataccgatagatcgtcataggtcttctgtgcaggcttttgcgcgtggatcaaggcctgcaccatatcgctgcagccggtgataccggggttgtaggcttccagatttttggagatgtacagcggcagccccagggctttagcctcccaaatgaccatgccctggccttcatagcgggaggtgagcacgaagccgtccattttgtccatataaggaaaagggttgggctggttgccgagcagtgtcacatggccggacagatccagtgcggcgatctgtttttccagagcggcgcggtcaggaccgtcgccgatcagataaaaatgaaaatccgtgcgggcttttttcacttcagccaaataagtcatcagcaggtcgtaggccttctggtggcagatgcgccccacggagcacaggttcagcttgctttcgtccaccgaaaaatccaccggagcgccgactttgcggaaaatttcaccggtatcgatatggttggggatggcggtaatgggtttatcctgaatgttggcggcgcggcggaagccctcgataataccgggggatacggcggcaaaggcgtcgtagtatttgagcttacccttgaaaaagtgccacagcacgcggtattttggctcgttggcgcgcttgatctccacatcattgtgaatccacatcacccttttttgagcgttggccttaatagcgcccacagcgcactcgttgcggtagctgctgaaatccacggccacatcgtatgcttttccgccggtgacgtcgccgctgagcttcatcacaagaccaaaatacagcaggcggaaataagacggcataggcggaagataacgaatattcagattttcatggacgggcacgtcaaaaaagcactctttgtcatcaagatagacatcgccgcagcaggtgctgtagtcgatctcgttgaggatattcaccagcgctttctggatgccgcccacgcggagatccgattgaaagatcgcaatttgtttcatgctcgcttccgcctttcatgtacttggaaaattgcgtatttcaaattgtataatacttttcccgcttttgcaaggggggaatggggctggattcgtgattttgcaataaaaatgatcttacaattttgataaaatgaccaaattaaccttggcgcagccgtgtaagatacccttctaaaatcaacgatgcggctacagcgtccactgtttttttgcgtttttttgcattttttccggcactgaataaaatattgtgggcgtcaatggtggtgcgtcgctcgtcccacagcgccacagctgtctcttatacacatctgacgctgccgacgagc

SEQ ID NO: 2779 - DNA, 3803 bp, Unknown
  16S sequences of unknown bacteria
ggaggtcgccgcgccgaccgtcgggatcagtacatccgcctggaccgatgcgatcgaagcacaggcaaagccaggcgtaggctatacactctactatgcctctgccgttaaatggacccaggcgggcgacagctcccattgggaatttgacagcgatacgattgctgaaacagaggtttacggcgtgacgctgtacctggaggcggaagcggggtacgcctttgcggagtcgctgacctcagccaaaatcaacggacagaacgtgagagtcttagaacagagcgtcggcagtgtgagcctctttctgccattcggtgacgtcacgattaccaatgtgaaggtggcgagcaagacctggcccattgatggcaatgcgattaacaagacaccggagaatttttatgcccagaaaaatgatgcccgtgccgcatataccctggagtcggcagcgttccagatctgggaaagcggcagtggctaccgggacctgaccgcggcggagatgatcttcgatcaggcaaaaagctaccgtgtgatggcggtgctgcaggcgtgtgagggtgctcgctttgccgagacagtcactggcgattttaatggaactagcggcgtgacctgtactgtctcgccggatggcaagacctgcaccgtgacccggagctgcgcggtgtatgatccgatctgcacctacccggcagctgacccgacagaaagtgtgaacggcgtcacggtctaccgtaacgatcctgtggcggggcagccctatgagttgggggaatttgcccccacggcgggtgctgtctggctgcggggcgcaagcgctacggcggggtggtatgaagtgccctatgtcggcagtacgacccagatcaagcagctgaaaaccggcgatacatttgaagacggcaaggtatatctcgcgaccttgcagctgcgcaaccaggatggttttcggtttggtgacggcttcacggtcacttttcgacagaagaatgaaagtgcaagcaattatgcgctgctcaaatgtgtgagcgatacggcaaagcgcaaggaatacaatgtctggtacaccgtgggagatgtcaccccacagccagtcacggagcttgccatcaccggtcccgcgctgcagccagacggcagcttggcgaccgacgatttgacagcgttttctgtggaaggcagcgtgattacaagtgcttccttctatcaaaacaccgggaacctaagtctccggcttgtggcgtcgtcgggccactattttgaccgtactgtgatggcgacctacaatggagcgcctgccagtatatcgtatggatttctagtcagcaaatgggatgtcgtgtatgtggcggtgaatttcaaaacgcaggaacttaccgtcgcggcagatacgattcaggcggagaacaaaacctatgacggcacgacggcggcgactctctccggtggcagtctgctcgggctgatcgacccgggcgacgatgtcagaattgattattccgacgctaaagcgtcgtttaacgatccaaatgttggggcgggcaaaacggtaacggtcgccggtacgctgcgtctgaccggcgcggatgccggaaaataccagctttcccagccagacctgactggtctgacggcggatatcacgccctgccagagcgtgacggaccatacgcagacggcccagacggtctacgcaggggagggcgccttccaggcggcaagctttggcggcgtaaacggagaaacggcgactggcacgacaacatatactgtcgacggccaggaaaaaaccacagcgcagatcgaggacctgctgcggcagagcgccatcggtgcgcagcttcccgtcgcctatgtgtttgcggggacgggcaactatgccggggcgtccgccagcggtacgatcaccgttactgtggtacgtcaggtgacgaatccgtttacagatgtcccatccggcgcctattatgaagaagcagttctctgggcagtcggagagggcgtcaccagcggtacctcggccacgaccttcaccccggatggcagctgcacccgggcacaggcggtcagcttcctgtggcgtatcgcgggccggccggcgcctaagaccggtacgatgccctttgcagatgtgaaaacaggtgcttactattatgacgccgtactgtgggcgatggaaaatggcatcacttacggcacctccgctgtggccttcagtccggatgcaacctgtacccgcgcgcagatcgtctcgttcctgtatcggtacgtcggcagccctgctgtgcaaagcggtgcggtgttcagtgacgtcggcgcgtcggcctactatgcagacgcggtcgcctgggcagcgacaagcggtgtggcagccggcatcggcggaggcaaatttgcgcccgaccagaactgcacaagagcgcagattgtgagcttcatctaccggatgcagacaaagtaaccagcccgccgccggaccatatcagcagcggcatctagaatacaagcagccccgcagcatagggcctatgctgcggggctgttctgtctatctatctgcgctgccacaaataataaaatcgcgtttccatgtacatgatcgcgggttttagaaaaagacagcagcaaagggaaaagccaaattgtaaaaaacagtgtgcctgcaatttggcagcgaagaagcgccctgtcgggcaaagaagcctcgccgcaaggcggggatctgtaccgtaaagggcgcttttgtgctggtgccggtggccggactcgaaccggcacgccatcgctggcggtggattttgagtccactacgtctaccaattccatcacaccggcatataacaaaaatattatagtatacagcgccgaaaaaagcaagaaaaattttgtggcgctagagcaaaatggcgggtggggaaagattgcgcagttttagaaattgtgctatgatgatagcaatacggtattatcctacagccggaaagaaggggttcttatggaacaaaacacggcgctgccaggaaagacggtgatcgtcgtctgcgatgcgatgctgctgcatctgcaggcagcccaggagaaaatggggacgagcttccccgtggtggagattgaccgaaagctgcatgtggagcccaagaggatgtgccaggagatgaagcgggttctggcgcccctggggcaggcgtatgatacgatcctgctggcgatgggcttttgcggcggcgcgctggatggcgtgggtgccgattgccgtatcgtcgtgccccgggtggatgactgcatcaccctgcttctgcatacggatgacacctggtaccccaatctaaagtcctgcgggcatatgtactttcgggacaatgacgaatattttaatatccacgctatttatggcagaatgttggaacaatacggtgaaaagaaggctggacggctgttccgggcgtattttcggtcgtataccaacgcggatatcatcgatacgggtacctatgattgccgggagcctggatatgtcgctgacgcgcaggtgcaggcggagatgatccacagcaagctcggttatgtcccgggcagcaatattctgctggaaaagctggtcagcggccggtgggacgagcaatttgtcattctcgagccgggggagacattttacaatgaccaatttattaaacaaccgcaagaaacggactgcctcgcgatgtgaggcagtccgtttgtgcttttggcaatataatcaggcttcgacggccaattcgccgttttggacgctgacgcgaagctgcgcacccggcaggata

SEQ ID NO: 2780 - DNA, 17936 bp, Unknown
  16S sequences of unknown bacteria
acggacatcggtgagaacggctgtgagctatctggcggcgagcgtcagagaatatcgatagcccgcgccttcctgaaggacgcgccgataatcctcctagatgaggcgaccgcgagccttgacgtcgagaacgagacgctgatccagacggctctgtcgagattgataaagaacaagaccgtcctcgtgatagcgcaccgtatgcgcacggtcgcgggagcggacaagatagtggttctcgccgacggagtagtcgcggagcagggaagccccgccgaactgtataagaagaacggcttctatacgcatatggtcgatattcagacgaagagtcaggaatggaagatctgaaaatctgaataagaacgccgcgcgcattgattctgatgcgcgcggcgattttttacagatatttccgaagaagttgcgtgagctcattcactgttctctgatcggacagtttgcagagccgtctgagtctgtagtagagcgtcccttccgagataaagagcttcatcgcgatgccgacgcggctctctcctttcgagagacagtcgagtatcctgaaatcagtctcatcacagcgcgtcagacagttttcgaggtcggtcacctcgctgacagtctggtcggagtagaagttgaacgtgtgctccggcggggcgtcggattccggtgtatgctcgggcatatgcctgtattcagtggaagcgctcggatagaaattcgcgcggacgcgtacaacggcgtttatgtcggcggagctttttgacagataataccaaagctccgcgcactgctttccgagttcctcatggtcgaccgagaatgtcgatatcccgggagacagcgggctgctgaatatcggcgccagcatcgtgtcactgaagctgatcgcccacatctcacttggcacctcaaccccggcgtcacgcagcattgatgacgcggcgagcatgaagatgtcatttgtgtatataatcgagtcatacgatccgcgtttgttcagaaatttgtcgacacaatcggcgatgccggaattattatagaatatgtgatcgttcatcccgtgtgccagcatatatttcgacttctgtctgtcggttgccgagtccgggttgactccgataagggcggtgtgtgtccttccgtacgccgaataataattgaatatcctgtccattgtgtcgtagtagtccatgatcaccatgcttgagtcgtgtgacggcgtgatcagggagtagttcaggaagagcatccgtatgctcttcgcgcggcagaccggtatgagccgttccatcagccggtcagaggctccgatgacagtcaggagcctgtttctgtttccgaagagctcctctccggacagatcgaatatcatgttttcatcggtctcgcggattgtcacgcctttttttgacgcggtcttccggattccttccatggctttgcagtaccagagaccgctccggaaatcgacctcagagcatataagcatttccatatctttatcccccgtatctgtttctattgtacacgaagttttccggtatgtcaagtgtacttcaaaaaaaatatctgacctctgttattttttgaagtcagacccggactgaatgtgctataatctatatagaaacagaaaatccgaaaggaaaaaacgcacaaatgaacaaagtcagtgttaaagacaccacaatcagtatcccggtatatccggtcggcgcgcctgagaaactgccggtcttcgccgagaaccgcgtccatcagcggatgagcggcaatccgtacccgaacgcggtgacagctgacgtcagggcttctgataaaccggagcggcgggagctgcgcgctgtcgtgatagagaatgactacatccgcgtgacggttctgccggaatacggaggtcgggtgttcagcgcggaggacaagacgaccgggagggattttctttaccgtcagcacgtgataaaaccagcgcttatcggtctccttggaccttggatatccggcgggatagagttcaactggccgacgcatcacagaccgtcgacattccttccgaccgacgtgacgatagaggaagatgagcacgagtcggtcgtgtggcttacctcgagcgacgtgtttgacaggatgacaggttcggtcggcatcgcgctccgggacgacagggcgtatttcgagacccgcgtcaggctttacaatcgcactccggagcgacgctcattcctgtggtgggagaacgcggcggttccggcgggacctgacctcaggatattcttcccgcaggacgtcggacacgtgttcttccactacagacgcaacacgacggcgtaccctgtgaccggcggctggttcaacgggcacagaataccggagaacacagatatcagcagacacggaaacacgccgttcccgacgtcgtatttctccgcggcgagcagatatgattatttcggaagctatgacgagagcaccggcggaggagttgtccatgtcgcggatcatcatatctcacccgggaaaaagatgttcacgtgggcgtacgatcagctcgcgaggacgtgggagaaggcgctgaccgacaccgacggaccataccttgagcttatggcgggctcatattctgacaatcagccggatctttcgtggcttgcgccgtatgaggagaagcgcttttcgcagtactggtacccgataagcgacacgggcgttccgtgcttcgcgaacctcgatatggcggtgtcagtgcattccgatcgtgtggtgatcagaccgacagggagcttcgccgactgtgagatcaccgtgagcgatgaaaacagagagatctcccgcgagaaaacgtcgcttgacgtgttgcgcaatcatattattgaactcacaggagacgttgtcggtgaggtgagaatagtcgtgaagtccgccggaaagacgcttgtcgactacacgacgatgaagccgccgaaggacgagaacgtgcccgtgatagagggattcccgacaccggatgagtgccgctcgtctgaggaggcgttcctgaccggcacgcacgtcgtcggttaccgcgacccgtcggcgaacgccgagaggtattttgaaaaggcgatcgcgctctcgggcgacaacttcgaggcgtacgcgtcgctcgcggagtgcgtggcgcgccgtggggactttgagagcgcttaccggaacataacccgcgcgtgggagatacagacaatgcgcgatatgagacccgtcagcggcaggacagcctttcttcgtggaaatatcgctctcgcgctcgggaggcgtgacgaggcggaggaggcgttctgggacgcgtatttcacggcggacacgaaggacgcggcgctcgtgagaatagcggagcttgaagggctgcgcggtgatttcaacgcggcgaagcgtcacgcttcggagtcccgcgccggcgtcagcgccgacgtcatccgtattctcgctggaaaccggctcggggaaaagacggatatcagggaaaaactgagggaatacccgatgagtcaggcgctccgcttcgcggcggtaatctgcggagaatacgataaaagggcgttctatgatgggttgtcggatgagccttcgcagacctgtatcgatatctttgaggatctgtcacgcgccgggttcgcggacgaggcggcggaagcgctccgcggtcttacaatgtccggaaagcgatactcctgtatggtctggtatctgctcggggaaagaccggagacaaaggatgtatgcggagtctttcctcaccgcgagtgcgagagaaaggtgcttgagacagcgttccggaacggcgacgcatacgccggatatctgctcggctgtctcctctgcggcagacgtgagtacgcgcgggcgcacgcgatgtttgagaagagcggtttgccggagggaacaaggggcgctgctgtctgcctgtggaagctcgggctgaagagcgaggcgctcgaaaaactgagagccgcggcggaaagaatgccggacgacgatcaggtactttgggaactgttccgggtggagaaccggctcgtggcatcgaccggcgacgcggaaagactgctcatgaacagaaagaaaatccgggacgatatctgcacagagtacgcggttgcgctctgccggcggggagaacctgacagagccgtaaccatcatggaagggcacgaatatgtcccctgtgagggcggcgagggcgccgtcgcggacgcgtggattctcgcgaacgggatgctggctgacagggcgttcggcgaagggctttatgaaacggcgctcgggctgtatgagaaggcggagactctgccggggaatctcggagccggctggtggaacgatgccaagaaggcgccgctgagatacgccgaggggctttgcctcgaaaagctcggaagagagaaacaggcaaaagaacgtttcggatggataacatctctgctgactgatttcttctcggacatggcgctgcctgagctcgacatcataaagattaaagcatacagaaagctcggcaacactgaagtcgcggagaaaacaataagatccgcgcgcgcccgctttgaaaaggagataaaccgtcgcgacagcgggttcttcggaacgacgccgttcttcgacagcttttatgccgagagcgacgccatggcggagagacacgctcattacggaagacttctcgcggagcttgaaaaagtttcgcttgatggttgacagaattgtcagagtaatatataatatttgttgaagggagcaaacacgatgaaaaaggcaacagtaatccggatccttacacttgcgatcatggcgtcaatgctcatgacatcctgcggaggagagaccggcggcgacactaccgaaccgaatacggaaaccacagtggaagagacaaaggacgtctcatacccgtatgagataaaaaagctcgacggcagagagttcagattcctcaactgtgtcgacgatcactggcagggcgcgtcccagataatcgactacgactcaatgaacggtgagacggtcgctgacaaggtttacagaaagaaccgcgacgccgaggaaaagctcgggataaagatcaccgtgacaaaggaggctgtcgatcagctacacaaggctgtctcgaccgccgtcatggcgaacgacgatatctacgacgcggtttacggctgcgtatacgcgttcggcactgagaccgacggcaagtatgtgctgaatctgcatgacatcggggcgattaactttgacgacgagtggtggaacccatcctacgcgaaatccgcgctcattggcggcgacaggctgtatgtcgcggtggactatatgaacctgaacggctacacatggactgacgcgctctatttcagcaaggaccttgtgacgaagtacgggcttgaaatgccgtatgatctcgtgagggacggcaaatggacgcttgaccggatggctgagtacatgaagcccgcaatcaacctgaacggagacgagagcttcaaggtgaatccggagggcagaagcagctacggactctgtgtgcagcacagtggcggcatcgtcgcgatctccgagggagccggaggattcgtggtcgagagagataaggacgggataccggcgatagtatcgaatgtcgagggagcggtcaacgcttttgagaagctcgcgggaatgctgtccgatgagggttcctgcttcatgtacaataccgcggagtacagctcgctgatggcttttgtctccgggcgcggtatgttctatcagggagcgctcggaaactcgctcggcgacaagatgcgttccgcgtcgagcgaatacggtataatcccgctgccgaagtttgacgagaagcagtcccagtattattcgacagtgagccagtatactctcgcgctcagcataccgaagacggtcgccgatcctgaaacagtgggcgcgtgcctcgattatctcgagtgggcaagcttcacggagtgcattccggtcgttcaggacgcgctctgctataagggcgtgcgcgacgacgattcgatcgagatgctcgatatcatccggaagacgcagtataccgacatgggcgtgatttacggttggtcaactgagttcataacaaagcagagcgataacgtctataagggaaagctccagttcgcgtccgatttcgcgtcggcaaagcagaagatcgaggatagcatttcgaaatccctcaaggagatgggcataaacggctgaaagcgtgaaccggctgccggcactgtcagacgtgatgacggtgccgcgtccgggacgcctcaggcggcaaaaatcacgaaacctgtaaaggaagacagaactatgaagatattgaatggtatcaatgacggaatggtcatgcagcgcggcaccgcgacgaacgagtgtgatattcttttgtcgctcgaatgcgatggggaacccgccgcgaagtacgacggcaaagcggtgagcctcacgagagagggcgataactggcggctgaccggcataccggtcggcggaccttacacgctgacgataagcgataaaaacggtgaggttgactttgacaacatctatgtcggcgacgtctggattctcgccggacagtcaaacatggagggcgccggactcatgaccgacgctgaatacgcgtacgagagcaaccctgatatgtcggtgcgggcgttctacctcgacgacagctgggacttcgcccgcgcgcagctctgcgagcagtggaagaacgccgacagggctatcgcggagaaattcatgaatatccggaaaaactcaatctggaaggaagctgttccgtccggagagcagaccgacggcgtcggaccagggctgttcttcgcgctcaggatgaaggattacacgggcgttccgcaggggcttatcgcgtgcgcgttcggcggcgcgagcctcgcggaatggaagcccggaaaccccgctccggacgcgtattatccgtcgctcgtccgccgcttcagggcgtgcgggagcaatgtccgcggcgttttctggtatcagggagagagtcagacgtctgagggcggaatcgcgtcgttcgacgacgatatgaaggagcttgtcggagcgatgcgccgggacttcgggaaggatgatcttccgttcgttcaggtgcagataggttcacattcgctctacggaatatccgagcagggtgctaaggagtggacggcgatccgcgagaagcagaggacgctcggcggcaagataccgtatctcggcacggtcacggcggtggactgcccgcgcgacgatctgatacacctgagcgctgaggggcagagaagagtcggaaagcgcgccgccagagaaatggcgtacctctgcggctatgacgcgaagccaacgccggagatactgtcgataagcgtcgagccggacaaggtcagatatttctggtgctgtatcaacgtgaagtacaaaaatctcgacggagatctgacggcgtacggcgacaacccgatgggattttcgatcacgtctgaggacgagacaccgtatctgttcccgtaccgcgggatatcgaacgtgacgctgaagggcgacacggtcagcataaggactgagctcaccgcggagcagctgaaaagtgtcagcctgtggtatggcgccggactctcctgtgcctgcacgataacagacggcggcggaatggcgatcccggcgttcggaccgataaagctgtcggagtggattgattaacagcgaaagtgaacactgctatggaaaagaaatacacaaaagggattgtcatagaaagcggcaatacatacacggctgacctcccgcgattcgattttcgcccggaggactgtgtcgtgacaaatgagccggagtaccgcgccccgtcgtcagcggcaaaatatcctctgaccgccgcgttcatcctgaaagacctgaaagatgtgacgctcgatttcggcggggcggagcttgtctttcacggaaagattgtacctttcattctcgacggatgcgagaatgtcacaataaggaactgcacgatagatcatgaccgaccgttttatacggaagcgcatattcttgatgtctcagaggaccggctgaagctcggtctgaaggacgattttccatgtcgtgtcgacaaaggaaatctcgtcgctgtcagcgagtattgggagaacaggctcgatcacggcgatctgctgatgcagccgtatgacccggagaccgggacgccgacatcgtcgatgatgctcgcgctgataggcgacgaggtattcccgcacccgaacccgcctcttccggtacaccatatgagggtgaccggacacggagacaagacggtcacgctctcaggcgggtttccgtctgactggagggctgggaccgacctcgccttcacgcacgagatacgcgacaagaacacgttcaccgccgtgggctgcgatggggtgacgctcgagaatgtccgcattctgcacggcgcggcgatgggctttgtcggaatgcactcgcgcgaccttactttcagacacttcgatatgtacagggacgaggcgcatccgcgctatgtaacgaacaacgcggactcgatacacacctttggctgctcaggtaagattctgatcgaggactgccggatggattccatgctcgacgactctctgaatatacacggcaacttcacagtggctgagagcgccggcggtgatatgatcctggcgcgctctccgggcaaaggaatgacgaaccggatgaaaaattatctgtccggcacgaggatcggggttttcaatggtcagacgattgaggaaaagctgacgctgaccgtaaaaacctgtgagccctacccggacgacgagcgtatgttcaggataaccatggaggaggacgcgtcaggcgtcaatgccggagacctcatcgagaatctgagcggaaacgccgacgtcactgtcagaaactgcgagttcggcagattccgcgggacaatgcggatacagacgcgcgggaaggtgctgatcgagaactgctcgttcgcgaacagcggcgacagcgtgatcttcaccggcgactctgtttactggtatgagtccgggccggtcaggaacgtgacgctgagaaactgccggtttggcggggcggtgaacgcctgcccggaggtcagggtgacagagaaggcgccgtattatcatgacggtataaagattgaaaactgtcattttgcgacggatatcatcttcaagggacttcagacggacaggacgcggtttgtcggaaacacgtgcgggagcggaaaaatcccgaccgttacgctgcgaggctgcggaatatgcgaagccgactgcgcggttgtcagagaatgaaatgagaggaacggaaatgcttcatggaatgaaacttgtcggtcatatcacaccgaaaaactccagtgagatcagaaactcgcgcttcggtatcggtcttgagaagatcgacagatatctgtacgacccggcgccggtttacgacccgctggcggagaccggcgtcaaatatgtcaggatacagtccggctggatgcgcacagaaaaagtgaagggcgtatacgactggaaatggatagacgatatagtcgacaatctcgtatcgcgcgggatggagccgtggatatgcctatgctacggcaatccggtctggtcggagaaagcggtgaatgtccgcggcgccataggcgtaccgccgattttcagtgaggaagaagcggcggcgtgggacagatacgtgtcggaatgcgtcagaagataccgcggaaaggtcagaatgtacgagatatggaacgagcccgatggtcagcactgctggcgtcacggcgtcagcgcgtccgagtacggaaagttcgcgaagcgcacgtccgcggcgatacgcgcggcggatccggaggcgaaggtgcttgccggttcgttcttctcgtccggctcgacgacatatctgcatgatttcctgaaggagctcacgccgggcgacattgattttgtcacgtaccatcagtatcgttatcgtgtcgagcacggcattgaggagttcgcgcgcgggatacggaagatgctcgacgcgttcgacccgcgggtcggtatgatacagggcgagaccgggacgcagtcgtcattttcgcggaacggcgcgctctgcggttctgagtggacagaaagaaaacaagcgaaattcctgacaaggaagctgcttattgatctgaagactgaggttgaattcacgagctggttcacggcggtcgatatcttcgagaatataatcaatgagaacggaactgtgaaaaaggattattacggctttttcggcgtgctcggagagaagttcgcgccggacggtgcccccctcggagaatatgagccgaaactctcgtacacggcgctcagaacgatctgcgcggctctttccggagccgaaaagacagagctcgccgttttcttcgagaatagctggacaccgctgttcgggagaagcgacgaggatccgtatgatcccgcgagccggattatctggcagggctttgagaaaaacggcgcgaaggcgctcgtatactggaaggcggctgacgtcatgaccgaggagtttctgtcgacagtgtcgctgagatgcttcgatttgccgggagagatacgacttaccgatctcatgaccggagaggtgtgggcgcttgacgggatgatcactggggaggacggagaaattatactttcgcatattccggtaactgattacccgctgatgctgactttcggaaatttcgccgaggtgacgactgatgctgctgcgacgctgtcctgacagaagaaaccgcaccggggaaatcgtcgaggcgctgcggacggctccggatggctctgttatccgttttgagccaggaatatacgattttttcgcggatgacgctttaaacggctatttctgcccgtcctgcaacaagagcagtgacaaaaaggtgatttttcctgtactcaggaagaagaatatcacgctcgacggcggcggcgcggagttcatatttcatgaccgcgtatttccgttcatcgttcaggattcggtcggggtcacgcttgagaatttttcggttgatttctcgttcccgcgctgtatcatctgcgatgttcagactgtcggggaggatgggatatgcctttcgattgaccgcgcgaaatacgattatcggacaaatgaagaaggtaatctgatgatacgcgcggggaatgacgagttttccacctgcgagcgcagattcttcctgaaacaggggacgcgcgggaacgcggactgctgttatctcagcgccggagaaatattctacgacaatgacagtcttccggcggaagtgttttactgccgtgccgaggagacggacgacggagtgtttcttcgccgtgacggcaggagcggcttcagtccccggttcaccgcgggcgctgaattgctgctgagctatgacgagcagagggacaacgacgtgtttttctttgacaggtcggagaatataaccgtccggaatgtcagtatccatagcggcgccgggatgggattcgtcggtcagtgctgccgtgatctcgctcttgagagctgtgtgatatccccgcgctcggagggcttttccacgaccgcggacggaatactgctgacgaatttctcgggtcgggtcaggatagagaactgcgttgtcagagacacgatggacgacgcggtcagcgttcatgggtattatacgacagtagagcgcataaccgctccgcgaaaggcgatcctgcggatgcgtcacaggtcacagagcttcatgaacccttactgtcccggcgacagactcgttgtcacggacggaaagagcatgaacgaaaaggacgcgataaccctgaaaagcgcccggtatgaaaacgacccgtatctcatatacgcgtattttgacgaggacatacgcgggagactgagaccgggcgaccttatagaggacccggaacggacgccggaaacgcttatcaccgggtgtctcttcgagaacgcgtgcgcggtgaggctcggaagcgccgggaagactgtttttgagaacaaccggatgctgaattgttccggactgctcgtcaatgacataatgagctggtggtacgcgtccggaccgacaaaggacgtgacgatacgcgggaatgtttttgacggatgcgggataagcgcttttgtcgacaggggaatgccgtgtgaagtccggcacagactcatccggatcacagacaacgagtttaagaacggcgccgcgatatccgtaagaaataccgaaaagctggttttgtccggcaacagtacagacaaagcggaactgccggtcgtgacagacggtaaagtgaccgtcatggaggagtagcatatgagtcagcttcttatgagatggatacctgaggagctttcggagccggagcttccggagggctttgcctttcaccgcttcaggcgcggcggagatgaagtatttactgaagacgagttcagaagacaatggataagtatgcgcgacgcgtccttcggagagacgatggtaaagtggtatcacaccgtatacgacgatccgcgggtgccggatgatgggttctttctggttatcgccccggatgggagaatggcgtcgagcgcctgcgtgcagtacggcgagcacacgccggattccgcgacagttcacgcggtctgtaccgatgaaaaataccggggcatggggcttgggagggcgaacatgatcgctctcatgcgtcatgtccatgaaaaaggcttcccggagctgtggctgacgaccgacgattggaggatacccgcggtgcggctctatctgcgtctcggatttcttccggttctgtcagagccggatatgcgcgggagatggctcgctctgcttgataagacaggcgagcggaaaatcagggtgatcggcgaggacggacaggaagattttctcgtgaaaaacggatgaacgaaggaatatgaaacagacagaggtctccgcgccttttaagtggaaacctctgtatgttcttattttccggataaccggcggagaatcctgactgacggctccggtattcttccgagactatccggcccgacgttcaggagatagttgactccgcggctgttcaggtgttcctttattccgagtatctgttccgcggatttgaaggaatcgtcgtaatatttgaagccccatgaggaattcatcgtacaggggcattcccagagaccggttttcgtgtcctccggcagtttgttgtcgctgcatgatgtgtaatcaccgcggccgtttccgatgcgcgagttgatcaggcaatcgggctgatatgatttgacaagcctgtagagctcgtcgctctgcccgggggttatgcacttcggcgtgtcgaaccatatgagcagaaggtcgtcgaatttcgtcacgagttcctttacctgcggctttatctttttctcgaagcagcgcgagaaatcccagccgctctcgtccggaaaatcccatgagttgcggcagaacagaccgccgtccttctcgtgccagtcgatttcctgcgaataatacagtccgagccgcatatcatgctttctgcaggcgtcggcgacctcggcgatcacgtctctgccgaacggcgtccggtcgacaacgttgtaatcgtccgcctcggagccgtacatcgcgaagccgtcgtgatgcttcgcggttatcacaagatatttcatcccggcgtttttcgcgagaagcacccattcttccggatcgaagaataccgggttgaaggcgcgggtgagcttttcgtatacacttattggtattttgtgtgtcgccataatccactcggcgttgacgtccgtgcgtcttgagtcgtattctccggcgagcagtgagtagaggccccagtgtaccatcattccgaaccgggcgtttctgaaccattctctgttatccatttttctgaccattcctttttattttcagatattgacatcgtggtgattctatgatagaatgattataccataattgctgggaaaagtcaattctcagtattggtgagaaaatatatccggattggtgttttgctttgaatgagaatatagaatttctggttttcggtcggaagaggataggcgcggaatggagcccggcgatggatccggggctcgataaactgtattatgtctacgacggggaggcatactataacggtatgaggcttgagccggggcacctttatatatttccggagagccgcgggaaatgggaactccgcgggagtttcgatcacctctatttcgacttttttccgtatcccccgctcatgatttccggtgtgattgaccttgatatcagggaatatccgggaataaaggcgatatgcgacgcggcttccgcgctgttcactgtgtatgagcgccgtgaggtggtcagtgaggcgaagctgacgcttgagatacttctcggacttatcggacggacggtgcggctgagatcgacaggggacggcagagttgaccgcgcgatagagtatatttccgcctgtgttaacgatcatggcggagccggtctgaccgggcgggagctcgccggtcttgtgaatctcgacaggttctattttagtaagctcttccgggaaaagaccggaacgacgccgggaaatttttcgcgcggactgcgcatgaagcgcgcggcggcgatgctgaggagcggcgcgacggtcacggaagcggcgttggcggcgggattcctgtctgacgcggctttcgtgtgctcgttcagaaaatacttcggcgtcactcccggaaaattccgcgcgggaaagcctgacccggaatcgtatggcggcgagccggaagcgtgaaaataaaggcagagatgacgcggcaagcacggtcatctctgctgttttaatatggatatattatccgtagatctccgtcacgttttcgacaagttccgcgtaggatttcgcgatcttatccgagtgtttcgcgagataggacgcgacatcggtcgatttcttctctttcaggagatatattgccatggtggtgagctcgtttccgtttccgtagttccagttgaagtcgcagacgagggacgagcgtatcatctggtacatttcgtaggaggtcgcgtcgcggaggtatttgctttcgaagattgagttgtacaccgcgggggtgacagttttccaggattcatatgacagagcctcggttatcctgccggcgaattccttcgtctcgtcgtcgaggttgcctggtatgagaagtatctgcgaggagagcatggagctgtagttctcctgcgcctcgtcgtatttcgggagcgggactatgccgaagttgacctcggtgtcgcggagctttggcagctgcaaggtcgtctggtgcatgaagaggatgttcccttcggcgaacgccgtgacgctctccttgtctcccgtaactgttccgatgtaggtcttgattccgtcgtagagaagtgaatagtagcgctcgaacgagttctggagccggtcagacatctgaagcagctcgacactgtctccgtttgctttcgccatcagcattccgttcgactgcacgctgcgcgacatcagcgacggtgtctcaccgggagtcgtgtagccgaatatgtcgccataggacggcactccgtcgccgttcaggtcggaagcgaccgactcagctatttcggcgagctttgtccaggtccactttccgtcatagacgaggtcatacggattttcaagcccgaacttctctgtcatgtcctgattgacatatatgacgtcggcgtagctgtacacaagatcggacaccgctatcgggagcacgccgcagatcgagagattctcctttatcgaggcgttccaccacggctttgacacgtcgatattgggcattgtcagaaaatccgcgagatatccgccgacgagcataacaggaacggacgaatacgtgtgcgagattgccaggtggtattctgtatcccccgcgttgaccgatttcatcagggctttcggaacctcatcccacactccgccggtgtttatgtacgagacagagacgttgaatctgtcgccgaccgcgtgattgcgtttatagacgctgtcgctcagcagatcgccggtctcggtctcagcgtcatacggccaggcgtttccgagctgatccgcgctgtagacgatgttgaactccgccccgccgtagtcgacgttttcaagtccgtctgtgagctcttcggttgtcgtatcctcttgcttttccgatgtgccgtctgtcgtttcgtttccgccagggttaccttctgagccgcaggaggcgaggagaaggcagataagaagggacgctgaaatgagccgcttttttgagtttttcataatgaatcctgtcctttcagaatagaatactgtttcattttttccggaactgtgacggcgtcatgcccgtcgtctcccggaatacgcgcgtgaaatactggactgaggaaaaaccgcactgcgccgcgcagtcggtgagggtgacgaactgatacgagaggagcttcttagcacgctcgacgcggaccgacctgatataattcgacggggaagtatgatgcgccgagcggaacagccgcctgaaatacgcctcgctcatcccgaagcgctccgcggcgccggagacggtgaaggactggtcgaaggctccctgctcaatgaacagcttcgcctccgtcatcttcttccgcgttccggagccgagatatccgctctcacgcgagtcggctatcagagcggaaatttcatagatgcacgccatgcaagagttgaacctttcgccggagaccgagttgtatatcctgaacatccgcctgaaaagattctccgcgtccgtcgtgctgtgcggtgtgcagacgaagctgtgccgcgcgccttttccgccgtccgcgaatttgaagtcgcagtacaggaagctgtactcctcacctccgaccgacattctgtaggtcgagtcgttcgcgaggtagagaatgtctcctgccttcacggtgaagctgtcgttttcgaactcgtagaagcaggttccggtgaggatgtagacataagcgtcgctgtgccttcccgtgaccgtgaacggctttgtgtacggtgccatcgagttccggatgacttcgatcagttttataacatatggttcgttatttgcactcttgtcagcgtcgtacataagcgctcctttcgccgtccggcatagcttccgtctgattacggtcttattatagcatatcaaaacaagaattgcaagcgaatccggaaatcacagtatcgaaaagtataattctactgataattactgtttacaaatcttcgcgtcgggtgtatactttaattacgataagcataatgaggaaaagaaaatgagtgagacaagatcagagctctgcgcctatgccgcgggtcacaccgtgataccgggtgagccggatgtcctgaccgctgacgcggctaacgtcatacatatattcgagaattgtgagatgaggctgactgaggcgaacagcttcttcgtcacggtcgccaccgattacgtaatgaacgaggtgataagcagacgcgccgccgcgctgccggatatgctttgcgggctggctgacggcgtggattcgcgcgcttattccggagtatttgacttctcgcacacaatgccggagtgggacaccatcctgcgtctcggcttcgtcggtctgcgggaaaggctcactgagtacagagccggaagctccggcgatcccgcgaggacgcgtttctacgacacctgcgtcagagtctgggacgcggcgctgagattcctctcaagagcggcagatgcggcggacgaagccgggcgcggggatatcg

SEQ ID NO: 2781 - DNA, 6031 bp, Unknown
  16S sequences of unknown bacteria
gttatgtggtgccgcagcagcggccaaactgtggtttacgaaaggaagtgccagccatggcaaagtctcacacccccggcatccggatgccgctcttgctcacgctggcagcgctgctggccgccctgctggccctgagcgccctgttccccgtcaccggagacgactggtaccgggaaaccgtagggcagaacctgcatacgctctccgagcttgcagagcttctcatagaaaagtaccaaaccaccaatccgcgcctgctgggcaacctgctcgcctattgcgccggtagccacgctgcgctgcgggccgtgctgcgcggcggcattttatttattctgattcttgcagccgccaaaaacatcaaccgcctgacaccaattcctgtactgctgacgttcaccgcactgctggttctgcctcaagcgatgtttgcccaagtctatccctgggccgccggctttttcaattatgttcccccagtggccactaccctgctcttttttgtcctggcccggccggtttttgaaaaagagccgatgcgcgacgtcccaagtgcggccctggccgcttttctgctgggcttctcaggccaactgtttattgagcacaatacactgtacgcccttctggcctctctcgttcttctggcttggtatatcctcgagcagcgccgtttctccctcgtacttttcttccacaccgccggctgcgttctcggaaccgctctgctgtttctttccccagcttaccgcgccatcgggaacgaggacaacgcctacaccatggaacgcggattgcagggttttttgaacacagcgcgggaaaaccttcccgatatgctccaaagcctgattgaaacatcccccgtgctctatctctcgctggcagcgctgtgcctgttctttttcttctccctgcgcaaaaaacgctggagcgacgtcttactcgctgccgtgatcaccgcggcagcactgtggtatctcgccggacagctgctgggcgggcctgttcccacgctgaagcttcgactgctcatcgcgctgatttggggattcacactgctgctttcctgcctgctctgggtgccggaaggactgcagcggcggcgggcagtctttttcctgctcagtgcagccgccgcggcagcgccgctggctgtcgtgtctcctatcgggccgcggtgtctgtttttaccctatgtactgttgctcctgaccgccggaaatcttttgcaggcagcgctggcggatgtccaacggccggcacgcgccgcaacggccgcagccgccgtgctcgccgccggcgtctgggtcttttacctgcagatctatttccccatccaccaggctgaaatggcccgggagcattccattgcccaggccatggcccggggcgaaacggaaattaccgttgtgcgctatcccaacagcgcatggctgtgggaaccggaatcccaaaagatgggggagcagtatttttacgaaacgccccacgacatcacgtttgtcctggtcaatgccgaaagttgaagcgttccctatccgcgcgtcagcagaaacacaccaaacacaataagcgccacgcccagcaatttgcgcagcgtgatcttctcctgtaaaaacagcgccgaaagaaccagcgtccagatatatgtgatcgccgtcatgggataaatcacggaatattccatccggtgcagcagcgcaatgttcagcaatgcgcccgctacataaaacacacccccaaggtacaaaaagcgattgcacaacaatgcacgcaggcccagagagccgccggtactctttttcaggaagaacgcgcccagagatcccaaaaacgtcatcaaaagggcgatcccgatcagcatggccgatcctcctttttctccggcgcgctgagcagcaccaatcccagaaggatgaccgccacccccgcagctttgtacgccgtaacgctttcgcccagcaccacgccgcccagaacaatggaaagcacatatcccgcgctcagcatgggatgcagaatggaaagttccccaaaccgcagggccaccaccattaacagcgcgccgcagccatagagcacaaatcccaccagcatcagccacagggcgccggaggccgacagcttccagcacaactggcccacgcaggtgagcagcgacgccgtcagcatcaggataatgcccagcggcagattttgtttatttttcttcatgctttccgctccttttctttcccttgccaaagccaaggcaaaacctgtccccgacgcacgagaaatgcctcctgcgccaaagcagccagaggcgcgtcagaacaggagtcggaatagaaccgttccacctccgccgcgccgtaagcgctccggaagcgccgcactttttcttctccccggcagttcggtcccaacagctgtccggtacgcgcgtccaccggcgaagcgagaaagcgcacgcccaggcggcggcaggccgcgccgatcaaaaaatccggcgaagcggaaataatcacgtccgtattcgattgctgtgcccggtaccacggctcgataccaataagatggcggtcccagaagcgttccgcttcctgcgccgcctccggcacaaagcgcagaaattgataaaagcgctctttaaactgctcccggctacagttgccctgccgaaaggccagcgccttggccaacgtgcccggcagcgcccgggcagccccgggataccgccttaggcaatggcgccaaaaatccacggtgctgtcgccccgatagatggttttgtcaaaatcatatacattcatagcattgtcccacattcatttctgttgtttcacatatgctctttatcttagcagatacccatgcaaaattcaaccgaatgcggccccggaacaggagcgccgcacgcaatacagcaaggagattatcactttggaacactatttggcagactcacagcgcccgcagctttctccgaaatggatcggcttcgcctttttgtgcgcgctctatatcctcctgttcgttctgttgtgccagacgcctctgtattccatcgaaggggcgcacaacgaccgtctgttttccgcagacgacatctattacaccaattatttcttctccaccacgatggacgaatccccacgcattgtcaaacacccgcttctgatcgtgttcggatggctgttcacctgccttgagtccaccatcctcggccccatcaacctgcgtcatcactacgagctgatcgtcctgctgcagttatgtgtttctctgatatccgtgctttacctgtacaaaattctcgatgaattttaccatctgcgtccgcgccacaccgtgctgctgtgcgccatctatgcgctgtccttctctacccttttctacactttcattgccgagagctatatcaactccagctgcattcttctgatgagctattactacgcacgccggaaaaactccgccgctgtagtactcttgggcgttctggccgcaggcgtgaccatcaccaacgcctttctctgggccattatcgtattcgccacatccacacagagcctgaaaaagcgtctggcgctgcttgtactgggaggcgtgtgcttttgtctggccgtagcgctgtctccggcaggccgcatcttttttcaggacacgctggctgtctgcttcggcagcgcagaaaattacagcgaccacttccccctcctcaccatgctgcgctatgcctttttcattttcttcggctccacgtttttctttttggatacgcaaaacgctaccccctttggagattatcccggcgacgcgctttcgtttctgccttccgccccgccgctgatcgtggccgccatggcgttttggtgcgccgtgctgattgccgccgtcatcaaagggcgccgcgatccgcttctgctggctcccctgggcgtgctcattttcaaccttctactgcacggtgcgctgcagtacggcctgaaagaaggttttctctattctctgcaccatctttccgcacagcttctgatcgcagcgcttctgctgcgcccgaaagaacagcccgcaggaacatgggacaagatcccaccgattgccctgtccgtatttctgctgtgcgaaatcctattgaatctcccgggctatttccagctcgtacattatattggggggtgagcacttgaaaccctatatccgtttactgcggccaaaacacgctttgaaaaaccttttaatcttcctgccgctcgtttttggcggcgcactgtttgatgcgccggtactgcaaagcgctgtgtgcggctttgtggcgttctgctgtctggcttcagtggtctatattatcaacgacatctgcgacgcgccgcgggaccggctgcatcccaccaaaaaaagccgccccatcgccagcggtgccatttccccaatgcaggccgccgccgaagctgccgtgctgctggccgtgatgcttctgttgagcttctggtgcaatttcccactggaaagttacctttgccttgccatttattttgccgtcaatatcggttatagtctgggattgaaaaatgtccctattctcgatattgccctgttggtgtccggttttctgctgcgggtacttttcggtgctgcggtcacaggcatcgctatctccgattggctttatctcaccgtcatcgccatatctttctatctgggactgggcaaacgccggggcgaactggcgcgccaaaagggagatacccgcaaggtgctcaaatactatacctatgactatctcgacaaatacatgcagatcagcctgggcctttcgatcaccttctatgctctctggagcatgggcgctgcaaacggcatggtgtggactgttccgctggtaatctgtttatgcatgaaatacagtttgaccgtagagggcgattccgacggcgatccggtggaagtgatctgccgggacaaaatactcctggcactggccgcggcttttgccgcactggtgctttcgatcctctatctgttctgatcctgaaccccaccctggcagagtaccgctttgccgcataaacgcaaagggcgccggagcaaattcgctccggcgcccttttatgaacagttacaacaggagtcaaaacaaaaaacagggtgcctgctcagccgtgcaaattcagcacagcaatgccggcaatgatgagcgccagggcatagcccacaatcacccccagcgcgggcaggagcttcgcaaatgcgttgcagtattccaggcatgccgttccaatcagctcaaacacaaggaaaccatccgaaaaactgtcttgtctccttgtaatatcatgtttttcccggattgccctgcggctcagaaccgtccataaacagagacaggagttttacgttgcatcaaactctcgcggtttcccgccggcttcctccgccgcttcttccatcagctcccccaaaaatcccgacacatcttcttccaccggcagcagcaattccgtgacaaagtgctcctgcagcgaagtggaatacgaatcgatcacgcggcgctcaaacacgtcgccccgcagggtaaaaccatgccgcgccgcccactccagcagcgccgcatacgtctcacgcacctgttcgagcgcacccaaatgatagcctgtcaccgctgtgaagccgcccagaagaatcgtttcctcccgctggcggctgccaggctgcatgtgctccaaaaatgccatctgcgttggctgcccttccatccgcgcctggaaggaatcaaagcgcacatacaccgcaccgcccacgtccaccatagcccgtccgcccagtttggaaaatgttttataattagcctcaatgtaggcggccgacttctccgtgccgtcgtagcggcagcggtagcagaggtaacgttcccggggaatgtaacgggccgccggggaaagtcccccgtgccgcagcacccattctccttctacaaacagctcgtaccacgccttcaggctctcctcccggcggtgatagtagtcgatggtgcggcggg

SEQ ID NO: 2782 - DNA, 4074 bp, Unknown
  16S sequences of unknown bacteria
ggcgggggaggctgttatttttttgtcagttcaaagcttatttccatgagaaaaagcaggcgtttttccgatatattttccagaacgaccgaaatccaatgctttttattcatatgataggcgggaaaaacggcgattttgtcccgcggctccaatgggtcgcatttcagattgataacttcaagctttctttcgggaaaaagaccgaattttgacgaatccacctccattataaggccgaaccactttctgctgtcgctgtggcggaaaaccgtcgcggataaatcggaaaatggattgtccataatgcaggggaaattatcttttacaagctttttggcccggtcagccgtcattttccgtcgcctccataatgctttgggcggtttttatgccgtccaccgccgccgacatgattcctccggcatacccggcgccctcgccgcagggatatatgccctttatgttggagtccccccgttgtgaccggaccatgcggagagggcaggaggaacgggcctcggggccgcaaagcacagctccgtctgtgtcaaagcccctgatttttcgtccgaaaatcggcagagcctctcttatcgactcggttataaatttgggaagatagctttcaagctgagcaaagctcacgcccggaagataggtcggcacaacctctccgagcttttcggaggggcggtttttgagaaaatcacccgcaagctgtatcggcgcaaaataattttgtcccgccgctttaaaggcagcctgctcgattttccgctgaagatacactcccgcaagggggtcgggcgagccgaagtcctcggggcaaacgttcacgagaattgcgctgttggcgttttgcccgtctcgcgccgaaagactcattccgttggtgcataccccgccctcttccgacgcggcggccacaacctgccctcccgggcacatacaaaaactgaaaaccccgcggccgtttttcaaatgcgccgaaagcttataatcggcggcgggaagacggctgtcaaagccctttccgtactgtgcctcatttataatatgttggggatgctcgatacgcacgcccatggcaaagggcttttgctccatgaatatcccgcgggttcttagcatttcaaaggtgtcccgtgcgctgtgcccgagggcaagcacaaggcggctgcagggatatatttttttctctcccctggcttcgacctcaatggcggtcagccgcccgttttcgacaattatgtcggtgagacggtggccgaatttgacctcgcccatgttttcgatttcccgccgcatatttcggacggtgtgaaaaaggcggtcgctgccgatgtggggctttgcctcatacagaatttcctcgccgccgccgaaacgggaaaaggtctcaagcacaaatttgcagcggggatcctttatgccggaattgagctttccgtcggaaaatgttcccgcgccgccctcgccgaactgaacgttggaggtcgggtcgaattttcccgttttccaaaaggaattgaccttttcggtgcgtttttccacacattctccccgttcgagcagcacagggcaaaatccctctttccccagtgtatatgaggcaaagaggcctgccgggccgctcccgattatgtaaaccttgcctttacagccgatagaatttttcaaaacggacaatgtatcgtcgaaagactttctatcctctgtgaaggcaacttttttcgacgcatattttgtcagaaattggctttcgtttccctttactgcaaattcaaagctgcagacataatgaatttgattttttttgcgggcgtccaccgcgcggcggacaagtctcgcaaaggaaattttgtcggatgaaattccgaggtgccccgacaaaagcgccgcggcatttgaaaagtcggccgacaggggaatgtttactccggtaattttaagcattgtttttcctcattttatttataatcgcctttatcgccgttcccgccgtcgaccaggcccactgaagattgtatccgccgcagtctccgtccacgtcgagaatctcgcccgcggcgtaaagcccctcatacagccgcgactccatggtgtcggccgaaaaatcaaaggggtcgattccgcctgcggtcacctgcgccatgttccagcccttggttccgtttacctcgacggtaaagcctttaaggcagtcggcaatgtttgaaatttcttttttcccgagagccgagcaccttgtcgaaaggggaattcccgcgcattttaccgccgtctgcccgagccgtttgtttataaatcccgtgagcaactccatacagtcgcggtttgaaaaggcggcggcacgggcggcaatttcgctctctatctgctgttttgataaatcggggcagaggtcgagaattatttgacccgagccgtttttggatataattcgggaaacctgcaaaacgggcggccccgaaaggccgtagtcggtgaaaagcacctcgccgagttcggttcggctttggcggcctgcccttgcggtgacgccgcacacccactttatgccggcaagaggcttggtctttttggtgtcggcggtcagctgaacaatagcggggaaggtacggttgaccctgtggccgaaggccgaaagcagctcatatccgctgccgtccgagccggtgttcgccgccgcacggccgccacaggttatcaggacgttgttcgccgtgaaaattcctttgtcggtggtcaccgtgtaatttccgtcatatcccacacccgacacctcggccgaacacagcacgtcggcgccctcctcggccttgaggcggagcatatccaccaccgagcccgcctgaagcgaacggggaaacagctttccgttttcctcctcgacaacgggtatgccgatttgttcgaaaaattcaagggtctcctcgcggggaaaggtcctaaacacatcctcggcaaagctttcggccccatgatatttgcccgacagctcggttgagttggaaatattacaccgtccgttgcccgttgtgagaagctttttgcccacacggtcgttcttttccacaagcaaaaccgacatatccggcacatttaccgcttggtaggccgcagcaaaaagtcctgccgcgccgccgcccacaacaatcaaatcataattgtccctcataccttcaccgaccttatgtttcacgtgaaacttttttctcattgtatcacattttgctttacattacaagttggccgagcacaaaagaaagctcaaaaatgtttcacgtgaaacaaaaaagcactttaattttgatttggagtgtgatatactgtttaaagaacaattaagcagctgaaaggggtgtgttttttgcccaaaacaatagcaattgccaaccaaaaaggcggggtgggaaaaaccaccacggcggtcaatctctcggccggggtaggtcagctcgggaaaaaggttctgctaatcgatttggaccctcagggcaacgccacaagcggctacggagtggacaaacggcaggtggaaatcagcagctatgaccttcttgtgggctcacagtcggcggaaagcgcggtgctgcacaccgaatttaaaaacgtcgacctgattccctcaagcatggacctcgcaggcgccgaaatcgagctgtcgggtcttgaacaccgtgacagcaagctgcgtcgggcgatagccccaatagcggacggatatgactatattttcatcgactgcccgccgtctctcgggcttataacaataaactgcctgtgcgccgccgacacggttcttattcccatacaatgcgaatattatgcccttgagggactttcgcagctcatctcgtcaatcagacagataaaacggctgtataatcccacccttgacatcgagggaattttgctgaccatgtatgacggtcggttgaatttgactcatcaggtggtttcggaggtcaagaatttcttcccgggaaaggttttcaaaacatccattccccgcgcggtgagaatttccgaggctccgagcttcggacagcccataatgtatgactg

SEQ ID NO: 2783 - DNA, 2209 bp, Unknown
  16S sequences of unknown bacteria
gcaggcgggcgaacaggtcaaggtttacggccgcgaaaacgaccttattaagcgcattgccgccgaccctgccttcggaatggacgagcaaaagctgtccggtacgctcgaccccaaaaaatatgtgggaagagcccctcagcaaaccgccgaatatgtggaaaaggttcgccgtgaggttgttgaaccgaacaaagagcttctcggcgaagaggccgttttgaatgtatagtgtgcctttttaaaggcttccataaatattattaaaggattgatgaaaaatggtacgagcaatagttggtgcaaactggggcgatgaaggtaagggcaaaattaccgatatgtatgccgccgaatccgacattgttgtccgctttcagggcggcgccaacgccggtcacaccataataaacgacaagggcaagacggtgctccatttgcttccgtcgggcgtttgctatgaccacattgtcaatgtcataggcaacggcgtggctctcaatgttcccacctttgttaacgaactcaatatgcttaaggaaaagggaatagaccccaaaattctcatttccgagcgtgcacagatggtcatgccatatcatgtactgttcgaccagtatgaggaggagcgccttaagggcaagtccttcggctccaccaaatcgggtattgcgcctttctattccgataaatatgccaaaatcggtattccggtatgcgagctgttttatcccgaaagacttcgtgcccgtctcgaatcggtgcttgaagttaaaaatcttttgctcgagcatctttatcataagcctacccttaatgcggatgagattttcgaaacccttatgagctataaggatcagattgcaccttatgtctgcaacacctttgaattccttcaaaaagcccaggatgagggcaaaaatattcttcttgagggtcagcttggttctcttaaggatccggatttcggtatctatcccttcaccacttcttcccacaccgttgccggctacggcgcaatcggtgcgggtattgctccctataacatcaaggaaatcgtcaccgtcgtaaaggcatattcaagtgccgtcggcgcgggaccctttgtaagcgagatgttcggtgagcaggccgacgagcttcgccgccgcggtggagacaacggcgaattcggcgccaccaccggccgtccgagaagaatgggctggtttgacgccgtggcaacgagatacggctgccgtgctcagggagccaccaaggtcgctctgaccgtgcttgacgctctcggctatcttgatgagcttaagatttgcgtgggatatgaaataaacggagaagttaccaaggaattccccgtaaatgctcagcttgaaattgcaaaaccggtctatataacccttcccggttggaaaaccgacattcgcggaatcaagaatttcgacgatcttcccgaaaactgcaagaactatgttctcaccatcgagaaggaaatcggcgttcacatcggcgttgtcacaaacggtcccaagcgcgaggaattcattttaagataagagcttgtgcttttttgcaggaaagagtttttctttcctgcttttttattttcaaaaaaatttttaaaaacctcttgacagaaagaaaaaagtatgatatattatcaataacgataatgattatcgttattaaagaggtgaacaaaatgacggttgagaaaaaatattcgaggcaaagggaagccattgcaaaggatttggcctctcggaaggatcatccttgcgccgacgatgtttatgaaagcacccgaaaaattttcccgaacataagtctcggaacggtctatcgtaatcttaaggggctttcggccgacggtaaaattatcagctttacagttgacggcaaggagcatttcgacggcgacacaagtaatcactgccattttgtctgcagaaactgtcacaaaatcattgatgttttcgagcctgatttttcagacttttctcttgaaattcaaaatcggcttgagtgtgacgttgattatacccaaattgttttgtttggcaggtgcaaagcctgtcttgaaaaaataaactaaaatttcggaggttttaattatgaaaaaatttgtatgttctgtttgcggttatgttcacgagggagacactcctcccgagaaatgtcctcagtgcaaggctcccgccgagaaattcgt

SEQ ID NO: 2784 - DNA, 3403 bp, Unknown
  16S sequences of unknown bacteria
gatggagtaggtcgggatcgggtactggaagccgcggccgttggcgtcgccctcgatcatgatctcgatgaaggccttgttgaccatgtccatttcctttttgcagtctttgtatttgaaatccagttccttgccgcccacgattgcgttgagctcggcgaggtcggcgggaacggtccagtcaagggtgatgttggtgaagggcgactgggttccccagcggctgggggtgttgacgccgtagataaaggactgtatgcactgcttgacttccttgtaggaaaggttgtcgaccttgacaaagggagcaagataggtgtcgaaagaggaaaatgcctgagcgcccgcccattcgttctgcatgattccgaggaagttgaccatctgattgcagagggtggaaaggtgggatgcgggggaggaggttatctttccgggaactccgccgagcccctcctgaatgagctgcttaagcgaccagccggcgcagtagccggtcagcatggaaaggtcgtgaatgtgaatgtcggcgtttctgtgagcgtcgccgatttcgtcgtcataaacctccgacagccaatagttggcggtaatcgcaccggagttgctgagaatgaggccgccaaccgaataggtgacggtggaattttccttaactcgccagtcgtttatctgaagatagttgtcgactatttttttatagtcaagcagcgtggtgctcaagtttctgaatttttctctctgcttgcggtaaagaatgtaggccttggccacgctgtcgtatccgctcttgataagcaccgattcgacgctgtcctgaatggcttcgacggtgattttgccgtcggcgattttctgctcgaaatccgaggtgaccttgagggcgagaaaatccaccgtgtcgggatgatagttcatttcgcaggcgtcaaaggccttggttatggcgtttctgattttggaaaggtcaaaatttacttcctttccgtctcttttgataacggtatacatgacttttctcctttttgtttttcatatctctacccgccctctttcgggcggaaaacattcgccgaatatgagtatacatttcttttttttgaatgtcaaggggtaaaacacaatatcttgtggaattttttaaatatcaattccacgaatttgcacatttggtatatactttgaggctgcttttgccattttttcaagggtttcggggctgtgaggggacagtccttcgccgatgagattgccgctgtccttaaactgctgaagaaaataatttttagcgggggcaatcatttgcgctatgctttctatatcggaaatttcgtgaaattccttcgtcacggtggtgcggaattcaaagggcaccgagccgccgtttaaaatgttgatggtcttttctatgggtgaaaaatcaaagttgtcaactcccacggtcattcggtatttttccctcgaatttttaatgtcgacggccgcatagtcgcaaaggtcgccgtcgattatgcttttaaggcggtcgggaaagctgccgttggtgtcgattttaacggcaaagcccagttccttcacctttttaagaaaatcgggcagttccttataaagaagaggttctccgccggtcacacacaccccgtcaagcagcccgcgccgcttttcgagaaaggcgagaatttcctcctcggggatgatgtcgtcctttgaaatgtcggtcacaagcagggcgttgtgacaaaagggacatcggaaattgcacccgccggtgaaaagggtgcaggcggttttttggggaaaatcaagcaatgtaagcttttgaagtccgtaaaagttcatttttgcctccgacacaatatgtagtggttatattctatcatacccctttacaaattgcaatatgtatgatatacttttgtcgaaaaaaattaaaaacccttttgggaggacaaaatgtataacgataaaataatttctcacgaggactatgccgagccggtctgtcctctttgcgacccgacaaaaaccgaaagcttcattcccgccgaccgtgtgatttcggctctcgaccgctatcttgacaaaaacgactatgacggcgcccttaaaaccctgctctactggaaggatgaggccgaaaaaatcggcgacgacaggggccttctcacggtggaaaacgagctgtgcggtctttaccgcaagctttcgaaaagggaggaggcctatgccgcctgcgaaaaggtgctgtcccttatagacaagcttgacatcggcaaatcggtgacggcgggaacggcgctgcttaacgttgccacggtctacaaggccttcggcgaggctcaaagggggctgcctctttttgaccgcgcctttgaaatctacggcatgaatttgtcggagggcgaccccgctttcggcgggctttataacaacaaggggcttgccctttgcgacctcgggcgttttgaagaggctctcgactgctgtaaaaaggcaattgaaatcatgaaaaaagccccgaacggttcgtgggacgcggcaatttcctatctcaatgcggccgacgtttactaccgcgacaaggggcaggaggccgaggccgaaatcgagcgctgcgtcgagacggcgtggcagcttttgaacggcgacgagccccaaaacggctattatgcctttgtggccgaaaaatgcgccccaaccttcggatattacggatatttcttctatgaaagagagcttaaagcgagggcaaagaaaatctatgaagggaattgaaggggcaaaaaaatattttgaagtttacggaaacatccttaaggagcagtttcccgacgtcgtgaaatacaccgccttcggcctttgcggccagggctcggaatgcttgggctttgacgacgaaatttcaagagaccacgatttcgaaccgggcttttgtcttttcctccccgacgaaagcaaggtcgaccgaagaacggcctttttgctggagcgggcctatgcaaagctgccaaaggagtttgacggggcaaaaaggagccttgtctctcccgtgggcggcagccgccgaggggtcatgcgcaccgccgacttttttgaaaaaaccgtgggcaaaagggacggagtcctctcaaaatacgaatggttaaatattcccgaaagctgccttctcgaggcggtgaacggcgaaattttcgaggataatttcggagaggtgacaaaaattcggcaaaggcttgccttttatcccgacgacattgcgagaaaaaagcttgcctcggcgctgattatatgcggtcaggccggtcagtataatttttcccgctgtatctcccacggcgagcgggcggcggctcagcttgcggctttcgaattcgtaaacgccgctttaagcgtgattttcctg

SEQ ID NO: 2785 - DNA, 5425 bp, Unknown
  16S sequences of unknown bacteria
tctccgctcccgtagaaggcgttaagtatgtttacttccagagcgaaggcgcactttccggaacattccaggtatccgaagtagttctcacaggcacagcaggtgaagcagctcccgctacaacagagactgaagctcccgcagctgaaactgaagctacagtagagacagaagctcctgaaacaaccgccgaagaaacagtagaagctcccgctgaaacaacagaagctcctcagacattcgatatgggcgttatcgcagcagctgcagcagtagtttccgcagcaggctacgctgtctccaagaagagaagataaaaataaagttccaatctttcaataaagtaatacccgggtattcgttttcacgcgaacatccgggtattcttatatttctttgtatgattgtgtgattatcatgaccttgtcacggcttatctttgcgtaaccgccttcggtgtacagcttcttcacgacatttccgtcagtcaaagccgtaatttctcctttgtcaagtgcggcaagtgcgtccgtgtgaccgtatctcactccgaaagagccgccgcctttgccttctttgttgtcctgagcagtcatgtggagagagtcgcattcaaacgagcattccccgtccgcaccactcggagttacaaccgtgacgtttattagcttactgcttgcagttttttccatatttacgccttgtcgttcttccatgccgcaaagacatcgtcgatagagcccatcatcatgaacttctgctcgggaatgtcgtcacagtcgccgccgagtatagcttcaaatccggaaatggtcttctctatcggaacatatgctcccttgattccggtgaatccttccgctacatggaaaggctgagacatgaatctctgaatctttctcgcgcgtttaacggtctttttgtcctcgggagacagctcatccatgccgagaagcgctatgatatcttgaagctcattgtatctttgcagaattccagtgacttccttcgcggttttgtagtgtctctcgcctacgatatcgggagtgagcatacgtgagccggactcaagcggagctactgcgggataaatgccaagctcaacgatgtttctcgaaaggacggtcgttgcatcaaggtgtgagaacgtcgtcgcgggcgcagggtcggtaaggtcgtctgccggaacgtatatcgcctgcacggaggtaatggagccgttctttgtcgacacgattctctcctgtaatttacccatttcggaagcaagcgtcggctgataacctaccgctgagggcattcttccgagcagagccgaaacctccgagcctgcctgtgagaaacggaatatattgtcgatgaacagaagaacgtccttgtgtgagtattcgcggaagtattcggcaatggtaagtcccgcaagaggtactctcagtctcgcgccggcagtctcgttcatctgaccgaacacaagcgcggttttgtttatgactcccgactgcttcatttcgttccaaaggtcgtttccttcacgagaacgctctccgacaccggcgaatacagaatatccgtcatgctcgaaggctatatttcggataagctccatgatgaggacggttttgcctactcccgctcctccgaaaagaccgatttttccgcccctcgcgtaaggagtcatgaggtctataaccttgattccagtttcaagtatctcgtccgctgtcttaatctcggtgaacggcggggacgcgtgatgtatcggccagtagtcggcggcttttatctctcccgcgcggtctatcgggtcgccgagcacatttatcatgcgtccgagcgttccctcgcctacaggaacggatataggtctgccggtgtctattgcagtcattccgcgggacataccgtcagtcggaaccattgatatgcaccgcacttccccgtttccgagatgctgaagaacctccgtcgtgtagacattgtctccgttgattatctctacggcgtggaatatatcgggaagctcaagaccgccgaaacgtatatctacaacgggaccggttatccttgttattattccttttgattttgttgacatttttcttaccgttttctatagaatcaattttcttcctcgggggaatatgtttcgataacgctggatgtgacctcgctctgacgttttctgcttatttcaagctcaagagcggctatggtatccttaacgttgtcggtagcctcgcgcattgccatcattgttgcagcctgtgctcccgtcgccgcgtcaagtacggatgagtatatcgagcagtcgacacatgagaggcacgcgtttttcatgacagtctcgcggtcggggatatagataacgtcatccgttgaggcggacgaagacacactgctgtttccgagcggcagaagctgttttttcgtcggtatctgagtaagcatatttttgaaatgctgataaacaaagctcaccgccgaaaattccccgttcacaaagccgtttctgaggtattcgcaaaactccctgcaatcgtcaaacgcgggaacatcggaaaaaacaaagtcgcgctcggtttttacaccatgctcagcgaaatacgccgccgctatctttccgcaagccacaacacggtattcacgtccgctatgtttatactcctcaaagcattcgtcggcatatgcgagaagcgtagagttgaatccgccgcaaagtcccctgtttgacgcgattaccacgacaagctccggcgcatcgggagacgtacacggaagcgcatccgcaagagcctcaccgaaggacgaaattatatcgtcacaggctgcggcgtattttgcgtatgcggcatagacggcgttgactcgcgaaaactttgcggaggacactgttttcatcgctccggcaagctgacccgtcgtattgacgcttcgcaggtgatttttcagttcacgcattccgggcataatcaagcctcagctttcgtcattgctccgagcgcgtttttgattctggctataagctccggagacatctttttgccggtttttatctcatcaacgatatcttcgcaatttgcttcaaagtatgagtaaagctcgcgctcgtattcgcctataccgtcctctgatatgcctgacgcaaagccttcggacacggcgaatattacaagcacctgctgccagtcctcgagaggagcgaatcttccctgcctgagagccgccatcatgcgcttgcccgagtcaagaaccgcctttgtatcagcgtcaagatccgagccgaactgtgcaaagcccgcaagctctctgtactgtgcgagacgcattctcagacttgccgaaacctgcttcattgccttggtctgagcggcgcttcctacacgggaaacggaaagtccgacgtttactgccggtctctgtccctcattgaacagctcgctctcgaggaatatctgaccgtcggttatggaaataacgtttgtcgggatgtatgcggatatgtcgcccgcctgtgtctctataataggaagagcggtcattgagcctccgccgagttcgggagacagctgagcagcgcgttcaagaagtctcgaatggagatagaacacgtcgcccggatatgcttcacgtcccgaaggtctgtggagaagaagagacagctcacgatatgcaacggcgtgcttcgagaggtcgtcgtagaatatgagcacatccctgccggaatacatgaagtactctgccatagcggctccggcaaagggtgcgatgtactgaagtgacgcggagcttgacgcgggcgcgcagactacggtggtgtaatccattgctccgtacttctcgagcttttccacgacttcggctattgtagtatccttctgaccgatggcaacatagatacaagccgtgccttttccgcgctgatttatgatagtatcaaggattattgaagacttacctgtctgacggtcgccgattataagctcacgctgaccttttccaatcgggacaagcgcgtctattgcctttataccggtgtgcataggacggctgactgcggctctgtcggggattccgggagctctgcactctatcgggcgtctttcctttgtccagatacgtcctctgccgtcaagtgcgtgtccgagcgggtctactactcttccgagaagctcttcgcctacgggtacgcttgctattctgccgacacgtcttacacggcttccggcttcgatatgagcatagtttccgtacacaacgcatccgattttgtcaggctcaatgtcgagtaccattccgcgctcaccgcagtcgaactctatgacctcaccgtacattatgtcggcaagtccgtcaagccagcagataccgtcggatatactgataactctgccgagctggaactcctgaatagtggtgtctatctcggatatgcccgtgagtatgtcggacacaatttcgtcgggcgtttcgtctccgtgaagagggcgtttttcgagagttttttgcagattgtagaggtggttcgtcacggttgaatcgtacactgtgtcgcctatacgaagtctcagtccgccgataagctcctcgtcaaccttcacccagaacgatgtgcgtccgtttacctcttcaacaagctgtttggttttttcgtcgattatttcaactatatcgtctggaagaggttcagccgatgtaagcgtgacatacagtacgtcgtggttgttgaggtacgcgatgtcgccgggtgtgagctttattctctcaagaatcttgtccgccatgccgatgagtttttcgtgaagctccgtatggtacggctctgttccgagaagctctattattctctccctgaccttttttataagctccgcgcgttttacggagacgacgtcgtagcacatttcaagaatctctgcgtcgcagtgcttttcgatgttcgctatctcctcgtcgcgtgaaagctttatagcgtcaagctttttgcgagcggttttgtcgatattttcgtctgccgcaagaggaacatcgggcagaatgggagcaacatactccgttttttcgatttcctccgcttcgtcaagctcgctgtttattttgtcaagcctctttttgaatatcgaggctatcatctttcttccgagcagccatatgagcgccgcaaggataagaaagttgattattgcatatatgaattgcatgattttccgttccgttctatgaaatcagacgcgaaatgaaagtctcggcgagtttgtcaacgcttctctcgagttttccgtcgagttctccgctttcaaattcaatatcggtttttgcaagctccagtctctttttgctagtttcttcggcgttcttcacgtcctcggctgccttttctcttgcgtcggacagcatagtctcagcacgatcactcgcagcctttcgg

SEQ ID NO: 2786 - DNA, 2806 bp, Unknown
  16S sequences of unknown bacteria
ttcaaattaccttttttctatatattctataaataattgttgatttatattcaaaatatgatataataaaaataccacattttttctgttatatgatatatataactttacatttttataactttatttagagtattcaattttaggaatattcttttttgcagtacatataataacagtttgtgtttgtataaaacgcaggctttatatattgagatactgttattttcgctgcaaaattaaagtttttcatatatcagaaaatgtgtggtaacaaattctaagcctcgtttttatgcgtggtatagaattttataccacgcattttttaatatgtggaaatattgacggaaaggagaagcggggtgcaaaccgtcatttgcagcaaaaatacatatagagagaaaggattttattatgaaaaaaacaattttgttattttcaattattttaactttatcattgtgttcttgtgtaaacagtcaaactgcaaatacacaaagtacaacatcaaatcagcaaacaacaactgattcagtatcagaaccaacggctgttcctgctacggaacagcctaaacagaaaaacaaaggaaccgtaagcggtaaatatgatgttgaaatagtaactgcaaaaacagcaacagattttcagggtaatccggcaattatagtaacatataactttacaaataacagtaatgccaacgcatcattccttacttctgtaagtgctaatgcttttcaaaattccatacaatgtaatgtagctacaatgatgcccgatgtaatggacgcacaaccgtcattagcggaagtacaaccgggaggaactatcacattagaatgtgcatacagtttgcaagatactgcaaaccctataactgtacaagtcggtccgttaatgagtataacaaacgaagtaaacgcacaaatgacatttagttttaaaaacaattgataatacaaacaaaaaaagatgttctcgcgaacatctttttttatattttcaaaaattatttagctgttacaacaagtgatgtaccgtcaactgtagctgattctgttacttctgcgaaaaattcagcaggaacatatgttagatcattaacaatttcaggtgcggcacttagtgttagtggcatcatcttacccttaacatagctgttttcaccaatctttagactgtaaacaccgtcattaagaataactgctctgttttctgcatcccaatttactgtgaaaccagcggcttctgcaacttctcttagaggaaccattgttgtattatcctttgcatatacatctgaaacattcttatcaccgattacaacatttacaagacctgcatagcttacttgcggagtttctgttacttcaggtgcagctgtaggagctggagtagcattttttgcagcttcaatctgctttagagcaatttcgttttcaccaagaactacaacctttgtaggtgttgtttgagcagggatactctttgttgatacaccgtagaatacgataaggtcattcttatccaaatcacccttatattctttttcgtccttatcaacaatctttgtatcgtcagctgctgcaatttttaaagtatttgcggcatttgtatagccttcttcatcagcaaggtatgtatctgcatttacattaccttctttgtcaccgttgatgataattacatttgctgtgtactgaacaggaagaataagcggagtcggttcatatgagcctgtaaatacagtaatttttgaaccatcagtcaaatcacttagagcctttttgttacccaaattgtcatatacaagtgtatcatctgtaatctttagatttacagtattgttttgatcgtccttgttattaacgtctgttgttgttttgataattccgtcaacgtcgctgtctgtttttacaactgttacgtctacagacatatagcttgcaatttcaataggtgtttctgcatctgtagcaactgcatctttttcttcaccattcaaaagcataatgtcgccttgaatttccggtgtcggcatagcatccggtgcatatgtcgaaacaggcttattaagttcttcttctgaaatttgtactgtgtctgcaaaagcagatgtacttgcagcaagtgctgctgttagtgcaattattgcgattagattttttttcatttttataatctcctttttttattatttgcatttatctgtttgcaatttattagacgtaagtaacatcacttttgttcccaaaaaaatatgaattttttattaataaacttataaaatcaaaaataatgacaatactaaggttatattaataaataatggaggcataaaaatgaaaggtataaaattagttttattatcatttatggctgccgcaatgcttacatcatgcggtatgaataatacaaatgacaatacttcaccgtcaccggaatcaacggtaaatacaaataacgaaaataaaaatgacaataacaatgtttcaaacgatgtagataacgcaggtaatgcggcaggtgacgcagttaaagacgtcggtgacgcggcaggcgacgttgtcgaaggtgtcggtgatgcagcagccgatgttgctgagggtgtaagtgacgccgtaggcggtaatgacgcaaacaacaacggcaaataatcattaaagggactgcatagcagtcccttcatattgtaagaggttgagaaattagtttggattttttgaaaatgaactcgtcggcgtacatgggtacgttagagtttattttcacaaaaagtgcaaaggcaagccgtatatca

SEQ ID NO: 2787 - DNA, 25435 bp, Unknown
  16S sequences of unknown bacteria
cctgcttattcatttcacaaaaaaggtagggatgagcttaatggaaagtaagcaatcccacttagaaaaatattaccacaataaagattttttagataatgggataaaagatggagctaagtatccggattgggaaatcactgttatcttttattgtggtgtacatatcgttgaagctatgcttgcggaaaaaaacattcatgtcatagaccatcaggatagaaaagatgaaatggaaaatatcaataatatagacgattttagagatgaatatagccatctttatcaattaagtagaaaagcaagatataaatgctttttacctaaacaaaaagatgtatatgatgcgcaagtggatttggatgctattaaaagtgcagcagggataaaataaaagggtagcggtttaatagccgttgccctctttttttatgcaaaaagaaaagcggtggcaagcccgctttcttcttaatcttctttcttttgctctttcaataagtcgtttaccttttcttttgcttcgtctaaatccttacaaccgtctaaaatcattgaaaccatttttaaaattttatcaaattgtttatctgtcatctcttccatgtgtaccgcctttccgatatttgtaagaacttgccttcttactatctatattatatactatagcgcgctatatgtcaatagaattagcgcactaatttaagattttttcaactttttcttgaatcgcatctaaataaaattgccgcatacttggataccctgctttttgggctgctttttcgtaaacttcaaattcttccggtttcactctgaatcggatttcttttaatttttctaggtatttcaatgtgtattctttttgtttttcatcgtaagccatagacacacccccttataaatagtatagcactttataaaatagcgcgctatagttagttttactatattagtgcgctaatgtttgtgtaatatgccatttgctatatagtgcgctatatgttatactataatcacagtaaagataagaaaaacaaaaacaaaggagatattaaaaatgacagtacaagaaattgcaagagaaattagaaacagtgagacatgggataacgaactattggagcaactttgtgaagctgctgaactattagaagaatatcaaaatgcagacggtgaaacttttgaaagcgtagtatataaagcagctgatattttaaatgtagaaatataaaaatactccagtaaaaggtatgttcagctttcgggctgggcagcttctttttttgcgaaaatttataaaaatattattaaaaagtattgacacgtgttttaacacgtgttataatatgtacagtgaaagggggataatattgaaaagctattcttcaagggatgttattaaaatcttaaaaagtgacggttggtttgagatttcgtgcgttggagaccatcaccagttcaaacacccaacaaaaaaaggaaaggtcacgattacacatcctgttaaagacattccgattaaaaccctcaaaagcatatccaaacaatccggtgttactttcccgtaacatcgggtttcccctgactaaaaataggaggtaatttcatgaaagatacttatacatttatagcactaattgagccgttagatgacggagtttatattgaatttccggatttgccgggatgtttgccgtgcgctgaaagcctagagaaagcagcggagaacgcaaaagaagcgttaggactacacttatatggtatggagcaagataaagacgatattccagagccaaccccactagataaaattgatatagaaaaaggtcaaatccctttacttgtaagcgtatatatgccattggttcgcgcaaaagttaaaaatatttctgtcaataaaactgtaacacttccttcatggctaaactgtgttgcggaaagtgaaggcatcaatttttcgcaagtactacaaaaagccttaaaagaaacgctgcatttacaataataaactcccttgcttacttagtaggtgagggattcttttatctatgcaacacaaaatgcaacatgaagtgtgaaaaagtgcgtatttatgccgtttttaagcaatggcttacgggttcaagtcctgtcacccgtaccaacgtaaaaaccgcgtaactaggtcaaatggcttggttacgcggttttctttgtgttatatttgattgggaaatcctaaaaaacggtcataaaacctataaacacgtggtattgaaaagcacgtatttatgccgtttttaagtgataaattacgggttcaaatcctgtcaccgtaccaagatttttgttttgccatttccccccgcgctttaaacaggtatcttttcggtagcgtaaacccataaccgaaccgacagttgataaaattattagctgttggtttgttgttttatgtggaaaacccgtcgaaaaagtggcgactgctttatcggcaggtttttgtgatataagaaaatacatactatatatgaaatccgtttttcaaagttatcacaaaagagtatccaaaatggataggaatattattttcatagtataaatatgataaatttatactttaatttatcatattggaataacatatttacaaaaaggtaaaaaagaattataatattaatatatgtcaaattagacaaaaataacatgaaaaatacaatgtttttagaagagttatagggaactcttagaattagggcagaataatagggggaattatatgaaacagacaggagtaaaaaaatatcgaagaacggcagctatgcttgctgcaacctttactgcattgttggcagtatccagtttcagttttgtgcaggcggaagaaaatacagaaatttcatttcctgcattggaagaaataccctttgcggatatgctgaaagaccagctggaccgtgacttaaatgtacccgcaacttatgcaaatacaggtgttgatttgcctgcatcttatgatttacgcgattatcaattatcaacgtcggtaaaaaatcaggacccattaggcacttgttgggcttttgcggcaactgctgcagtagagtccaattacttattaaaaacaggagttgcacctgatttttcggaaaaacatttggcttattttacaaagcatgcaagacctgaaggattagatcaggcgggagaaggcatgaataacaataatataggttctgccttagacagcggacaagtaacaaatgctatgggtacctacgctgcttggcaaggtcctgtttatgaaagcgatgttccgtatcaggatgataacggaggaaaagataaagatgcgaattggactgtaaatgaaacatatcgtaccgctagcgaagcgcatttgcaaaatgcagaaatatttcccagccctgctaactggacaacaggagaatatgtttacgatgccaaggctgttgaacaaataaaagaatctatttataataatggtgctgtaagtgccttttactatgtatatcagcctacaagtgatgccgaaaaagataatatcttgaaatattggaatgaagaacatgggtgttattataccacagggtcaaatagccctaatcatgttgttgctattatcggttgggatgataatttttctaaagataactttagcggagatacaaaaccggaaggaaatggtgcttttctaattaaaaacagctggggagaagatcctgattcctattctgcagcgcatgattatatgcatgctatcccaaatgatgaaggtggaaaagattatgggtatttttggatttcttattatgatgagagtttaagtttgcctgtttcttatgagatggatgttataacagacggatttgattacgacaatatagagcaatatgattatcttggcattacttctccattatctatgtcacagagtgctgctcaggctgttttagcagacaacggatacactggtggtatggatgaatccgtagctaatgtatttacggcagatgattatgtcactttggctgcagtgtctctattttctaaccaagctgaaggaagcacagcagaaattgctgtttatctaggtggtgaatcaggaaagcccgaaagcggaacattggtttccaaacagactgcaacggttgatggcaacggattttatactataaatttagatcaaccggtaaatttacgtccgggagatacttataccattgttcaaaccgtaaatggcggttctgctaacaattaccttccggtagagattggatatttgttgaatagttttgaatatattgcagtctccaatccgggagaaagctatattagttgtgacggacaatggctggatgtttcaacgttaaaaccgtttgaactccaaactcaggaaaccacaatgaaactgactttgggtaatgctatgatcaaagcgtatacaaatgacagacaggaaaatgctgcagatgatgtcattgctatgattcaaaatcttcctgagattactggtctggagcaagaatcagacgtagtaaaagtacgcgatgcatacgatgcgttgacagaagatttaaaggcacaggtatataacctgaatctgctggaagcagcagaacttaaaattacatctttaaaagatgatcaggctgcggcggacaaagtgagcgaaatgattgaaaacttgggtgaaataaccggtttggaacaagagcaagcggtagcagatgtacgcgccgcttataactcattgacagaagaacaaaaagaaaaggtaacaaacttagcggttttggaagctgccgaacaaaaaatacaagcactgaaagaagagcaaaacagcgcagagaccgatacaggcttaatgtcagaacccgagacagagcaagcgactgcaaatgtaaattctccatctacaggagatcagagaaataatactatgatttatattgccgtggcattatctgctgccctagttgtttcaattgttgtattacgagttagaaaagagaaaaaataatttcataatacagcgttatttcatattaagcaggtatttcaaatcctgaaatttaaatattaagtgaaaaagactgcacgatttcgtgcagtcttttttattgctcttgtttatcataagaaaaaatctttctatttgaatatggaaagttacatgaaaatttttctaaataatatcataaatggatattgttacttggctgacttgtgaacaaaacgtgaaaacttaatgcaatcttaatgtacagacgtttatgctaataccttttttaaatctttgctattatacttgttgaggaaggcgcaaaaaaggggatgagaaaagatgttgataattgtttcaattattggctgcattgcggtcgcgcttctagtttattatgtagtaatcttaatgaaaggagataatcaaaaatgaacacagttttacaatacgttctgtatcttgtaattcttgttgcattggccgttccactcggtttttatattaaaagagtaatggaaggcgaaaagacctttctttcaagaatacttacaccgtgtgaaaaaggtgtatataagttaatgaggattaaaagtgacgaacagatgacctggaaaaaatatttagtcagcgtgctgattttttccggtattggatttctgtttgtctttcttttgcaattgcttcagggatttttacccggcaacccacagggactctccggagtatcgtgggacttatcctttaacactgctattagttttattaccaatacaaactggcaggcatacaccggtgagtcaactttaagctatttaacacaagctctgggacttacagtacaaaacttcgtttctgcagcaaccggcattgcggttttatatgcgttgattcgtggttttacaaaagtaaaagatacaggacttggaagcttctgggtagaccttacacgtattacagttcacgtattaattcctttaaacctcattattgcgctttgtcttgttggcggcggagtcattcagaactttaaaccggctgaaaccgtttctttggtagaacctgtagcggtaagtgcagacggtgaagtattggagggtgcaacggttgatttagataccaataccgttaccttaaatggtgagattgtttcagatgcacaaattgtaacggaacaatttgttccgatgggtcctgcggccagccaggttgcaattaagcaaacgggtacaaacggcggtggttatatgggtgtaaactcagctcacccacttgaaaacccaaatccatttacaaacttgcttgaaatgatttctctgctgttaattcctgcagctttatgcttctcctttggtttaagtattaagaataaaaagcaaggtttcgcgattttctgcgcaatgtttatttgcttggtacttgcactaagttcagtggcggttacagaacaaatcggcacatctcaattgagtgacaacggtgcggtaaatctaacaatgtacgatcaagccggcggtaatatggaaggtaaagaatcccgttttggtattgcaacttccgcaacatgggctacctttacaaccgctgcttctaacggttcagttaactccatgcatgacagttatacacctcttggaggtatggtcacgatgttgctgatgcaattaggtgaagttatattcggcggtgttggctgcggactgtatggtatgctggcctttgcgatactcacggtatttatagccggtcttatggttggacgaacgccggaattcttgggtaaaaagattgaaccatatgaaatgaaatggtcagttgtcgtttgtttggcaacacctgttgccattctgttgggcagtggtattgctgcaattgttccgggtgtggcagacagtttaaataactcaggagcgcatgggttctcagagatgttatatgcatattcgtcgtgcggtggtaataacggttcggcttttgcaggctttaacggaaatacgatattcttgaatgtgtcattgggactggtaatgctttttgcaagatttttgcctattatcggtactctggccattgccggaagtcttgccaaaaagagcaagattgcaaccacatccggaactctatccactacaaacgcaatgttcgtatttttgctgatattaattgtacttttggtcggtgcactcagcttcttaccggcgcttgcacttggtcctattgctgagttcttcagcacaatagcataaggaggttatactatggcatcaaatccgaaaaaaggctttgccgataaaaaaatgattggccgagccatttcagattcttttattaaacttaatccaaaaacacaagcacaaaatcctgtgatgctgctagtttacatctcagctattttaacgacgattctttggattattgctctgtgcggcttgaaggatgcttcagccggttacacactcgcaattgcgattattctttggtttactgttttgtttgctaactttgcagaagccattgccgagggcagaggcaaggcacaggccgactctttgcgcgcggcaaaaaaagatgtggaagcccataaaataccgtcagcagaccaaaaggatgcaatcacagtggtatcttccgcaactttgaaaaaaggtgatattgtcattgttcaggcaggagaacaaattcctgccgatggtgagattattgaaggtgctgcatctgtagatgaaagtgccataacaggtgaatctgctcctgttatccgtgaaagcggtggtgacagaagcgctgttacaggcggtaccacagtgttatctgactggattgtagtacaggttaccagtgacgcaggagaaagcttcttggataaaatgattgcaatggttgagggtgctgccagaaagaaaacaccaaatgaaattgcactccaaattttccttgttgctctttcaattatctttattttggttacagtttctctttatacttactctgtattttcagcaaatcaggcaggtattgaaaatcctacttccgtaaccacattggttgcattgcttgtttgtttggctcctactaccattggcgcattgttgtctgccattggtattgcaggtatgagccgactcaatcaggccaatgtacttgcaatgagtggtcgtgccattgaggcagcaggtgacgttgacattttaatgcttgataagacaggtaccattacatacggtaaccgccaggcacatgaatttgttcctgtggacggcgcttccattatagaattggctgatgctgcttatttatcttctttatcggacgaaacaccagagggcagaagcattgttgctcttgcgaaagaaaaatatggtgttgaggaaagaacaatttcagaaaatgaaatgacttttattccatttacggctaaaacccgtatgagtggtgtggactatcatggcatggaagtacgtaaaggtgcagcagatactgttcgcaattatgtacatgaagcgggtggaagttatacggaagaatgttacgagacagtaaaaaccatttccaatcaaggtggcactcctttggttgtagcaaaagaccataaaattttgggcgtaatacatctaaaagatattgtaaaacaaggtgtaaaagaaaaatttgctgatttaagaaaaatgggtattaaaactattatgattacaggcgataacccattaactgctgcagccattgcggcagaggcaggtgtggacgatttcttggccgaagcaacacctgaagcaaaacttcaaatgattcgcgattatcaaagcaaaggccacttggttgctatgacaggtgacggtaccaacgatgcaccggctcttgcacaagcagacgttgcggtggccatgaacagtggtacacaagcggcgaaagaagccggaaacatggttgatttggattcttcgcctacaaagctgattgatattgtacgtgttggtaaacaattgttaatgacaagaggcagtttgacaacattctcaatcgcaaacgacgttgcaaaatattttgcaattatccctgctctgtttatgggattgtatccgggattgtccgcgctgaacattatgggcttgcattccccacaaacagcagtgctatcggctattatttacaatgcattaattatcattgtattgattccattggctctaaaaggtgtaaaatatcgtgaggtttcgtccggaaagctgttgtcgaggaacttgctgatatatggtttgggcggactggtagcaccgtttatttgtattaaattattggatatgttattaactgttatgggaattggttaaggaggaattgtacatgaaaacattaaaaagcgtgttaccgcgtgcagcacttatctttttaatctttaccatagtgtgcagtgttgtttatacaggtgttgtaacaggtcttgcacagcttatttttcctaaccaagccaatggcagtattatcgaagtagacggtaaaaaatatggctgtgaattgttaggccagcaatatactgacgatgcacatatgtggggccgtattatgaatattgatgtttctacttatacagacgaaaatggaaaagcgcttatgtatgcatccccatcaaacttgagtcctgcaagtgaagaatatcaggcattggtagatgaacgtgtacaaaaaattaaagcagccaatcctgatatgggtgatacgcctattcctgttgatttggttacatgttcgggaagtggtcttgacccacatatttctgtggcagctgccgaatatcaaattcccagacttgctaaggcaaataataaaaccgaagatgaaattcgagcaattattgataaatgtaaaaatggcagatttataggaatctttggtgaagaaacagtaaatgttctaaaagtcaatctcatgttagacggtattttaaaagaataattttgtttgagcattacaaatatattaagggatttttccgtgataggaaaaatcccttttttgtacgcctatatttatggaatgttctcaaagcgggattttctatctttttagactattattgtttgtttgtatttctgtgatggataaaaatacaagtaaggagatattgtaaagatgtagccgtatgatataatctttatacaatcttaatgctatttatggttcgtttatatttccttaagataggctatgctataataaatttatgtatcaagcgctttggagtgaattatatgggagaaataaggtccaatcccgatgaattgttaagagccattaaaaatgaagattcttatcataagagaggacatttaaaaatattttttggttatgcggcaggtgtaggtaaaacgtatgcgatgttaaaagcggcacacgccgctaaaagacgaggaattgacgtggtagtagggtatgtggagccgcacccaagaccgcgcacggcagcgttactgaaagggttggaaatactgccgaataaacaaataccttatcacaatattgtattaaaagaatttgatttagatgccgttataaaaagaaagccacagttggttatcgtagacgaacttgcacataccaatgcggaaggatgcagacatgaaaagcgttatcaagatgtggaggaactgttaaaagcaggaattgacgtatatactaccgtaaatgtacagcatattgaaagcttaaatgatatggtggcttctattacagggattacggtaagagaacgtattccggacagagtatttgacaatgcggaccaggtagaactggtagatatcgaacccgaagatttgatagagcgtttgcatgccggacaaatttatttagatacccaagcgcaaaaggcattaacaaattttttcagcatagaaaatttaacggcgttaagagaaatttctctcagaagatgtgcggatagagtaaataaactgacagaaagtgccagaattaaaagtaacagcgattattttacggatgaacatattttggtttgcctgtcttcttcccctacaaatgcaaaaatcatccgaacagcatcgagaatggcaaacgcgtttaaaggtacttttaccgctttgtttgtagaaacatcagattttcccaatatgagtgaagaggataaaaaacggttacgtgacaatatccatttggcagaacagttgggagcaacgattgaaaccgtttacggcgatgacgttgcattccaaatcacagaatttgcaagattgtccggtgtttctaaaattgtagttggaagaagtaccgcaaagagaaaacatatttttgcaaagccaacgctgacagaaaagatgttggtgctctctccaaatttagatatctatgtaattccggataaggaaactgtaccttataaaataaaaaagaagcagcattataaatggaaatttgtaccccttgatttgattaaaagtattcttgttttatgtgcagcaacgctgattgggtatatttttgatttatttggttttagtgaagcaaatattattattgtttatatattgggcgtgttggttacggctgttattacaacaaaccgtatttatagtctggcctcgtccgttatcagcgtatttgtgtttaacttcttctttacttacccaagatatacctttcatacgtatggattagagtatcctgccacttttattattatgtttgttgccgcttttattacaagtacgctggcaaccaaaataaaaagaaatgccaggcaagctgcccaggttgcatttcgtacaaaggtattatttgacacaaaccagttaattcaaaaatcagaaggtgagcaaaatatcattgatgttacggttcatcagttaatcaaattattggatagagacatcgttgtgtatttggcaaaagatgcttcattgtccgagcctcggatatattcaccaaaaggaattgaacaacataatgaggcttatatcagtgataatgaacgtattgttgccgaatgggtatttaagaacaatcaaagggcaggtgccactacaggaacgctgtccagtgcgaaatgcttatatcttgcaattcggatgaatgataatgtatatggtgtcgtgggcattgtcatagatgaagagcctttggaggaatttgaaaacagcattatgctttctatcttaggcgaatgtgcattggccttggaaaatgaaaaagttgcaaaagaaagggaaaaggctgctattcttgctaaaaatgaacaattgcgagcaaacttgcttcgttccatttcacatgatttgcgtacaccgttaacgtctatttcaggcaatgcaggtattttgttatccaatggagacacattgaaacaagaaaagaaacagcaattatacagtgatatttatgatgatgcgttatggttgattaacctggtagaaaacttattggcggttacaaaaattgaagaaggaagtatgcatttaaagatgtccgcagaattgatggatgaagtcattacggaagcattgcatcatgtaaataagaaaaaggatgaacataccatcaaagtagtgcaaacggaagactttattttagcaaaaatggacgcaagattaattgttcaggttattattaatattgtggataatgctataaagtatacccctacgggctctaccattaccatttcaaccacaaagaaagacaaacaggttattgtagatattgcagatgacggacccggaattccggaccaagcaaaagaaagaatttttgacatgttttatattgcccccaatgaagtggtagacagtcatagaagtcttggtttgggtcttgcgctttgcaagtccattattaatgcacatggcggggaaatttctgttttggataataaaccgaaaggtactgtttttcggtttacattacctgcagaggaggtcaatttatatgaataaacccttaattttggttgtagaaaatgacacggcagtgtgtaatttaattactacaactttagaaacccatgattatcgttttcatacagcaggtacgggagaggcagcaatattagaagcagtatcccacaatcctgatattgtattattagatttaggtttgcccgatatggacggcattgatattattacaaaaatcagaacttggtctaacatgcctattatagtagtaagtgcaagaagtgaagatacagataaaatagatgcgttggatgcaggtgccgatgattatttgacaaaaccattttcagtagaggaattacttgcacgtttgcgtgtaactattcgtagattaaacactatgaaaacaagttcagaggcagaacagtccgtatatatcaatggagatttaaaaattgattatgcagccagatgtgtgtacatgaaggataaggaattgtatttaacaccaatagaatataaactcctttgcctattagccaaaaataccggaaaagttttaacacatacctacattacaaaggagatatggggcaatacttggagcaacggggtagcttctttgcgagtatttatggctacgctgcgtaagaagatagaaaaggatccttccgctccccaatatatccaaacacatattggtgtgggttatcgtatgcttaagctgtaaatggttgataaagcatcctatccttttaaggataggatgctttattttttatgtaaatagcatatgctataacaaccttataacagcaacaaaactaaagttttggctgttaacaagaacgttttagcgtttatatgttagaaattactttgcaatttattttatgctataacaaccttgcagcaaaaagcaaaacaaatatagaaaggaacatctttccatgttcaaaattttgattgctaagacaagattttaacgttctgcctacagacattatttcaaaacttctcttatgttgtaagatatttgatatgattttttcctttacttttgtgcttttttccgtttggaaaacggttttgtaaatagtatcatacatacacctgctacgataaaacataggtatataatgagtgctacccaggatgaacaatgaaaaaattcaaataggatttcatggctgaaaattgcttttaacaatgggaacacaataccttgtaatccatagataatgcatacaattccaatcagccgaatggtgtcattatacttcatacgatatcctcccttatcaaagtgaagtttatttttatatgttctataatatagattcaaggttgtccgaaaatatgcatgcaaattccagaatcctaacggaaaatatttgaattatatttttcatgatttgttgtatttgcaacatactaatatcagaaatatgctacaataggaatcataaagttgtaggaggatttttatgaaaaatttagagtttgctgctgttcttccgtttgctcagcaagtacaatatcaaaaaggtcaggtggtcagcaaaaccattgctcagagtaaagcgttaagtttgactttatttgcatttgataagggagaagaaatcggcacccatgcttccgatggagatgctttggtcatcgtattggacggacaaggccaaattaccattgacgatacttcttatattctaaatgcaggagattcgattatcatgcctgctcagcacccacacagtgtatttgcaaaagagcagttcaaaatgtttcttgtggtggaatttccattgtcttaaataaaccatataaaaaacaaatattttttattgcccgaaatccggtaacagcgtataataaacttatctaaaaatttaatggataaagtgtgattgtatgcgtaaagctgccatgattgtaggcgatttcttgaaaaagaacatcgtattttgtattgctgttacagcggcaatcgttacgatgttttttgttcctatagattctcagtatatacaatattttgactttaaaattttagcgtgtatcttttgtgttttagcagtggttaacgggctgcatcatattcatttttttgaaattatatctaaaaaaattattcagcgttttcgtacggtaaaaatggctgttttggcattaatctatttaacttttgtggcatctatgattattgcaaatgatttggctttgattacatttttaccgttgggctattatcttctcaaaaattcagataacttaaaatggatggcatttacttttattatgcagactgttgctgcgaatttaggcggtatgctgactccttttggaaatccgcagaatttgtatttatatggtaaatttcagataccggatttggaatttatttctaccatgtttttgccatttttatattccattattttaattaccattacttgtttgatttttgtgaaatctacacctatgaaattgtcacaggtaaattcggaaaaattagacggaaaaaagacggcactgatgatgggtttgctgataatttctattttaatcgtatttcatggcattccctattatataggacttctggcagtcataggtgttctctgttttgctgatagaaaggctttattagaagtagattatttgctgctgttcacgttttgtgccttttttgtatttgccggcaatatggcgcgtattcctgaagtaagggatttttttggttatctggttcagcaaaatacctttttatatggaatattgacatgtcagtttatcagcaatgtccccagtgcattattgctgtctaattttgtgaccgattataaagatttattatatgcagtcaatattggtggaattggtactttaatttcttctttggccagtttgattactttccgtgaatatgtaaaacatgaacctaagaagggcctccgttatttggggttgtttaccgtagttaatgtttcgtttttaggaattttaatcgttcttgtcatgtttgcaacataaaaaaagctcctgagttttcaggagctttttttaaagtaatccgaagaaaataaatatgagcccaattgcaattccaacttgacaaatgcctacagtaccgccgtataacaatgcctttggtccgtcttttactaaatcgcggaattttacacgcattccgatacctgccagtgcaataatttcaaattggctgctgatggtatgagctgtgtgagaaacaatttcaggaataatattgaatgttgcaatgatgctgaatagaaaaaagccgataatataccacggaatttttgcttttacttttttgtcgtcattagctgtggtgcttctggaaagcagtttttctccttcattggtatttaatttggagaaagccaatgcaacaaatacaataaatataattctgataattttaaatatggtagacatagctactacatcagagttaacaaaggtagccgagccaattacttggccgacagattgtaaagtaccgccaatcatcgcggaagtttgcatcgtttcatttccgtaaagagcacctgtgagaaagggaagtgtaatcattagtacggtacccgttaaattcacggtggtaattgaaatacctttgtcttttgcgcttggatgaattacacctgaaactgtgccgattgcggaggaaccgcacacagagttacctgcacacattagtaaggagaatttttttccaaagcggagtaattttccaataaaatatgtgacaataatggtcaaagtcatttgcagaataatgaataatacgccttgccagccgacactcataatatcagttaaatttagtgttaaacctgtcagtacaatggaatactctaacaaacgactttctgaaaattttgttcctctgttaaaaaaatcttttgtgcagagtgtatttccaacaataatacctaaagcgatggcgaataaagcagcccctacagtaggtacaaaatgtgcaattacttggctgattccggcaatgataacgcatacaatcagcccgggtaaaatttcaagtatgttttgttttgcgcgttttaacagttctattatttttgttttcatgggtcattttgcacctcccttttatttgtgacttgattttatcattgtttcgttataaaatcaaattataaaaaattatataatgataaatttaatttatgaaagaggatattatgttagattttcgtttgcttacttttatgaaactatgtgagttaaaaagttatactaaaacagcagaaaacttgcatatgacacaaccaacagtcacacagcatgttcagtatctagaaagacagtacggtgtaccactggtagaatatcacggaaaaagcgttatgctaacgccaaaaggggagcaattgtatcactttattatgaccatggaagcggacagcgaacgtgtcaaacaaattttgaaagaacctacagaagaaaaacgtcatattaaatttggagcaacacttaccattggtcaatatattatgcctcagattatggccaaatattttacgcagcatccgaatgtgcaaattaccatgccggtggaaaatacaaaacgattgttgcaacgtttaaacaatggggaaattgaatttgccatcattgaaggttattttgataaacacatatatggacatgctctgttgtcttatgaaagatttttagcggtttgtgctccgggacatcctttattgcaacgtacgtacaaattagatgaattgtgccgttatcctttggttacaagagaaaaaggttccggtaccagagatatttttgaacacatattgaatgaacattacctatctatcaatgactatgaacaaattttagagttgggaagttttcaggtaattaaagatttggtgcgtcaaggaattggatttacatgtgcctatgaaccggttgtaaaggaagaaattgaaaagggaattctaaaagagatttccattgagaaattttcgacagagagagaatttaattttgtatatttgaaagacagtatttttgaagaggaatatttgcagttctatcaattttgtatggaacatttaaaagaatcctaatagaataaagtacagttattttttatttttatagatatatcaactttttccagaaaatttgtattattttatacaaaaatccatttcatccttgaaaataatcacaaaaaacggtatcataaaacgacatgttattttatgaaagattgattttagaggagggtacaatggaaaaattaaaatttaagcaaataatgtcccttactttaacattatttgctatttttttcggggcaggcaatatggtttttccgcccgctatgggacagctggcaggagaaaattattggcaggctttgattggtttcatattaaccgatgcaggtattgctttacttggcattattgcggttgttctggtgggtaatgaaattacggatttaggaaatttgataagtaaaaaattctccatttttctttctattgttgtttatttgctcattggcccattatttgcacttccaaggacaggaagtgtatcgtatgaattagcggcaaaaccttatgtgccaagtgaatattcatggttggtttctttagcggtaacagctgtgtttttcgctgttacatattttctgagtgcaagaccgaacaaaattgtagatattataggaaaatatcttacacctatcttgattctcagcattgtagctattttcttttcctgcctgtttatggataaatcaaatcatacgattcaatatggagccacaacagcatcggatgcttattcctcaggcggtgcctttttccagggattagtagaaggttataatgcactggatggccctgcaggtttggtatttgctattattattatcaatgcggtaacaggttttggaattaagaaaagaaaaaatattacaaagtataccgtaatttgcggcattggtgcggttatcattttatcggcaatttattttatgttgacttatattggtgcctctacactaacttcgttccctaacggaggggaactgctgcatgctgtgaccagtgatttactgggtactccgggcggtatcattttaggtattgccgtattattggcatgtctgactacgtcgattgggctgaccacatcattttccgactatttccacgagttaattccatctgtatcttatcaaaaaattgctttgattgtgtgtatctttagttttgtaatcagtaatgttggtcttactcaattggttgcggtttcattgccagtgctgatggcggtttatcctgtattggttgtcctcattatcctatcttttttcaaaagatggattcagcacagaagaatgatatatgtactttcaatggcatttgcattctgcatttcatttatcaatggcttagacagcgccaatattcctctgggtattgtagctgattggattggtatgcttccgctttatgatttaaatctgggttggatgattccggccgcgataggggctataattggtatattacctttttggccaatgaataaaaagaaaacagcaattgaatcatccgaaggataacaacgtttgtttagattatatatttcgatttgttatccattcataaaggacactcttaaaaatctccggaagggtactgagacatatcttaatcaggaacaattcataaagtaagactcagaacagagaccagaaactctgcctgagtctttttgtttttctaaagcgttgctatggcacgtttaagctttttaggaagtacatggaagttctgataatttagaagaagtggaggtttggtatggatagaggaaaagcagtgtaataaaggattttttcaaatataggatatctttgacaattaccatatctataaattttaataataaaactatttaaatttataattttactttataacagttttatcatataatatagccaatgaggataagagaaatcatttggtaaaggagaggcatcatgtacgattttattattattggcggcggtcctgcaggtattagtgcggctgtgtatgcggtgagcagaggactgcgtgttttggttttagaacaggaaaaaatcggcggagtgattgggaaagtgtccattgtaagccattatacagccattgtagagggtgaaactggggaaacatttgctgcacgtatgaaaaaacaagcactggatgccggtgtacaaatttcttatgagactgtagtagaggtgcaattgacaggtaaaacaaaaatagtaaagaccaacagtgacgtttacgaatctcatgcagtgctgcttgcaaacggtactacaccaagaacactaggtattcccggcgaggatacactgacaggaaaaggctatgcactcaatgcagcgaaatcagcgcaagcgtatgctggaaaacatgtttatgtggtaggcggtgcggacggcgccatcaaagaggcattatatttatctcgttttgctaaaaaggtatttattattcattttgaagacaaactgggggccattccggagtttaccaataaactggctcagttaggcaatgtggaattattattgcattctcgtttgaccgaaatcggcggtaagggccaagtagaatggttacagcttacagatgaaaaaacaggtgtaaccacaaaaatagaggacgaaggctgtgggatttttgtctatgcaggtgctacgccaaatacacagttgtatcctgaattatacttagaaaacggctatattcccgtaaatgaaaaaatggaaactatgtatcaaggagtgtatgcagccggcgatatttgtgtaaagcaagtacgtcaggcggcaacagcagtagcagacggtgcagttgcggcaatcaatgcggcacagtggattgcaaaatcataacacattcatttatcacagtaaaattttatcacatccccaaaaaagtcatacgttgtatggcttttttccataatgatgatattgacagattttgccgaaaccgatataatgttgccataatttaataaagtatgtcatatcgcttttgcaattatttgcaggaagttgggtgtaattcccacacaggaacgctgctgtaataacggagcggcctttcacgaacaaattgtttttgttcagtcactggatattttctgggaaggcgaagggtatttgctatgaggtttaagtcagaatacagcgatattacataagtacaattactcttcggactcaagaggtactaaatggataaaaaggctgttttcacacagccttattcggcgtgtgttcattatcctgttccaatgcaaattaccgcatgaatcttttgaagggttcatgcggttttttatattttatttacatttgaaagggagtaacaagtatgaaaaaatggatgggtttaggtatgtcggcgctattgttaattgcagcgcttaccggctgcgggacaacacaacaggagacggcttccaatgaaatatcggtgagccagacagactctcattatcccgtgacggttgaaagctataattatgcgggtgatgtggtaacaactacgtatgaaaaggcaccggaacgtgtgattgctgtgtatcaaggttccattgaaacgatgcttgctttgggattagaggaacatgtagtggcttcttacggactggataatgccgtaaaagaggaatgggaagacggtttgtcaaagatgaactatcacgaagaagtgtttgcaccctccaaagaagatgtcatgatgttggagccggacatgattttcagttggggttctttgtttggtgagaaaaaattaggcgatgtagaccaatggatttccagaggtaccaatacttatattaataccaatacaagagcgggtggttatgaccgtactttggaacacgaatatacagatattttaaatataggaaaaatatttgatgtagaagaaaaagcgcaagcactggtagatgaaatgaagcaagaaattgaagacgcattggctaaaaccaaaggaaaagaagcacaaaccgtttctgtcattgaatttttgaatgatgacatttccaattatggtgcgtcttctttagcaggagatatgattacacagttaggaggagaactggcagctcctgatgcaaaacaagtaggaaaagaagatttggtagaacaaaatccggatgttatttttgtggtttacatggaaaacagcggtgacgatggagaagatgtaaaaagtacatgtgttgcaaaagtcatggaagacccggcatttgcaagtctggatgctgtaaaaaatggacgtgtatatccaattatgttgggtgatatgtatgcaagtggcgctcgtaccattgatggaatccgcaattttgccgcaggtttgtatccggaactaaatcaatagtatgaaaaaaagatcattcaaaaatgggttattcaaagggaacctatcttttatcactttgttggttctgctgtctggtgcactgattgtttcattgttatttgcggttaccattggttccagcaatatctctatggcagatgtatataaggttattattcgccaattatttggcattggagatgcctcttatgccaaaggttccattcatgatgtcgtctggtttattcggcttccgcgtctgattttagcagtcggggttggtattgggttatccgtctgtggtactgttatgcaggccattgtgaaaaatccattggcagacccatacgtactgggtatatcttcaggtgcatatttaggtgcggttattgcaattgttctggggattggctctgttttgggcgggaattttgtaggaatattggcatttataggtgcatttgtcgtttctttggcagtacttactcttgcaaatattggttcaagagccaatacagcgaaattgttgctgtccggtatggcgttaagtgctgtatgcagtgcaattgcgaactttattgtatatatgacaaaagataatgaaagtgttgtaacggtgaaccattggctgttgggcagtttaagcggtgccaattggaccacaaatttgattgttttatctgtggtgctggccggttttatattttttctgacacaatatcgtaccttgaatttaatgctgtatggcgatgaaacagcaattacactcggcactaatttgcatgtatggcgccatgtatatttggtagtttgtgccgctattgttggcgtgttggtatatgcggcaggtatgattggttttgtggggctggtgataccccattgtgtgcgtatgctggtaggtactgaccacaaaaaagtagtacccctctcagcactgataggcgctatctttttaatctgggtagatgtttgctgccgtgtgttgctcaaggggaatgaacttcctgtaggtgtactcacaggtatcattggcgcgcctgtatttatctacttaatgattcgcagaaaatatggatttggaggaaaagacgcatgacggtatcaacccaaaacctccatatttcactgggtggaacggaaatactgaagggaattgattttcatacaaaacaacattcattcgttggaatcataggtcccaacggcagcggaaaaagtacgttgctgaaatgtatttatcgtaccttaaaaccaacgtccggcgctgttttactggacgatgtatttttgcgaacactaagcttaaagcaatcggcaaaaaagatagctgtagtagcgcagcataatcattataattttgattttacggtaaaagatgtcgttatgttgggaagagcgcctcataaacgtatgttagacagagacaccaaagaagattttcaactggtagatacctgtttacaacaagttggtatgcaagacttttcagaacgtttgttttcctctctgtcaggcggagaacagcagagagtactgttggctcgcgctctggcgcagcagacgccctgtttgattttagatgagcccaccaatcatttggacattaaatatcagttgcagttaatggatattgtaaaatctttggatatcacaataattgcggcaattcatgatttaaatattgctgctatgtattgcgattatatttatgttatgaaacatggtgagattgtgacaaaaggtacaccaaaagaagtactgacctctgaaatcattgaagaaatttatgaggtacaagcggacgtaatggaacaaaatggcgttttacatattttatatcatccgggaggaaaaacaaaatgaagcatattgccatgttaacctgtttgaatgcaaatgccgtatgtacgggtgcttcttgcctcaaagcgttttatgatagaacaggttcttttgcaatttatcaaacggaagcattatatttggatgcgtttatgaaatgcaatggatgtggaaatcctccaaatacagaccatggcatgctggaaaaaatagagaggctcaagcagttaggaacgcaaattgtacatgttggaatttgcgccagaaaaaaggatggtacggaatgtccatccatgacggagattatccgaatgttggaacaaaacggtatgaaaattgtaaaaggaacacattgagatgttaaggaaagagtgatacagctgtatcgctcttttttatttttatatacaaaccattttggacatactagaacgtaaaataagaacaaggagagagacgtatgaacatttcatttgatgcggtctattatgaaccgtcggtattatcttatcctttaggacaacaattaaaagaaaaatatgcagatttgccatggcaggagattgaaagccataatcatatacagcagttcagaaatgctcaaaatagcgagtttccaaaattaaaacgcaatttaattataggtaccaggaaaacacataagtatacggaaaatcataaggtttctgattttctggttccctatacgtcttccggatgcagtgcgatgtgtctttattgttatctggtctgtaattacaacaagtgttcctatttgcgaatatttgtcaatcgtgaacaaatgatggagaagctgattcgtaccgccaatcagtctgaaaatccgctcacatttgagattggaagcaacagcgacttaattttggagaatgtagttacggaaaatcttccatggactattgaacaatttgccgcaaatgcaaaaggaaaattaacctttcccacaaagttcgacatgatttcgcctttgctttctctgaatcatcagcagaaggtgatatttcgtatgagtttgaatccggaaaccattatcagaaaagtagaattgggaacatcgaggctcaatcagcgcattatggcattaaatgctatgtgtgacgcaggttatcctgtggggattttattggcgcctgttatttttgttccccaatggaaaatattatatgcagaattgatttcccatttggcag

SEQ ID NO: 2788 - DNA, 3641 bp, Unknown
  16S sequences of unknown bacteria
agctgcttcgcagcttatcagaaggagtttgcactcctcctgatacaagcaagccacccctgctgcttattgctccgcgcaattgaaacaggggtcttgcttgactcgataaaaaatagatttccaggctggcatcagatataacaatggctgtgagatgggaaggtgacagatatggcagcaaagagagattattatgaagtgctaggcgtcaaaaaggacgctgatgaaaatacaatcaaaaaagcataccggaagctggcgaagaagtatcatccggattccaatgccggagatgccggtgcggagcagaaattcaaggaggtcactgaggcctacaatgtgctcagtgataaggagaagcgaaagctctatgaccggttcggacatgcggcctttgatggcagtgcaccggaaggcggctacgcgggtgccggaaacggagccggctttggcggctttggcggaagcggttttcatggcttcggcggtggaaatcctggcggctatcaggagtatcattttgagggcggcgatatggatgacatcttaaagcagatgttcggcggaaccggcggctttggaagcagaaaaggttcgcagcgcggcttccgtggcttcgacggtggcaatggtggcttctatcagtacggaaacggtgcaggcaatggcggttttcatggcttcggcggggactatgatgagaacggtgaagatctgcatgcagatgtatcgatcagcttcgatgaggcagcctttggctgtgagaagcggatcacgctctcagacagccggggcggcgcaggtaagaccctgcaggtacacattccggcgggtatcgataccggcaagagtatccggctgcgtggaaagggcatgccgggtattggaaagggcgctccgggcgatctgctgctgcgtgtgaccgtcggcgaaaagccgggctttgagcggaagggctcggatgtatacaccacggtgcagattccgtttacgacggctgtatttggcggcgaggcggttgtgccgacgctgtatggcaatgtggtctgcaagatccgcgagggtacgcagtccggcacgaagatccgcttaagaggcaagggtattgtgtcaatgaaggatgcttcggtgcatggcgatcagtatgcagtggttcagattgcggtgccgacccgcttaagcgaggaggcaaagcggaagctgaaggaatatgaggcagcagcccaaggtgctgaaaggacaaggcaaagaggagcggcataatgctgcagaagcctgaaaaatagggtggtgcgatggcatataaatatgagaaggtaaatcaacagctgctggttcctcagattgaagatcagctgctgatgtatatacaggagaaaaacattgcgataggatcgaagcttccaagtgaatataagctggcagaactatttggagttggaaggagcactattcgggaagcagttaagagccttgttacgaaagggattcttgaggtaaaaagaggatccggaaccttcgtgacgtcgacaaagagggttgcggatgatccgcttggtttcgcacagtttgaggataaatacaggctggcgatggagctgtttgaagtaagaattctccttgagccggaggtcgcagtcgcggcgtgtcggaatgcgacggaggatgataaaaagcatatcaaagaactgtgtgatgaggtagagcggttatatcttgaaggaaaaaatcatattcaaaaggatatggagtttcatgaggcaatcgcaaagtgcagtggaaaccgtgtggtagaggtgctgataccggttattcttacagccattaccacgtttgcaaatctgacaaacaggaaattgcagaaggagacgatagaaacgcacagggcgattacagatgcgatgctccaaggagacagtatgggggtaaaatgtgcgatgattatgcaccttacctataaccgtcagatgctgattgaaatgacccggatagataaaagtgatcagacaagttgaaatgacagctattaaatgaattcaataaaatacacaaaaaaccaacctttttaacaaaaagaggttggtttttttgttaaaaaaatggaaaacacatgtagatttgaaacaacttgcgataagatgaatgaaattatatacttagggtaagatacaaaagacgtcggatgtatatgaaaaatgaaaaacaaaacctgtaaatgtatggaggagtaaaatgagtgaagtaacagcattagatcctgcccggctggtgacagctgcggtggtcggactggctttattattggtattgataataaaatgtaaaattcatgcgatgttatccattctgctcggagcgataacgatcggtatgatagcaggtatgccgttttcagagattgtttcggccgtgaatgatggtatcagcaatacgttaaagggaattgcattgctggttggccttggttctatgtttggggcaatactggaggcatcaggaggagcgcagacgcttgcggtaacgatggtgaaaagatttggcgatgaaaaggccgcatgggcactcggattgaccggacttgtgatcgcaatcccggtattctttgatgcagggctgatcattttaataccgctcgcgttttcactggcaaagcggacaaaacggtcgactctgtgttacgcgattccgctgctggcgggacttgcagtcggacatgcatttataccgcctacaccgggtcctgtgcttgtggcaacgatgctgaatgttgaccttggctgggtgatcttgatcggtcttgcgtgcggtactgtggcattgattattgcggggcctgtatggggcgcgtattgcggaaagaaatatatggttccggttccggagcatgtcgcaaagcaagaggacatggatgagtcaaaacttccgaaattcagcacaattgtgctcattattgcgattccgcttgtgctgattattctgaaatcacttgctggcgttgttccgtccatgcattcattatctccggtactgaccttcctaggagagccgtttgtggcactgctgattgcgacgctgacagctatgtttgtgcttggaaaaaaacacggttatacgatggaagagcttgaaaaaataatgacgaaatcgctggagccgaccggtctgattttacttgtaacggcctgcggtggtgtgctcagatatattcttcagtattcagggctgggagatctgatcggcaacgcggtagcttctgtaaatatgccgattgttgtagttgcttttattgtagcggcactggtaagaatttgtgtaggctcatcgaccgtggcaatgacgatggctgccggaatcatagcggcaatgccggggatttccgaattgtcgccgctctatctggcatgtgtcgtagcggcggtagccggaggctcgaccatatgctcccattttaatgattccggattctggctggtaaagtctctggttggagtggatgagaagaccaatctgaagacctggacgatcatggaaacattagtcggcttcagtggatttgtagtagcatttatcatttcattatttgtatgatgctagggtcaaaaggtcaaaaagccgttcatgcttgcatgataaggctt

SEQ ID NO: 2789 - DNA, 2030 bp, Unknown
  16S sequences of unknown bacteria
cttttgcacgccgcctttaaatcggggatcagccgctgatacatatccgcaccggaagggaaaaactccgccccctggttttcgtacaccggatagcccgcccgggccaaataccgccccagaggcgcttcgttgggaaagtcctcataacagcgcgtttcagtctccatgcgaatgggaagcagctcgccgatttcatgttcggcccggcgaaagcgccggttaaaccagctgaactcccgcttgctgccccagagaaaatataaaatgaagccgccggcgggaatcaggaaaataatgagcacccagttgagcttatagcgcggttccttgttcaccataacatagatgagcggtacgctgaacaactgcagattaaggtacactgagatggcacttctctgcagaaacaccaccgggctgatgatcagcaccatttcaaggaccagcaccacgatgaccgagccaatacgaaggaaactgttcatcagctccaacattctttcattcagtttcacagcccggcctcctttcccgcaggcaatactgcaccagagtagtgtattcttttttattatatcgatacgccgtaccggtgtcaaatgacatccctcaaccagtgccaaaatctcctgcgtctgtgcaggcgccgctgaaacggattgactttccgccccgtcatgatatactatagttagcggacgcaaactttttgttttgcatctgggtccgctttcacagacgcagccggcacattctccggcggcgcagaaaggagaagatatcatgcccccctcgatttcagcaaccaacctgattgtgatcgccatcctggctgtcatcctcttttttgccgtgcgcagcagcatccggcatctgcacggcgcgggaggctgctgcggcggcggtacctacaaagcccatcccaaaaagctggagcatgtagcgcagaccaaaacattccctgtggatgggatgacctgccagcactgtgtcaaccgtgtgatggacgccgtcaactccatcgacggcgtatccggcgtggtgcatctgaaaaagggcatcgtgaccgtatccatggaacatcctgtcgaagacgccatcatttgccaagccattgaaaaggccggctacactgttcccagaacaaagaactgagccggctcccagccgaacggtttgtttctgaagatctcatcttgtatgacaagaggcgcggagcatattgctccgcgcctcttgcatttgtatggatagaaaacagacgacagatggggattctccgttctgtgtttctcatttttgttccgcacaacagccgcaggtatgcgtttgaccacagcagttcccggcggtctcgcccgaggaaggacaggatgtgcagtttccgccggccgggcagccaatgcatttgacgccgcgtttcttggcccggatgatatagcccagcgccgaaccgacaatcactacaacaatcgcgattacaatcaaatctgtcatacgaagcatctccttttctgtatgcctttacttagccgtacccaaggcatattccgcagccaatccccggttcgtccggcggatcagatacacaattacagcggcaaagcacagcactgcaatcagaccgggcaggaagccagcgcccagcgtgcccgtggtgatcaacgtgccgatctggaacaccaggaagcccacggtataccccacagccagctgcaggcagatcgcgccagccagccatttgccgctcttcagctcagagcgcatggcgccgatggccgcaaagcaggggggtgtgaacagattgaacatcaaatacgccaaagcggcaactttggtgatggccactactgtggcgacctccgcgccggcaccttccatcatcgccagctcttccgtgtcgatcaggttttcaaggccaacaaagcagacggccagcgtgccgaccacgttttccttggcgataaaacccgtcaccgcggcagcggccagctgccaggacctgtctcttatacacatctccgagc

SEQ ID NO: 2790 - DNA, 3499 bp, Unknown
  16S sequences of unknown bacteria
cttaaagacatcccgaaaagccgttgcaaacttactctgattttcgtatccgacctgattggcaatttcagcgatggtttcctgtgtctggcgaagcagagcagcagcctgtttcatgcgataagttttcatataggttccaatgggctgaccatagacccccttgaatgtatcttttagcgtggctgtattgatatgatattctttggaaagctcctcaatcgtcagccgctcatgcaaattagagatcagccgcttatgaatttggcgcacaatctccacctggggagaagtatataactcccgctgcttttcctgctttacattcaccatgcacaaaaacaagagcagctcctgcaccttcagcatgaagtatggcttttgaaagcgatccggtacggaataaagttcagaaaagatatgttcaatatcgtcttttgcccgcatgacaaaacatgagccatcggcacagaatttgtttttgaaatctgcaatatcaataccgctttccgtgaggattcccggcggattttcagaaaccagttccaggtcaagcaccaccgagatcccacggtaatgtttcaacgggaaagacatttcagacgcacagttatccattgtatgaatggagagatcgccttctccgagatacaggcaggagccgctttgcaatacgctcccttcccgtccctcccggcaatgattgatctccaggacgttcttgccaatatttccgtcccaataacagctcgttgcctcgaaatcattgtaaataagctgaatcccagggtagacctgatagactgtcataaggcccaggccatccgcacagtccaatttatagacggtacagtatccatcattatcttttggaataaccgcagacaaccccgtagcgttggtaatagggttttcgttcatagtattccttccgttatctcttatttgttctgccaggattctcctggcatcttttattatatagtctttcctcattttatgtcgctccaatcggcaggatttgcaatccaatcagaagtcaaattagattatattacattcctgacaactgtgcaaacggagaaaaagccgatgctctccaaatggaaaagcaccggccttatgttggggtgatttgctgcaatgtctttattccgcacagatcattgacggcaagttttcaattttttgcatatccaaagtgcaacgccgattattgaaataatggtcgctgaaccaaaaaactttttaagcgtcataagcgatcctccttaccgattcacggaagaagtcgcaggcagtttgcggaactcataagccaccatgaacgcgataatagcaaccagaatcgcatcggtcagcgcaatcgccagccacacgccgcgaatacccatgccgccgatcatcggcagaaccacgcagagcgggataaaaagaatgatctgacggaacagcacaagccaggtggcctttttcgctttacccaaagactggaacagggtcacggcgatcataaaactgccttgcaggatataggtgctgaacatgatacggaagtttgtcgcacctgatgcggcaatacccggcgttgtcaggaacatggacaaaatcttttccgggaacagctcggcggggatatagaacaccagcgacagcagcgttgcggcgataatgaaaactctggtcagcgtctttacccggtcatagtctttcgcaccgtagtttgtaccggcggcaggctggaatccctggctgataccccatagaggtacaaaagagaaattccagaaccggagcgccgccgctaaaaggagctgggaggtttcaccgccatagttcgatgccacacgataaatcactgtctgctgcaccagggtcagaatctgcattaacagagcagagatgccgacagaaagaacctggggaagcagctcaccatcaatgcggatacgcccgatcttcacatgggggcttttcttcttgaaataccacagggtaatcgcagcctggacaaactgggagaaaatcgttgcataagcagccgcttcaatgcccatgccgtaggggttgaggatgctgataaaaatggggtcaaggataatgttcaaaatagcgccgctggcaataatggtcattgcccttttgagctggccttctccacggatgaccatgttggcgctctggaagaagtttacgaacagagaaccggcgaatacgatccgcagatatttctcagcgtaattcagaatgttatcgctggctccggtcagggacagaagctggcgggtgaaaaccatacccacaacagtgtagatgacggacaacagaagaaccatcgcaaccaagttgcccatgatcttcttaattgtgttctcgtccttcttaccgatagcgcgggacagtaccgatgcagaacccacgcccagcattgccgctgaaccggcattgataagggttaaaggataggataccgatatggctcccatctgcacgtcaccaaccatctggccgacaaagatggaatccatcatgttataaagcccaacgaccaccatgccaagaaccgcagggatgctaagttcaatcatcagcggccagggagtttttgttaagagctttgttcttgtgtcaagtgcctgtttcatcactctattcctcctggtctattttaattacaaggtatccagcaaaacgcgccagtgacgcgcctcactggattaaccatatctaaccaaccacttaaagtatataaaaaccgggcttctttgtacgctcccaaccgcaggatttacaatccaatctgaaacgaatttaggagcggaaaggacataaggcccttcccgctcccgttgttactgtatcattttttccagtaatttcagggcttcttccagttttggatttacagcgtccgtttgcagggcatcccggacgcagcttcgtatatgggcttgcaaaatctgctgattggcgctttttaataacgcctgcgtagcaagaagctgattggaaatatccacgcaatagcgattttcctcaaccatttgcaggataccgtctaactgtcctctggcgatttttagcttgtgaacaatatcgcctttcttggccttcataaacggcccgttactggatactgacgagctgatagccagcgtcctcgatagcagctttcagcacagcatccggcacatcctggtcaagctgcacctgggccgacttactctccagggaaacatccacatccttgatgccctggatgtcccgcagcgccttatcaacgtgttttacacacattccgcaaaccattccttcgatgttcaatactttttccatgtgaattgctccttttcgttcttgtttaattgttgtttgttcatacataggggctgaatcccgttctgtattggcctgatgcctcgccttgaaccaccgcagacgcagggcattggacaccacgaataccgaactgaaactcatagcaaaagcgccgatcatg

SEQ ID NO: 2791 - DNA, 7200 bp, Unknown
  16S sequences of unknown bacteria
tacaatatctagtttgtgttttttgtgtcccatactaacattcgtattttattagttagtttattttaactttattttccatttctgcttatgaagacttattaaaaaaagttgattgacagtcatggtccaataatgatacgtttacggtgattattgataacacaaacgaagaggtgtgaaagcatgcaggaattaaaaccgatcaaagaaggtaaagtacgtgagatctatgataacggcgacagtctgatcatggttgccacagatcgcatcagctgttttgatgtgatccttcataatgaagtgaccaaaaaaggtactgtcctgacccagatgtccaagttctggttcgacatgaccaaggatattcttccgaaccatatgatctctgttgatgtaaaagatatgccggaatttttccagcagcccaaatacgaaggcaaatccatgatgtgtaaaaagcttcagatgctgccgatcgagtgtatcgtccgcggatacatcaccggaagcggctgggcaagctataaagagaatggaaccgtctgtggtattactcttccagaaggtctgaaagagtccgacaagcttccggagccgatctacactccgtccaccaaggctgagattggagatcatgacgaaaacatctcctttgaacagagcattgctcatctggaaaagtatttcccgggaaaaggtcagaaatatgcagagcttcttcgggacaataccatcgctctttataaaaaatgtgcagaatatgcactgagcaaaggaattatcattgcagataccaaattcgaatttggtctggacgaggaaggtaatctggtcatcggtgacgagatgctcacaccggacagctcccgtttctggccggcagatggttatgagccgggacatggccagccgtccttcgataaacagtttgcccgcgactggctcaaagcaaatccagacaacaactggactctgccgcaggagatcgtagataagaccatcgacaaatatctgcaggcatataaaatgctgaccggaaaagatctgtaatcaaaaactttaatagctcttttaactgtcggatttggatgaatttgtccctatccggcagtttttttcgtttatttccataaaaatgagtaaaattattgtaaaagcagtgtaaaatgttttataataatgaagtacgtgtaaaaatcacataggagagaaagaaaaaacatatgaatggcataatgattatcctgacccttttaagcggagttgcattattcctcttcggtatgtctctcatgggagacggcctgaaaagtgtggcaggaaacaaactcgagcttgtattgtacaagcttaccagcactcctattaagggactgcttctcggaaccgcagtaaccgccattatccagtcttcatccgcaaccactgttatggtagtcggattcgtaaactctggtatgatgaaggtatcccaggccatcggtatcatcatgggtgccaatatcggtaccagcgtcaccggctggatcctgtgtctgtcctacattgagggttccagtggaattgcacagcttctgtccaccgcaaccatttcagccattgttgctatcattggtatcatcttcaagatgtttgtcaaaaagacaacctataaaaatgtgggcgacatcatgcttggttttgccatcctgatggtcggtatgcagaccatgagtggcgccgtatcccctctgaaagaaaacccgcattttgtaaatctgcttaccacctttgaaaacccgttcatgggtatcattgtaggtattctgtttactgcagttcttcagagtgcttctgcatccgtcggtattctgcaggcactgtccgtaaccggaagcatcagctttgcagctgctctcccgatcaccatgggtatcggtgtcggtgctgcatgtccggtactgctctcttccatcggaaccaaccgtaacggaaagcgtaccgccctgatctacttgctgaatgacttattcggtatggtattctggtccatcgtgttctatagtgtaaacgctgtagttcacttctcatttatggatttgaccatgagcccggtaaccgttgccctgatgaacagcgtcttccgtatggctaccatcctggtactggtaccatttatctccaagattgagaagctggtcttctggctgatcaaagaagatccggaggacatggaagagcaggctgattttgatctgttggaggagcgtttccttgcttacccggcactggctatcacccagagtcataccgccatgaacggtatggcaaaaaaagcccgcaagaatctgaatcgtgcatttgccctgctgaaggattattcccaggataaatataataagatccaacagaaggaaaacctgattgataaatacgaagataagcttggcacttatcttatgcagctgaccggacacagcatgtctccgcagcagacccagcaggtgtccaagtttctgcatactttaagtgactttgagcgtctgggtgaccatgcagtcaatatttccaaagttgccagtgagctgtccgagaagaagatcaccttctctccatccgctcaggacgagatccgcattcttcagagtgcagttcaggaagtggttgatctgaccgttgatgcgttctgtgaagataatctggagatggctgctaaggtagagcctctgcgcgagctgatcggtattctttgtaacgaactgaagacccgccacatcggtcgtctacaagatggaacctgtgaattccagcagggattcgcattcaacgatctgctgactaacctggagcgtatcgcagctcactgttccaacgtagcagttgccatgattgagactgacagtgatgaattcgatacccatgagtatctgaagagtgtccgtcacatgaaggatgctgcatatctcaaatgttttgataattatgcccagaaatataagttggccgatctgtcttcacagtaaataagatgtaacaaaaaagacctgcatgtcaggtctttttttgttgaatcctgtcgattttaatgatatgctaagaatatgaaaataagccttatggaggtgacagatttgaaattcaagaaaagtaaaatgttgcttggtaccatgtgtgcccttgttctggcaaccacgatcggtgcattcccatcaaaagctgaatccgcattcgactacaactactacttctggaaatacccggatgtagctaacgcagttggattcgatccccaggcactgttcaatcattaccagaccagtggaatggctgaaggacgttatgcaaatcagcaggcagagtggcgtgccgctgccggacacgttgataccgctgaagagcgcaaagcattcctgatgacaatcccgcctgcagacccgaacaatgctgattctgatctgccgaagcttgatccgatctactattacaataccaacccggatgttgcaaaggtagtcggcaaaaatgcacagggactgttggaacattatttcgcacatggatacagcgaaggaagacttccctactatggagctgatccatgtaccgaagtacagacttcttattaatcagcctcaaaagggctgctgtcaattatgacagcagcccttttttgtaatgaacggattctttacttttgttcacgatagccttaaatcgttactccacgtcaattttgttaaaatcataaaaaatctgttaagcagacaatttgtttaaaaccgatttcaaagcttccagtgtctcaactacatccgcttcattggcattctcgcccatatgaccgatgcggatcacctgacctgtcagtacatcaaagcttccggcaatcatgatattatgatccttcttcatcagttccagaatatcatctgctttgattccatccggcacacggatgactgttaccgtattggaatacccattttccagatagagagacaatcccatctccttcactgtccgtctggtcaattcacccatctgtttatgacgctcataacgatccggatctgcttttacattctccagagctgtacgaagaccataaatatcactgatcggcatagtatacgggaaccacaggtttttatagtaatccttgaacaccagaatattggcgtagaaggatgcaatcggtgtctttctctcttccatcgctttcatggctgcatcactgacagttacaaaagtcagtccaggaggtgctgatactgctttctgagaaccgccgcagacaatatcgatctgtccttcatccacacgaagaggttctcccatcatggcagataccgaatccacaatggtcataatgccatactcatgaagggcacggcttaattcctccactggattcagaacaccgcttggagtatcacagtgaaccagtgttgcatacttaaaatcgtgatgttcttccagaaatgctctgaactctttcacatctaccgcctgggtatacgtggattcatagaatgtcacctgcccgccatacatggtcacaaaatcagcaaatcctttgccataaataccgttatcaaccaccagcactttatcgccaggctctgtcagggatgcgcaggcagcctccaggccaagaataccttctccgtcaagaatataagcggtattcttcgtctccaataattcgctgatcaactcacaggtttccttataataatcataaaatgccggatccagatccggattggtgcacgcaaggcttctcgccatgcggacattttctcttacctgggtcggacccggggtcatgatcttgtacatatgttatcctccattttcgtgtaactgcatacacggcagaagccatctgcttccaccgtgccatactctcctattatctgcgaatggctcttctgaccacctctgcaatcggcagtaccagaactgctgccacaccgatctgtaccaggttacccggaatggacgttaccggcgcaacccagttaccatagataaatccttctgcaatataataacctacaattttgatcacacatgcagcagcaatcgccattgcattccatctgaatcccttgtgattctctgtgatagctcctactgtgaatcccataagaccaacaattacaaaggtgaatggtgcccataatacccagccgcccatcagatcaaacaatgccattccaaaagaaccagccagtgctcctgtccgttttccgaaaatgatagctgcaaggaacaacggcacatttcccagatgaaccagtcctccattggctgcgatcggcagacgaatgttgatgaatccggttgccacaaatgtcagtgcaatacatactcctgtaattgcgatctccgatacggtaatactctttccagcagatgcttctcttgtgctcataatactgaacctccttgtaataaaagaacggaagacaagcattttcctgtcttccgctgcttgctggaacctatattagcctatgactggttacaattaaatatccagttttatattttttgaccagtccagttatttttcctatctatttagtaataaatccgattttcaaaggtgatcgtaacctgtccgttctccacatgaaggcaggtcacaccacagtttttatgtaccgtaccactccagaactgtgcaatcggcaagttaaggagtcctgacataattccccggatcgctgctccatgagatgccatcaaaaatgtctttccgtcattttccggatcattgatcacacttttcacaaaagaggatgtccgtttgatcagatgcgccagactctcgcctcccggcggagtctcgaaatgctccggatcttcaaaaaattttcgaaatccaggctttgggatcgtataatgctccggctcatgacacaatccttcatattctccaaagctgatctctttcaatccatccgtcaccaccagctcaacaggccggtctccgcgaatgatctctgccgtcttctttgcacggatcagagggcttgtatagatccggtcaaagggcacatctttaagcccctctgctgtcttttctgccagttcgatcccgcaggcattcagcggaatatctgtcactccctgcagccgtttggttttattccagtccgtctctccatgacggatcagataaatatcaattgccatcttgtcactctcctcatgccttcatggtcttgcagtctttacagattccatataacacagagttccggcactgtaattcaaaaccatggtctttctcaatatgttctgagatttctttcataaaggcacagtccagatgatagatccgaccacattttacacattgaaggtgcagatggtcgcaacagcctttgccctgctccacatactgataagcagcctgggaaccttgcccggatacataacggatcaccgttccgtccttctccagccgatccagataccggtaaatggtggtaatattgacttcactgtccatctggcgaagctgctcccctatctgagcagctgtaacggtcttatccttgctttcctttaagatctccagtatttttctgcggcttgccgtcgcataatgattttctcctgccatacgtctcttcctctctcagacactacctttagaataccactccaagtgcatgaatgacaagcccccaaaacacaccaagggcatacagtgccgctatgatcttcgccgtctccttccggtcatggtcgatccggagcagaaccaggatcccgactcccgcattgaccagaagacctgacatcatagctccggctccgatcacacctgacagataaagctccgtgatcactacagaagatgcacagttcgggatcaaccccaccaacgctgccagaaattcacccagcacggggatagaagtgaaaaatcctgccagtgtttcttccccgatagctgcgattcccagattcagcaaaaatgaaatacctgcaatatagataaatacttccatcgtatgacgaagagcagccagtgcaagacgttcctcacagccctgctccccttcatgattatgatgatgatgtttctcttctgcagtctttctgcagtcccggatcaccagatcaatggcaatgcccgagaccatggcaattcccgcctttaccagaagcagatgcaggatccgcgtaatcccc

SEQ ID NO: 2792 - DNA, 17619 bp, Unknown
  16S sequences of unknown bacteria
catcctgtataatgaatgcaatgatcgcttaaatgaccatacgggcaggcggggagataccacaaaaagccgtaccccgccgaaaaaaccatgtttttgagccaatcgaggaaaatcgaaagggcggcgccggttccgcggttccggtaaattcgggcggccgtgaagggaaaataaaccgccgaccaaaaaagataaagccaaagtatttttttgacgtatttccatatgggagaaaaaccgaaattttgtccgatttgcacctttttgaaaaccaaaaagcccgacgacacaaagaaaaagggcacggccaccctgcaaaagcagttgacaagcagggaatttgcccgagtgctcagcgattcgaggggggcggtgtgtatgcagacgataagcacggcgcaaaggagcttaaaaacgtccattccgtaaaaataattctttttcataaagcccctccgaaaagcaatatcggcaacaaaaaagaccgcaacagatgcgaaacaacgcatacattgcagtctgtcaaccgtagtttaacttttgccgccgaaaacccaaaaagcggccggtcgtcaaccgtaggcacaaaactttgtgtccctatctttcgataagtttaccaagcatttatattttttaaattatacatcatttcacacctttttgtcaagtattttatatagacataaagcgggaaatgtggtagaataagcctatcatgaattcaatcgaaagaaggagttttatggcgagggatcggtttgccgacgcgcttaagggctatgcctgcctgcttgttattttcggccatgtgctcatcggaatacgaacctctgggacggcggttcccgccttttgccttcccgccgaaaaattcatttggtcctttcacatcgacctttttatgtttttgtccggctttgtatacagcctgaccggcggctcaaaaagaagcggctcggcaaaggattttttgctttcaaagcttgccgctctcggaattccgtatataatattttcctcgctctacacggcggtcaactgcctgacgccgggggtcaacaatcaaagctccttttccgatttgctcaccctttggtataagccggtggcgcagtattggttcattttcgcgctgttctggctttttgtgctttggacgctgctttcgaaatttttaccaaattttgccgtgaccctcattctttatgcggtttttcttttcggaaaatgctttaacataagcttcggctttctcgactcgtccttaaactgcgtgctcgccttcggaatcggcacctgtcttacctccataagggtggacaaaatcccgccccttttgagggcggcgacggcggctttacacatcgctgcgaccttcctcgccataaagacgggctttctcggcagatttcttgccgacgaccttttcacggttttcggaattttttcctccctttgctttatttcgcttgtttggaaaatccccgccgtctcgaaatttctcctttacatatgcaaatattcctttcccctctatctgcttcacacctttttcaccgccgcggcaaggatattccttttaaagctcggcatcgcaaatttcgccgttcagctttgcgtcggcacggcggcgggaattttgctgccgcttgtctgtgcaaaaattgccgagcgctcgccctatcttgaaattttgttttatcccaaaaagggctattcggaaatcaggtcgagaaagaaagcggctcaccttgcggggagggaaagatgaaaaaaatcagaattcacggagagtgcgtctatattttcgcaagtcttttgcttgcccttgccgtcgcaatgatgtcggcggcggatttcggcatttccatggtggtcgccccctcctatctcataagtctgaaaaccggctttctcaccttcggtcaggccgaatatgccgttcaggcggtgctttttataattttctgcatttgcatgaagggctttaagccgatttatctctgcgccttttgcacctgccttatatacggggcgctgctcgatttgtggcggctgctccctcttttcaacccctcggtcaccccgcccggcagcatggctctgccccttcgggccgtccttttcgtgttaggcatgattttcacctccatggcggtggcggcctatttcaaaacctatttatacccccaggtcaacgactttttcgtcaaagaggtcagccgaaaatataaaataaagcttgcggtctttaaaaccgcctttgacataggctttctcgtcctttcggcaattctcacctttgcctttttcgggaaaatatgcggaataaatttcggtacggtgataatggccgccgtgagcggcacccttgtggggtttttcgacaaattatacgacagaatgtttgaggtcgttcccttcttccccgccgcggcaaagcggttttcggtggattaaaaacggcgatttacaggaggaatccaatgtcaaaggattattcttttaacggtctttcggccgagcaggtcaaaagccgtatcgaggcgggcaaggtaaaccgttcggaaaattcgacgggcaaaaccgtcaagcagatcattctttccaacaccctgacctacttcaactttatttttgcggtcataaccgtgctgctctgcattgccggctcctttcgcaatctcacctttcttcccattgtcataggcaacgcccttgtgggaatttttcaggagctgcgcgccaaaaagacccttgataaaatgagccttttgaacgctccccacgcaaacgtcattcgggacggacagcttttaaaaatcaagtccgagcaccttgtggccgacgacattgtggttttccgcgcgggagatcagatttgcgccgacgcgatagttcttgagggttcggcctcggtcaatgaggcgctgcttacgggagagcaggacgaaattcccaaaactcccggcgaaagactgctttcgggcagctttgtcacctcgggcgaatgcgtcgcaaggcttgaaagggtgggaaacgagtcatatatttcccgtcttgcccttgaggcaaaggccgccgacgacagggagcagtcggaaatgataaaagccataaacaaaatcgtcatgtggatgggcataatcataattcccatcggtggactcctcttttatcagtctttctacgtttcaaaggccggattttcggcgtcggtcgtgtcggccgtcgccgccgtcatcggcatgattcccgaggggctttatctgctcaccaccgccgccctcgccctcggaaccatccgccttgccaaaagaaaggtgcttttgaacgacatgaaaagcatcgaaagccttgcaagggtcgacgtgctttgcgtcgacaaaaccggcaccataaccgaaccgtccatgcaggttcgcgaatttatcgtgctggacgacgatgttttcgacggggccgaaaatatgctcgcaagatatgccgccgcatccaaagacacaaacgccaccatggaggcgctgaaaaaatatacggcgaaaatttctcccccctcggccgtcgaagtgacggcggtcgtgcccttttcctcgtcggtgaaatacggcgcggtggattttaagggcggaagtcttgtgctcggcgccccggattttgtgctcgaaagcatggaaaaggggcttaaaaagcaaatcgacgaattttcttcaaagggctaccgagttttggtctttgcctttcaaaacgaaggcgtttcgaaaaacgggctgtcggagggtattcgtcccgtaggacttttgaccctttcaaacgccgtgagaaaaaatgccccggccacattcaaatactttgccgagcagggcgtggacataaaggttatttcgggagacaaggccgaaaccgtctccgaggtggcgcggcttgcgggaataaacaactatgaaagctttgtggacgcctcctcccttgacaccgagcaaaagcttttcgacgccgccgaaaaatacaccgttttcggaagggtgaccccgaagcaaaagcaacagcttgtcaacgcccttaaggcgaaaaaacacaccgttgccatgaccggcgacggcgtcaacgatattcttgccatgaaggacgccgactgcggcattgccatggcgtcgggcagcgaggcggtgtcccaggcggcaaatctcgttttgctggattccgactttgcgaaaatgcccggcgtggtcagcgaaggacggcgggtggtcaacaacatcgagcgctcggcaagccttttccttgtcaaaaacattttttcgctgctgctttcggttatcgccgtgctgctcaccatgaactatcctctcgagccctcccacatttcccttataagtatgttcacaatcggcatacccggatttttgcttgctctggaatcaaacaacagcaaaatcgaggggcattttcttaaaaacgtgctgctgcgcgctcttcccgcgggaattaccgatgcctttatcgttgcatcgctgacattttcgggtcagctgttcggcatttcccgttccgacgtgtccacctcggccacaatcgttttgtcggtggtgggatttatgatagttcaccgcataagccgcccgcaaacgctttaccgcaggtgtgtgcttattctgaacatcgtgggcatgatcgcctgcttcctttttgtgccaaacctattttccatcgtcagtctgccggccaacatcattcagcttgtgataatatattcccttgcggccgagtcgctgctccgcattgtcacggcggttatggggctgcaaaaggaggagccgagcgaaaaaaagcgcaaaaaaagggttgcaaaacacagaaaaagcagtacaatgtaagtatacgagcaacggcgttcgcagagagtttctttgcgggcgcccttttgattttgaggtgattttatgaaaaggccgataataggcgtttgcccgcttttcgactcggaaaaaaattctctttggatgctgccgggatataacgacggcattgaaaacgcgggcggcgtaccgctgatgctgcccctttcaagggacaaaaaggtgctcgccgcggcttttgaggtttgcggcgggcttgtgctcacgggaggtcaggacgtcgaccccgccctttacggcggcagaaaagaaacctgcggggaaatttgcgaaaaaagggattttgccgaagccctgcttttaaagcttgctcttgaaagggacaagcccgtcctcggaatttgcaggggcatacagtttttaaacgccgccctcgggggcacgctgtacggcgaccttaaaaccgagcacaaatcctccgtaggacacgtcatgaccccgccctacgaccgcgccgtccacaaggtcacaataaaaaaaggcaccccgctttatgacattatcggcgccgaacaaatcagcgtcaacagctatcatcatcaggcggttaagacgctttcgccgaagcttttggaagcagcccgctcggaggacggccttatcgaaggggttttcctgccggggaagaaatttgtgctggccgttcagtggcacccggaattttcctttaaaaccgacgaaaattcgagaaaaatattttcggcctttgtaaatgcggcaaaatagcaaaagaccttcttcatcgtgaagaaggcctttttttattaaattttttatgccgtcaacgacgttttttgtttctcacaatgccgagataggcgcgggcggtgaggcggtagacgataatgtaaaacagtgtgaacaccgcaaaggaaagagccgtggtcagaataaacagaccgtcgttcataagggcgaacagctcgaggattttctttatcatggggaaggcaaagcacaaatgaatcgccgaaaagacaagaggaataaaaaacaccgtgagaatttgggagtttacggccgagtttatgtccttttcggtcatgccaaccttggccatgatgtcgaaagaggcctgatcctcatagccctccgacacctgcttgtaataaattatcagcacggcggcgagagcaaacacaatgctcagcagtattccgaggtaaaaaacgcctccgtaaacaccgtaatagtccccctcattttcggctcggcttgcaaccgaaaaaataccggtctgcgaaacatcggtcacggcgcccacatccgcaagctcatttacaagggcaatttggccgtcggcgtcaaggcttgtgtcaaaaccgtattccagggaatagttaaagggcgaatcggttctttcgggcgagagatattcgtcaaagaaatcgggattattcagaacaaccacaaaaagattgccgtcctgaattcggtcggagaaaaaggccgcccgctttatccttttcgaatcggaaatcgaaatccgcggaccgttcacaaaattaagtccgtcctctttgtaatcaaagccaacggttctcagggcggcgggaccctcggcaaggctgaggctttctcccgacagcccggtataatcgtcgctgctcaaaatcataaattcgcaaagctcgctcgaccccttgacaaaacgctccatgctgctgcagtcggcggtatttcccgttaaaaagccgtaggtatatgcacagccgtaacgtctcacatcggagacctcaaaggaggattcctgtgcccttttataaacgaaattttcgattttcgccgccttggccgcggttttttcggccgaattgtcacagttcagggtcatgtttatctgtctcggaaaattaagcttcagcgactcctcgcagccgaaatacatacaggtcgtggtggagacggtcaccagcaccatggtggacagaatacaaattgaggcaagcccggcgccgttgcgcttcatgcgataggccatggaggacaccgatataaaatgatttttcttataataatagctcttgttcttctgaagcagacggcacagcgccaccgagcccgagatcatgagcagataggttcccgcaattacggccatcacggcgaaaaagaaccaagacatggccgttaaggggtcctcgatggtgatggcggtgtaatatgcccagccgataagcgcgatgccgagaacggcaaagataacattacctttaggcggcttttcccccgcccgctcgcttttcaaaagggtgacggttttggaaaagaggatttgccgcgcaccgtttaggaaaacgagcacaaatccgattgcaaaggtcagcgccgttttaagaaccgccgtaatgtctatgccgaaatcaaaatcggtttgcccgcccacaatgcgtataagaccgagctcggcaaatttcgaaagggcgatgccgagcaccagcccgacggcgagcgaaagcagcgagacaaaaaaattttcgaaaaaattcacgcccgcaagctgctttttattcatgccgagaacgccgtaaaggccgtattccttctgacgtcttttgactataaaggaatttgtgtaaaacagaaagaggcaggagaaaaaggcaagcacgacgcagccgaaggacagcgtaccgtgaatagcctcgcctccactaagggcgtttatgcgctcgcttccggcgagaaagaacataatatagttcattatgaccatgccgcaaaaggcacatatatacggcgcataaagccgcttattcttttttatgccgtcaaccgacagcttaacatacattccctttttcatgcccgttcaccctcggcgcagagaagggtcagcgtgtcggagattttctgataaagctcccgatcggtgtcttgccctctgtaaatctgatgaaacacctgtccgtcctttatgaaaagcaccctgccggccgtgcttgccgcctttaccgaatgggtaaccataagcacggtctgaccgagacggttgatttccgaaaaaagcccgagcagctcgtcgcccgacttcgaatccagcgcaccggtgggctcgtcggccaacacgattttgggacttgttatgacggcgcgtgccaccgccacacgctgcttttgaccgcccgacagctcatagggatattttttcataagctcggtaatgcaaaggcggtcggcaatggggcgaagctttgcgctcatttgcttgtaattttcccctttaagcacgaggggcagaagaatgttgtcctcggccgaaaaggtgtcgagaagattgaattcctgaaagacaaaaccgagattgtcccgccgaaatgcggccatttgagattccttaacggtcgaaaggtccatggaatccaaaatcacccgtcccgacgtcggactgtcaagggcggcaagaatgtttagcagggtggtttttcccgagcccgactcgcccattatggcgacatattcccccttttccaccgtgaaattaacgtttttaagggcctcgaccttgtttcccccgaaacgggaagaataggtctttgcaagcccgctgacttccaaaaagctcatatgctttcctccttttctgacctaattttaacaaaaaggggaaagcaaaaacaatcgaattgtcttacatttcccttgtcatttcttacatttcggtaagattttattcgtcttttaaaagctttttcgcaaatttaagcttgaaaaccgtgccctttgaaacctccgaaacggccgatatgtcaattccgagatttttgcatatctttccgcagaggaaaagtccgataccgctggaatgccgctcactacgcccggtaacgcccgtgtatcccctttcgaaaatacgcggaagatcctcgggggctatgcctattccgctgtcctccacgaaaaggctgtcgtccttcgcatatattttaacgccgccctttttggtgtatttaacggcgttggaaagcagctgctcaagcacaaagcacagccatttttcgtcggtgacgacctgcatttttgtgggagtaaaagcaagggacagctttttgtcgataaattcggcggaaaagcttttcaccgattttttgataagcccgtcgagatcgtgaggcgaaaaaacatagtcggtggactcgctttcgagccgcaaaaaggtcatgaccatttccacataccgttcaatgcggaaaagctcggagcaaagcctgcgggaaagggcgctgtcctccccctcgagagcgagcttcatggcggcaatgggggtctttatttggtgcgcccaaagggtgtaatattccaccgtattgttaaaacgcaggtcgtcccgcgcggtgatttcctcgattttatccttaagcgacagaattattttttcatagtcctcttcaatgggatttttggccggcggcagagcgcaaagctcggaaaagtccctgcccgcaaaggccgaaagctccttatgtttctttgcaaaccgccgaaaccccacaaaaacaaagcaaattccgaacagcaagcacacccccgcggggtacagaaccgccctgagcggcagctcataaagaaaaaacgcaagggtaaaaatcccgcaaaacagcagaaatgcgagacagaaaaagagctttggtttaatatattcaaaaaacagcttcatttttattccttcaaaacaaaaaaattcagtccccgacggtatatcccatgccgaattttgtgacgataaatcggtcaagccccgccgccgtcagcttttttctcaggcggttgacgttgacagtcaaggtgttttcgtccacaaactggtcggtctgccaaagggtttccatgagcctttcgcggctgaccaccttgcctcggttttccatgagacagagaagtatgcggtattcgttcttgctcaaggggattttttgacccttaaagctcaggcttgcttcgtccttgttgagtacggcgccgccgtgttctataagggcggtcggctcggaaaaatcataggttcgccgcagcagcgcctgaaccttggccataagcacccgcccgtcaaagggctttgtgacaaaatcgtcggcccccatgttgacggccatgataatattcatgttgtcggcggcggcggaaatgaatattatgggcaccttggatatttcgcggatttttctgcaccaatgaaagccgtcgtaaaagggcagccctatgtccataagcacaatgtgaggggaaaaggcggcgaattcggccgtaacatcggaaaaatcctcgcaaagtttaacctcaaatccccatgccctgccaagctccgccacggcgtttgcaatgccggcgtcgtcctcggctacaaaaagtttatacataccctcacctcaaaatcatattatcacactcggcggcaaaaggcaagaagcgccccggggttatttcgaaacggaaatttaattttccgtcaaatatgtcccgattccaaaagccgccttttcaatacatttcgtcacatacaaaaacacagccgctgcaatccgcaaacggctgtgtcttttggttttatcttttgccgccgtctttaaaacggcggtgagaaaggatttttcccgatttatttaatgggaagcttatcgatcttcttaaccgcatattgcagaacggccagcgcgtcggtaacgctgataccggcggttccgtcaacatcggcggccttgagatacttgtcggcaagggttattttgcccaccgaatgctgaagaatcataagcgcgtcggtaacggtgacgtctccgtcgccgtcaacgtctccgtaggtggtctcgtcgacgggcacggtggtgagtcggtcataatcggctcttgccgcggtgagaacgccgtccttttcgatgaccgcgtcgggatattttctcagcagagcctcttttgcggtttcggcaaactcgatgatcgagcccttgtcaaggacattgtctctgttgacctcgccgatatagtcaataaccttgtcgagctgagcaagcttgacgtcggccgactcggaggcggaagccatcttcagagccttttgagcctttttaagctcttcggtggcgtttttgaagttgaccggctttgcggcgtcgcctgccgcgacaatggcctcggcattcgcgattgcctttgccatttcaaagccgctttcaatcgtcatgatgctgaacttggtctttttggccttttcgagagccgcgttaaactcggtcagatcgttctcggcctcggcggttctcttaatataaagaacgtcggaggacttggtcttgacggcgacgcctctgttcatgagatagttgccgtttgcggtgaccgatgcggcgccggaggcaaagcttatctcataggtgtcgtcctcgttgagacccttaagcttgatatattcggtgcgctccactccgttgcggttgtaaaccatggcaaaaccgctgtgtgtgtcgcggtcaagataaccgtaggaatagaactcgttgcgggagaaggtctccttggtgagctgatagatgtcgtcataataatactgactgatgtttctccactcggcaagcagtcccttaagcttatccttctgagtacccgacagctgaagcgggtcatactgaaggacaaggcactgacggtagcccgaacggagggtgtattcgtcgacggtggtgaggctttcggccgagtttgcgccggtgaagggcagccaagaagcaagattgaagtttgcaacctgttttgccaccatgtcgttgtggttatagtcgctggggtggagggaaacggcaagtctcatggattcgagatcgagacggtgtccgcccgaagcacaggaatccagcagctcgacctgatcaagctcgatgaggtatttccaatagtcatagtgaccctgaacgcacttgttctcggtcatgccggtgcgctcgggatgagaattgttgtagagggtgtagtagatttccgaacgacccaggttcatgtcctcgcggtagacggaaattccgccctcggtgagcacctttgcgatttgggtcttgagccatgctctgcactcgtcgttgccgatgtcgagctggcggtagtaaggaacattggggtcctgataggccgactcgtttgcctcgccgtagcctataagccattcgggcttgacgcaggaatcggcaagcgcctcgccgtcggtataggacatacccacgcgctcgggctcgaaccaaagcagcgtcttaacgccgttttcgttggcggttttggaaatttcgctgaatttgtcggggaaacgctcggtgtcgggagtccagttaccggtatttctccaatccttggtgccgtttgactcatagcagggataccagcccgcgtccatccaccacacgtcgatgtcgacgccggaggtcacataggccagaatggagtttttctgattttcggtgtttgcattgagcatttcgttgtagacaatggaggtaacgccggccacgaaggggtcggtgaggtccttgccgttgtcgcggtacatattgcagtcgatgaaccagcttctccaaaggtttcttgcgcggtcgatgtcgcggccgtcataaagcaccatggcggtgaggggggttcttgccacctcgccgggctttatgagcgagctgaaaaccttctgcttgtcggagaacttggtcacaccgtttgaatattcaaagtcggtctgccaggtggaggaccagcccacggcaatgagagcgcccttgtcgccgtattccaggttatagtaagggaaggcctcgtcggttccgcggccgttggccggagaatcggtcacggtctgaccctcggcgatttccaccttgtcggtgcggtagggagcctctcccgcctcaaagtcggaattgttggtgaggatggtgggattttcaccgttgaattcatatccgttgcagccgtagaagttggaaacgatgggagaatcctcggttccgggattggtgacataaaccgtccactcaaaggcggcatattcgggatagaacgcggttttaagcacaaactgaaggccgctcttgtggtttatcgtggtgtcggtggtctcgcaatggtgctgttcgtcggtcgtggtgttgcgggaggcaacggtgaaatcgggagacgggaagccggtatagctgtcgtcgccaatattaaccgacgagggaaaggaagaaagatcggccagcatattcttataggtaagctcggctctctgcttttctgcgggagaaacgtcggcggttttcttctcaaaggacacttcctcggtgggtgtgtcgagatagctgtcggcggaatttacaaaggtcagcgaaacgttgatgagacccttgttgggatttccgtcgagatagtaatagccgtactgagagccgttggccttaacgcccttaagaccctcggccacaaagacatattcgccggccgggacaattccgccgaggtcgaatttgacctgagtgccctcggcttcgccggtgacggtggcgatgggcttattctgaagagagcggacataagaataggtgaaatcatagagataaccgtttatcttgtcctcggagctttccttggcaatcgaaatttcggaaaagccctccttgacgttaaagcggacgccgattgaggcctcggccgaaaccgagatgttgcccgaaggattgccctcggaataaagcgcctttttaacgccgttcaccttgggcgagccggtgtaaagggtgggctcgatccagtcgcagtagtcgttgtagtgatcgccctcaacatcggaggtgcgcatggtgagcgtctgagctccggcggggattatgcagcttatgcgctccatgtcgccgggagccataatggcggtgtccacaagggtctcgccgtcgacaatgaccatgcactgaagcgagccgcccacgccgttggcacggatgagcgaggcattgtcgtcctgtcccacgacggccgaaaaataggtgtaggttttatcaagctttgccaagtcgatgctgacgtcggccacattgggcttgttgccggcaatttccgggcggatgacaaaaccctcctccgacatgacggcctgatcgcccaccgaaaggcgggtatccctcgtgccgatgccgcggtttatgttgtattccttctgtccggtaaccgaaaggtcaagatccatgaccttggtaccgataacttccgaagctttcgtttcgggagcggccgaggcacaggagatcgccgacagcgaaacggctgcggcaaggaaaacgcccaggctcttttttaacaaattacccatataattcctccataaaatataatttgccttatggccctattatatagtatttctcaaatgttttcaagcagtattgtgaaatttcaatccgaatttacgcaaaataaaaggcccttttaatgattttttccaaaaatacgcagttactgcaatattttgcaaagaaaaatcaaaaacggccttgaatttcaatgtgtaatttaatatcccgtcgctcccgaaagggaatcgtcgttgaacacccagtccctcacaatgacggtctcatagtcggtggagctgcggcggatgaccaccctgtcgataccggcgtttattatcatgcgcttgcacatggagcatgagttcatgttgttgaccaactccccgctttcggcctcgcggccggcaagatacatggtggagcctatcatcttgtctctcgaggcgcttataatggcgtttgcctcggcgtgaaccgaacggcagagctcatatctctcgcctctcggaatctgcattttctccctgaggcaaattccgaggtcgatgcagtttttacgccctctcggcgcgccggtatatccggtggaaacgatctcgtcgtttttgacgattatggcgccgaaattgcggcgaaggcaggtgccccgctcgagaacggtctcggcaatgtcaagataataattgtttttatcggttctttgcatattcgttcctcctcatttaagccgaaaggggctttgcacttcggaaagctatgacataaacattttaatttattcggcaagaattttcaagtcatatttacaaaattttataaacagcctgacaaacaagataaatcaccggctggtggagaatgtagatcggcaaagcgtggcgccccacaagggcgaaaaagggcacgggattttttctgaaaaagccgggaagcccgtttttaaacattcggcagaagaaaaagccggcaaagaaaatgaaaaaccacggcagcagcgggaaatagtcggcagaggcgaaatcctttgagggaaaaccgaaaagccacataatattccccgaataaaaactctcgggaagggcgattttaaacccgaaaagaccccagtagccgtgctcggtgttgtataaaaacgggacgagcaaagcgtttatcacaaatcccacaagggcggggcattttaaaagaacgggctttaaggccgaaagggcaagccaacacacggcaagcagatgaattattccgaacaccacaaagcagtcgaaaccgaaattgctgcttataaaccacgttgctcccgaaagggcggcggcaacgcagacaagtatgaccgttcgcttccatgggtttttcgaaaaatttccgcacattcccgaaatgaagataaatcctgcggcgaaaaagggttcggcaggcaggaaaaagtttataaggtctccgaagaatcctatcgacagagtttcaaagcaggtgtaaaaagcatgaaaaaagaccatgcagataacggcaaagccacgtatttcgtcaagcagaaaatagcggccggcaaggggctttcttttcatcaaagcacctcgcaaaggcggtcacaaaggagagcaagctcggcaagatcaagctcctcgattctcgcaagggggcttttgcccatgctctcaagaatttcggccacgtcggcttttttgacggcaagcaccgccgaaagggaattttgcagggttttacgccgctggcaaaagcccgcattgaccgttttcataaaaaggtcgcggtttttgacctcaacgggaggggttttatagggcgtcagcttcataaccgtgctgtcgaccttgggcgccgggaagaaggaaccggccgaaacgccgaaaaggatttcgcttttcgcaagaaatgccgctcccacggttatggcaccgctcttgcggctgcccaccggggcggttatgcgctcggcaaactccttttgcaccataacggtcatcgactcaaatcccaaattgctttcaagcagcgtcataacgagatttgtggaaatattataaggaagattggcgcaaacaaacaccctttttccgccgaattcggttttgattatctcggcaaggttgagcttcaaggcgtcgccctctatgattttcacgttgtcaaactcggcaagggtttccgaaagaatgggaacaaggccgctgtcgagctcgatggacacgaccttccccgccctttttgcaagctcggcggtgagcaccccgataccgggacctatttcaagcacgccgtcgttttctcccgcgccgcattcgtcggccattctcgggcagaccgaggggtttattataaaattctgacctctcgctttggtaagcactataccgtttttcgaaagcagaggctttataaccgccatatttgtaagttccaaatcgtttcccccttaaattcgatttattttaacacaaaataaggatttttacaagagcggcggtttttcggcgaaaaaaataaataaccgttgttttatgggacaaaatgtagtagaatgactttgaggtgacaaaaatgctttcaaacctttttatttgcgcatcatatgaaaagaacgaatttgaaaaacacattcccgctccgcttttccgcaggagatttaccctgtcgcgccgtcagagcgccgaggtgacggtttgcggtttgggattttacgagctttatatcaacggcgaaaaaataaccaaggggcgtcttgccccctacatatccaatcccgacgacgtggtatactatgacaaatacgacctgaccgactatatccgctcaggcgaaaacgtcatcggagtctgcctcggaaacggacttttgaacaatcccggcggaaagacatgggatttcgacaaggccgctttcagaagcgttccaaagcttgccattcatttttcctccgacgaggttcgctttgaggccgacgagaaattcaaggttttcccctcgcccataaccttcgacgactaccgctgcggcgaattctacgacgcaaggagagaaatcgacggttggtcgctgcccggatttaacgacagcgattggaaggccccgcttaaggccgaggctccgaagggcatacgccgctattgcaccgccgagcccataagggaattcgaccgcattgctcccgtgtcgatagaaaaaaccgacgagggatttttatatgacttcggaataaacgattccggcgtttgccgtcttaaaataaacggcgaggccggccaagaagtcaccctgcgccacggcgaacagcttgtcgacggcaaattctgcgacaaggcggcctttttccagcccgaaggctaccgtcagaccgacaaatatatatgtaagggcggcggaatagaaagccacacccc

SEQ ID NO: 2793 - DNA, 12843 bp, Unknown
  16S sequences of unknown bacteria
aaatattcaagatttatgtacagcgttagaagtctcatatgagtgggataagcaacatcggaaaaaagacggcttaatagtagaattaaaaaggaaaataaaagatgctataaaagaatttacagaattacatcccgaacttgatccttctaagcaaaccactataagcagtgcttttcagtatttggattacacattaaaggaaagaatcattacgctgtataatgaaaatacagattctattgatgcggtagtttcaaaatgttcattaccaaaaataagcgatacaaatatttcgtcttttgtaaatcttcgtaataacaaaacacattctggcgcgattgaatggggagaaaatgcggaaatatacccagctcttcttgctttagtatatgcatgtttatttaaacatcttggaattaccgatgaaaaaataaaacttcttattcaacaaattttttaagaacgaaatgaaaataccattgaaatctgagccccttcgtttaatttcagatattcttcaaagtgctgtttactggtgttgtccgtcttatcttttgcagttgtcttgtctcgtgcaagagttcaactccatcagccaaaatcgccaaaatatcttttttatagtccttagacacgtcggagcaaagtccgctttgcttcgacgcttttttatgcaacgggcataaaaaagcgtcattcgcccgcttccttgctcctcctttccaaaacaggtcacgttcgcttcggctgttcgcttgtaaacgcgctctcgacgcctcccgctcactaccaacctgttttggttatgggagttcaatccccgccggtggaatattccaaatatcttttttcaatgaaattcgccttttggtgagtgaaatattacttcgtaacatgaaatacgctatgcgtatgaaatatttgcttcgcaagggttcaagttcatattgcaaactgacgaaaatatttcttttatagtccttagacagtttaaaaaacctgtcgaaaaagctggaattgcttgttcggcaggtttttgctatactgggatagtaaagcgtgtttgtcctgagttcggaataaacacatatgctgatatgcccactcttgaaatactttccaacatcagagaaaaagtaacgcctttatcagggccgtgatgaacagcggcgaatacgataaatttgatcgtggtatggtatttgatgtttatcagttatggcggatctattttgcatcaattttacaaatacggaaccctgtcaaaattgattttttggcagggttattatgggtataagacttaaatcctacaaattggttaataaaataacgggtattcacgtgctctaacgtatatcatgaataggaaaggtggtaagcaatatgaattcgattgacagattgaaccttgctattagctatatagaaaataatctctgcaatgaaattgattataatgaaattagccgtatcattttatctcccatatctgcttttcagcatttcttttcgttgacaaccggaatggggctggcagattatatacgacatagaaaactaacttgcgcggcacatgatttgcgaaacctcaactgcaaaatcattgatattgcattgaagtatggctatgaatccgccgatgcattcagcatcgcttttaaacgcctttatcacataagcccctctgcctataaacaatcgaatgttgttttagaaccattccatcgtttatattttgaactttcagtaaagacggataggagagatgttcgtgtgatacggcttttaaatgatattgtgtacttgccgcaagattgtgaaatcggatttgcctcttgttttgcagctatgtatatgaaagcgaaaggtattgttcaacgctcggaaggtgaacgtaatcctgtatggtgccccaaatacagccgcagatgtataagctgtggggactgtcctggaaacgtccttggagcgccgtcccttcatggcctatttgcagttctttcaggcatcgtctttgcaatcccggatttaaaaagctcaaaatatctgaaattcagtatagaggctggtttttcccatgcggttgaagaatatgacaattacattgactttatctgccagtgcattgggtactcctataccctattcgacaaaacccaaggaaaatcctatatatttgataaaatcaagcatacgatagacgaagataaggctgccatcctgcaatataccgaacaggaaaattggctcttaattgtcggttacgatgatgaaaaccaagtgctgtttggctatcaccaaggagaagcatataattatgaccccggatatgttaaaaatatacgagttgacgattggtttgaccgtatgagacgaatcgtctttcttgatgagaaaatcaacacaaatataaagcgtcagagtatctatcatagattgtatcatatcatgaagaatagctttgacgccaacacgttggaaaataatcgtgaatatattttggatgatgacagatttagcaatgcagatatagaatctctaattcaagaacataataaattggttaatttcttttttggaatggttattacacgttgtattttgggttggttttttgaaaacccttataacctggatggaatggattggagccgatatgtcgataaagaattgaatgatatttccatagcatgcaccaatatacatgatctaggacatatatcgaatggctcggtactcggaactcgatacgacatagatcttttagaaacgccaaacaataaagacaatattcaaaaagtagccgaaaaattaagaagccggacagttcgttcggtattagcaactgtgctggaactcacttatacgtacaatgagaatattatgggtgctttaaagcggatgatggaaacataatggctataacgttataaaaaggatattgtcattcgttacgatgatattcacggaacctataaaaatttgaaagaaaaaaggatacgctgcatctcaaccaaagtgggtatctttttttgtcaacggaacccacgccgtcgcagacttcgcatcgtttgcgacggcgtttttctatgaagcgagcccgtaggtgcatgaagcgccccgctaatgaagagggacatcaggcttccgcggcattagcaactttttacgggccgtattctgtaagtatcaaccttcccacaaaaaacctgccgaaaaagcggaaatggctttttcggcaggtttttgccatatggaaaggagggatgtccgccataatccccgcgttgcgggggccttcctcaggaagcgagagcaaggcggcggatacggcgccaaaggcgtatcggcagggacaatttatccatcacatatgctaaggcgagaaggcatccgcataccaacatgataacggcaggcccgattacagcgctgtagagaacgcggagcccgccttccgccagagctgcctccgttccgccgagcagggaggagaagagcggcggagccaaaacgaccagcaggagcaggccgcagagaaacagcgggatggccgcaaacagcagcgcccgccctttccggcgccggttgaaaaacagcagcaggcaaaacgagacgatacagaccgctataccaccccaaaacagccgggtgggaagatgcagcagcccctgcacctgcgtgacggtttttaagattttatccgaatccagattggcaccgctcgtcagggtctggagtgcctcctgccgcaccgcggtactcagctcgtcgttacagatgacgagcaggagccggacgttgtctgccagctttgggctgaggatcgcagcgcattcggtttcagacagatatgtccggccgtcggaggtcatatacagcagctgctcctgctcaatcagccgcacaaggcgggtggcgatggctgagtagttcagccggggttcggtaccggtacgcatataggtatggaggccggatatcaggtcatcgagatatttttgtatccttgtattgagcagaagggtctgtaccgtccgtttttgcagacggatccccatgaagtagacggtgtccggcatggatgcggtcaaaaccgcggcggtgtctttcgtcaagaaacgggaggctggcgctttgtccaacgcatgtccggccatatagcctgcgcaggtcatcatactgccgagaaacaggcagatagacaacagaatagccacggccttttggcggagatgatggggaggccggactttttccacgtgaggcttgtccgcagagggttccggaaaataaggggcggtttcttttccatcctcgagcgaaagcactggggggatctcctcgggcccggcctcctctgccggagcggagggcgaggcaggcgctggcgcctcgacggtggggacgggattagaggtgggcgtcgccggtttttcctccggataaagggggcagtgccggcaggtttcatcctccggggaaaacccatgcggacaggtgtcgcagttcatacaaagacccctctcaactaaggaaaaccccgagccgcagtataggggttctccgatggtaattacagacgccggaacgcccgtctgtttatcagtatatcacagaagggagccctgccgcaactgccaaaacgcctgttttcatgtccggatggggactttccctttaaggagtttgccgctaaaataccattcgtcaagccgcacaaaaggaggctcatctcgccttctgccgacgaagcaaaccaggctatccaatatttctgcatacaaacgtccgtcagtaaataagggcctgttcttttcaaagaacaggcccttatttgtgaaaaaacggatgaggatcggttaacgggacaacgccaggcaggaaacacaggcgggtctataccggctcgtttccgaaggtatcggccgcactgtccctgcggcttatccgccccttccggatgttcctgaattttccctgaagctgctccgcctcagcatgtgcgaaacgggacggatttgtccgatgaatggcgcctcatatccctcaggccctggccgccagcttgtagccggcggcggtcagggcccttttgatctcctcgacgtgggcgtggtccctcgtctcgagcaccaggcggaggaagcaggcgttgatatccatgtccaaatcggcccggtcgtgatagacagcgaccacgttgccgccgaggtcggcgacgattttggatacgccgctgagctggcccggcttatccgacagctcgatgatgatatcagccgaccgccccgacttgagcaagccgcggctgataacccgggagaggattgtcacgtcgatgttgccgcccgagagcaggcagaccacgtttttgccctcgaccgggatcttgtcgaagaggacggcggcaaccgacaccgccccggccccttcggtgatcagcttctgctgctcgatcagagtgaggatggcggtggagatctcgtcgtcggtaacggtgacgatttcatccacataccggctgcacagctcgaaggtcaggtcgcccggggttttcaccgcgataccgtctgcgatggtggcgacgccgtcaagcgtctccttccggccgtcccgcacggcgttgaacatagaggccgcgcccgccgcctgcacgccgtagaccttgcagtgggggttgagggacttgatcgcgaatgccacccccgagatcagtccgccgccgccgaccggcaccaccacggcgtcgatctcgggaagctgttcgagcagctcgaggccgatcgtcccctgtccggcgatgacgttttcatcgtcgaaggggtggatgaaggtatagtgtttctcatcccgcagctcaagcgcccgctggtacgcgtcgtcgtacaccccccggaccagctcgacccgggctccgtattttttcgtcgcctccaccttggagatcggggcgccgtcgggcaggcagatgacggatttgatgccgtttttggtcgccgcgagcgccacaccctgggcatggttgcccgccgagcaggcgatgacgccgtgagccttttcctcgtcggagagctgggaaatcttataatacgccccccgcaccttaaaggagccggtcacctggaggttttcggttttcagatacaccgtgcagtcgtggcggatgttgggcgcgtggatgagatcggtagaacggatgacgttcttgaggacgaacgacgcatggtacactttgtcgagcgtgagcatggagatcccccgtttcggtaaaaaataaagcctccgcccctgtatagagacgaaagccggctttcgtggtaccaccctactttggccgccgaggcggccctcctccccgtctcccgccaaaacgggggaaacgcggtctccggtaacggggagaagccgtgcccgcctacttcaccgttcagcggtctgctcaggggcgatacccgtccgggattcctgccgcctcgcaccacccggcggctctctgaaaggaaggacccgttggacttccccgtcatcgcgtttctgtatatataaaaaagcataccccctttttgggcgtttgtcaagaggcgggtttggattttccctgtaccggccccgcgcgacttattccggcgggagataggtgttccgatacgcttcggtccgggggagccatttggggcaggccgccatgccggatagtttccattttcatcacctcaaacacgttttgacacaatctgtgtcaaaacgtcaaccctttcatctttatcggttatactggagacggtgatggaagatgcggtatcatagaatcaagcaactgcgtatcgattcggacataaaacagcaggatctggccgatttcctaaagctaaaccgcagcacatacagcaattatgaaaacaatttgcgggatgtcccggtcgaggttttggcggggatcgccgagttctatcataccagcgtggattacctgatcggccggacggatgaaaagaagccctatccctccgcccatgactgaccgtttgcggcgattctgccggcggaaccggcatccccgtcaaaaagcagaaaacggccccggcacgccttcgggtgtgccggggccgctttcgtcattatgacggaaagtgccccccaatcgtttttgtatttcggctgaatagggctatcttttttggaagagatcggtataatgaggggtattccacacaaggacgggtccgcggcgcatggcacgtccctgcgcggcggggcttggggaaaagagggggagacgtatgttccagatacgatggatttggcgcaacatggatcgaaaataccgggtaggtgtcatcgcggcgctgctgatttcggtggtgacgagcgtgatgcttttgatcaatccggcactgacggcccagctcatcgaccaggtgattatcgcggagaataccgagccgctcctccggctgctcaccatcatgctggtggccaaggtcctgcgggaaggcttgcggtatctgatgatcgtgtgcttggaaaagggttctcagaacgtggtgttcaacctgcgccggcggcttttcgcggtgctgcagtaccaggaaatgcgctttttcgaccgcaaccgcaccggcgacctgatgacccgcctctccgccgacctggactggtgccggcatttcgtctcctacctcgcctatatggtggtggactgctcggtgatgttcctgtccaccctgcttttctttttcactgtgagctggaagctcaccctggccctgctggcggtgacgccgctgctgctgttgattaccaagctctattcctccaaggtgcgcccgctctttatcgggatgcgggagcgcctggccgagatgaataccgccgcgcaggagaacatcgcgggcaaccgagtggtcaaggctttcgcgcgggaggaattcgaaaaagagcggttccggaaaaagaatgaggcgtaccgcgacgccaacctcgaaatcaacaagctgtggcttaccttttatccctttatcgaactgctggccaacgccatgaccctcatcacggttttcctgggcgggtttttcatcatcatcggtgagatctcccccggagagctcaccatctttaccagcctgtcctgggccctagccaaccccatgcgcaacctcggcaacctcatcaacgatttgcagcggttcgccgcctcggccaacaaggtcattgaggtgtattatgcccgtcccctgatcatggaccggaccgacgctgtggatcacgcggccatggaagggaaaatcgagttccgggacgtctccttctccttcggcagggtccaggtcctcgaccatgtcagcttcacggtggagccgggccggaccctcgcgatcatgggaccgaccggctcggggaagacgacgctcatccacctgctgtcccggttttacgatgtggacggaggcgcgatcctggtcgacggctgcgatgtgcggatgtggaggctgcagcagctccgccggaacatcggcaccgcgacccaggatgtttttctcttttccgattcggtggaagggaacatcgccttcggcgaccaggccctgacggaagaggaggcccgggatttcgcgcggatggccgacgcggacggcttcgtcagccggatgccggagggctacgacaccatcgtgggggaacggggcgtgggcctgtcgggcggccagaagcagcggatcgccctggccagggccctggccatgcgtccggcggtgctcgttctcgacgacaccacctcggcggtggatatggagaccgagacatacatacaggaccagctccggcggctgcccttcccctgtacaaaaatcctcatcgcccagcggatctcctcggtcaaggatgccgaccagatcctggtgctccaggacggccggatcgccgaacggggcacccatgaggagttgctccgccagaggggctactactgggagacctatgccctgcagaacgacatccaggacccggctccggatgaggccggagtgaaagggggtgcgtgctgatggccagacgcaatacatttgaagtggatgaaaccctggaatcccccttcagcttcaagcacttgaagcgcgccatgaagtacatcggccgccacaaagggaaaatgggcctcgccctgctgctcagcgcggtggccagcgtggtggccctgttccagcccaagatcatgcagtgggtgctggacgacgcggtcccgggcaaaaatgtgaccctgctcctgtggctcgccctcgcctatgtgggaatcatcctcgtcagcatcctgttcagcaccatccgctcccggatcatggcccatgtcagccaggagatcatctacgatatccgcaaggatctcttcgcccatctccagcgcctgcccttcagctattacgacagccggccggcgggaaagatcctggtgcgggtcatcaattacgtcaattccgtgtcggatatgctctcaaacgggatcatcaacagcatcctggaaatcctcaacatcctgttcatcgtggtattcatgtatgcgaccaacgcggtcctcgccaccatcatcgtggccgggctgccggtgttcgcgggggtcatctggttcttaaaaccgcggcagcggaaggcctggcagcgccagtccaacaagaattccaactataacgcctatctggccgagagcatcgacggggtgaaggtttcgcagctcttcgcgagacaggaggagaacctcaccgttatggagcggctcgccgccgcctgccgcaaggcgtggatgggcgcggtctatatctccaactcggtctggctgagctcggagctcatcacccagatcgtcttcaccctgctgtacatcgcgggggtctactggctgggcggcgccatcgtctccttcggcgtcatcctggcgatggggcaatacgtcagccggttctggcagcccatcaccaacctcgcgaatatctacaattccttcgtcaacaacatcgcctatctcgaacggatcttcgagaccatggacgagccggtggtggtggacgacgctccaaacgccgtggaactgccccccatcaccggagaggtggagttccgggacgtgaccttcgcctatgagccggaggtccatatcctggagaacctcaatctgcacgtgaaggctggggaaagcatcgccctggtcggcccgaccggcgcgggcaagaccacggtggtcaacctgatcagccggttctacaacctgaccgggggcgagatcctgctgtacggccggccggaggagggggagaacgccgtcgcctggagcgaagggtacgatatctccagggtgacgctccattccttgcgcacccagatggggatcatgctccaggacagctttattttcagcggcaccatccgggacaacatccggtacggccgcctcgacgctaccgacgaggagatcgagcaggcggcgaaaatggtccgggcccacgatttcatcatggagatggaaaaagggtacgataccgaggtcaatgaacggggcagccggctttcccagggacagaagcagctcatcgccttcgcccgtaccctgctctccgatcccaagatcctgattctggacgaggcgacctcctccatcgataccaaaaccgagcggctgctgcaggaggggatccaggtacttctcagagggcggacctctttcatcatcgcccatcgcctctccaccatcaaaacctgcgaccggattctgtatatcggcaacaaggggatcctcgagcagggcagccacggcgaactgctcggaaagagaggactctattacgacctgtacaccgcccaggcgagggagcagggggcgctcggcgtttcctgaccagtccggcgccccgcatttaaaaaacagggatggccatgccggaaacccggcggccaaccctgtttttttcgcggcggcggcggtcagagcacccattccaccacgttccgttttttgagtgcgggcggtgcgggccgggcggcatagccgagggccgcacagccgagcacgatatgggtatcgggcagatggagccgggtgagcagcccacggacgcggggccggtcgcagatccccttgaactgattgatccaaaccgacccgatccccagggcgtgggctgcgagaaacatattctcgagcgcacaggcgcagtcttccaccccgtgaggattgtcccgttcgttggaggcgaggatgagcacattagcgtgataaaagtggtaatccgggtcccgtcccgcttcttcccggatcacggcggcgagcgcgtcgagcatcgccggattctgcaccaccgtgaaccgccagagctgcttgttcatgccgctcggcgcataccgcgcggcgccgacgatccgctcgagcgcctcctgcgggacagcctcctccgtaaaggcccggatactccggcgggtcatcaggttttccagtgcgtccatgccgattgcctccttttttcagtcatctttcgtttcaggatcgcccagcaccttgacataaaagcggcgttcccggggcccgtcgaactccgcgaaatagaccccctgccacatccccagcagcagccggccgttttccaccgggatggtgacgctgctgcccacacagacggctttcagatgggcagcggaattcccctccgcatggcggaactcggtccggtcgggaaaggttttgtccagcgccagcatcagatcccgggtcacgtcgggatccgcgttctcattgatcgtcaccccggcggtggtgtgggggcagtagaccacacacaggccgctctccaccccgctgtcccgcagagcctcctgcacctgggccgtcacagccagaaatccctcccggggggtgctcagacgataggttttgatcatgacgcgcctcctgttctttcctaatttaccttattatggcacacggcgccttccggtacaagccttgccgcaaaacagccgaatgttagcactcatatatattaagtgctaacattcacaatatattcataattcagatatgatctattcgcatttttttcctatactatatcctgggccatggaaaaaaaccgccgccggcataaatcccccggcggccggagaggaagggatcgtatgaacgcacaaaaattcacccaaaagtccctggaggcgatccgggaggcccagaatctgacggtggagcatcaaaacatgcagctcgagcaggagcacctcctcgccgcgctgctgactcaggagcaagggctggtcccggagctgctgctgaaaatgggcattcccgccgagcaggtggaggccgacgccctgcgcgcggtggacggcctgcccaaggtcaccggctctggccgggaggccggcaaaatctatgtatcggaggatgtggacaaaactctcaccgccgccgagcggaaggccgagagcatgaaggacgaatatgtctcggtcgagcaccttttcctctgcctgatcgagctggcggacgacacgctggcccggctgttccggcaatacggcattgagaaaaacgcggtgctgaagggccttatggggatccggggaaatacccgggtcaccagcgacagccccgagggcacctacgacgcgctgaaaaaatacggcaccgacctggtggaacgggcccgcagccagaagatggacccggtcatcggccgggacgacgagatccgcaacgtcatccggatcctctcccgcaaaaccaaaaacaaccccgtcctcatcggcgagcccggcgtgggcaaaaccgccatcgccgagggcctggcccag

SEQ ID NO: 2794 - DNA, 32759 bp, Unknown
  16S sequences of unknown bacteria
acaggtccatatagcctttgatttccttgttccggtgggctaacgatttgatttgaataatgaatcctcccgtcaaaagccgcatattccttgaaagccttactgctgcggtactcctatggtactaaaagaataatcaaatcgttaaaaaagagcctgaagcttatccgcaacctcctcctgcttattgggataaagatgcgaatagatattgagagtggtttctattttctcatgccccagcctgtctgctattatcttgggcgacagcccaagctctatcagaagagaagcatgagagtgccttatatcatgaatccttataaccttgacacccgtaacactgcatattttgcgtagaaaatttctcaaatcattctttatgtaaggaaaaatccgttgatccagtcgcatatcctgaacatactctttaagctcgctgcacaggaagtccggaatagaaacacttcgcttgctctttgctgtcttaggagttgaaacaatatccctgctgttaagcctctgatatgacttgcttacactgatgctgcggttttcaaaatcaatatcggcaggagtcagagccagaaactccccctcacgaagccctgtccagtacaaggtctgaaatatcatatagtaggtggggtttgttctggctccctcaataaacgtcataaactcatctcttgtccagaacagcatctcatcagctctgctcttacccatactgcctgcacgtttgcagggattatcccttaatccgtaatatttaacagcaaagttaaacagagccgaaagctgactgtttataagccgcagataggtaggggagaaacctttgcccatcatattattctgccatttgcgtatatcggatgcagtaatgtcacagatgcgcctcttgccgaaatagggcagcagcttggtacgcagtatatgcttcttcgtttcaagagcagattccttgtaccttgcagcaaaatccgccagataaaccgccgcaaaatccttaaaaaacatagttgcgccttctttctccttggtcagaaaattcctttcccattccagagcctcttttttagtagcaaacccgcgtttcttcttttgcttcctttctccggtatattcggtgtagtaaaacttgcagaaccatgttccacgctctttgtctttaaaagcagccatataaattacctccatgtttaaaaaattaatatgggctattctaccacaggtaatatggtactgatttggtaccataagtcgaaaattgtgacaaaaatacaactaaaacagtcaaaatcagagcgaaatgtacgctttaaccggcaaatacaggcgtaggatgaaaatccgggtgagaaaagcagcatccgtcaacttgacagagtaccggttataaccacattaataattccaacacgaaaacagagcaactaaatgtcttgacattacggtgcatatagcgtaaaatttgttaatgtatatacacacatatatatatactaaaccagagtgtaagtcttggaggacaatatggaagaacaaaaacagacagtaaaagaaaaaggcagtttcggtaaatttcttcagcgaaagaatatcgagttttctgccaagagatatggtatagatgctctcggcgctatggcgcagggactgttcgcatcgcttctgataggaacaattatctcgaccataggagagcaggcagggattgacttccttgttacaataggcggatatgccaaggctgtggcaggccccgcaatggcagtggccataggatatgcgcttcaggcgccgcctctggtgctgttttcactggtggccgtcggaggcgcggccaatgaccttggaggagtcggaggccctcttgcagtgctggtagtagctatatttgccgcagagtttggtaaggcagtatcaaaggaaaccaaagtagacataattgttacaccgtttgtaactatatttgtgggagtcctgctttcaatgtggtgggcgcctcctatcggttctgtggcaagcgctgtgggtaatctcataatgtgggcaacggtgttaaagcctttcctcatgggtattatagtttccgttatagtgggcgtggcgctgacactccctataagcagtgcggcaatatgcgcggctttaggccttacaggacttgcaggcggagccgcagttgcaggctgctgcgcgcagatggtaggcttcgcatttatgagcttcagagaaaacagatggggcggactgatttcacagggcataggcacaagtatgcttcagatgggcaacatcgtcagaaacccgaaaatctggataccgccgacactaacagccgctataacagggcctattgcaacctgcgtgtttcatcttgagatgaacggcgcggctatagcgtcgggaatgggtacctgcggacttgtaggacagataggcgtatacaccggctgggttgccgatgtcgcatcgggcgccaaggatgccataacatttatggactggaccggccttatcctcatatgcttcgtgcttcctgcggtactgacactcatattcggagcaatattccgcaaaatgggctggataaaagagggcgatttaaaactggattaattaaaaaatacataaaatatgggctgtcaacaatgagcggctcatatttttgtttaaaataaacaaaaaacagtagatttattgtaacatttttgatataatcgaaatatacttacttagagaagtatatttttttcaccaaaacagattgaatattaattaaaacagaaatagaggagatgaacttatgggactaaaagtggctaaattcggaggttcttcagtagcggatgcaatacagcttatgaagattaaaaagataattgaggctgacagcgagagaagatatattgtagtgtcggcaccgggcaagagatttgacaaggacaacaaaatcaccgacctgctttatctttgcaaaacccatatggatcacaacctgccgtatgaacaggtgcttcaggtaatacaggacagatatgtggcggctgcggtaggacttggacttgatatagattatgatcagcagtttcagataatcaaagacaaactggaaaagggcgaggcgactgccgactaccttgcaagcagaggcgaatatctcaatgccatacttgcggctaagcttctgggctatgactttgtggatacagacaaactgataaaattctctgcaaagggcagactgcttgcagaggaaaccaatgaagcccttgcggcagagcttaaaaagcacgagagagctgtgcttccgggattttacggcagcactcctgacggcaaaatcaagacattctcaagaggcggctcggatattacgggcgcactggttgcaagagctgcaggcgcagacatatacgagaactggactgacgtatcgggattcctgatggcagatccgagaattgtcgataaccctaagcctatagcggagatttcatacagagagcttagagagctttcatatatgggagcttcagtgcttcacgatgaggctatctatcctgcaaaggaagacaatattcctatcaacatcagaaacaccaacagaccggaggatcccggcacaatcattacggcagatgcgccgctttcagaccacattataacgggtattgcaggcagcaagaacttcactgtaataggcctctcaaagagtatgatgtcacaggaggtcggctttgtcagaagacttgcgggagtatttgcagataaggatgtaagccttgaacatatgccaagcggtatagacacaatctcagtggttgttgacaatgacgaacttaacggcaagctggatgatatagttgatgaaatccagagacagcttcagccggatacaatagatgtatttgagaatatggctcttattgcaactgtaggcagaggtatgtcctcaagaaccggcacttccgcaaagctgtttacggctcttgcggatgcaggagtaaatatcagaatgatagatcagggctcaagtgagataaacataatcgtaggagtacagaataaagacttcgaaaaggcagtaaaagctatttatgatgcatttgtagaataggagaaacgggggagcgggaaagctccctctttgaatgataaaatgaagatagtatgtataggcaacagtatagtaaacggatttcctctcaaaagaagccagtgctttacagggcttttaaggagccgttacgggtatgaaacaatcaacaagggagtaaacggcgataccacagacggaatatatcagaggtttgatggcgatgtcacagctcacagaccggatgtatgcctgctgcttacaggaaccaatgactttatagggggcaaatctgcagagcaggcctttgacaatatcaaaaggatactggcaaaggcggcacagcttgacagcatgcagatgattttactgaccccgctgcttacatatcctcctatggcggagcgtatgtgggttccggcagattatacggaattaaataagacactggaggagtttgcacagaagctcaaaactcttgaggaatgcattatcattgatacccagagcgcatttaaaagctgcgggattgcagcagaagatgcgtacagtgacggcattcaccctacggcagtatcccacgaatttctggcagaatacattgcaaagcagcttgaggatattttaaagtaaaaaagaagcagactttttttgcctgattttaaatctcgttttttgtcaagtcctgggcttcaaacgttcaaagaccaacgtttgaaagctatagtaaaaaaataaaaaaatggaattgacagtaaaaacggggtgtgataaaatggtactgtcgaaaaatgtatgcagacgcatacagtattaacttaataaacagcagagattaagagaagtgcttgcacttctcttttttgtgctgcaaaaaaagaaaggagaaaacaaaatgagtttaaggaagacactgagtctgctgctcatatgcataatgcttgcggcaatgctgccggtacaggcgtttgctgatttaaacagcagtcagacggcaaaattcaaagagggaggcgtgctgtatgacgcctatggcagaacctatcattacgacaggcagtactatatacaggtatatcagtacaactccgacggctcaaggcgaaaaatcatactcgacaatgaaaacacttcgcccaagagatcatttttaataacgcagggcggaagttcctacaggggctactgcatagagcatggagtatacagcgatgaaacgctgaacatgaaggcgctgaccggagaaggcagtatatcattttacaaagggctaagcaaatcacagcagaaaaacatacagcttgcgctgctgtacggctggcagtcgggcaaaagcataaccgatacgaaggatacgcttttcaccaggtcaaagtggtataagaaaacctgtgacagatacaacagagatgactggtatcttgctactcagatgcttgtatgggagatacagcagggctacaggacggcaggtatggattacaactacaggaatgtatcgggaagcagagttcacaaggagctgtgctatctgtcgggaacccccgtaagcatatatcactattcaaactttctcaaagggcagggagcctatgatatatacaagtttatggcagaggcagtaaagtcgcacggaagtattgcttcaggacttaaaggcaccgaaaaatcaaagcctgaagaaataacgctggtgcaggaaaaggatcaggcgggcgaaccgactgccgtatggtcagccgttataagggataacggcaaatatcccgttgcaaaggataagcttaaagacgagtacagagcagtgaacatagttaagggcaaaaataaaaacagccttgagatagagcctgtcagatcagatacaggcgcgctgcagtacaggataagctggagaggaaaggacagcgaggacagaccgcctgaggatacggtatttacaatcgaaagagtgtctgatgcaggtacggatgccgttaaaaacaatctgcttttctggtactggaattcaggctccggcggatggccgaaccactgccagaccatagttacgggctcctgcaatcctcagcacttctatatatcccttaaatccgctgaagaaaagcagccgcctgaggaaacggagcgcggcgtgccggaatattttccggagtttgagtttcctgtaagcaagcaggataaaaatccgggctgggacggagatgttcatacgggaatgggcgatgcctctcttggcgcaacatacaccctttatcggaacggtgaggctgtagacagtgtaacccttaatgacagcggtgagcaggaaattctcatagataaaccgtgggagtcggaagaggatcttaatatgacagagtcgggcgcatatacccacagtacggaggacggtgtccactgtattgttacaccggttcacacagagtggacaggagaagttacatataccattagagaggaggtgccggacggaagatttatgcagcctgacagcgggctcagaacctatacggtttcctacaaagcctatagtgacaacgcacagaaatgcacgggcgagcctgcctgctggtccgaggtatgctacgatgtaaagtgcagagcggacaacaccacacttgatatatcaggcagcattgcagaggcggaagcagaaaaccccgtgcagtttaatgaagagatctttgtaaacgactgctacagaggcaaaataactttgagtaaatcccttgaggacgaaaatgtatttgatgatgtgcctctcggcggaggcaagagaaaatcaacagactccggctggaagctgtatctgaaaaacggatacgagtctgcaaaatatatacacttcaaaagagaagctgaccttgcagacggcacagcagtctacagggctctcagagataatacaggcattgacaatcagaacactgaaatgaaaatcggctcaaacggcgctttgatgatacttgatgttccgtacggtgaatactacatggaggagaccgcgccagacgatgcttcctttgtgcccgaaaaattcacggtagttataggcgagcacagcggagcctattcagaggacggcagatttgacaacagatatgattatgatataagggataaaaagattgaaaacagaattaaaatagtcaagactgatgaggaaacaggcaaaaccgtaagcttcgcaggcggcaccaaattccgcataagatatatgggaaacaaacttctctcggatattacatcatctgaaaactacggcagactgctcccaaatgcagcatctataaatgataaaacaggaaataacgatgaatttgaatgtgatgaaaacggatatatagttattccgtatatgcttaaattcggcacctacagaatagaggaatttgcagtgccggagggctactatataggcgagggcgaaacccctgtcagatactatacctttgatgtagataagcagaatatccacgaggacggaaacttcggccagatggtagacagtgacggcaacatatatgaggcggacccgttatacaaaagcagcagctggccttatgaaatattctatcaggcggtaagcatagcaaacagtcaggccaagggagtaataaggattgacaaagagggcgaaatgttcacaggctggaaaaagattatcgcttcgggaagagagcttatgcagcctgtatatgacggagcaaagaagcttgcaggcgcggtattcggtatatttgcggcagacgatacacttcttgcagacggcaatgacggcgccgatatatatgatgcagaaacagacgaaaaaatcgtaatccctgtttcaaagagcacccacgaggcaagcagtaccgaggaagtgaaagggcttctcgaaaaaatatataacgctgatgtatacgaaacaggaaatcttgagcacagcagcggagccaagctttggtatatgcgggagcgtcaggcatcagagaacaatgtgaagcgcagcgtatatattactccggagcagaaaaatacagagtattcctatgtgtatgaacaggaggacgatgagtttacatacagatatgatgtgaccgcaaagcttgaatatcaggcgggaggacttaatattacaaccttacagattatgaaaaccaccgtttcaaaaaaaggcggtgcggcagtgataaactctgcagagccggagcagtacatagcgggcagcagggtggcaaacgagtcgtggggagcgccgggcggaaatcttctcgacttttcatacagaaaatttgtatatgaggcagacggaagcgagggcacagactggaacggaaacacggttgatttttccaaaggagcagcggcaagggccgtaaatgaagccggaagctttgtaatagcctctaagacagatgagcagactggtgaggtttcctacagcgtacttcttgaggacggaagctatgccccatgcgatgaaaacggcaatttccagacggctcttgtagaagtgtacgatgtctcctatacaaatcagcccaaaagtgaagcggattatgcattctcgtgggacggatttgaacttctgacaaaaagagcggaagaaaaagcagtgacagaaataacagcgcagggcggcagacctgagataagctgcggcataggatacagcgcaaagacagagggagcaaagacagtatttacagcctcacagcctaaagcgcctgtatattttatgacaagagataaggttaaaacccggatgtactacttcggcggcagactcaaggcagacataaccatacctgcggcggcggtaaaaacaggctgggaaactacagtgccggagattaaaataaggagcaccgacggagagggcggaagctctgtgactgttctggactggtttaaaaatctgacctatgataatcagcaggaggtgttcaattcggtaagcggcattacggttaccgctaagtacaacggaggcagtaagaagcctgtatattacacccttgagataatttcagacaaagacgagagcagtcctgtggagataacctattcggatggatatactgcaaagctttactgcggcagggcttcttcgggaaacggagtcggtgttatggagcttgcaagcgtttacaggacaaacaggtatccgctttcaagacttgtcgaggtgataaccacagatgaaaacggatatgctcagtcaaaggagcttcctctcggtaaatatatagtaagagagcttgatgcggcatcgggatatgtgacagatgacaggggctatgaggtggaactcaaatacaaggatcagaatacaagacttgtatggtcggatatcaaagcggtaaacaaagcctgcagcgttgaaattgatatcagcaaggcctttgaaacagattatggctccggaaattacagcagagaaaaaggcgcagtatttggcatatacacagccgaaaaaatatcggcagcggcaaaaggaacagatgaaaagacggtttcctctgtagaaaaagatacccttgtagatgcagttgctgcggacaaaaacggtagaggcatactgaaagtaaaactgcctgagggacggtattatgttaaggaaatcaagacaaagcagggatatataattgatgaaaccccgttctatttcacagtgagagataagcaggcagaaaacaaagcgctgaaattcgattacaagcaggcgggagtaagcggtaaggctgttatggagagtcttggcaaaagcgttgtgactatagatgtaaaggcgagaattcctatgcctgatataactgttgacggcagtaaatatccgcttgataagagcggcaaagcagataatatggtgataaccaaagacaaggataaaactacagtgaagctggttgtgggcgatggtgaggaaaaaaccgtaatactgccggaaacggaaaaagtgcttaaaattaaaaccgagggtaatacttacagctatgagcttgacggagcaacaggcacctatgtgccggaggcggtatatacaggatatcttgcttcttttgaaaagatatttgaagcagaggaaaaaccggaggcgccggtactgcttcctgttacggaaacaattcagtttactgcggcgggaaaaaatccgtcaaagcttgatattacgcttactcatactccaaagacctttgaagaggaaacagaggaaggcgcagtgactaaagcagtgacagataaagacggcagacaggtttacaatcataaggccgagattgatgtaaacggcggagaaaaagagataactcttgaggcaggagaaaaaacagagtttaaggacagcaaagatacatcgtttaaagcatggctcgccggaaacgggactctgaaagtatcggcatacggatatcctgatgagagcctgtctgatgagcagaagcctgaagctagagcaggcggcatgcctctgactgttaagtttgtcaaaagcgtgacccacgcaagagcagacagaagcgcggacactgtgcagataaaaataaattcggatgataatatcaatgcaggggatatttacaatgacagagaaaagccgcaggatacgccttatgtgccgggaacacccgaaaagaaaaagggaagccttgaaattataaaggttgatgccaaaacaggtgaggcgctggcgggagcaaaattcagaatatggagcgacaataagagcttcggcgaaaggtatgaggtttccgatgagcagggcacagtcagaattacagaccttgaaacaggcagatactatgtctgcgagacagaagcaccggatggatatattgtagatgatacggtatatgagcttgatgttgaggccggtgaaaaagccgtaataagcattgaaaacagcagagcgccggaagaagatacccctgacaggccggataaggacaagcctgaaaaggataagccgaagaagaataaagaggttaaggaaaaagtgcctcagacaggtgatgtgacaggcgtaatgacatatattgcggtaatgcttgcagcgcttctggcaggactgctgatgctggtaatacgatttgcggctggtaagattagaaaacgttaggagggctaaagttttcatttacattctttgtataactaagtatacttagtatagtgagttataagactgagtaattatagaggagttatactgatgagcacaaagaaaaatacggttacctgttcttttataatggatagggatatatataatgcgtataagagtattgttgtgatgaatggagagaatgtaaaggaaaatctagtaaaatatatgaagagtgttattgaatacggaacagcaaatgcagaaaccatagctgcaatcgaggaagtaaaaaggcttaaggcagatccggataaaaagacatataattcttttgcagagattatgaaggaaatcaataatgaataagtataagatagttcagaccggtattttcagaaaagatctcaaaaaagctattagaagaggttataatattaagcttttggaggaagttgttgatactttggcggcaggcataccgttgcctgaaaaatacagagaccataaactgacgggaaactataaagaatgcagagaatgccatataacacctgactggctacttatttatgagattgcagaaaaagaaataattttgtatttgactagaaccggtactcatagcgatttgttctgatgaatatacaattaattaacttaaattattgatatttaacttataaaaagttaaaataaaataaaaaagttaaattgtcgaaggcggataatctctgcttccggcagatgaggtgttttatggatatcttatgtgatgttatgggaatgaaagctgaatacagagagtggaataagacagaatttcttccgctttatatttcagcgggatatgattttaacaaggctgtaatagatggtatagattgcataatgttaaagcctaaaggcgagctgccatatattcagagcctgaaaaaacagatttcaaagatacaggaaactgaaaatatacctgtggtgctgaggctggacggaatttcagtgataagacgaaaaagccttatagaaaacagaattccttttgtgtcagagcggcaggtatatctgccgtttatggctgcgctgcttactgcggccggcgaagaacataaacagcatatagaaaaacttacggtttcagcacagatgctggcacttgtgtatctgtatagcagcaaagaaaagttgtatattacggaagcaagaaaaaagctgcctttctctgcaatgagtattacaagagctgcaagacttctggaggacacagggctttttacactctctaaagacggggtgaacagaattatttacagcaggcattcgaaatatgatatatatgaaaagctgaaaaaatatatgaggtcaccggtaaagaccgcaggatatatagacaaaaacaggctgcctgaagaggttgtttttgcaggagatacggcgctgtctgccagaagtatgcttggcgcagatgattttaaaacgtttgcgacagcgccgggctttgagactgctgtacttgaggaagaacttgttgatattaaaaaacagtgcaggctggaaatatggaaatatgatccgtatatgttttcgtgtgacggatttgcagatcctgtatctgttgctctatcccttgaaaaaacatcagatgaaagaattcagatatccgttgaggaaatgattaaaaaaatctggagataaaatggtacagggaattaaaaattttaaacactggtttgcaggatttgaggaacagtatatagttatcggaggtgttgcctgtgagctgcttatgtcagaagcagagcttcaattcaggactactaaagacatagacgtagtacttgtagtggaggctttgactccgcaacttgctgaaaggttctgggagtatgtaagaaatgctggatatatccacattaataagaatacaggcaggatgcagtgctgtcgttttgataagcctcaaaaaccggagtatcctgtgatgatagagctttttgcaggaaagccgaatatacttgatgacggctgcggtatgaaaatacctgtttcaatcagcgatgacgtatcaagtctttcggcaattcttctggataaggattactataatctggtacttgaagggcagatttgtgttgacggataccggtcttaaaacctgagtatcttataccgcttaaaaacagagcgtggtccgatttgagcgaaagaaagaaaacggcggtaaagcggaggtgcagttaacagatgcgataaaagcggagattgaattcttcattaacgctatggaaaatgagcgtatggatactaaagctataggtgtaaaaaatgccgataagcagcaatgcctaagcttactgaaaaaatgctatggtatttgatgcggatatggacaaataacggttgcggggtcaaataaattaaaaaagtgattgcttttcactccgagataatatataatatttgcgttgtctgtgtatttttacagacagctaaacagacgacccttgtgtcgggagtgtattttacactgtgcggtattgcatatccggacccggcaccgtttagtccagaaggaggtgaaacaaatgacaaattatgagcttatgttcattatcgaccctactttagaagacgagaagaaggaagctacagttgaaaccgtaaaaggtatcatcgaagctgacggtacagttggagaagtagacgtatggggactgagaaagcttgcatatcctatccagaagaagaacgaaggatactatgtagtagttacattccaggctagcccagaattaccaaaagaacttgacagaagacttagaatttctgaagtagtaatgagacaccttataatcaataaggatgaacagtaaggaaggagcccggtatgaacagtgtagtattaatcggcagacttacaagagaccctgaagtgagatatacgcaggatcagatggctattgccagattttctgttgcaatagacagacccgtaactgccggcaaagaaaaacagacggactttccgaatgtagttgtattcggcaaacaggccgagaactgtgagagatttctttccaagggcagactcgtaggcatccagggaagaattcagacaggcagctatactaacaaggacggcaacaaggtttacacaactgaggttgttgccaacagagttgaattccttgaatggggagacaggccatcaggcggagcggcaccggcaagacaggatgatgacattcctgcgggctttgaggctcttgaagatgaagatatcccattctaaactttcaggaaaggagataatctactatgatggatagaaaacgcggtggcatgagaagaaaaaaagtatgccagttctgtgcagataaaactgaaactatcgactacaaagatgttgagaagttaagaaaatatgttacagaaagaggtaagattttacctaagagaataactggtacttgtgctatgcaccagagagaagtaacaaaggctatcaagagagcaagaattgttgctttattaccatacactgctgaataaacagtaaacaaccggaatgagtattatacttgttccggtattttattttcccctcaaaaatgataaaatatattcaatatatcgtaaggggagtgagtgtattgaaaacaggatttataggtgtaggcaatatgggtggtgctatcttgagaagctttgcagcctcagataatatagacaccggcagcctgtatatttacagcagaacagtatcaaagacagaagcgcttgcacgggagcttggcgttaaaacctgcggcagcgcggcagagcttgcgaaagcctgcgacatcataataataggggtcaagcccgatacggttgcatctgtaatggagcagatagcgcctgtatatacgccggataaaatcataatatcaatggcggcaggcatcagcatcagagcaatcgaggatatggcaggagtctctgcaaaggtaatcagaataatgcccaacacgccggtcatggttggagagggcatgacggccatatttgtaaatgacaatatcacagaagaagataaacagacagtgtatgatatgttcagccggaccggcagagcggaatttgcggacgagagtatgatacactgcattataggggtgtcgggttcaagccccgcatacacatatatgtatatagacgcacttgcgcaggcggcgcaggcagagggaatgagcagggagcaggcagtggattttgcagctcaatcggttctcggcgctgctaaaatggtacttgaaacagggcagcctccgcagcagctgagggacaatgtatgctcgccgggaggcaccacaatagaagcagtaaaaaccctgcagcaaaacggctttgctgacaggctcacggagggctttaacgcctgcgtcagaaaatcggaggatatgagcagatgatagttgaagaaaaaacaatatcaagtgaaatgatatatgagggagcaatattaaacctcagaagagacaaggttacggttaaagacggcaaaaccgcctacagagaaataatcgagcataacggcgccgtggcgcttgtccctgtaacagcagacggcaaggtggtaatggtaagacagtaccgcaaggcctgcgaaaaagcgctccttgaaattcctgcaggcaaaatagacaaaggcgaggagccgattgtctgcgcggcaagagagcttagagaggaaacaggctatacggcggaggatatcgagcatatgagcgagttttatgttgcctgcggctacagcggagaaaaaatctccatatacctgtgcacaggacttacagcaggaagtaccgattttgacgaggacgaggctctcgatatagtcgagataccgcttgaggagctttacaccatgtgtatgaacgatgagcttgaagattccaagacaatagtaggaatacttatggctaaagagaaactggcacaaaaacagcctcgatagcagcgcacaccataagcataatcagcataacaatattaacgataatatacggacctgccttttggggcaggttcgctttttctattccgcccttttttgatgcaagaaatccgtatgcgtatgacagggcaaatgaagcggcaagtatgaacagaggcaccagcagcatattctggggcagtaccgagagcattatcagtttaatgccgtctgtactcatgctgtcgataatcatagtgcaggaaagccccagagctgcgcccttgtaaagcagcggcagcatcgaaagcggcgcgcccagaaccgtaaaccctcctgtaaaaataacgagccacagcacggcgttttttctgaaggcggtctgtgcatagtctataaacgatacgtctgcagcatctccggcaaggaacgacagcagatgctctgcaatagcctctttttcggaaggctccatggttacagccataaaaatccccataaaaagacccgaaagaaacacaaacgttgatattgaaattgctttattgccgggaagcgacggcaattttattcttgaattcatacaagccctccgaaaacttctgataattatagatatgacagcggtttgttttttagtacagccttgcaaaatatactttgcgggagtataatcatagcatagattattgtaaactaatgagagggtcggtatgtatacagacagctttacagattaccttaaaaatgacaaaaaagcctcggcaaataccgttgaggcatacaggagagatattgacggcttccgaaaatatatggaggagcgcggcagcagcgatcttgccgttgcggtgagtacagacataacaggatatatgcttaagctaaggacagagggcaagtcggcatctacaataaacagaaaaatggcgtctctgagggccttttactcgtttcttgcagagcggggttatgtcagaagcaaccctgcggcagagcttaccgtacccaggacggaaaccagagagcttgaatacctcagcatcgaggaggttgaaagactgctggagatgcccgatgaaactgcagcaggcatcagagacagagccatccttgagataatgtatgcaacaggtatgagagtaaacgagctgatacaggcagaggtttccgatgtcaatacgacccttggcttcatatcctttgacggatcacacggcaaggcgcgcattgtacctataggcagacccgcaagacaggcggttgaaatatatatcagagacgcaagaccgctgctggtcaaagacagagaggactgcggagtgctgtttttaaactactacggacagccgctgacaaggcagggcctctggaagataataagcgggtacggagaaaaagctggacttgaaaccagactgactccgcatatactgcgaaactcctttgcggttcatatgatcgaaaacggagcggatatcaaagccctccaggaacttatgggccacgaggatattacggcgatgcagatatatatgaacataaagaaaaacagaataaaagacgtatatgacagcacgcatccgagagcctgaaaacctctgtaaaatcgattttaacaggctacagcgccaaaaatactgacagtaaatactaaaatctgatataaattaaataacgctttacaactgtttttgcagggggggggagcgtaatattttatatgaaatattaagaggaggcaccgatgttgaaacctgaaaaacgcaaaaaaatacttgtaatcgacgatgacagaattaacagagcgataatagcagaaattcttgaagaaaactttgatgttatagaaaaagcggatatagatacagcttatgctcttgaagaaaacaccaaaaagcacatagacctgatactgatagatatgttcctcaaagacggcgagttctggaagtttatggacagactcaaaatccgcagcgattatgcgaatataccggtcatagttataattgcacccgatacggataatacatttatcgagcgcgcgggcagacttggcgcggccgagtttatcgcaagaccgttttccgaatacattataaatcgtcgtatttcaaaaattatagacatatcaccggaaaaatccgaacatatgcaggacaggcagaacggtgagagcattagagagcgaacctctgcatatcttgaagaggaaagagcaaaatcggatttcttcctttcacagacaagggagatatggtttaaatacaattttgatccgcaggtaattactctttcgagaatgtcagcggataagctgggagttccgcaaattgtggagaacccgttcgaaaatgaaaaaattaaatcgttttttgacgatggacagtatgagcgcatcagaaattccctcagagacttatctgcggagaattcattttatgagggcgaaatgcagctgaatacagaagccggcaggaaatggtacaggctgtcgatgtatatagtatggtcggcagagcttaacaaaccggcatctgttttcggaatgtttcaggacatcgacacaggatacagggaactggaaaaacttcaaagctatgaagcgccggaggcgcagctttctgcggaggctttagactgtgatatacctgaaataacagaggcgcaggccgtaaatattatgaaatacttcggaagaatgtttgagtttgtgcgccttgtagaccctgagatatgtatgcagtttacaatagacagcgacaaccatataatcgaaaagcctcacagatgctatgcaatatggaacaaatcaaaccgctgcgataactgcatatcaatgacggtggcgcatacaaagaaaacacttaccaagctggaatttataaatgacagaatatacaacgtgtcggcggcatatatacttgtcgacggcaaggggtatgttttagagcttgcgtcatttgtagaccacgatgttatgctgtctgccgatgacaaaaacaagcttctaaatgcgattacggcacataacagacagctgtatatagattcggtaacaggaatatacaaccgcagatactatgatgacagactttgtgagcttagcggcgaatttgcgtttgcaatgattgatatagataatttcaagcagataaatgaccgtttcggtcatcttgcaggtgatgcggctcttgcggcagttgcgcaggcaattaaagaaaacgtcagaacaggcgatgatgtggtacgatttggaggagatgaatttttcgttctgttcaaggatatgccaaatgaaatactgctgcgaaagcttgaaaagatacttcatgcagtcgagagagtaagacttgaggagtacccggagctcagagtcacagtcagcattggcggagcatatgacagaggcaagctgtcgcagatactgcgtaaggcggacatagctatgtataatgccaagggcaggcgcaacaggatatgtatatatgaagattaaattaatttactaatctggaaagtgaacgaaaatgaaaggtaaaaaagatacaatcggttttgtaaaagagaatattatactgctgattgttgtactggcaggaatactgcttctggctttttcagcatattacaccaaactgggaacagcttccgagcagagagcctacaggcttttgagcgactctgccgaggcgcagcgtgtggcaatagacgagagagtcagcgcaagttttcagcagatgagcattataggggcggagatagactggaaagaggacatatacagcgacccggctcttgtttcaaggcttgatgacgttgtggacgcaagtccctttgaaaatctggcagtttcagatacaagcggcgtgatgctctacaggaacggagatacggcggactgctccgaccgtgaatacttcaaaaaagccatcgagggagaggaaagcatagagttcctcaaaaaaggccgtatgagcggaaaaaccatatttgtatttgcacagccggtgtacagaaaccgggagattgtcggagttgtggttgcaaccagaagtttaagtgatatgagtgaaactcttgccactcacgactctattgaaaaccagtataaattcctctgctatgaggatggggaaatcattacggcggtgataggcgaaggtgaaaaatccgaaatatcatcgggatatcttaaggactgcttcgagccttcgggcaatgcacaagaaatatccgaaaacaaagtcagcatatatgaatataacgggcagaagtattacggtatatatgctccgtcgggacttgacgatatatatatattcagtgcggcagaaacagattatgcgaataatcttgcaggtctttacaacagatggactattgcaataatcgctctggctctcgccctgacaataatagcgtcgtttattatcatcagacagcttaagagggacataaccctggcccagcggcaggaggcggagaaaaagcataaacttgaggaatactacaacttccagaacaggcgttatctaggccgcaaaaacgtttcaagatcgttttaccttaaccttactcgcaatacatgcagaaaagacagcgacggcaaattaggaagtgaaatagagataaaagacggtatgagcatagagcttctgtgcaatagcatatgcggcctgctccacccgcaggagagagcgcgttatatggagagtatgtcaagagaaagtctgattgaagcctttggcagtggcgagtccacagtgagagactatttcctgttctactacagcggatacggatatacatggctcaggactacggcggatatagtcagaaaccctatgacaggcgagcttgaggccatactgtatgctttttcggtaaacaggaaaaagcgtgtagagcagataggacagaagcttatcaatgagaaatttgttgcaatgggtctgatagacgtcatgtcaggttatgtttacgatatcaaaggactgtcggagtataacgcaggagaaacggaagcaggcagagttgaggaacttctgtatgataccgctgccgcagaaactcttggcagggtactgccgacggaggaattccaatacatcagtaaaaaagtaaagtttgaaacagtcattgatgaacttgaaaaaaacggagaatacagcgtcagagtcagcattacgcataacggagaaagtgttgcggagcattatcagataagctattcatacctcgacgattatcaggagagcattatggtgtcctgtgaaaatgtaacagatattcttgagggtaaacttgacactgaaacaggactttacaatatggcgggctttgacgaagcggtgcagaaatggattgcggacaatccgggcagaaaataccgtctgcaaagatacaggattgacggatttatgaatatcaatgccacctacggatacaaagtgggaagccgcctcataaacgatataggcaaatatatgagagctcgtacaggcagggacagctttgccgcgcatatcaatgcggacaactttgtcagattctgcgcagatgacagcatttcgcctgagtctttctatgagaaattccttacggactttgcggattatgagcttagttatcctctttttctgaaaatgggtatatatgatttatgtgagcctgactgtgatacccttactatgagctatagagcaaaccttgcaatacagtccatagagggcgatttctcaagacatattgcatattacagcaaaggtcttatgcaggctacaaaggaagaacagcagatgctggcagatgtcgaaaatgcggtcagacagggacagtttgaagtatggcttcagcctcagtatgattacagcagcggcagaattataggggcggaggcgctggcaagatggaatcaccctgaactgggaatgataacaccgggagcgtttatccctgtcttagagcgaagcagacaggtaggcatgctcgacgagtatgtttgggataaagcctgccagtatataaacagatggagcaaaaaaggatttaacattccggtttcggtaaacgtttcccgtgtggatatacagaattcgggaatgtgcgaaactctgataaatctggtaaaaaaatatgatattccgcccgaatatttaaggcttgaaatcacagagagcgcatatatgaatgagccgcacgagctggcagccgcagttgcggagcttagagcggcaggtttcattatagagatggacgatttcggcagcggatattcatcacttaacgcgcttaaggatttagacatagacgtgctcaagcttgatatgaaacttgtttcggaaataggcgacggcaatgaaaaaaacgacaatatattgagaaacgtggtgcatatggcaaatgctcttaatatgtccgttattgcagagggtgttgaaaccgaagtgcaggccggatacctgaaatcaataaactgcaattatatgcagggatattatttcagcaaaccgataaaagcagaggatatagagaaattatttgaagaaagcaaaaacagcaactagcttaaaaacggctgctgcggagggttaaattaaaatagacggcaaaacaggcagagatattctcaccaatatgtatggaagacaggtattctttgaaagagcaaaagctatgattgaagaaaaagccgccggatactatatcctgtccagcatcaatgttgaaaatttaaaatttataaacagcgcatacggactcgactcaggagatgcagtgcttcgtgcatattgcagactgtactgtccgctgtatggctgccataggaggtatagcaggccgaatatacggagatgcttttgctgcattgtttccggcatcctatgccgattcaaagcttcttgcagagctttatcttgagtctgcggctcctgcctgtattgatgaaaaaatcaggctcagggtaggcagatttgtcgtaaacgtgccgggagcgtctatagagtctatgtatgactatgccaaaatcgccggtgattccgtcaggggcaattacgaaaaacatatagaatactataacgattttattaaggatgagctgctgcgaaagcatcagattatctacgagatggacagcgctcttgcggaaggacagtttgagccgtggctgcagcctcagtacaaccacgctacaggcgctatgataggagcggaggtgctggttcgctggaacagaaacggcacatatatttcacctgccgaatttatccctagtgtaaatgatattgatgaatttcagaaagaacttaaagagggacttctggcaaagagaattcactcactgataatggcgccgatgtggaaagatggcaggctcatagggtttgtaggtacggacaatccgaccagagccgtaactcacctggtgcatctggcagcgctgggagattaccttgcagtgcttctgacaaggcgcgactttccggaacagtaacaggtgcataccgattgaaaaacagggaaatcaaagcgtgtacggcttctaaccgaggcagatcgtatgcgcttttgtgtttttttgtttgacaaatgtggcaaaagtgtggtaaaataccgatattaagttattacaaaaggataagagagactataatgaagaaattattcagcataattaccactctggcccttttattttcattccccgcggcggcatatgcgaacgtggagaccaaagcttcagatgacagcattacgctgagctggcagcaggacaaagaggccacaggttactatatatacacaaacgataagaaatcgggatattattcacttgcagacgtagttgtcggaagcgacaacacaaagtacaagttcacaggacttgagaaagataagacctactggtacaaaatcagagcatattacataacagacaacgactttaaattcggcgaatactctgaccctgtagacgagcgtgtcaagcttgaagcgcctgacagcctcaaggccaaggcagtttccgacagcacaatcaaaatctcgtgggatgaggttgacgatgcggacggatacaaggtgtacagatacaattcgtcaaaaggacagtatacgtgtatcaagactgtcggcgcaaagacaacggcatacaaaaataccggactttccgcagaaaccaaaaaatcctacaaggttgcggcctacaccaaagagggcagcaggacctatataggatataaatcggacaaggcttccgcaaccaccgacaaatcggacagcgttgaaacccttatagacaaggccgagtcaaagctgggatgcccgtatgtttcaggtgcggcaggtccaaacagttttgactgttcggggtttgtacactgggttttcaaaaagtcggatgtatctccggtgaagttttcaaggtcatcagctcagggtatatacagcagcctcaggaaatatgacataggaagcacatcgctggcaaacgcccgcaggggagatatgcttttctttggaagcagcaaatcaaacatatggcatacttccatatattacggcaacagcaagcagatacacgcgttttcaacgtggggcagggttgctgtaaatcctgtaagtatgtctacaagcaacaagaagcttgtggcaatagtcagactgccgatgagatagagcgttaataagatagtaaagttaagggaccgccacatcagcttaaaacctgatgcgacagccccttttttctttataacataggaaatatcggcttgtatataattccatatatttcccctttctttatatcctagagtgaatatttgtttttgtacattttgaagtttgacttgaactcgtctgtatcgtttcttatgtcacccagatatttgtgcatatcaaatgatgcgttttctgatatctcggtgatgcaggccgctatgttggagcagtggtctgctgttctttcaaggttagtaagaatatccgacagtacaaatccgtggtctatggtacattcgcttttctgaagtcttaatatatggtgcagctttatctgctctaccagtatatctatagtctgttcaagcggctctacgagagatgctttgtcaaggtcattgtcaatgaaagcgccgtaagcaaggtctgtgatttcaaatacagcctctttgagtatggaaacctcatgttttgcttcatctgaaaacccaatgtgcttgctgtttatttcctctgcggactctacaatgtttactgcgtggtccgatattctctcaaaatcgccgataagcttgagaagctttgttatcttatgattttcggtttccgatatgtcttcgtttgacagtttgacaaggtatgagcctatagcatcttcatagacatcggcatctttttcgtatttccttacctttttggccgtcggcgcatcatatatgttgagaagaggcattgctgttttaattgagcttactgctgcatcagccatatcagcggttacagcttccgcacgctctaaggctactgacggagtgatgagaagtctttcgtcaagcagtgttgcttcttcttttgtaggggcgtcctttatagtcagggttgccagcttgcccagtcctgcgccaaacggcagaagaagcgctgtgcaaagcaggttgaacatcgaatgtgtaattgctattccgaactggtttgcctgcagatccacaaatgcgaaatgaacaaatgaattaactgcataaaacagcagcagcagtgcgactgtaccgattatattgaaatacaggtgtacaaacgcaacacgcttggcgtttttgtttgcgcctatagatgatattaatgctgtaacgcaggtacctatgttctgtcccattatgataggaattgctgaagcgtaggtgattgcgcctgttgttgacagtgcctgaagtatacctaccgaagcagatgagctctgtattattgctgtcagcagtgcgcctgccagaactccgaggataggatttgagaataccgtgagcagatttgtaaagccctccacttcttttaatcctgaaactgcgcctgacattgactccataccgtacataagcactgcaaagccgagaagtatcatacctgtatcttttttctcggtgtttttaacaaacatatagaagatgataccgataagagcaagcacaggtgtaaatgaggacggcttaagaagctgaactattacactgtcaccgcttatgcctgttaaactcagcagccatgcggttactgtagttcctacattggcacccattattacatatatggactgtttaagcgttatgatttcagagtttacaagaccgaccagcattactgttgttgccgaggaactctgtattattgaagtgataccaagtccgagaccgaagcccttgatagggttgtccgttattttgcctaaaacggtgttaagctgaccgcctgcttttttttcgagagcgttgcccataacctgcataccgaacaggaacagagcaagtccgcctataagggatagaaaatcaaaaatattcatcacatacctccgtaatccataagtcagtccaaataatatacggcaagtgtgaaatgtagaatatcagttatgttaaatctgtgtaaaatctgctgcaggttatttgaattccagtgaaattgaagtgcccttgccaggagcgctgtctatatgtataaccgcattgtgatatacagcgccgtgcttgactatggaaagaccaagccctgtaccgccgacctctttggaatggctcttgtcaaccctgtaaaacctttcaaatatacggctctgctgatcggacggaatacctatgccgtcatctctgaccgtaagctgtctgtccgatattataacctgggcgtgacctccggggctgttgtattttatggcgttgtcgcagaggtttgaaattatttcatcaagtatgcggcggtttccgtcaacatagcagcttttgcctgaaagagtcagggtgatgtctgatttttcggcaacgggtgcaagacgtgaaacaacctctgaagcaacctgatacagatccacaggctctttatcgtaaggaatttctccgccgtcaagctgtgaaagcctgattatatcgtttacaagggttattaggcgctgcgcctccctatatatattatctgaaaatctcacagcggtatcctcatctgcaaggccgtttttgataagctctgcaaatcccgaaatagaggttagaggtgttttgagctcgtgagaaacatttgaggtgaattctcttctcagaacatcgcgtttttctttttcggtttcatctattaccattattacaagaccctctttttcgccctcgtgaattacgggagccgctattacctcacagtaggtatctcctatatgcatggtgcaggagcttctttttccctccagcgcagaaagcaccgcatatctgaacctgtcgtctttgctgagatccagcacatgaaaaggactgccctcgccggtaaagccaaggagcctgagagcgctgtgattgcaggatagtatttcagcctttgtattggttataatcatgccctcgctcatactttccattgtggcattaagctgcgcctgctgaagcttaagctcatctatctgtgagagtattttctgattctgggatttgagtcttctgactgcgggtcttaattcgtcatagatttcctcttcatcgggattgtcaatatctatattctcaagaggctttacaattcttgatgacagcctgaacgctatgagtgcgctgagaataagggcaaatgcaaaaataaaaagaattgcttttatcatacccttgagaaccgttaaaaatgtataccgatttgaagaaacccttaatatagtattgtcgtcaagtctgagagcgtaatatacggtctgcaccgacattgtgccggagttccttatagccgttccatagccgtctgcgacagcttcatttatctcctcgcggtcgaggtgattttccatttcggaggcatcggccctgttgtcgtaaagaaccttgccgcttttgtctatccaggttatccttatttcatcttccgaaatgctgtcaagataatctgcgccgccaagcttaagtcctgccgcagcgtatgccgcctcctgaccaagctctgtttcaagctgggtattaaaatatttatatgaggcattgagggtaatgcctgttgatgcgattacaaaacacagtattgcaatcagggtatttctgaatattcgcagtttcatttatctgtcaccaatcctgtagccgactccgcgaatggtttctataaggctgcctgcctcggacagcttgtggcggagcgtccttatatgcacatctacggtgcggttttcgccgtcaaaatcatatccccagatgtgctggagtatctgatctctggtaagcaccatacctttgttttcaaacaggtatttcagcagctcaaactccttgtaggtcaggacaacctcattgcccgatactgttaccatatgctttgaaacagacaggcacagaggtcccgccgcataggttttgccctgtgaggaaacggagcttctgcgcagtaccgcttttactcttgataccagctccataacgccgaatggcttggttatgtaatcgtcggctcctgcatcaagtgccgtaaccttgtcaaactcactgcctttggctgtaagcattataaccgggatgtcggaggtggtatctctgctgcgaagctttgaaagcacctgaagcccgtcttcttcgggcagcataacatcaaggattacaagctccggcagattttcggaaacagcacgccagaactcagagggagctgcaaagccttctgcttcatttcctgtcacgttcagcgaatagcatacaagctcgcgtatattttcatcgtcttcaagtaagtaaatcataataactctccatatttataggttatgtatagtatagaccaaaaaaatgatgattgcatcttttttgttgagctgcggatatatttttaatttggagtgtgataaaatcttagatatagagaggggaaagaatatgaatgatatatttacgcagcagcccgatatagtgactgcgggtacggactttgtaataagtctgatggcggctgtttttggatatatgactgtcaggagacatacagacaggaacgccgtatgcaatatgagtattctgatgtttgcggcggtgtttgccgcgggaattgcgggagctgtgcttcacggtcttactgcggtttccgaaagctttgcggcagagcaggtgataagagcatttacggcagcctgccttggaggcatagcggttcctgtcgtgtatatatgtatgtattgcgcttcgggacggttgcacgctgcgaggcttggaagagcggctctgatattgtgggtggcgtctgcaacggctgcggcagtgtctgctgccggaggaaacagggctttcggacctgtatatatttatgccgcagtctgcattctgtttgccgcaggcagcggaatttactgtgttttatcgggaaaggcaagagagatgatatttcttctgatatgtattgccgcggcgggagcaggacttgcagttcagaatctgcttgcagaggggaaaacacttaatctgatattgcagtttaatcattcggggcttgctcatattgcagttatagctgtgctgcctctgacatatatatggtgtaacagaattatatcgagatataaatgaaatggctatttctcatcggaagcaagccatttttttcttgtttcatcacaggaaagctgctctcccgaaatactgatgcagtattctctgcaatagcagacggaacattcgtgtactgtgttttcaagctgaataagttcatctattgtaagcagcttcagtcgtttctcgtaattagtcataattcaaaccctccgttgtggctctttgttaccgccattataccaccttgcagaaggtataatcaatacaaaaccaactgtaaggggaagcggaatgaaaataattataaacaggcgttttgcagaaaatctggttgctttgagattgcagcacggtctgtcgcagtacaagcttgtagagaagatgcagcttctgggaagcactatgtcgagaagcacatattcgaagatagagcttggcgcaggcaatttaaaggtttcggaccttatagcgctgaaacagatatataatgcggactatgcggaattctttgaaggcatcagcatagacgaaaaagaaaacgagtaaaaacagactccccgaaaagtgatatatcggggagttttaaatatgaattaattttctgtcctgccgccggtaccgaaagtttgggtatggtctcctttgttgcagaagtaatgtatctgatatccggactccttgccgtgagcttcctgcgttgtgcgtatgacgctgaatctgcctgcctgaagtttcgtctgtgttccgtcagagtaagtgatggtatcggttatgcctgtccatatgtcatcgtctatatctgctatgtattcttctgtcagcagatactcagtctgaagctccgcatagtacgcgcggacatttgcaatatcggccgccacctttgccttgtgcaggctggaactgaatacaggaattgcgattgctgcaagtactgcaatgacagctattacaatcagcatttccattattgtgaagcctctgccccgtcttttatttgttttcactgcttttacccctgtttaaaaaaattcttttacccttatacatatactaaaaaccgaacacctactgcaacagagtctgtgtccggttatggtgagggtagagggactcgaacccccaacctgcgcattcgtagtgcgttactctatccattgagctacacccccatgttcgtacaacaatcattatacaaaacagcggcagtattgtcaaagagattttgcgcatttatgtgattttttagtcgtacattcagtaatatttcttgctaccggtttgtttacggtatacaattgtatcataaacagacattatgaaaggtacaaaggtacggatatatgactgacggacagaaaagacttgaagaacatatgacaaggactctttacgagaataatgttaatcagaaagatttaatcaacggtatgatgcgcgcggaggcggcaggctgttcctatgaagagggaaccctgtcctttgcctttccggttcagaaatggcagactaacagagtaggaagcctgcacggcggcattatagccaccgcttttgacctgacagtggcggcgcttgcaaggttttatgcaggagcaaatttcgcgccgacagtcagcctggatattaaatatgtaagacctgcaaaagagggagacactataattgtaaccgcccgcagaatttcggcaggcaggcgcatatcgcagcttgtatgcgaagcagcagataaggcaacaggtaaagttattgcaacaggcgcgtctgtatatcttaatattgatacagacagggaacacagataagaaagggattgttatggagtttctggaacttgcaaagagcagatattcggttcgtaaattcaaaaaagagcagataagcgacgaggagcttgcagctgtgcttgaagtggcaaagcattcacctacggcgcttaattttcagccacagaagatatatgtgctcaaaagcgatgaggctgtggcaaaaataaattcattgtgcaaatgtatatacggcgctcccatggtgcttatagtatgctatgatgaaactgtatgctggaggaaccctctgataagaggtcacaaatcaggggtgacagatgtttctatcctctgtgatgaaataatgcttaatgcgtggagtatgggaataggcacctgttttgtgggcttgtttgatgatgcaaagcttcagcgggaatttaatctgcctgagcatatcagacctgtggcgcttctgcccatcggctatccgtcggagacctgcaaacctcttgcgaaaatgcacgatgtgacgaaaccgatagaagaaatggtaagagtgatttaggaggaatacagtatgaaaactatgaaatacactacggcggacggctatacatttgagggatttatgtttcgtgatacccacggacagtgcatcaaggttccgtatgaatacagaggtattgtcaatatgggagataagctcacaaccgagcttggcgatgttatagatcttgtcgatgaggatatggaagtaattgatgatgagatgtatgccgtattttactacaaatataactactgattcggatatagaaactgcatattatcatatgatgcgtactgcgatgtcggtgtaattgccgcttgcggcagagtttttgaataaaagcttgttaatttagcaagatattaatttacaaagcatttttaaaatggtataatgcaatcaatagggttattcgggctgtgcctttcagcctgcttagtccgcttttatatgctgttgtagctcagtaggtagagcact

SEQ ID NO: 2795 - DNA, 1602 bp, Unknown
  16S sequences of unknown bacteria
ggcttttataggcacagtcttttttacgaatatatgaacaccgccgttttgaatatcggcaaattcaaaaaactttatagccgctttaacggcaacatttttgctgtcggtgggaatatatcttgcgtttgaagaaatggttattccgctgtcggtttttgtaagggttactttttcgtaaacggaaaccgactgcataatcatatcaagggtgtggtagccgttttcgtccaagcccgttacatccaaagagagatttactttccgtggtgccaaaaccgtaactttattttttttgccatgttcaggcgatgtttcttttttatacataatacacttccccgattacaaaaattcttcaaatatttcggctgagccgtcacttggcaaatatctcattccccttgtcagtgccccatgagtaatgtctgcaccttccggtgcggcagagcgcttaaactgaccggccacaaattttttgtagaacatacgggccttttctttgagatattccggcgtaaattctcccgcaaaaacttcttgagcttttttaagggcaaccgccggggaaacatttgccacaacaaaacaataaatataaaagtctatcaacttataaggggcgagaatatcttcggttttctgcaaaatttcaccgccgtgaggaatgagttccgggcttaccgggatatttaaaatgccctttaccgcttcttttgccgcctttaagttttcaagccgggtaacataaggcaacattgtgcgtataaccgtttttgaaacgctgctgtttacattgtaacttgcaagccggtctccgccgtaggtggcaaagcccatagcttcctcggaaaggtcgccggttcctatcataatgcccccggtcatattggctatattcaaacagttcaatgtgcgcatacgagcctgaacattttcaaatgtcacatccggggtaactccgtcatgacctatgtcctttaatgcctgtttgcaggcggctgttatgtctatgacctttaaatcaatccccagtgaatcggcaagctgctttgaaaggtctcttgtggtttgggaagtgccgaaccccggcattgaaaccgcatatataccctttctgtcacggccaagcaaatcaaaggcgtttgccgtaacaagtagggcaagggcgctgtccagtccgccggacaggcctataacagccgttttggcgtttatgttgtcaagtcttgcggccagagccaaagtctgtgcctcaaacaaatccaagcagtaatcacggtttgaaaattcggccggtacaagaggattttggttgtactcaattttaaactcaatgtcgtgaaccttttcaatgtcgccggtaggagcaaattttccgcctattttgtagcagttttccgcctgaaggtactgtttgaatgtggctgtgaaaatatcctttttatcgtccacaacgccgataaccggcatgtggaaatccgggtaagaacaatcgccccaaccgcctatatcggctatacagggaacgccgcaggcggcgcttaattcctgcattgccctgtgcagcaacagacgagagccggccacggcaggctttgt

SEQ ID NO: 2796 - DNA, 8701 bp, Unknown
  16S sequences of unknown bacteria
aacttctagcggtttctttccttcatcgctcgttccacatcacgtttcgcggcttttttggccaaatcatcccgcttatcatacagctttttgcctttgcaaaggcccacctggacttttacacgcgatcctttcaagtataaagacaccggaatcaacgtgagcccctgtgtttttaactgtccataaagtttttgaatttcctttttatgcatcaataaccgccgtgggcgaagcgggtcgcgattgaaaatgttaccttgttcataagggcttacatgcataccgcgaacaaacaactcaccgtccttcacttcgcaccagctgtctttcaaattcgcctttccggcccgcaaagacttcacttctgtaccaaatagttcaatccccgcttcatacgattcgaggataaaatagtcatgccgcacctgacggttctgtacaatggttttggtgccagctttgtccattttatctcctcctcccatgatgtgggtctttattgtatcatttctcccgcctttcgtcaatgatgggattcttcctgctttcggcaaaccaaaccatattccgccgaaatacacgtttttcccctaccgggcgaacccattctctttggccacagacagcaaatattccaatgcttttttcacctcagcacagggcgtggccagattcattcgggtgaacccttctcctctggggccgtattcttctccacaatccgttaaaaacagcgcctgttcttccaaaaaagcatgcagctcgctttgcgacagaccgaggccgcgccagtcgatccataaaacaaacgctccttcactttcaaaagcatggacctgtggtaaatacttttccaaaaagcaacgtatcaaccgaatattatccggcacatgaccgttcattgcctgtacccaacgggcaccttcgtcggtataagccgacaacatcgccgcataggacatgggttcaatactaccatagtgatccgcatttccctgaacgataaagctctctcgcagttcccggttcggaataatcagattggcaaaatttactcccgtcaggctgaatgccttgcctaatgaggtggatacaatcgcatgttcccacgcatccggcgcttcactgtacggctggactacatgatcattatatactgtttcggcaaagatctcatcgctgaacaccgtaacatcatactggcgcgccagacgcgctacttttgcaaaatcctcccggctccaaatctgtccaatgggattatggggattgcatagaatcatcagacgattgttcggattctccatgcaccgctctaaactgccaaaatccatttcgtatcgcccatttaccagcttcagaggattatagatagtctttcgcccagtacggtctgccgcctgcttgtaacggtaatatactggcggctggacaatgataccatccatttcatgcatccgatatttttccgccgagccgcgtatcaaaatcgaatttctgtcccatgtttgtccctctcaatcactaaaaacaacattccccaccctttgcagcatcgggcagggaatgttcttagtcgacaggctttacaactcgctgcgtccttccagtgcacggtaaagagttacttcgtcggcatattccaaattgctgcctacaggaattccataggccagccgtgttaccctaatccccagcggcttaatcagccgtgacagatacatcgcagttgcttcgccttccacagtaggattcgtggccataatgacctctttgattttcccttgtccaatacgctgcagcagttcttttacatacagctgatcgggtccaattccatccatcggcgaaatcagcccatgcagaacatggtataggccattgtattcttttgttctttcaaaagccagtacatctctgggatcttctaccacgcagacgacgttttcgtcccgggatgcatcttggcaaatcgggcacagctcattgtcagttaaattctggcagaccttgcagtgcttaattttttcctgcgcttctacaatacagttggcaaaatccaatgccttttcttttggcagattcagcacgtaaaaggccagccgctgagcagactttttcccgatacccggcagacgttcaaaatgttcaattaatcgggtcagcggcaaaacatgatattccatatgtttagaacagccccggcacactcataccgccggagatcttctccatttcttttgtggattcgtcttcaatttcccgaattacttcgttcacagctgaaatgaccagatcctgcaacatttcaatatcttccggatccacaacctccggttgaatggtaagcgctttcagttcttttttaccagtcatgaccacttcgacagccccgccgccaacgcttaccgtatgctctttttcttccagttccgcttgcacgcgggcaatctccgcctgcattttctgcgcctgtttgagcatcccttgcatattgctagcagctccgccgccgtaaccctgcggtaatcttgctttcattgtatcatccattcctttcgtccaattgcttcatctatcacaggcaaaatcgcctgatgacgtcatttttcttctactgcaaccccggcgctttttaccgactttagcagcgtttccaaaggatcttcctctggctttgcaggcatctgcccttgtgcgcggtacggccccagccggtagcgccgaccggtttgtgctaacaacgcatcccgcagagaatccttggcaaattcattctcccggatcaatttgaaaaacaattcgtttttcgcgtcaatcaacatcaaatctcctttttcgtaggcatcagaatttttcagcgccgcaaataacggcggatttgttttcaacaatctgccaaggacctcctgccacttgccaaaaggctgtgcatcggacatatccgccagtacggataccgttgcttttttgatctctgatgcggtctgtatcgcagaatcaggcgccgtttgcaaggattctggcggctgtttttccgctttttttgatctgtccgccgccgtttccgaaaaagaagaggatacggctgaaacgcccttgcgcactgccgcctctagttcttccagccgggtcagcaccgcttcggcagaactgtccatcgccggattgcagatacgaacaacagacatttccaattccgtcctccggtttgccgtacgggacatacgattttgtgtctcctgcaagacggagagcgtatataaaatccgggacagagagaaactctgcgccaacggtttcatatcatctatttcctccggaagagccataatcagctgctccggtttccccaccgttttcaaaagcatcaagtcccggtaaaacaccaccaaatcgctgcacaaccgatccatatccatggatttttcatgcagcgccccaatttgttccagagcagaagcagtgtccttttgagcaaaagacctagccagcgccaaaagatgtccggaaccagccaatccggccgcttgggccactacctctgccgtaacagcgccgccatgagaaatacacagatccagaagagagatcgcatcgcgcataccgccgtcggccagctttccgattaacaaacctgcgctgtgttccagcgcaacgccctccttctgggcgatcttttccaagtatcctgcaatatcttcgctgccaatccgccgaaagtcaaaccgctggcagcgggaaagaatcgttgccggaaccttatgggcctcagtcgttgccaggataaacaaaacatgcggcggcggttcttccataatttttaacagcgcattgaacgcgccggtgctgagcatatgcgtctcatcaatgatataaacccgatattttgcctggcctggtgcaaaataagcgtcctcgcgcagctgccggatattatctaccccgttgttgctggccgcgtcgatctccagtacatccatcacagttccgtcatctattcccctgcaaatttcacactccccgcagggattaccgtcctgtgtatgcgggcagttgaccgcctttgccaaaatcttggagcaggtagttttaccggttccccgagagccggtaaacaaatatgcatgtgctgtttttccggtctttacttcattttgcaaggtacgggtgatatgggcctggcccaccacgtcatcaaagcttttgggccggtattttcgatacaacgcctgatacatcgtctcgctccttctacaacaaaatgcagatatacaaaacagacagggcaccaattgtgctaaataccggttctctcacaagggcacacaggttgactgcggcgcacaaaaacagccgcttaatgctgctcggttccccgcctgacatggttcacagcgccttgtcgcacaggacccgcataccctcatgacagaatcggtatcatcctgtctgtttcattgcttttgctgccggcttataaatgccgcagccatttttaaatggcagtattctgtattcaaccaccgcttggcctttccttccgcaaaaacaaattgctgtacgcagcttacctaaggaacgaaaacatttgtccacaccattccaatcagaaacaccgttgcggcaaaaacggcacaacaaagaccgctttttaggtattatatcgtactttttgcaatttgacaatagcttgaagcggaaaagttatacgactatccttccaacacttcaaatcccatatcgcaaatccgatccgccagatcggcccgttccaactccataccacagattaccaattggtttttatcctgattaaaatcaactgtatccacaccgctgacaccataaagcttttctcttattttctcctgcgctcccgccgccgaaaggccggttacaataaacgtcacacgattttccaccttatatcatctcctttgaaagaaagtattccgccaaaggagagcattcatccaaacgaaaaactggaagaaaaagcgcaggccaattggtcctgcgcttttaaaatttttgactgcttctttaccgtttttctcccaggaaaaacaatgctacagtgccagggccggaatgggcaccaatcgtcgggcctataaaatgaatcaagtgtttctggataccaaaacgcttctgcacttctgcggccacaaactttgcgtcctccagacaatccccatggctaataaagaaaacttcattgtggtaagaaccaatgcgttcctccatcatattgacaagaccaatcaatgactgttttctgccccgtacttttcccaacggaatcagctttcctgcatcatccacatgcaaaagaggtttgatattcagcacagttcccaataccgcagttgtcttggaaacgcggccgccccgatacagatggttcaaatcatctaccgtgaacatgtggcacaaatgcagcttattttcctccacccaggaaacaatctcatccaaagatttgcctgactctttcatcgtaacagcgtaatgggtcaaaagtccctgccccaaagaagcgcacagcgtatccacaactacgacccgcagatcagggtaactttccttcaattcatccgccgcgatcaaagcgctgttatagctgccgctgagtccggaagaaaacgccagatacaacacttcaatgccgtcttttaaatattgttcaaaatagctttttgcctgctccgggttcacctgcatcgtctttacatctgcgccagcccgcatctgatcataaaaagcatgttcatcaatcacatctttatctgcgcaaaaagttttcccattcacagaaaaactcaggcaaagccgtcccagtccatgatttttcaaatattcttcagggaaatctgcattggtatcggtaacgatcacaaattttttctcgctcaattcatgatcctccttgctgtctgaattttgattttttcacaaagaaaactgtttttcatctgccgatcctgtcgacccaaaaggcctgtatcacaccgccaaaaacagcctatcttgtaattaccatttttattttatcatattctctccacttattcaaccgttattgtcgtgttttccctgattagtgccagccccaatccggagagactgtctgccacctgggcaaacagcggcgctgctacccgattgccggactgcccattttctacaaaaactacaatggcaaactgagggtcctcagctgggtaaaacccaccgaaccacgcatgaacaatttcttcctccttttcatcgtatattcctgtttgagcagaagcggtcttgccgcctgctccacctgttttgggtgttgccagctgtccagacccttccacgaccaccgtttgcataaatttgcgcaacaaatttgcggttttttctgaaatcacacggttggcagaaaaagaagtttcctgctgcagtgcgccccccaaataaattccctgtaccagatagggggacaaaagttttccgccgtcagcaattgtggcaatcattttgcaaatttgaataggagttgctgttaaaagcccctgtccaaacccaaaattggcaagttctgctgagttttccagctgctgtgcatcaggcagatttcccgacgcagtctgcagagtatccgccagcaaatcagccttggaaaaaccaaaacgaaccgccatgtcccgcagattctgagcgccaatctgttgagccagctgaataaaatagcagttgcaggagtgtgtaatcgcttgctccatatcgatctctccatgccccgccagctggttgcatttaaaaatctgtccgtttatgtccagccagccgctgcaaacataagtctgttccggagatattccctgctccaatgcagtagcagccactaaaagtttaaaagtggaacctaccgcgtaagcaccaaacgcccgattaaccaacggactgtccggattattcatcgattcggctacattccgcggatcaaaacccggtgcgctggcgactgctctcagaccaccgtcagccaaatccatcactacaatggctccgttcacttcagctccgcttaaaattcgctcacatgcctgctgtaagcctttatacaatgttaaaaccactccatcggaccggttgccctcctgcaaaatctcaattccatttcctgacaacgcacgtcccatagcgtcgatctgataacgaacctttactttttctccaacgctttttaaaaaatcattgaaaatcctttcaatgccggtctgccccacgccatcagcatccacatatccgacaatatgaggtgctgtgtagtccatcgaatagcggtctgggacagaaaaaacttctaccccctctccccgtacggcatctgtattcacctctgtcaaaaagggaactctgctgttcattttttcacgccacaaatcagcggaggcaaactgacttctcagtgtggcggcactttcgttattgggcagtactgccgccatatagtgaaaactgtcattcaccaagctctggccctgacagtcataaatcatacccctgctttgcgaaacttccagcgtataagtactttgctggttggccgcctgcgcaaaatcttctttgcggctcagccaagacagccgccaaatcacagcgctaaacaataaaatcaggacactgaataaggcaacaatccgttttcccattttcccacgctccttacaatctttattctgggcgctggactgggtttcatacgcatatgaaaaggactcttcgtttcaaagtatttttgctttttcggatgatagtttgaaaaggattgtctattctaaaaacaaaaaggagggattaaaatggcagtcaaaacttatggatatatccgagtatccagtgcggaccaaaatgaaatccgccagctgatcgccatgcgggaaagaaatgtaccgaagcaaaatatttatttggacaaacagtcaggaaaagactttgaccgcccccaataccaaaatctagtgtcgcatcttcaaccaggcgatatactctatctgatgagcatcgatcgtctcggccgcaattatgaagaaatcctcgtgcaatggcgcattttgacacaacaaattggtgcagatatttgtgtcattgacatgccgctgctggatacccgcaacggcaaggatcttcttggaacctttattgccgacctcgtgctgcagattctatccttcgtcgctcaaacagaacgggaaaacatcaaaaagaggcaggcacaggggattgccgctgctaagtcacgaggtgttcgcttcggcaggcctccacggccacttccgggaaatttcgataagatacatgacgcatggagaaataaaaaaatgacactttagcaggcagcaaacgcctgcgaaatgcccttaggtaccttctatgccaaagcagtgaaattagaaaaaaggtaaaacaacagcatttttgaaaaagtgtacaaaaggaaaataaagctgggacttatacgccacccaccaacgaaaatgccgtcctggaatacaccggtactgacggcagtcagggaaatttggagtttccctgactgccgtgaaatacgccatcgatgaaaaagggcatacttatgacgatgatggggatgatgaaatttccaagacaacacaagataatccagaaaccggcgcaaaggatttggtaaatg

SEQ ID NO: 2797 - DNA, 16849 bp, Unknown
  16S sequences of unknown bacteria
ccgtttccgaacgggaaacggctctttgcgttcagacggcggcgacgtccagacgcttgacggaaagcgtggtgttggcgttgccgttcactacggcgttcagacctgcgggcagggtgttgagcaccgtcagcgccagatcgagcacgctgcccgcggcgaggtggacaatggtggagcaattgaggcgaccgtcataggtgagggcggtcgtattgtcgattgccagagtctgcgccgcgcgggtctgcgtgatcggcgtgccgttgtttctcaccaccgccaggatgtccaccgcgcggttggcgttgattaacagattgtaattgatttcgtaatcgccttcattttgaatggtgagttgattggcggaggcggttacgttctttaaaggcatcggggtgttcagttgcagctgcacatacgcgtttaccgccgtgaaagcggggagctgagtggagctgttgtagagtccgccgtatgcggcaaggcccgcattggaggtcccggcaggacccggttgtccctggggaccctgggggccctgaggacctgtgaatccgcgcggtcctctcggtccggggatacatacgcagcagggctgcgggcagcagcattggttccaacaaggaataccgaatgattcgtacatagtgttttctcctttgtagggtataagcgagagtcgctcatttcagtatacgaaatcgtgagaaaagtggtgagaggcttccgttttcgccgcttctccccgcgttcttttacgggttttccgcgtttttgtgaaaagttaagatgtttttttgtcgtaagcagggtatttcttagttgaaatagaagataaaaagtgatataatgaggacaaggcaacgtttgcgaaacgcgcttttataaaaatagaagggaaagcgggaggagaatcggagtcgacggagaaaagctcaaagggaaaggactttccgttttaaggactgttgcatcggggaattttaattctttgccgcggcgaaacgccgaattgccggagataggtacgggatttttgcagctgtccgccgcagtcggaaaaggaaaaacggggaaaaggaagattccccgccaaacgggaaaagaaggaactcgtaaaatagagatgaaacgaaaaagcaaaattgaaaaatggattctcgatccttcgttcgattacgccgaaccttggttttattcccatacgtattccctccgctgcgaactcggcataggggaaagccggcgggaatataggaaaaagacgcgcggacgggcggaggaaattttcgacgttctgttttgccgcggagtggacgccctgtttttggagtacgccgtggaggaccccacgctggcagaaggaacgccgaaacaaatccatcttgacctgatgacgcgcgtggaaaaaaagagtctgaaatggttttacggctggaaaaaatatccccatcggctcgttttaaacgtacccaaaagcgacgacgaggacgttcttcgcgtcaatcgtctggtctgctatttcgacaaggcggagcggatcgattttaaaaaattggtcgtaaaaaatatcgataaaaatatttttcatttggtatcttttgaaaacgagtgcatcttttccgtttatgacgacaggggctgcgacatcgttttcgcggacaaggaaaaatatgcggaatattttgaaaaactcaacgaatacctgttgccttacgacttaaagcgcatgaggcggatgcgggaggaaaaaatgtttatcgacgacgtccggcgaaaaaaactagggggaacggcatattttgaatttcagttctgcaaaaagacggggagcgtgagagaactggcgaaaggaaaaccgtatcgtccgtggctggaagactccctctatttttatgtggattacgacgagatctttttcagagaatacggggaatatttttcctcgccgacgactccgaacggagagcatcgattcgactattacggaatcaattattatacaaaggaacaggcggaagatattttaaaacgcatcaaagcggacgcgccgcccgaaagtccggccttgatttcctggctggaaaacgcggcgcaagaatataacggattctttcttttgggaatctgacgaagcggcggcttcgctttaatgccggagggaaacgatgaaaagagatctgaaaatttttacggacaatatagaccccgaagcgacgaatcagatatatacgctgatgaatcaggcgccttttacgggggaaaaggtgcgcgtcatgcccgacgcgcattacggggctaactgcgtcgtcggctttacgagcacgctgggcgataaaattatccctaacgttctgggcgtggacctcggctgcgggatgtttacggcggaattgggcaaagcggaaatttccttttttgaactcgacaattttatcaagtcgaaaattccctacggcagcggttacagaaaagaagttcatgcggaagaactgatcggcgaactgcattgtttaaacaaacttcgggatatggatcggctttacggctccctgggaacgctgggaggcggaaatcactttatcgaaatcgacgaggacgaagagaaaaataaatatctcgtcgtgcacagcggctcccgcaatctggggctgcaagtggcgaagatatatcagcggctcgccgtggatatctgcaaattcagcgcgcagaaagagcgcgaaaaagtggtgggggaatggaacgcaaagggcaggcccgccgaaattcccgacgcgatcgccgcggtgacggcaaagtacgcctataagaccaagattcccgccgatttttgttatctggacggcaggaaaatgcaggaatatctcgacgacctcaggatatgtcagcgctttgcatccctcaaccgcaggaaaatcgcggaagagatcattaaatttctcaaaattcataaatatacctccttcgaaacggtgcacaattttatcgacgaggacaacatcatccgcaaaggcgccattcccgcgcacgcgggacagcgggtgctgatcccgatgaatatgcgcgacggatgcttaatcgccgtcggaaagggaaacgaggactggaactgttccgcgccccacggcgcgggcaggctgtgccggcgcagcgaggcgaaacgcctctttaccgtggaggaatttgaagaaacgatgcggggcgtgtatacgacgacggcaaacgaatccactttggacgaatctcccatggcctataaacccatgcgggagatcgtggaactcatctcgcccaccgtagagatcgaacggatcatcaagcccgtctacaacttcaaggcggcagaatgatttttgcaggcttgaaaaggagagcgggcggccgaccgagcgcgggaaaattaaaacggcgtcgagccgtttcgcgaaagaataaaataaattgaaaagagagaaaaataaaagacaactttgcggttttttttccgccgtctgcctttttgaaatttgtgcggcgggggccgtacggctgcgacgataggaggtggaaaaccgactgcgacgatacgaaacgggaaataggagagaagcggccgtttgcggcacataattattcttcggaaagcggatactgttttgtatggaaaatgtaattagagttttggtattttcgctgtcctccttcgcgtttcttttcatcgtcaccaaagtgctcggcaaaaaacagctggcggaactcagcttcatcgattacgtcgtcggaatttccatcggctcgattgccgccgattggagtacggaaacggagcagcctttttatcattttctcatcgccatttctgtctactgccttttcagtcttcttctcgattggctggaacgcaagcagcccttccgcaaattcctcaaaggggaggtgctgacgatcatcgaggagggcgaattcaattacgagaacctcaaaaaatccaagctggacgtggaggacgtgctgggaatggcgcgggaaaaggacatcttcgacgtggaggatatcgcctacgcccttttcgaaacgacggggaagctgagcatcctgcccaaaagccccaagcgtcccaccgtcatagaggatttcgatattcaggaggagccggcttctttgaccgattacgtcatcgtgaacggaaaattgcagtatgaagtggtgcgggaactgggtatgaatgtggaaaccctgttcgacagactgaaaattcggtctaaaaaagatctggaaaactttttggtggtttcctacgacaaggagaaaaaagattttctcgtccatcgcagatgagcctttaagacaaaggggatagaggagaaaaggcgcggcttctttttcaagagcgcgcctttaaaaagccgtaacggcgaaaaggagcctgacttggaaagtccggctcttttattttttcgcggcgcttgacaaaagggattttttatagtaaacttaaagcgcgtcccgcaaaaaaagcgggcaagggagcgaggcggcgttgcggcgcgaacggattgcgcctctgccgcggccccgcgctttggaccccgggggagaaagatgcgaaaaagagcgcgcttacggcgcggctttaaaaacggcagatacgagagagattttgttcgattgcgcgctttctcctttgccgaaaacagacgggaggagtgaaaatgccgttgaacgggaaagattcggaaagacgttcgggagagaaaaagggcaacggggcaaatcgccgcgaaaggccgccgcgggaggcggacgagggcgaaaaaaacgggaagggacacggaaggaaaaaagcgaacgcgggcgccgtcggaagctttaacggcagagccgataaaggggggagcgcgcgaaggagctatacggcggaatacaaggtgaaccgcagcggcgaactgctggatttcctgctggcgaaatgcgatacttcccgcaacaacgtaaaaacgctcttatccgggcatttcgtcctcatcaacggcagcgtcgtcacgcggcacaatttgatgctggcaaaggacgacgaggtgaaaatttccaaatatccgatacgggaaggggaaaagggggacagggagaagccgaaacggcggttttcactgaaaattctgtacgaggacgacgattttgtggcggtggacaaacccgcgggcttgttgtccgtggagagcgacaaagaatcgcagtgcgcgttcgcctacgtattggaatatctcgcggcaaagggcgcaagaccgtttattctccacaggatagacaaggaaacgtcgggagtgctgatatttgccaagaacgtaaaaatacattccatgctgaaaatgaaatggaacgagtacgtaaaaacgcgggagtattacgccgtgatagaagggaaaatggcgcagaaagagggcacgatcgtttcttttttaaaggagaacaagaacaacctcgtgtattcgacgcacgacccgtctgggcaaaaagcggtcactcattacgtttcggtgagggaaaacgcgcagtattccctgctgcgcgtgacgatagacacgggcagaaagaatcagatccgagtacagctcaaagaagcgggacatcccgtggtaggagatgaaaagtacgaggcgtcgaaaaatcccctgggcaggctgggactgcacgcgtcgaaattggagttttcgcatcccctgacgggagaggaaatttccgtcggctcttccctgcccccctcgtttaaagggttgttttaaaatttaaaaaagcggaaataaaccatcgaccgccaaagaaacggcaagtcgagattttggaaagtttcgcgctttgacggcgcggcgctgccgtgcggcaaaaagcaggaaaaatgtaagagaaagcgcccaaaggaaaaaaaggcttctgtccgcgggaatattcttccgaaaaaggacgacggaataaacgacggtatccgattttataccgccaaaaagtcccgggccgtaaaatcccttataaacatcgattttcagcggattgtgccatccaaaacaataaggattttggacgttttggcgctaaacaaggtgcgcggctgtgcaaacccgatttgcgcgggcataggggaagagccgagcaagggcgggaaattccttaaatacaggcttttttgcgcttctataaacacctgcaagaagttataacgattttcgtcgatagaatctataaaaactcaggaacgattctttttaaagcgaatctatgatacaaggagtaaaactatgccgtttatcgattgtaaactcacgctcaaactttccgaagagaaaagagaagccgtaaaagccgagctcgggcgcgccgtttcccttctccataagagcgaacgatatctgatggtcggtttcgcagaggggtacgagctctatatggcgggcaaaaagctggaaaaaggagcgtatgtttccgtcagccttttcggaaacgcgtcctcttccgattacgaaaaaatgacgggggtgatctgcgaggttttcaaagaactcctcgacattcctccctccgcggtctatgtcacgtatcacgaagtgaacgactggggctggaacggggcgaatttctaaattccgttttcgttttcaaccgccgttttggcggcgcggtaaattgtttgaaaaaagcgggaaaaagcgtcggcgcctttcaaaaaagaggcgcggggctgcgcgcaacttatattttcgaaggtgtattaaagattgtgcctggcgcgcgtgagccgtccgccgcgcaaatggcgttcctctaatcaaattcaatagggaaaaaggaaaagaactatgaccattcatcacgacaaacttgcctacggcaaactcgcgtcgcaaagagaggatctgtcggaagaaaagctgctcgaaatggcgcgccttttagcggagtccgcgcagtacgaagaaaacggggaacaggcggaaggagcttggaaagacgcttctcgtccgacggaaaattgtccggacggaaagaaacgggaactttgaaaagaggacgcgtttccccgtcggacacatcggaaaagacattttaacagggaggaaagataatgatgtttatggaggaaaggggacgcatttacgccgcggacgaaacgggcgccgtgactgcggaaatcctctttaacgacgagggcgaggacgccgtttgcgtcgtgcgcacctatgttgccgaaagcctgcgcggacagggaattgccggaaagcttatggaagcggcgtcggaagctgcgaaaaagcgggggaaaaaggtcgtcgcggcgtgctcctatgccgaagcctggctgcaaaagcatcccgaatataaaaaataggcgaagcgaattttcgcaaatacaaccggaccccctgaaaaaggcggacgcgacggcgctcggcgaattgccgaagcgaaacggagaggctggattttcgtcctcgatgagaaattgccatttagagaaacggaaacaaataaaaagacggagcttgggcaggctccgtctttttgcgcaaaaggactctcttttttcgcgggcggacgggaaaagcccgccgcaatccgcgaaaacgtttcccggcaattttttaagcggggcgtggagagcatataggggagaaaagcaaagggaatcttgggagaggcgccgcgggaaaagaaaaacgaggaaaaaagaggctttcgggaggaggatcgcggagaaacaaggcaaaggaaaaaatctttcaagagaacccgaatggaaagaaaaataaggggcaaaggagtttttttaagagtcgtttggaaaaagcggaaggcaagggcagggaacgcttccccaagggacataggaaagacaaggacaggtgtttgacgtaagggaagcgttgcgaaggcttgtaaaaaaggatatacgaaaaaaaggggaacctcgcaggaagggcgtcgggaaagaacaaacaaagacggtgggcaaggagtttatcaagggaaggcaaggacttcaaaaaagaaaacgtttgaaaaatcagaaatcgcgaaaaagttttacggtctgcggacgccgaggatatgcagacagcgtatgcgttgataggaataggaggagagcggcttattgaaggcgtcgtaactgtgcgccgctacgagaggctgcccgcgcgaaaagccgcacaccacgggcgtgtgataaaaatcccccgtcgctctcccgagttgcaccaaatccccgatttcgagttctcccaaaggcacttctttcgcaaacggacccgcgcctttgttgtccacgagaaagcgatagagatattcgacgcccgtccacgacgccgttctgttgtcggcgctgatataataccaccccaagacgggcgtatagttcatgacgtcgctgcccgcgtacacgcactgcgatgcaaaattggtgcaatcgccgccgaggcggctgaaatcataataagcggggttgcgtccgtacgcccatttgcgggcgtactccaccgccgctttgcggtcataggcgaccgttttcaaaccgttgatgacttcttccataccgtatttttatgctcaggggacgaaaaaaggtgccgaaggacagactttcggggaaagaaagcgcgattcggagcgttttttccgggaaaaacaatattttaaaattggaccttgacaaatgctccaagatgcgatacaataaacccgaaggacgaaaaagcgttgtcggggagagagcatggctgcatacgaagaggaagagagggcgtacgtcgcgggcaaagatcccgttatgaaagagctggtggagcgtttcggccgcttggagatccgtgtgtcgggggatatttttgccgacctcgtttccgatatcgtcggacaaatgctttcgaatagagtcgcggaggtgatcgtaggcagactgcgggcgctggcgggtggactgacgcccgaaaaattgctcgcaaagaccttggaggaaataaaaaactgcggtatgtccgcaaggaaggcggaatatattttagcgctttcccgggacgtgaaagagggaaaatacgacttttcccgtttggactcgatgacggacggagaggcgatcgcctatctcatgaagatcaagggcgtggggcgctggacggcggagatgatcgcggaattctccctgggcagaaaggatattttcagttacgacgatatggccttacgcaacggcatcgtcaaggcgcacggctttaagacgctgagtaaaaaacgctttgaaagactgcgcaaaaagtattctccctatgcctccgtcgcttccctctattactatcggctgaacgacgaaaaatagggacgtgacgcgagagaagaaaagacaataaaaaggcgccgtttagagcagaaacggatggaaataaggcttttaagagccgggcatccgcgctgttcggataggaaagtccgcttttgagatggggtgcgctcgctcgttgcgtcgaaagcggggttggtcgctgccttttcgggcgacggcgggaaacgcttttttgcgggataaaaatggttttttaaggcggtcttgaagagcggcgacaagcggcaaattgccgcagaggggagcggaaagcgcaaaggagtataaaattgaaaaggcaggagatcgcggcgggcagctgggtgacggaaatgaacgcggggtggtattacgtcgaaaaaatcgtcgattattacgtcgtggaaaatttaaatgcggtgcaatttcaaggcgaagcgccccgatttgtattgaggcgcacggcgctgatgaagcagggatttacgggaagcggaaaaccgaaaaagacaatcgtctgttccgcctgtccgacggccttgtgccgaccgctcgacgaggaaaaacgcagggcggcggaagatttttttcggcaaaatccgtccgtatgggaaaaattgaaagaagcgcccctcgactgcctctctctatacaatctttcccttcgcctgaaagaggaggagtttcccctcctggaacgagtccttgcagaactcaaattccccgtgaccgcaagggaagcaaaagaatatcttaaaaagaagggtttttcatccgttctgccgacgaatggcaccgtacagctgatcaaccataactgtctgcaaaacgcgggccgggaagatctttatacggaatatgagattttaaaattttaattttgaaaaaacgtcttatcaaaagagcgttttaaaaggaaaaaaagcgggcaaagagcgggatatgcgttcgcccgcatatgcgcgcggggaaaaatccgaaagggcgcgcgaaggggaaaagatgaatagttttaaatgggacttcaagccgaaaaaaatagtcggggagctgaacgcggaaaaattggaagagctccttttcgattatcttgcctcgctctatcagaacgggcagatctgccgcgatttcgagctgataaaaaaggacggctcgggcgggtacgccgcctacgccattttgcccgaggacgacgccttcgacgaaaaatacgcggacgaagccgtgcggaagtcctcgaaaaaaatcggcgcgtgtttcgacgtttccgtttcttgtttgggagaaaatatggattacgacgacgtttgccgctgcgaaaaaccctccgcctacgtactgtatacgatggggcggcgggaaagccccgtgatgtgtctgcgctgcggggattccgtgccgctttacaaaattccgatttcgaacgactccgaccggacggaggattgtaagcgctatcgggtcttatggtggcaggaaacgcaccgcgcgacggacaccttatggctcaacagcctttccgaccgttttacttcgcggcagctttccgatcccgcttctcagctttcccgattagggctcgaaatttgcgaaggaatagagaaaaagacaggcatacagactttttactatttgcattacgacggtatttttggaaaaaaattctccaaagtttgtccgaaatgcggcggggcttggaaaaagatcgaaagcgaaagattcgattatgtctgcgaaaactgccgcttggcggcgaacgatcccgataacacggtttggagcaaagaaaagggggaaaaagactcccgcgagcgcaagcgcaacgaggaactcatcgcccgcgcgctcgaaaacgcggaaagggaacaaaaagcgcgggaggaatgaaactctaagccgcaaacgccgccgattcggggagcgcgaatggaaaaatatcgtttggcgcgtatcgggtttttcggcgggggaagcgcgaaaatcagcaacaacggcgcgggaaaaagagcatttgggagataaaaaatcggataagacgtccgtcttatcgaaaaatttgcaggaggaaaaaaatgaaaagatttttatgcggggcgacggcgtgcattcttttggccgggttatgttcctgttcctgggagtctaaactcaaaaatatatcgaacgacgtgaacaattacgcgatgtatccgttttcccttaaaacgggagaaaagcgaacgttcgacgtgagggacatatttaaggacagcggtatccgcttcgagagctataaaatcgtgacgaaagaaggcggaaactataaggtgaagggggacacgatcaccgccgtggggacgggcgcttgttccgtcggggtgtatctctattccaaagaggacgacacttgctatgccgcgtccctgggcactttgtattcctatgacgaaaaagattttacagaggtgaaatcggctgcggatttgcaggcgatggagctggacaaagcgggaaaatatatcctgaaatcggacatcgacttatcgggcgtggagtggcagcccgtcggcaatctgccctccccggaaaagccttacgatccctttatgggtatgctaatcaatccggacggctatcggataaagaatctgacgatttcttccgcggagaatatccatcagggggtttacggcggttgcgagggaggactgttcggctccatagaagactcctttatcagcggcgttaaacttacgggagtcgagatcgacatacgcgattttttgggggaagggctttcgggatcgggctcgtacgcgggcggcatagcgggcggcgcgttgaattgttttatagaaaactgcgaggtggaagggaatatcgccgccacgggatttttgggcggcatggtcggatctgtgtcctggggcagcatcgaaaactgctctttttcgggaacggtgacgctcgacggggacaaagcgcaggatgaggagcgctggtatgcaacgggtgcaggcgggattttcggctattgcggaatgcctcctttcttcggtaacattcgtttggggagaatttggcaatgcaaggcaagcgggaaaatttccggtttcagcaacgtcggcgggatttgcggctatctttgggggaaggacaaaatagaaaagtgcacctttttgggcgagctgtccccggctcagcgttcggggcagatgtacggagtcgctcaggaggacggacggtaagcgccccgcaaagaggaatcccgatagggaaaacggattccgaaaacggcggcaacgcctttcgccgcgcgttcgccgtttctctccaagagcaaacgcggctatttcctgtccgcagttttttaaagggcgcccgcttgccgtaaaagcggaggaaaagaggaattttttgcgtcgaattagaaaaaataatcgagggggaggcaaagacaggcggtttccgctatttgacaagaggggcgaaaagtgttataatatagggaagaaagcgcaaacaaggagcgaatagtatggaaaataaaatcgtatgcaattgcaagcaggtatccgttgccgacatcgaaaaagccttacatacccacgactcgttcggcgacgtcgacagggaattcgaggaagtgcagaagctgacgcattgttccacgggctgcggaggctgtcacgataaaatactcgacgtcatttccgaactgatgaacggctgagcgctcgggagaaagggcggcgacgctttcagggcggggcaggggcttccgtcggaaaagtcggaaaaaaaccgaccggaaagaaaacgctttcggtcggttttttatatggcgcggacaaatccgccgcgccgaaagacagaaaaaattaaaggacgagggagggcgcggcatagacgcgcgctttcagctcgttatccagcatatacaatccctttgcgtcggagccgaacaactgatatttggtgatgagatcggaagcgttcttttcctcttcgccctgctccttgacgaaccaatcgaggaactgcatggtgcggaaatccttgacggaataggcggcggcgtaaatatcgttgatcagcgccgtgacgtatttttcgtgcttcaagccttccgccaaaatgcccgagtccccctcggcgtccgtcttgggcgcctccaccgcttccagcgtcactttctcctcgttgttgagcagaaaacggtaaaagagcatcgcgtgatcgcgctcttcctgcgcctggacttcataccaatgcgcaaagcccgcaagtcctttgcgctcgaaataattggcgaattcgagatacagataggcggaataaaattccttgttgatttgtgaattgagtaaggttgctacttttttatccatgatgttatctcctttctctctatatataccccttttgacaggtaaattaaccgaagtgaagaaaaaagttcgaaaaatctgcgttcggttttaaaaaaatgtaaaagtatcttgaaaataaaagcgctacgtgatataatagtaaaaaaggcttccaaagagagagccgcctatcgctgctgcgtgtcgcctacgatcttggggggcgataggaagggaaaagcgccgaaacgagtgcggctatgaattgttgtagaagtgctttttgaaagcgtggaaaaaacgttgaaacgagtgcgtttttggggcgtcggaggagtatttttttagaagcgcggaaaaagcgttgaaacgagtgcgtttgtgaattgtcggaaaagtacttttttaaaagcgtggaaaagacgccgaaacgagtgcggttgtgaattgttgtagaagtgctttttgaaagcgcggaaaagcgaagcggaacgtcccgcgggctgcgcgttcctcctgcgcgtaccgtttggcaaacactttcagaaaacgggcgcgggaaaacagacgggcgggactcgatggcgatgggggatacggcgatcgcatctttgcgcggcgttcccgccgaaagatcggataagaagtgcgcgctccgcgggcagaggcgccgtcagctctatctctctcgccgtgaaatatcgcccccgagccggctaagagcaaatggcggcgtcggaaggacaagcggtagtcttttttcggttataaaaagaagccaaaaaccgcaaggcgggaaaaggggagaaagacgaaaagtttttcgcggggcggtaagccgtcgaacgattcgctcggataagcctttcagggcggatactttcgggcaaaaaaattcgtttttttgagccgggagctttacgggaatagccgcccgacaaacgccgaataagcattaaattgcgacgaggcgggaggttgtccgaatgccgacccttccctggaagaatgcgcgtaagaactataaaatcaattcatggatggaggaaaaaagaatgttggaactgcctgaaacgctgaccgtggcgcttctgcttcgggcaagcgtctggaaagcgttggtggcggaggtgagaacgccgacgaaaccgcataagttttgctggttttcggaggcgcccgaggcttttgaagaaaaattgaagggaagcagggtcgtgaccgcggagggattcggcatttttgcggaaatactgttcgagaacggatacaggctttgctttaacgacggcgtgaacgtgcgcctgctgcatttggaggaactgccgaaggattatcagctggcgatcgtctttgcggacgggcgggcgctggtctttaacgtcgccatgtacgggggaatttacctccatcagggggatttcgacaatccgtattatttgaagagccgcgcggcgatctctcctttcgacagggaattcgcgggatattatcgcctgatgttgaaggcgagcaagccctccctttccctcaaagcgtttctcgccgccgaacagcgttttcccggcatcggcaacggcgtcttacaggatattctcttatcggcgcggttgaatccgaggagaaagataggcggtttgacggaagaggagggagagagattgctgacgtccctcgtcgcggtcctcaaagaaatgaccgaaaagaggggacgggatacggagaggacgctgttcggggattggggaagatacgaaaccaagctttcgaaaaagaccttcctctcgggctgccccgtctgcggggggcaaatcgtcaaggaaacgtatctcggcggcgtggtgtattattgcccgcactgtcagcccctcggaaagtagagaacgcctttccgcaggcgcggacggcaaaaaaagataaaaataaacggaggcagtttatgaataattttgtatacgatattcccaccaaggtgtatttcggagaaaatcagctttgccatttgggcgacgagctgaaagcgtttggcaaaaaggtgctgctcgtctacggcggcgggtccgtcaaaaagacggggctttacgatcgggtgatcgccgaactttgcaaggcgggcttggagagtttcgaactcggcggcatcgagcccaatccccgcatagactcggtgagaaagggcgcaacgctttgcaaacaggagaagatagacgcgatcctcgccgtgggcggcgggtccgtcatcgacgcggcgaaatttatcggcgcgggcgccttttacgacggcgatccgtgggatctgtccacgggcaagggaaaaatcaccgcgtgtcttcctatcgtgacggtgctcaccctttccgcaacgggcagcgaaatggatgcggcgggggtcatctccaatcttgaaaccaaggataagatagggcggatagacccgcatttgcagcccaaagtatccttcctcgaccctacgaacacctatacggtgagcgcctatcagacggcctgcgggtccgcggatattctctcccatctcttcgaagtctatttcaatatggaacccgacctctatatgctggactgcgttatggaagggctgatcaagacggtcatcaaatacgcgcccgtcgccatgcgggagccgacgaattacgaggcgcgcgccaatttgatgtgggcgtcctcctgggcgatcaacggcttcatcaacggcggcaaggatttggaatggacctgtcaccccatcgaacacgaggtgtccgccatttacgacattacgcacggcctgggacttgccattctgacgccgcgctggatggaatattgcctcgacgaaaccaccgtttcgagataccgccaatttgcggtgaacgtgtttggcgtcgacgagaaggagccgcctatggcggcggctaaactcgccatcggcaaactctctcactttctgttcgatacgctgggactgaaaagcagctttaaagagctggggatcgacgattccaatttcaagctcatggcggagaaggcgtgcggaggggaagccatccacggctttaaaaccctgacccccgaggacgtggaagccattttaaaaatgtgcctttgaaccttgggtctaactttgtaaaaacgaaagaaaagaccgtcgcggcgagcgccgcggcgg

SEQ ID NO: 2798 - DNA, 3864 bp, Unknown
  16S sequences of unknown bacteria
taagctgagcaagcgtctcggctgcgaggttgttgagatttctgccctgaagggtaccggtatccagaaggcggcagagaaggcggtatccatcgcacagaagaagaacgcattccattccgtacatgaatttgcaccggaagtagagtccgtgatcgatcgtgtagcagcaaagctgaacagcattccggaggagcagaagcgtttcttcgcgatcaagcttctggagaaggatgacaagattcaggatcagatgacatctgtcccggatgtatctgctgagattaaagagcttgaagataagttcgacgacgatacggagagtatcatcacgaacgagcgttatgtgtacatatcctctatcatcggagagtgtgtgaccaaaaagcacggaaaagataagctgaccacttctgataagattgataagatcgtgacaaaccgctggctggcacttccgatctttgcagtcgttatgtacatcgtatactatgtatcggttacgaccgtcggcggcatcgcaacagactgggcaaatgacggcgtattcggagatggatggttccttgcaggtgttggcagaagctcctttgatggagataccgaagaatttgacaatgcatctgcaatcgtaaatgcatttgctgaggatgctggtgaggatagcgtcgtggaagctctggatgcagagtcagatgactttgacgcagatgcggctaccgcagcactgaaggagtttgcttcgaccgtttctgaggacgcaagtgtcacttataccgtagaggatgaagagacactcgcagagagcgaggagactgcgaccggtgcagatttcgcaaaggcagtcactgttatggagaaatggaactgtgaagctccggatccggcagatggctatggcgtatggatcccgggtatcccggtactgcttgagaatgtactttctgcagcaggtgtatctgacggatggctgcatggcctgatcatggatggtatcgtagccggtgtcggcgcagtacttggattcgttccgcagatcctgatcctgtttatcttccttgccttccttgagggctgtggttacatggcgcgtgttgcctttatcatggaccgtatcttccggaagtttggtctttccggtaaatcctttatcccgatgctgatcggaagcggatgtggtatcccgggtatcatggcttccagaaccattgagaatgaccatgaccgtaagatgacaatcatgaccacaacctttattccgtgtggtgcaaaggttccgtttatcgcaatgatcgcaggtgcgatcttcggcggcgcatcgtgggtagcaccgtccgcatatttccttggtatcgcagcaatcatctgctccggtatcatcctgaagaagacaaagctcttctccggtgatccggctccgttcgttatggagcttccggcttaccatctgccgactgtaggcagtgtacttcgcagcatgtgggagcgtggctggtccttcattaagaaggcaggcaccatcatcctgtgctctactattgtaatctggtttgcaacttactttggagttgtagacggcaagttccagatgctctccgaggatcagatcgattacagcatccttgccatgatcggaaacgcaatcagctggctctttattccgcagggctggggcaactggcaggcagctgtggcttctatcacaggacttgtcgcaaaggagaacatcgttggtacacttggtatcctttacggtggcggagatggaagtgtttatgcagagatggcttccaagtttactgcaattaccggatacagcttcatggcattcaaccttctgtgtgcaccgtgcttcgcagcaatgggtgcaatcaaacgtgagatgaacaacacgaagtggttctggatcgcaatcggatatcagtgcggtcttgcatatctcgtatctatttgcgtagcaagaattggtatgctcgtaaccggtgcaggcttcagtgtatggacgatcgttgcaattgcaatcgtgatcggcttcctgtacctgctgttccgcccgtacaacgaggcaaagaccctgaagatggatgtaaatgtttcaaaagcaaaataaaaagcaggattaaggacgcatagccggtgcccgttacgcgaaagcgccggggccggctattgaccgcttctggtatactggaaaaaaggcagatatcatggaggtataatatgggaacgattattgtaggacttgtgctggtggtgattgtcgggctggcagtacgcagtatggtcaaggataaaaaggcaggaaaatccattcagtgcggcggcgactgcaagcactgcgggggagggcattgccactgagcatgaccacgatggaactaacatttccggaggaggctgcagatattgaacatcacagaccgagcggattcagaagaaaacatccgttatgagaaaacaaaaatgcaaagggaacagatcctgaaccgtctgcgggagcagggctgccggatcacgaaacagcggctgacgctgctggatattatattggaagaagaatgctcctgctgtaaggaaatttattataaggcttccatgaaggactccggtatcggaatggcgacggtataccgtatgatcaatatgcttgaacgcattggggcaatcagccggaagaatctttaccgcatatcctgtgacaggcagtgcgatgtgaaggaagcttatacagtagaactgagtgaccataccatctgccaggttcccccgcacatgtggaacaacattgtccgggccgggctgaaggagtatgggtatatcgcagaccaggaggtggctcagattatgccacaggcttgcgaaaagctttcataatgagaaagtttatcagtaaagatatataagcttgcaaaacagaaaaaggttgattataatactcggaagataaaaacacggaatgcaaaggcagtccgtgtttctaccatatacattacagaggaggaatttacaatggatatcaaagatgtattaaactggaagaagtcaggactttttgcagcaggcgtgctgttcggaacagctggtatcaaggtactctcaagcaaggatgcaaagaatttctatactagctgtactgcagctgttcttcgtgcaaaggactgtgtgatgaagactgccacctgtgtacaggaaaatgcgactgatatttatgagagtgcaaagcagatgaatgaggagcgtgcagcagcagaagaggcatttgaggatgtagaggacgacatcatcggaggcgatttcaaggaagaaaccgaggaagctacggaagaaacagcttcggaggaaacaacagaggcagagtaagcgtcatctgttctaatgtatatttttatcgtaggaagcgacaggggtgtcatgtttgcagcatggcagccctttttaagcgaattaagcaagtcataatgaagcgggtgcgtacatccgctttgatacaaattaggaaatttcagatacaggagtgataaattttgaagtttcagattaaacatgagatgaaagggcggatccgtgtacattttatgcagaagcgcatgacttatacacaggcggatttgcttcaatattatttagagtcactggatggcgtggctgcagtgaaggtgtatgaccgcacagcagatgccgcaattcagtatcagggggcgcgcacagacctcttgaaggcactgcagcgttttcattatgaagctgtgcaggcaccgagtgcggtgctgacaaattccggacgggaattgaacagcaggtatcaggagaagctggtcaataaggttctgtttcattacggaagaggactgatccttccggctc

SEQ ID NO: 2799 - DNA, 11027 bp, Unknown
  16S sequences of unknown bacteria
cgtagctttgcttatcggcaccacctttgcatggttcaccgacacggcaagcaccggagtcaacaaaattcagtcgggaagtctcgatgtcgagcttgaatacagcaccgacatggtcgagtggcagcccgccgcaacctcgactaagcttttcagcgacagcaccctttgggagccgggcgttaccgaggttgtatatctccgcgttaaaaatgcgggaactcttgctcttaaatataccatgggacttaattcccaggtcggttttgcaaacggcgtgaatgtcaacggcgacacctacaacgtgggcgactatcttaaaatgggaaccgcaacggttgccgaaaagctcgccacccgcgaggaggcttgggcggcggttgcctcgtcggccgacaaaatcaaaaacctaaagccctttgtggagggtatgcccgtccttaaggcaggggagtccaccgctcccatggctctcgtaatctatatgcccaccgaggtcggaaacgtagccaacgcaggcaccaaagcctcttatgtataccgtctcggcgttgacgtttatgcaactcaggcggcggttgaaagcgacagcatcgacaatacatatgacgaaaaggcacccaccaagttcaaggccgtgtcctcttcaagcgagactttggaggttaacgaaaatattcaggcaaacggacgctacggcgttgttcagaccgaaagaaacgcaaacatcacggtaaatgcggatctctatgccgtctacaccaagggcggcgggctcggagccgcaatggcggtcagcgccgcgggcaacagcacggttacccttaacggcggcgattacagacaggtgggcgttcccgaaaacgacccctgcgaccttatctacggcgacggaagcgctcagatcttcatcaagggcggtaccttcaaggcggctcagcccgagcgcactctcaactgcaaggacggctcaagcgccaagatcaccgtaagcggcggttctttctataaatatgatccctctcaccccaccctcggcgacagcgaggtcgttgtggcggcgggttatcatgtcgagcaggacggcgattggttcaacgtcgttgccgactgacgcaaaatcataacggataagacagggtttcggccgattttcgaccgattccctgtttcttttttgttgaaagcttaaatgaaacgtgataaaatggccaaaaaggaggggtgagcatggaacccgttcaaatgtcaaaagagccgaagggctttatcgacctgcatcttcatcttgacggggctataactccgcaaatcgcaaaacggctgtgcgaggtgcaaaaaatttctctcggtctgaccgaaggtcagcttgaaagcagcctgacggtgggggaggactgcaaaaacctcaacgattttttgcggtgctttgagctgccgcttgcccttcttcaaaccgaaaccggcatcgaaacggccgtttatgaggtgctttgcgagcagaaaaggcagggcgccgtatatgccgaggttcgctttgccccgcagcttcacggcgaaaaaggattgactcagcggaaggtcataaatgcggccctaaaggggcttgaaaaatccgacattccctcaaatttcatcctttgtatgatgagaggaaaggaaaacgtcagacaaaactccgagacccttgacctttgcgaaaaatatctgacaaaggagcagggggtcgccgcccttgaccttgcgggggcggagggactttttccgacaggagattacaccgaaatttttgccgaggcaaaaagaagaaaaatcccttttaccgttcatgcgggcgaggcgggcggcgccgaggacgttatcttagcggtaaaggcgggagcctcccgcatcggccacggggtcagagccgcacaaagcgaaaaagccgtgaagcttttgagggacagcggcgttaccctcgaaatgtgtccgaccagcaaccgcctgacgggagcgtgtgacatgaaaaactatcccctgagattttttgccgaaaccggggtcggggtcacggtgaacaccgacgacccggccatcgaaagaacaagcataaaacgggaatttgaatacgcgtccgagctttgcgcgcttgatggctcttttcgtgccgagcttttgaaaaacgccgtgcgagccgccttttgctccgacggcataaaaggggaacttttgaaaaagctttaaaaccgacagcatatccgtttgacatacgggtgcaaaggtgataaaataaagtgataacactctaaagaaagaggaattgatatgaaagacaagacattttacatcaccacgccgatttattatccgtcgggcaagctgcatataggccattcctataccaccgttgccgccgacgccatggcgaggtataagcgaatgcagggctttgataccatgttcctcaccggcaccgatgagcacggccttaaaatcgagcaaaaggccgccgccaagggggtcactcccaaggaatatgtggacgaaatcgtggccggcataaaggagctttggaagctgctcaacatctccaacgacaaattcatccgcaccaccgacgattaccacgaaaaggcggtgcagaagatatttgaaaagctctataagcagggcgatatttacaagggtcactatgagggtcactactgcaccccctgcgaggctttttggaccgaaacccagcttaaggacggcaaatgccccgactgcggcggcgaggttcaccttgcaaaagaagaggcttatttcttcaagctttccaaatatgccgacagactggtggagtattatgaggctcaccccgattttatccagcccataagccgcaaaaacgaaatgataaacaactttataaagcccggtcttgaggacctctgcgtttcgagaacctccttcacatggggaattcccgtcaccttcgacaagggtcacatcgtttatgtttggatggacgctctgtcaaactatatcacggccatgggagctttctccgacgacgacagcaatttcaaaaaatactggccggccgacgttcatcttgtgggaaaggaaatcgtccgtttccacaccattatttggcccgccattctcatggcgcttgatcttccgctgcccaaacaggtctacggccacggctggctgcttttggagggcggaaaaatgtccaagtccaagggcaacgttgtcgacccggttgtgctttgcgaccgctacggcgtcgacgcaatacgttatttcctgcttcgtgaggttcccttcggagccgacggcgttttcaccaacgaggcgcttattaaccgcataaattccgaccttgcaaacgacctcggaaatctgctttcgagaacctcctccatggtgggtaaatatttcggcggaaagctgcccgaggcacaggccgccggtgattttgacgacagtcttgccgagctcgcctccgagacaaagtcccttgtggaggcaagcatggacgccatgcagttctccaccgccctgaccgacctttggaagtttgtttcgcgaaccaacaagtatatagacgaaaccgctccttgggtgcttgcaaaggaggaaagcaacgcgccgagactgggcagagtaatgtataatctctgcgaggcgctgcgccacatttcgattatgcttgctcccttcctccccgacacctccgacaaaatcgccgccgtgctcggactttccgaggaacagcgcacatggcagtcgctggacaaatggggagccctttgccccaccgccgagataggcaaaaccgacccgattttcccccgtatcgacgccgcaaaggagcttgccgagcttgaggccgcagaggccaaaacaaaggccgaagccaaagccgcaaacgaggcgcagaatgtcgcaaagctttcggaaatttccattgaggattttgccaaaatcgagcttaaagtggcaaaggtcgtctgctgcgagccggtcaaaaaggccaaaaagcttttaaagctcacccttgacgacggcagcggaaaagaacgtatcgtcgcctcgggaatcgcgcagtattactctcccgacgatcttgcgggaagaaacgtcatcgtggttgcaaatctcaagcccgccaccctttgcggagtggaaagctgcggcatgattcttgcggccgacagcggcgacggagtgaaggtcatttttgccgacgacgttaatgtcggttctaaagtaagataacattcggcgcaccgatgggaggccattccgtttcggtgcgccttttttgaggtgattatatgaaaaaattaaatgataaacagaaaaaattcatcgacgagctcatttcaaaaatgacgcttgaggaaaaggcaggtcaattaaatcagcttgcgccctcctctctcggcggctttacgattgacgaagaggagcagcaaaagctgcttaaggccggtcgtataacggaagaggacatcgagcgggccaaaaatgcgcgtgagagttttaaggaacaggagcagtgggtcagagaagggaaaatcggctccttcctcgggctttacgaccgcagcgatatagagcatcttcagcgcatcgcagttgagcaaagccgcctgaaaattccgctcattttcggctttgacgttattcacggccaccgcgttgtgggaccgattcccctgacgacggtttgtgggagcaaaatgccgctcttgccgcaaaggaggcggccgccgacggccttaactggaccttcgaccccatggtcgacattgcaagagacgcaaggtggggaagaattgccgagggagcgggcgaggacacctatctcggctgccgctgcgccgccgcgagggtcaggggctttcagggcgacgaccccgcaaagaaagacaaggttgccgcctgcgccaagcatttcgccgcctacggagcgggggagagcggccgcgattacaacaccgtcgacatgagcgagcaaaagttcttcgaaacctatctgcctcccttcaaatcggcaatcgacgcaggggcctttaccgtcatggcggcctttaacgatttctgcggcgtgccctgtaccgaaaacagctatctgctcggcgaggttcttcggaaaaagctgggctttgagggctttgtggtcagcgacgccacggcgattttggagcttgtggctcaccgctcggccgccgatcttaaggaggcctgcgagcacgcaataaacgcgggcgtggacatggacatgaattcccgcgggtatgtcaacttcctgcccgagcttgtaaaagagggaaaggtgagcgaaagccgccttgacgaggccgtgagaaacgtgctttcgataaaaatgctgctcggccttttcgacgatccctttaaccgtatatcctgggatgaaatagaccttgaaagccaccgcgccgccgcaagaaaaaccgcctgcgagtcggccgtactgcttaaaaacgataaaaatacgcttccccttgaaacagacgagccggtgcttcttgtgggcgctttgggcgcaaacggcccagaaatggtgggtacctggagcatggccgccgaccgaaattccgccgtgagcataaaggacggccttgaaagggcggggaaaaattgcgattacattgccgtctgcgctcccggggcaaagatagacgaggccgagcttgaaaaggcaaaggcgcaccccgcaaaaaccgtcattgcagccgtgggcgaatatgaggtgctgagcggagagggcgcggcgctgtcaaacctcgacctttcgggcgagcagaaccgcatgataagggagcttaaggcggcgggcaagaccgtcgtcaccgtgcttataaacggacgtcccatgtcggtgggcgaggcggcggcaaattcagacgcgctgctcgagctttggaacgcgggaagcgaggcgggaaacgcctgcgccgaccttgttttcggaaaggcaaatcccggcggccgccttgtcgccacattccccaacacctcgggagaatgccccatatactacaatcaccccgccaccggccgtcccgccagcgagacgctctattccgcccgctttgccgactctcccgtcgagccgcttttccccttcggtttcggactttgctataccgagtttgaatattccgacttcgaggtcaaggcttcggacggcaaaatcgaaacctcggtcaaggtcaaaaacgtcggaaaaagagagggtaaggaggttgttcagctttatgtgagcgaccttgtggccgaaagggtcagaccggtcaaggagcttaaaaactttgcaaaaataacccttgcccccggcgagacaaaaaccgtaaggctggatataaagaacgaacagcttgaatattatcacagaaacatggaaaaaaaggccgacagcggcgacttcctcgttcaaatcggtcacgacagcgcgcatcttctctgccaaaaggtctatcttgaattttgatttttgtgacgtgggcagattgcacaaaacggcatattgcgatttggttaaaattacgttgttgttagagtggaatttgtgtgctataatgaagtgtaaactgtattctgtaaaggagatgcaaggatgttaagcaagtttaaaaaggccgttgcggcggctgcctcggctgtctttattctgacaagcgccgtggctcttcccgcgtcggctcttgaaacattggcggcggattccgaagggaattccatcgccgtcgaattcccctcttccgacaaggacaaaaaggtagtcggaaacagcggaatcgatattaccggaaccgctgcggcgggttcctccctcaccgtttcggccgagggcaaaaatgttggcaccgcaaccgtgggcgccgacggaaagttcaccgcaagtgtgccttcctatgccctttcgtcgggtcttaacgaaatcgttctgtccgacggcgcaggcgcttccgcttcggtggaggtaaacaaacaaaactactatgatcttgccgatttggactacaatgtcaccggggctgcacaggtctttaagagcacgggcgtgtccaaatactgccccaccctttcggtgggcggccagaccgtcaagacaaataacggcttctcggtggttcccgccgacggaaggaatgccgctcccgccgacgcaacatttgatttgtcggctctcggcagcgttgcctatttccattcggttatcggtgttgacgattttgcaaacatcgcgggcgcggtgctcagctcggccgaatattcggtgcttgccgacggcaaggagcttgtaaagagcagagccgtcaccatgaacgaaactgtcgaaatttccgccgaaattcccgccggaaccaagaccctcaccctccgtgtggaaaattccgacggaagcaaccacggcgactatgccgactggatcgacccgagagtgttcataaaggccgaggactacggctccgaggaagtaagcctttatgattcttcggtttccgccgaccttaaggccaaggcctccgtcggcacccgcctcaatgtgagaaacggattttccgccgtcaccctgacccccgaaaaggcaaacgaaacggtggctctccgcatattcaacttcacctattcctatgcccgttccgttcagaacggcgctctctgcgaggtcaccgcaacggcagactcggagggaaaatataagtttgccctcgacaacctctacaccgccggagaatatctctttgttttcgacggagtgaccgccgtaaaggcaagcaaaaacgacaacgcttatgtttttgccgacggcgcatattccaagggcgctctcaacatgagcctcaccctttcgggtaagaacgcaaaccttcttgccgccgcggccgaagagcccgccgcagccacaacggctaccaaggctaccgacgccgaaaaggcgagagcaagagagacctataataactatctgaaaaatcttgcgaacttcccctccaaaatgaccatcgacggcaaggagtatgtgggattttccgacaaagattttcttatgatgtctcaaaagaccgagacaaacgaaaccaccaagagcgagaacaccgacacccaggttctccacgccaagagcggtatccggtttacccttaagacggttttctatcccgattatgccgcctttgactgggtcatttatttcaccaatgtaaccgccaaaaattcacctgtggtttccgacctcagccccgccgagctcaaatttgagggagacaaccccataattctcaccagctgctcggacagcgaggccatcaccggaacccccgctccctacaccccccgttccttctctctcgaggagaccccgaaccttacctttgagcccaccaacgcccgttccaccgaggccgcattcccctattacaacctcgaatacggcaacaagggcgcctttgtggtgaccagctgggcaggccagtggaaggacgacttcaactatgccgacggcgtaacctccttctcgggcagacaggaaatattcaattcctatgttaagcccggcgaaatcgtaagaacgcctctcaccgccgttgttctctatgacggccgtgacaccgaccgagccaccaacctttggagacagtggttcatcgactgcaatatgtataaaaaagacggcgagaacaacatgaagccctttgtagccggcgttacctctgccgtgtataacgagatgatgggcgctaccgaggaaaatcagaaggcctacatcgaaaagtattacaacatgggcgttaatctcgacctttggtggatggatgcaggctggtatgaaaagggcggtctgcccacctcaggtgagaaaaactggagctacaccggcagctggaccgtcaaccagacccgttttcccaccaagttcaagtccatttccgaccttgccgcctctcacggcatgatgactctcctttggttcgagcctgagcgtgtggcgttctccatgtcaagccctgatttcgacacctacggtatcaagagagaatggcttgtcggatataattccaagaacaactcggccctcggccccaacggatataagatgttcgatttgagcaatcccgaggcccttaacttcatgatcaaccgcataaacactgtccttaacgaaggcggaatttccttctaccgtgaggacctcaacaccggcagcatccgtgacatctggagaaccgccgaaaccgaggccgaccgccagggaatgttggaaaacggatatgttcagggacactatgctctgtgggacggaattcttgccaacgagaacattcagatgatcgactcctgcgcctccggcggacaccgtcttgaccttgagaccatgcgccgcgccgttgcacttcaccccaccgattataactacaacgacatgcccgcaaagcatcagggaacctatggtcttgcttcctggcttcccttcgccggcgccaacaccggaaccggcggcaacgtcaacgagacaagcaaatacaatatgcgttcggcataccgtcagtccatcattcttcagttcaacatcgacagcctcaatgccgaggacaaggagattgtcgccaagagcgtgaaggaatggagaaagctcagcaactatttctatgacgatatttacgaactgaccaagaacaccgcaagcgccaacgaatggtatgcttacagctatatgaacagcgaagagcaggacggctttgcccttgttttcagacatttcggcgaatattctcccgaaactcagaacattcgtcttaagggtcttaaccccaacgacacttatgaaatttcctttgccgacgccgacgaggtctacgccggcaccggcaccgaattcatgagcatcggcgtgcccgtcacccttaacgagaaggagcttgacgacggaagcgattccgacgttatcttcatcaagcgtaccggctcggccgtcctttacggcgacaccgacgaaaacggcgaagtcaacgtcaccgacgctctgcttgcacttcagggttcggtcggaaagatcagcctttccgacagccaggttaccgcggcagatgttgacggcgacggaaaaatcaccgttaccgacgctctgcttattctccagaaggccgtggcaaaaatcgacgccttccccgtagagaaataatttaatcacaaggcccccgccgagaaaacgtttttttcggcgggggcttttttgcgccctttttgcggcaaaaaagttgggcaaataacatgaaaaaatcaaaaaggacgaattatcatcttgacttgtgacgagtcggcgggtattataaagaggtattacaaaaaaactgtgcaacataacggcacagaaaggcgtgatcttgtgaaaatgaaaaaattgtggaaaaaggcggcggctctgtttacggcggcttgcctgacggcggcctgctgtccggccttttcggcggcggaagaaagcagcggtaaggcgagcgcggctcttgcctcctttaaggccgacggcgatgttcttgtaaacaagcgttccgacggcgaaaagcttcatatcggcggggcgagagaaagccgctcggccgtggcgataaacggcagcggctttgcaagctttgatgtttcgactcttgccgccgacggatttaccgcctttgtgggacttgacgagacgtcgggcgccgccgcaaaggccaaattctttgtcgaggccgatggaaagcaaattgccgcctcctccgagctgtcaaaggataagcttgaaaagcttgaggccgcacttccctcgggaacaaagacggtcactcttaaaaccgagggcgacggacttgccgttttcggcgacgcggcggttactttcccgttctcccattcgggctatgtggacatgaccaccctttccccgcggcaggtcataaacgattccgacaatcccgtcaagataaattccgacataaaaatcggctccgagagctttgacaagggttttgcggtctatc

SEQ ID NO: 2800 - DNA, 12223 bp, Unknown
  16S sequences of unknown bacteria
ctccggcgcaaggtaggaggcgttttccccggtggagacggtgatcacgccgccggaatacccctcggagacgaggatcggctccaccgcgcgcagccagcggatcttttccgccatgtcctcaaaatttcccaggcgcacctcaaagccgctgaccgtcgtcatccacaggtcggatacggcctccaggttgatctcggagacgagctggatgacgtcttggctgtgcagctcggtcaggatcgcgcgcagggcgtccatctggctctcctggctggcggcgacggtctcgcccacggcggcgccgccgaccacgttcaggctgctgaccacgggcaggtcgaggtcgcccaggcccggctgcacctccaggacaaagcccgtctcgtccacgacgaggaagctgtcctggtagcggatggctgcgctggcgcggcgctcaaagacctggatgcgcagcgtatccggaaacaggtagtcgatggactctacctcgaaataggggtccgcgtcgatctttgcgcggatctcgtcaaagttcagcttgaagatgctctcctcgttggcgatggcggccaggtccaccacgtccgccggatcgcgcgcctcgcatcccaggaccacgacctcgcgcacgcgcatcgcctcgctgcaggcataggcgctgcccgcgacaaccacgagcagcaggaacagcacaagatagatccgcgcgcgcaatggggtcccctcctaacgtctttcgtctgtgatctccattctttgggccgcgccgcccagcgcggtgagcttctcctccagccggtcgtacccccggtcgatcagggccacgttctccacgagggactccccctccgccgcgagcgccgcgatgcagagcgccgcgcccgcgcgcaggtcccgcgtgtgcacccgcgcgcccgtcagggcctccaccccgcgcacgaccgccacgcgcccgctgacctggatgtccgcgcccatgcggttcagctccgccgcgtgggacatccggttctcaaacacgttctccaccacgaccgacgtcccccgcgcgagggtgagcagcgccatcatctgggcctgcatgtctgtggcaaacccgggaaagggcgccgtctcgatccggcgcacgggccggggcctgtcgcgcatgcgcacgcgcacgccctcgcgcagggtctgcaccgtgcagcccgcctccttgagcttggccagcagcgcctgcatatcctgcggccgcgcgtcgcggacgtagacgtccccgcgcgtcgccgcgccggccagcagcagcgtgcccgcgcagatgcggtcgggcaggggctcgtactcgcacccgtgcaggtgcgcgccgccgcggatgtgcaccgcgcccgatcccgcgccgcgcacacgcgccccgcaggcgttgaggaagcgcgcaaggtcctggatctccggctcgcgcgccgcgttgtggatcacggtctcccccggcgcacagaccgcggccatcatcgcgttctccgtcgcgccgaccgacggatagtccaaatgaatctgcccgccgcgcaggctccccgagcagaggatgtgcccgtgccgctcctcgatctgcgcgcccagggcccgcagcccctgcaggtgcaggtcgatgggccttagccctatctcgcacccgccgggatatgtaaagaccgcgcggccgaaccgcgccagcacgggccccagcatgaagatggacgagcgcatctgcttggagagcgcctcgggcatgacgtgctcgctcgcgccatccgtgtccacgatcaggtccatcccctcgcgcgccgtgcggcagcccaggctctcgagcagccgcagcatgttggcaatgtccgcaaggtgcgggcagccgctcagccgcaccggcccctttacgagcatgcacgccgcaagcagcggcagcaccgcgttcttggccccataggcccgaatctcgccggaaagcggccttcctccgcaaatggaaaacgcctccatcaaaacccctcctgtccctggcaggatatgtggcggggcgcgcgatggtgcagatttccctggaaaaaatcagccctcggcgcgcgcccagcgctccttgaggcggacgagcgccggcggcgcgacccgctcccggatggcggccggccgccgcgagacggagacgagcaggccaatggtcgtaaggaagatggccatcgtcgtgccgccggaggtgaagaagggcagcgggatgcccgtggtcggcgcaaaccccgtcacgaccaggacgttgatgacgacctgcagggcgatgaccgaggtcagccccagcgcaagataggtcccgaagcggtcaatggcgttgaccgcgatgcggtagccgaagtagatcagcgcgaggaacaccccgagcaccccgcacgcgcccacgaaccccagctcctcgcccacgatggcgaagatgaagtccgaataggcgtagggcaggaagttgtgcttctgcttggacaggccgagccccgtgccgaaccagccgccgttgcccagggcgtaatagctctgcacgagctgatagccctcgccgcggacgtcctgccacgggtccaggaagaagacgatgcgctcccaccggtccgggatgatgaaccgcgccaggatgaagaagcccacgatggcaatgctcagcagcacgatcagcgtgcgcttgcgcatcccgcccgccatgagcaggaagagcgtgacgaacaccagcaggcacgaggtggaaaggttcggctgcgccagaacctccagaatcagcaggcccaccgtaaacagcgcggcgaagttgttgcgccagaacaggtgcatggtcttctgcttcttgtccatgtagtaggacaggtagagcaccaccgcgaccttgaggatctccgccggctggatggagagccaggtgtgcctcggcgggccgaagtacagccagcgataggcgttgttgacatagggcgagcggatcaggaagaagtggccgtcgttgaagaacgaggcgaccgatcccagctttggcagcagcaccaccagccccagcatcaccgcgcacgcgccgcacagcgccatgaccacccagcgctgcttgagccaccggtagtccaggtgcatggcgaagaagaagccgacgccgccgaccgccatgccgaagagctgcgtcttgaattcgccgagcgcgtcctcgcccttgacgctcatcgtgtaggaggaggcggagagcaccatcagcgaacccagcagcgtcaggatgatcgtgcagaccaccacgccccagtcgatgggcaggtgctgcccgatgacccacatgttgcgcaacgtccacttctgcggcgcggggtcgttgatgtgggatcgccggcgctccgccttttttcgctgctgcgccgccttgtcggccgtcttcatcgcggtttttccctcccttccgggcaatgcgcgcgcctacaggcgcgagacgatctccttgaacacgcggccgcgctcctcatagtcctggaacatgtcgaacgaggcgcacgcgggcgagaggagcacgttctccccctccctggcgcaggaccgcgcaaggagcacggcctcctcaaaggtctttgcgtgcaggatgctctcaaagccgaccgcgcgcagcgcccgctcgatctgctcggccgtgtcccccaggaccacgaccgtgtggatcttgctggccaggatctcgcgcgccagcggcaggaagtccgtgtgcttgtcgtacccgccggcgagcaggaccgtggggaccttcatcgcgcgcaccgcgcggatggaggcgtccacgtttgtgcccttggagtcgttgatgtaggtcacgccctccacggtgcgcaccgtctcgatccggtgctcgacgccggggaaggtcttgagcgtgtggcgcaccaccggcgcgggaacccccgccagcatggcgagcgccgtggcggccagggcattttccaggttgtgctcgccggggatgcggatctcgtccgcgcgcaggacgcgcttcttgtgcccattcagggaaaaaacgacctcctcgccctcgaggtatgcgcccgtctccacctcctgccgccgggaaaagaacgccggcgcgcaggggatgcgctcggccatgccccgcacgatgggatcgtccaggttgaggaccgcgtagtcgccctgccccatgttttcaaagatacgctccttgacgcggatgtattcctccatggtgccgtggcggttcaaatggtcctccgtgatgttgcacatcaccgcgatgtgcgggtggaaggtggaaatcgtctccagctggaaggaggagacctccgccaccgcgacgtcctcctcgccgcactgcagcgcgcaggccgtaaacgggtagccgatgttgccgaccacgtaggtggtcttgcccaggttgcggaagatttccccgatgagggtggtggtggtagtcttgccgtttgtgcccgtcaccgcgtagagcggcgcgcgggagacctgcgcgcccagctccagctcgccgatgagcgggacgcccgcggcctgcaccgcgcgcaggatcggcgcctgcatggggatgccggggctcgtcacggcgaggtcgtaggactccaggtccgcgggctgggcctggtcccccaggcagcggcggatgtccatgccctccaggggctggagcgcctctgcgagcttctcctccgccttgctgtcggagatggtcacgcgcgcgcccagctcgtagaggcactgcgccgcgctcacgccggagcgcgccatgccgcacaccaggacctttttcccttcaaagttcacgtctgttcaccgcctgttctttgttttttccgtcttagagcgtcgtggagagcaggcccacggcgcaggctgcgatcgtgatgagcgcaaacaccagaacgatcttccgctcggagacgccgctcatctcaaagtgatggtgcagcggggccatgcgcaggaggcgccggtgccggtacttgatggagaggatctgcaggatgtccgaaaggctctccgccacgtacatcacgcccatcacgaggatgagcagcggctgccggagcaggagcgaggccatcacatacgccccgcccaggccgaaagaccccgtatcccccatgaacacgcgcgccgggtaggcgttgaaccgcaaaaagcccaggcacgcgcccgccgtcgccgcgcagaggacggacatggcgcccgcggcctgcgcgtccacgccggcgctctgcgcaaagagcgcgacaaggcccagggccaccatcacgatcatcgtaacggtcgagagcagtccgtccacgccgtccatgaggttgacggagttggtcgtggccacgatggtaaacaccgcaaaggggatgtaccaaatgccaaggtcccactggatgtccgtaaaggggatgtagatcttgctgcccacgtaggggctgaagtagcagaacagcgccgccgccagggcgaggagcacctgcagggcgatcttctgcttggcggagagcccctccggccgcttgcgcacggccttgataaagtcgtccaggaacccgatgcccccgaaccccagcgcgaagagcaccgcgggcagcatcaggctccagcgcatctgcgccggggaaaagaccagcgcggccagggccagggcggcaaggatcatgatgccgcccatgatcggggttccggtcttcttgttgtgcgtttccaggccatagttgcgctccgtcgcgccaaagttcaggcgcctgagcttctcgatgacgaacggccccatcgccagcaccgccaggaaggcggccagcagggcaaagaccatgctttgcatacggcttcatcctttatgttgtattctcactccacaagctccatctcgctgagcagttcgcgcacgacgaccttctcgtcaaagggcagcttcctgccgccgatgtcctgataggtctcatgcccctttccggccaggacgatcacgtccccgggcttgcccatctgcatggcgaagcggatggcctcgcgccggttttcgatcaccgtgtagggcgcgcccgtgggctggatgcccgcctcgatctcccgcaggatctccatcgggtcctccaggcgcgggttgtcgctggtcaggatggaatagtccgcaaggcgcccgctgatctcgcccatgatggggcgcttttccttgtcgcggccgccgccgcagccgaacacgcagatgagccggccctttgtgaactcgcggatggtcttcaggatgctctccagcgaagccgggctgtgggcatagtccagaatcacccggtagggcgtgtgcgtgggcaggggctcgatgcggcccggcacgaccgtcacgctctccaggcccgccttgacgtccgtggggcgcatgcccatctctaggcacgccaccgccgcggccatgctgttgtagacgttgaagatgccggagatgtgcaggtgcagcgggatgcgcacgtcgcgccagctcaggacgtagctgacgccgctttcgtggatctcgatgtcgttggcataggcgtccgccggcatggagacgccgaacgtcgtcgcgggcacgcggcccagcatgtgctttccggcctcgtcgtcggcattgacgatcgcgtggccgatgtagaaggggtcaaagaacttctccttggcctttcgataggtttccatggtgccaaagtagtccaggtggtcctgggagaagttcgtgaacacgccctgttcaaacttcatgccgacgagcttgcgcaggtccagcgcgtgggccgaaacctccatcacgaagaagtcgcaccccgcgtcgcgcatgcgggcgagcagggcctgctcgtcgatggggtccggggtggtcaggttggagggctcctcctcttcgtcgatgtaggtgcacaccgtgcccatcagacccaccttgtgccccgcctgccgcgcgatggcccgcacgaggaaggaggtcgtcgtcttcccctttgtcccggtgatgcccacgccccgcatgccgcgggagggatagccgtagaagcactgcgccatgtagctcatggccgcgcgcgcgtccgccacccgcacctggggcaggtccaccggcaggcggcgctccacgaccagggctgcggcgcccttttccgccacctgctgggcaaagctgtggccgtccacgcgcaggcccggcaggcagaagtacaggtcccccgccttcacctttctcgagtcgcaggcaaggcccgcgatttcggcctccccaaatacctccgggctgtccggcaggctgcttgcaagctgagtcagtttcaagtgtgttcctctcctttatgctctggtcctctcatcgggttttctcttctctttttctgcgccgattcctactcaaaggtgaccacgacctcggtcccggccgcgacgcgctcgccgggctccgggtcctgggacacgcagatgccgctgccgtcgatcttcatcgtcaggccgacctcgcgcagttcgcggttggccggcaccagggacaggcccgtaaggtccggcacatccacaaggccgtcgtcctggggctccacgtactcggtgtagagcacgacgagcgagccctccggcacctcggcgcccgcggcggggagctgtccttcgatcgtctgccccaggccggagaccatgacgcgcaggcccgcgttgttcatggcggcgctggcggactcgaccgtgctgcccgtgacgcccggcacctcgacggtgctgccggccagctcctcctcgccctcctcgtactcgggctcgacccccaggtacttgagcgtctcctccaggatcatgcgcgcgtagggcgcggccacggtggagccgtagtccggccggacgctcggctcatccacgatgaacagcaggccgatctccgggtcgtccattggcgcaaagcccaggaaggagcagacgtgcaggtcgttggagaccttgccgttgacgtacttctgcgcggtgccggtcttgccgccgacgcggtatccggggatgtaggcgttgcggccgccgccgttttccacggcgttctccagcaggtcgcgcatgatggcggaggtctgctcggagatgggggtgcccaggacctccttgccgtagctctcgaccacttcgccctcgtccgtcaggatctccttgacgatgtggggcttgagcagctcgccgccgttgaccgcggcgctgcacgcggtcaaaagctgcacgggcgagacggaaacgctctggccgaaggccacgcgggcgatgtccacgtcctttacatatttataggcgatcatctgcccgctcgtggcgccggggaggtcgatggggacctccatgccgatgccgaagtcgtgcagcccgtcgtagaaggtgtcgatgcccatgcgcagcgccagctccacgaacacggggttgcaggagttggccaccgcgtccaccagcgtctcggacccatgggggttgcccgtgcgccagcaggagatcttgtcgccgtcgacgatggtgtatcccttgcagtagaaggtgtcgtccacgctggtgacgccgttctccagcgcaagggccgtcgtcaggatcttaaaggtagagccgggctcataggcgtcctgcacgcaggagttgcgcatcagggcggacagctgcgtcaggtcgtcgcgcggcgggtcgttcaggtcgaagtccggcttgttgaccatgcccaggatctcgccggtcttgacgttcatcatcacgacctgcacgccctgggcgcccgtttcctccagcgcctgctcggccacgctctccatgacggactggatgacgtagtccaccgtcaggcgaacggtgtacccgttttcgggcgggatgtactcctcctcgcccgtctccatccggcgcgcgcccgcgtcgatctcggtcacgacgcgcccgtccgttccgcgcaggtactcgtccaggctcttttccagcccctcctgcccttcgcccgagaccgtgcagaaccccagcacctgcgtcaggaacgcgcccatcgggtagacgcggaccgtgtcctcgctcacggagatgccctgcaggtttgcggcctccacctggtcgcccagctcgatcttgacctggcgcgccaggcgcacgctgctctgctcggtgtcggtgatcttgtcgtagacctcctgcgcgtccaggtcgaggatgttggccagcgtctgcgcggtgctgcggatgcgcagctccttgtccgcagcgtcctcgctgtcatcgcccacgacgtccccgggcgatgcggtgatggtcactgagcttgccgactgcgccagcaccttgccgttgacgtccacgatctctccgcgcttggcggtaaccgtaaacgaccgcgtccactgcgagagcgcgcggctctgcaggttcgcgccgtcgatgatctggatgtagaagaggcgcgaaaccatgaccacaaaacaaagaacaacaagacaaaagagccagccaatccggttcttcgtcttgtcggtaggggacgtattcggcatgcaggggtttctcctttccgcaggactgctcgcacctctttctctttttctatcgatcgggcgaaacgggggtcttttttctgcgatgcgccgccgccgtcagggcagggcgacgacgcgcgtgtcttccttttttgcgtaatccatatgcaggttttcccgggcgtagtcctgaatcttgctgatgtcgccctgcatgttgatctccacctgcagctcttccaggcgcctctgctgatcctcgatctgcgcggtgagggcgcgctgctcgacgaccatgttctccagctgcacgtagcgcagcagcagcgtgtagatgccgccggccacggccagcaccgccacgatgcccaccgcggcaaacagcgcctgcacgcggtgctgacggcggcgagcctcctccacctcggcctccgcccgctcgcgcgcctcctgctcgcggcgctggcgctcggcctctgcgcgctgccaggcgtggcgctgcacggtgcggtggttgacctcggcgtgggtgagccgctgggtcgcgggctcggggtcgtaataggcgcgcgtgggctcggcgcggcggcggtcctggcgggaccgcgtgtcctgcgtcggctcctcccggcggggacggcgctgccgctcctcgcgccggtcgggcgcgcggcgggtggtcggctcctccgccgctcgagcgctgcggcgcacggtgctcccggctacgtagtagtcatcggcatccaggcccggggttctcttgtgcaccggcatggcaacgtcctccttactttaacgatagcgggtatcgattgtttcaaatttccagcggtccctcgccccgctcaaaggcgcggaccttggcgctgtgggcgcgccggttctgctcgcactcctccgcgctcggcaaaacgggcttgcgcgtgacgatgcgcccggcgctcttcttgccgcagacgcacaccgggctcttcggcgggcaggtgcaggggttctgcatcgtctggaacgcgcgcttgacggcgcggtcctccagggagtggaaggtgatgaccacgagccgcccgccgggcttcaggcacgcgagcgcgtcgcgcagcgcgccgggcaggagcgacagctcggaattgacctcgatgcggatggcctggaacgtgcgccgcgcggggtgggaaacctcccgccgcgccgcggccggcaccgccgcgtcgatgacgcgcaccaggtccatcgtcgtgcgcaggggccgcgcctccacgatgaacttggcgatgcgcgcggcccacttctcctccccgtactcccacaggattctcgcgatctccttctccgggtaggtgttgagcacgacctccgccgtgaggggcgcgctctggtccatgcgcatgtccagcggcgcgtcgtggtggaaggagaatccccgctccgggttgtccagctggtaggaggacacgcccaggtccatcagcacgccgtcgaccttgtccaccccgacggactgtaaaagcgaaatgatgttcgcatagtttccgtggagggagcagaaccggtcgccaaaggaggccagccgctcgccggctgcccgcagcgcatctgtgtcccgatcgatcccgatgaccctgccgcgcgtgcgggcgaggatctccgccgtgtgccccccgccgccgagcgtcgcgtcgacgaacacgccctccggccgctgcgcgaggttgagcagctccatgcacggctccagcaggacgggaatatgtgcaaaatccatttaggtctcctcaatgaagcggaagaacgcgtcccggttccagacctccacgtggcggcccgcgccggagacgacgacgtccttttccaagccggcgtactgccgcatggtggtggggatgagcagccgcccctggcggtccatctcgttgtcgtccacggaggtggccagcagctttcgcatctggtcgtaggcctccccgtcgctctcctcgatcttctcgaacttttcatagacggcgttccactccgagagggagtagaggcagatgcagttgttccggccgcgcatcatggcgatggtcttgcccaactgctcgcggaacttggaggggatggtgatgcgtcccttggggtcgaggctgtgctcgtaatacccggaataccggtctgccacgggactccccctcctttctctgggcgcttcgcccacattcgccgccgttttagggagcgtcctccacgttctgccacgacgctccacttggatgtatatattctccaccccgccgcgttttccttcccgaatttctggaagggcgcaaaaaaacagatggaaaatttcgacaaaaagctgccttaggcgtttttccccccttccgccgtgcatttcgcgctccatttagggaaaacacgttcgtttttcctgctttttctcctggtggaccgcgcgcccggaatcccctgtccgccattcaagatcttgccgctccatgaaaccccggtgaatcaaaaccgctccgcgggcaatcataaccacccgtcaaacgggtggtttgcacaagggctaaaagcccaatgattaccggccagcgtctcaaggcgctggctttcactttttgcaaaagttcaagcccattgcctttgtcacttttgcagccccttaaggggcgttcgtattacttgccacccttaaaagggtcttcgtactctcggacgctcaatttgtccat

SEQ ID NO: 2801 - DNA, 20178 bp, Unknown
  16S sequences of unknown bacteria
ttatacagtagaacaaatagaaaaactatgtgaaaaagaaaatattgaagtatctccggatagaattaataaagctgtcttatattgtaatatgagagcggacttgttaaataatacaattgagaaaaatttgatggatgttgatgaggctaaacagatatttgaagaaatgagaaatagcggaaaatataaatgtaagctaattatgaacaaacagcgcaaagagatcaaaaaagtaaattattttaccgcaattattaccatgatagcagaagaaatgcttggtggagatgaggaatttaatccagatccaagagggcttgtgtatctgttgaataatagaaagattattggagcatcttcaagaaggtttgatggagcatatccttcgatttataatcctaagatagtgtgggaaataaaagagtattattattcaaagtcatttggaagtagagttgcagatgctgtgtatgaagctgaacttgatggatatgaatttaacgaaatatacgatagaaccggacagcaagtatatcatgtgatgtttattgacagccattatactttctggggacaagggaaatcctatttgtgcagatttattgatacacttaatatgggacttatagatgaacttattgttggaaaagaagttctgacaagatggagagaagttcttacggagcttgcaaaataggtctggctacgatatcggaaaggacaaagaggttacttcataaaggctaaatgattatattgaattggagaagaaatgtgagaatcctattctggaacacaaatagaaataaaataaatcaatatattgctgatgtagttagagattataatatcgatgtgttgattatggcagaatatgaggatgggaaaaatgaattgggaaatttgttacagtcatataataagccgttgacagaatacaatacaataggatgtgatcgaatagcattctggagtaattatgctgatgtagagccaggaatacaggatacgtattattccatacagattataggaaaagaatatatagtgtgctgcgttcatttatttacagatctacatggagatagaagcgatgaacggctggcaattattcaacaaattatgcaggaaataaaaaagcttgaagaagaaataaattcgagaaaaacaataataataggtgatcttaatgagatgccgtatggaagaggttgcctaaatgcaaatggatttcatggattgcctgctttaaggatagatgataatgcaacaagatcagtcaataatacagagtacagaaaattttataatcctatgtggaatttactaggagatttttcttatccacctgggacatactatttaaatcaagcgaaattaaatagtcctatgtggtatatgttggatcaggtaattataagtcaggaacttcttccatcttttagaagagaagagttgagaataattacaacatgtagttcaggagacttaatggataaaagtttgcatccaaacaagaaaataagtgatcattttccaataatgtgcgaagttgctgaggagggaaaattatatgaatgaacaggaatttgtatttgatttggttgataaatattcaccggaaattgttataggtaatttgctgaaacagatcgaaagtgctacaagaggttatgtttgtggacatattcaagaatatgatggtaaaatcacatcatatacaaaagaagttggaggatttggcgcagcgctaagtgcatttcaaaaaggtgtggaaacagtacatgttgatatccaagaggatttaggtgaacaagattatgaaaaccatcgttatgaagtgtttttaagtgctaagggattggaacattataagtatagaatgatgtttgtggattatggaacggtttcctatccggtgacaatagtgatgaatgaagatttagctgtcgaatatacaggaaaaagaataacaaattttaatgtagaatctatgagagaattagaggatatggttaatcaaattttgagctgtaaaactatgttatcattaattcaaaacttaataaatgaggctataagacaagaaaataagactgtttcacaagcaaaggcgaaaatgatacagtctgaggaacaatgataacatcatgataacaaaatcccaaaaaaccacacggacacagtggaaagtccgtatttttccgcacaaaataaacgaaaaataaccatttacaccctacaacacaccatactgataccgtgagggtggtagaactgtaggatcaggtcgtgttgctaccgttatcgagtaatcactgattaacagataaaattatatatattgttatcgcaagataacattgtgtccaaacgtaagataccctggagaccgaaaggtttccagggtttttctgttgaagggaaaaagtaccgaaaaatcttgactagaagctttcagaagattaaaatatacacgtatttgataggaggtgtaaatctatggacagttgcgatagtacgggacgaagtacgaactgcgatggcagatatcataagacgcagaggcagttgcccatggagcatcagtagacctctgactaatttcacatgtctttgaatataaccatcgcgtaaattcctatactatacagccggaaatgtaagtgtgcttttggagagagcgatgggttttttatgcccttttgagaccaatagaggaggcgaaagacatggataaaatggttcagaaaccaaattatgtagaagaattgctggaaatcttacgcagctccctggcggcagatgagctgcaggatcagatttccgattatcatgaaagtgacattgcggatgcatttgagcagttgacggaggaagagagaaaacgtttatatccgttgctgggaccggaatggattgctgagatttttacttatattgaagatccggatgaatatctgaaggaactggatcttggacaggcagcacaggtgttgtcttacatggactcggacgatgcagtggatgtcctggatgagctggatgataccacccaggaaaaactggtcggcatgatggatgaggaatccagccatgacattaagatgctgcagtcttatgaggatgatgaagtcggtagtctgatgacaaccaattttattgtgatccatgagaatctgaccatccgccaggccatgagagaactgattcgacaggcgggtgaaaatgacaatatatctactgtttatgtaatagataagaatgatcagttctatggtgctatcgatctgaaagatctgatcattgcaagagagaagaatgcactggaagatatcatcagtacatcttatccgtatgtaacagatcatgagaagattgatgactgtatcgagcagatcaaggattatgcggaggattctatcccggttctgacagaagataaacagctgatcggtgtcatcacggcacaggacttggttgaagtagtcgatgatgccatgggcgaggattacgcaaagttggcaggtttgaccgctgaggaagatctggaggagactaccaccgagagtatgaaaaagagacttccgtggctggttattctgctgtttcttggactggcagtatccacagtggttggtgtatttgagaccgtagtggccgtactccccatcgtcatgtgtttccagtcattgatccttgatatggcaggaaatgtaggcacacagtcactggctgttaccattcgtgtgttgatggatgagaatctgactgctggtgagaaagtgggacttgtatttaaggagatgaaggttggatttttcaatggattgttcctgggaatcatggcatttatctttattggactgtatatctggctgctgaagggcaatccggtagtccatgcatttgtgatctccggctgcgtcggattttcattgatggcggcaatggtgatttccagtttagtgggaactttgattccgatgtttttccataagatcaagattgacccggctgttgcgtctggtcctttgatcactaccgtcaacgatttagtagctgttgtgatctactatggtctggtgtggattctgctgattcatttcttacacatggtataatggaatcatataaggaatagcaccatctcgcagagaaggctttgcgggcagagatttgaatagcgataaattgagaaggacagtcgaaaaatcggctgtcttttttcttatatgggatcaaacagagtattactccgtctaatgaatgtaaggaaggaggagaagcaatgcaggaaaaggaactgctgcagttgatccgaaaggcgcgatccaaggatccggacgcattttccagtctgatctatttctatatgaaggatctgtatcggttggccatctcgatcctcatgaatgacgaggacgcagcggatgcgattcaggatacgattcttggctgctgggagaagctgcatacattgaagcaggagaaatattttaagacctggttgaccaggattctgatcaatcactgctatgatatgcggaagaagcaacaacggatgacaaccatggaggattatgaggaacctgtagcggaggatcagtacaatgtggaactgaaggaagcattgaggcagttggatgaaaaataccggatcgtgatggttctatattatagcgaaggataccagacaggcgagatcgcggaactattggagataccaagaagtacagtgcagactaggcttcagcggggaagggaaaagctggaagcctattatcgttgacagaaaggagcaggacaatgaaagaagagaaagatattctgaatagggacgtggagattccggaagtggtatttagaaaagcagatgcggcgctgaatcagattcgggcaaatacaggatccacaaaagcaaccagaaaagtaactcgtatacaaggaagaatccatcatgtgcaggcggctgcagtggcatgtgcggtactgatcggagcaggaggaatcactacgacggcagcagtcattcaccacctgtggagccgcggtatgcaggcaaatattcaggcaacagaagaacagcagaaaaatctgacggatcagggaatggtgacgcagtttgatcaggcgtatacttcagcaaattcagatctgacaggcatggaagtgacatccgaaggaattacagtgaaaccgatggaaatgatcgctgatggacattttgtacatctgtcttttcaggtggaagggtatgatcttccagatggagaagaacctttctttgaaacggtgaaagtatatacaggagacgaggaaacagcagaagacagtttcgttaatatgaacggaagtttttacaatggaattatctgtgatgaaaacggaaatcccgtatatgaagatggaacgccgcttacagctgatgaaaatggaacgacaatagaacgatataaagcggaagatggaacattggaatatgtgatgactttatataagccagatccagaagaaagtcttctggggcagatgctccatgttcaaatggaaaatcttgggaccgtgaagaaaacaatgtttatgaatggaatcgaaggaacgtggagctttgatatcccggtcagtggaaaagatgctgcacagacctatgagctaaatgcacctcttgaaaatgcaaatgtgacggtactctcagcggcactctcacccatttccgttcgagtcgattacgaagtgaccggtgagattcaggcacaggaagatgacaatggattgccggaagttggtggagtggtattgaaggatggaagccgtctgctctatctgctcgacggaggtcagattggttatcaggacgacacacatgcctatgaaatctcttcctttgaccgggtgattgatgtggatcaggtgcagtccttgctgtttcggattcacgcaggagattcccctgaaaaatacgtttcggttgatttgaaataaaaaaatatatatggattgacaatgttggtcggttattgtagactgaagaaaagagagggtctacaataaccgaccttttgcgcatgacagatacaggaggagtccatatggaggaatacagactttgtaacagcgattaccgatttatgacactggtgtgggaacatggtcccattggttcgggggaactggtcagactgtgcgcagagtatctgggttggaagaaatccactacctatacggagatcaagcggttgagccagaagggcgttctgaaaaatgaaaatgcagtagtaacaccgctggtgaccagagaggaggtacaggcgaaagagtctgatgagtttgtggagcggaccttcgatggttcgctgccgggattcctgaccgcattcttaggaggcaaaaaattgtcccgccaggaagtagaggacttgaaagcattgattgacaattatcaggaggaggggtgatatgctggaaatgatctttagtcagattctgaagatgagtttgactgcgggtgtctgcattgtagttgtgagcatgcttcatctggtatttcacagaattccgcggaaatatctgtatgcactgtggatcgtggtggcatttcggttggtctgtccggtgtcggtcagtacaccggtgggattggttttgatggggaatgtagggcagatcgaacagacgagtgtgacagatgagctggtgcagagtgagcaggcggagactggagatgtacggaaggcggttgattcgcatgtggcaagaactatgcaggatgaatcggtggttggagatggagattccgtaacaactgctcagaataatatgaccgacaaaacagctatgcaggacaacacgacaggaaccgcccagagcactgcatccaacgtgagcaccgacaacactggcaacgaccaatcaatgttacctcttttctcccgtatctggcttacgggcatgctcctttctctcatctacttgctatacagctatctgaaaacaagacgcagattaagccatgcagtgctggcagaggatacgaccagtgagcgactgatccatacgggctggagattagcgccggtctatgaatgtgacgagttaccgtccccatttgccatgggaatttttcatccggtaatctatattcctttcggactggaagcgtgccgccgggaaatgatccttctgcatgagcagtatcatatccgtcgccgggatcatctggtgaaattatttgcaagtgttttgttggcagtgtactggttccacccattggtgtggctgagttgggtgattctgtgcagagatatggagatgagctgtgatgagaaggtactggaactgctgggaagtgagcagcggaaagcatacagtctgactttacttcaatttgcgtccggagaatcggcaggatatgtgccgcttggtttcggcgaaccgaacgtaaagagtcggatcaagcatgtgctgagattcaaaaaagcagcagtgggaaccggtgttgttggtgtggtcattcttattgcaactatccttttactgggaagcaaccgtcagcagaatatcagagattctgccaatacagatactgcgagcagtacacaggaaaatgcagacgagacacagtcagacagttcgaacgtttctgatgcagcaacgcttctgtatagtgtaaaaaatccttatgtgggtgatatttctgctgatggcaaggtgcttcgagccattgaagaagtgagacctggttctgtatatgcaggaaagacagaactgcagacatcagaggagccatatgaatatcattttctgctggagcagaacaaagagacgctgaaagtgaagacgggaacggaggagtcgaaactgaatcaggagatgtccagaacagccgtgctcatgctggcactgatcgacaatctgggagaagtccagtggaattatgctttgattgcagaagatggaaccgagaacgatgtgctatacacctcgtatgtggatattgacagtgcacagcagtggctgggtgtggataacattaaagcttacgcagagtccccggagaagatgcaggaatttctgaatctgctggatacggtcagtggagatgtcatagaaggtgcaaatacagagattgacggaaccgcatcgatcactcacagggaaggctttcagaatgcaacgcttcattattatgtgccaaaatcatcagagggtatcgtgactacaacgggtatttacacggaggaagaagccaaggcccatgcccagcgggcggtgcaggagatctatgacctgactggttttcaggtgaccgagtgttattattacgcttatgactttggaactattgatcttggcatgtcagaggatgatctggaacacagcagagtcttctattcccgttgttttgcagatcttccgggcgataccacatccattgcgtccgcatatctggcaaatgcacaaaaagtatggtattctcccataaaaatgatgattttaccggacagatatgatatgatgtccgagagtgaaaaagcagtatggttcgtgactcattctggtcagtataatggtcagaaagtctatgcaacctatcaggattatgctgaccagccagagacttggacagtagtgatggatgatgagactgcatatgagatcaccctggaggctgacactaacagcttttcgaatctgacgggaccttatccggatggaaatatccggcattgaccaatcttggattgattagtccataaacagtaagaaagtacatgtgtcaggttaaaatcatatgacttacgaggaggacagaacaatgaagaaatacttgatgatgctggcagcaggattgctgactgcttctctgggaggctgtgcagtcgttacggacagctcgcagacagacagtgtcgaggtagaggaagttgcggaagaggcgaaagatgatacagaaaagaatgatacggagcaggaagagacagatgaacctgcatggtatggaagctggaagatcatagatgtgaaggcagcagcagtcagtgcattggcagaagaagaggttgaaaaatataaggatcagaccgtgacctacggagagacaacggttatggttggggatacttcttatgaaattgaaggttatgagaccatgttggacgtatatactcaggacagtatggcacaggactataaagctgatttaagtgactggtggaatggtgccggtgaattatcctttgtgcaggtactggcaaatgatgatttcttcggaagtgtattcttcgcaactgataatgaagagctgtggatctactgcgatggcgtatttttccgggcagagaaagcagcataagagaaacagaataaataagaagacaggcggaaatggtgaaaggtttccagcctgtctttttatgtgtgcccgaaggcgcacgtttctaaaataagatcttattctttgccattccagcaataggtgcacagatggtcaggatcgataccgacggaatccagaaggtcatccagccggttgaatttcaaagaagtaaaattcaattctttacggatctcttctaccatgatctcatatttttcagaagaaggatcggtgtattcctgaaggatttcatctgacacatcaggtccttccagcttctggatcacttttctggtaatcagatccatgtctgatttggaacgggagaagtttaagtacttgcagccgtagaccagtggtggacatgccggccggatatgaacttctttagctccactctcatacaggaactctgtggtttcacgaagctgcgttccgcggacaatagaatcgtcaatgaggagcaggctcttaccctggatcagttcatgaatcgggatcagcttcatatgggcgatcaggttacgggtatcctggatcgtcggcatgaaggagcggggccaggtaggtgtgtatttaatgaaaggacgggaaaatggaatgccggattcattggcatatccaaccgcatgggcaattccggaatcgggcacaccagctaccgtatccggtgtcacatcatccctctttgccatacaggctccacagttacagcgcatctgttctacactgacaccctcgtagacgctggacggatatccataatagacccacagaaatgtacagatcttcatatcctttccgggagcagccagtgtacggacttcctccggtgtcactaccacgatctcgccgggaccaagttcccgttcgggttcataacccagattcagataagcaaagctttcaaatgttacacaataagcatcttccttacgtccgatgattaccggtgttcttcccattttgtcacgggcagcgtagataccctttggagtcaataacagaagagtcatggaaccatcgatcagttcctgtgcataacggataccgtcgatcagattctccttctgattgataatagctgccaccagctcggttgggttgatgtcgccaccgctcatttccagaaaatgagtgtgtccgctctggaagatcagcttcgtaatctcttctgcgttgttgatcttaccaacggtagtaatcgcaaaggtcccatgatgggaacggacgatcaatggctggggttcgtagtctgagatacagccaataccaatattacctttcattttctgcatatccttttcgaatttggtacggaaaggtgcattttcaatattatggattgcacggtcaaaaccatccggtccgtagaccgccatacctccacgacgggttcccagatgggaatggtaatctgttccaaagaacaggtcaaacaaacagtctgattttgatgcaactccgaaaaagccgcccatagttatcctcctcagtaaatgttttaacaatcatcaagaaacattatatctgtgacggctccaaaaggaaagccaatttttgtcaaattttttgaaaaaataaaaggattgtggtatcgtagaaaacagatttgaatatgtgaggtgtaagagatgagattatttgtatacagtatgagaacctttgatgagcttccgttttttgaaaaattctgtgcgaaatacaatgtggaatatgattacaccaccgagacgccctgcctggagaaccttgacatggcagcaggctatgatgtggtggatgtgatcacgaccgtatttgacaagcctatgttgaagaagcttcatgatctggggattaaatgtattgccaccagaaccatcggctatgaccacattgatgtggagtatgcaaaggagctggggcttggtgtgatccatatcagttattcaccgaacagtgtagcggattacacaatcatgatgatgctgatgggctgtcgcaagatgaagcatattatggagcgggctgccattcaggattataccttgaaaggaaaactgggccgggaactgccggactgcaccgttggaatcatcggaaccggccggatcggtcgtaccgtgattcgtcacctgagcggatttggctgtaagatgctggcttatgatctttatgaaaatgacgaagtgaagcagtatgcgcagtatacagatctggagactctttataaagagtgtgatattattaccctccatgcaccggcaacagaggataattatcatatgatcggcacagatgccattgcaaagatgaagcaggacgtgattattattaactgtgcccgtggcgccctgatcgacacggatgcgctgatcgatggtatcgagagcggcaaagtcggttttgcaggattggatgtggtggagcatgagagcggtctgtactactttgaccgtatgggcgagccgcttcacaatccacgtctggcgatccttcgttcctattccaatgtggttgtcagcccgcatacggcattctacaccgacgaggcggttgccaatatggcagaaaattccatcatcggtgcgatcaaattcatgaatggagaagataccccgtatcttgtataggctcagcaatcggtttgcatggcaatgcatcggtgttttgtgcctgttatgtaaactgataattgtataaataccatataaaaatcagataatttataaaatataaatattttatctaaaaatagttgacaaaataggaaagatgttgtattataaagtcaccaacaagaaagagatacaaaaatctctggaacggaggtaaggtccaatgggaagatgaaaaaccttacaaaaagatgaattgatgaggatgaaacggacaactgaatgatctgacagaattaaaaagatcaagattctaagcagactggatgaagttgatcgagatccgaataagaatatcagacaggtggacgagaaacaccgtgatacaaagtcggacagacacttgctcagtatgatacataatcgcagatcgacagaaagtggatcagatcaaatagaaacagaggtacagaccgatgcagagtctcaagaaggatcataaaaagtaaggaaaaaaatcaaaggaggaccaacaatctgaaagacccaataatcttgaaaggagataataaaggtgaaactccagattgacaggtaaagagtcattcgatgaatcaaaatcggatgactctttttcgtgtgttctgcaaaagttatggtagagatttttggaagttgcggttataataaaaaggaacatgagcaggaggcacggaacatgtatgagtatgacagcagagtacgcctgtcggaggtggatcagcatcagaggatgactttgaatgcagtattgaattattttcaggactgcagttcttttcactcagaagatctgggtgtggggattgagtatctgaacgaacacaatcgaatgtgggtgctgcggtcatggaagatcgttgtggaccgttatccatatatgggtgaacagatcaaagtaggcacatggccttatgagtttggtcgtatgacaggacggagaaacttccggctgctggacaatcagggaaagatggcggcttatgcggattctgaatgggtattgatggatacagagcgcatgcggccaacgaagatcgaggaaagtctctccggagcatatacactggagccgggactggatatgggttcagaagaaggaaagatcagcttaccggagcagatggagagcagagatgcatttgaagtgcatgaatatcatctggatgtgaatcgacatgtaaataacggacagtatgtacagatggcggcagactatctgccggaagagacgaagattcacgagatgcgggcagaatataaacggtcggccgtactgggtaaccagatctgtcctctgatcggaaagagggagaacacctggatcgtatcgttaaatgatgaaaatggtatgccttatgcagtgatagaatttaagtgacaggagaaagaaagttgatgcagttaggagaaaaacagcttctgaaggttgtgaaaaaagtggaatttggtgtgtatctgggagaagaggactctgaagagagagtcctgcttccgataaagcaggttcctgaaaatatacaggtgggagatggcctggaagtatttttatataaggattccaaagaccgtctgatcgcaacgaccagagaaccagcggtaacacttggacagatcgcaaagcttccggtgaaagaagtgaccaagatcggtgcatttctggactggggattggaaaaagatctgtttctgccgtttaagcagcagacccaccgggtacatcctggagaagagtgtctggtaggactttacacagataagagtggacgtctgtgtgcgaccatgaacgtatatgagtatttaaggcaggacagcccttatgcgaaggatgatcatgtaacagggacaatctaccagatcagcaagaattttggagcgtttgtggcagtggatgatcagttttccggtcttattccagccagagagttttttggacaagcacagatcggagatcaggtgcaggcccgcgtaaccggtgtgaaggaagatggtaaactggacttgagtcttcgcgaaaaagtgggcgtgcagatcaatgaggacgcggcagccgttatgcgtgtgattgaagaatttgacggggtactgcctttcacagataaagcatctccggaggtgatcaagcgggaaatggctatgagtaaaaatgcatttaagcgtgccgttggtcatctgctgaaagagaaaaaaattgaaataacagagaaaagtattcgaaaactataaaaaacatccaaattctcccagactttaaaaggtatttttggatgggaatcaggaaaaaaggcttgcaaatacaggttttcttgagtataatgtaggcgtagaaaaggaaaggagattatagaaatgaaagtacagaatatcaaagatgtgaacaagttctttgaagtgatcgacagctgtaaaggtaaagtagagttagttacgggagagggcgacagactgaatctgaaatccaaactgtgccagtatgtatcccttgcaaatattttctccaacggtgagattccggaactggagatcattgcttatgagaaagaggatatcgataaactgctgtccttcatgatcaacggctaataacacataagaatttacagatcagggaatgatgatttatcattccctgatttttttatacgtaaatataatgcaaaatacacatggaatgtggtatcatgaaacgtagttcgatatacgcagaggggatacgaaaagaagatgaattttacacatttacatgtgcatacagaatacagtctgttggatggatccaataagatcaaggaatatgtggcaagagtcaagaaactgggcatggacagtgcagcgatcactgaccatggtgtcatgtatggtgtgattgatttttataaagaggcaaaagctcagggaatcaagccgatcctgggatgcgaggtctatgtggcgccaggttcccggtttgacaaagaggcaggaaataacgaagatcgttattatcatctggtgttgctggcggaaaataacgagggctaccagaacctgatgaagatcgtatcgatcgggtttatcgatggattttactataagccgcgcgtggatattgagacactggaaacatatcatgaaggtatcattgcattgagcgcctgcctggcaggagagattccacgctatatcatgcgtggaatgtacgaggaagcatgtaaatctgctctgcgctatcagaatatctttggaaaaaataatttctttctggagctgcaggatcatggcatgccggaacagaagcaggtcaatcagtcgctgcttcgcatgagcagggagacgggaattgaactggtggcaaccaatgatgtgcactacacgtatgcggaggatgtgaagccgcatgatatcctgctctgtctgcagacgggcaagcggctgtcggatgaggaccgtatgcgttatgaaggcggtcagtattttgttaaatccccggaagagatggcaacgttgtttccctatgcacctgaagctttggaaaatacgtataagattgcacagcgttgtaatgtggagattgagtttggcgtgaccaagctgccgaaatacgatgtgccggaaggctatacttcctgggaatatctgaataaattgtgctgggatggatttgcagagagatatccggatgataccggaaaattgagagatcagctgacctatgagttgtccattattcagaagatgggatatgtggattatttcctgatcgtatgggatttcatcaagtattccagagaccatgggattgctgtgggacctggacgaggttctgccgcaggaagtctggtttcctacacgctgggaatcacgaatattgacccggcaaaatatcagctgctgtttgaacgttttttgaacccggagcgagtatccatgcccgatatcgatgtggacttctgcttcgaacggagacaggaagtcatcgattatgtcgtccgtaaatacggcaaagaccgggtcgcacagatcgtgacctttggtacactggcggcaagaggtgtgcttcgtgatgtggggcgtgtgatggatatgccctatgcctttgtagattccattgcgaagatggtgccgcaggaactgaatattacactggatcgggcgttgaagaccaatccggagtttaagactttatatgacaccaatgagcaggtaaaagagctggtggatatgtccatgcgcctggagggactgccacggcatacatccatgcatgcggcaggtgtggtcatcagtcagaaggcggtagatgaatatgtgccgctctccagagcacaggacggatcactgaccactcagtttaccatgaccacattggaagaacttggacttctgaaaatggatttcctggggcttcgtaccctgactgtgatccagaatgctgtgcggatggccgagcagggacatggctgcaagattgatgtggatcacattgattacaatgataaagcagtgttggattctctgggaaccggtaagacagacggcgtgtttcagctggaaagtacgggtatgaagaatttcatgaaggagctgaagcctcagagcctggaggatattatcgcaggtatttccctgtatcgtccaggtcctatggattttatccctcagtatattaggggaaaaaatcatccggagacgattacttacgactgcccgcagctggaatcgatcctggaaccgacctatggctgtattgtctatcaggagcaggttatgcagatcgtgcagaagctggcaggttatacattgggccgtgcagacctggtgcgccgtgccatgtcaaagaagaaggcagctgtcatgcagcaggaacgccagaactttgtatatggaaatgaagcggaaggcgtacctgggtgtatttccagaggtatcccggaaaatgtggcaaataagatctatgatgatatgatcgactttgcaaaatatgcatttaataaatcccatgcagcggcttatgcggtagttgcctatcagactgcgtggctgaaatattattatccggtggaatttatggcagcgttgatgacatctgttatcgataattcaacaaaagtgtccgagtatattctgacctgtcggcagatgagcatcggtattcttgcaccggatgtaaatgagagtgaaagtgcattttctgtgtccggtggagccatccgttatggcctgaatgccatcaagagtattggtcgtccggtgatcgagagcattattgcagaacgaaaagcagggggaccgtatgtagatctttctgattttatccatcgtctgccaggcaaagatgtgaataaacgtgtagtggaaaatctgatcaagtcgggcgcatttgacagctttccggcgaaccgcaggcagatgatgctgatctacgggcagatcatggatgaggcagcgcagaaaaagaagacagaactggcgggacagatgagtctgtttgattttgcggcagaagaggataaggaagctttcaaagtgaagattccagtagttgctgaatataacaagggagatctgctggcatttgaaaaagaggtactgggattttatatcagtggccatccactagaggaatatgaagagcagtggaagcgagggatcagccatgtgaccacagattttctcccaccggaggagggagaacttccgaaggttcatgacggggagcgtgccaccgtgggaggcatgattaccactaagacgatgaaagccaccaagaccaataaaatgatggcattcatcaccattgaggatctggtgggaaccgtggaagtgattgtatttccaagagattatgaaaagatcggaaagatgctgaatgtggatgataaagtgtttgtaagcggacggatttctgctgaggaagatcgtgccagcaagatgatcctggaaagcatccgcccgttttcagagccgaagaaggaactgtggatccagtttacggatgtggaagagtttaaacgccgggaaccggaactgttgtcaacgatcatggacagcgaaggcagcgacagtgtgatcatctatgtaaaaaaagaaaagatgaagaaggtgcttcctgccagccggaatattaagatcacagatgagctcctggggcggctttatcagatatttggagagaaaaatgtaaaagctgtagagaagtatattgaaaatacaggaaaaatgcattaaaatgtgaaagaattacgtttttgacaaactgtttgcggaggaatcgaccatggcaaaagaagtgaacacaattggagttttgacaagtggcggagacgcgccgggtatgaacgcagccattcgcgcagtggtgcgtcaggcatgtgccaacggcaagaaggtaaaaggaatccgcagaggatatcagggccttctggaagaagatattatagatatgcagagagaatctgtcagcgatatcgtggacaaaggcggtactatcttatttacggccagatgctcagagtttcgtacagaagatggtcagagaaaaggtgcggagatctgcaagaaacatggaattgatggtctggtagtcatcggtggagacggttcctttgcaggcgcacagaagctggcaggatttggcgtaaatacagttggtgtaccgggaaccattgaccttgatattgcatgtacagaatacactatcggatttgatacggcagttaatacagccatgcaggccattgataaagtacgtgatacttccacatcccatgagcgctgcagcatcattgaggttatgggacgtaatgcaggatacattgcactgtggtgcggtattgccaacggtgcagaagatattctgatcccggaacagtatgattatgatgagcagaagatcatcaataacattatcaataacagaaaacgtggaaagaagcatcatattatcatcaatgcagagggaatcggacattccacttctatggcaaggcggatcgaggcagctaccggtgtggagacccgtgcaacgatcctgggttacatgcagcgtggcggaagcccgacctgccgtgaccgtgtctatgcgaccatgatgggtgccatggcagtcgatctgctctgcgaaggcaaaagtaaccgtgtagttggattcagccacggtgagttcaaggattttgatattaatgaagcgcttggcatgaacaagggtgtatcagattatatgattaaagttgcaaaggatatgtccaaataatgataacaagtacatcgaatccacaggtaaagaatctgcagcagcttggccgtaaggcaaagcttcgcaatgagcaggatgtctttcttgtggaaggaacaaaaatgtatctggaagctccagcggaacggatccgcaaggtctatctctctcaaagtctctatgaggaaaagggagaaagctttgtaaaaggacatgacgtagagattctggaggacagagtgtttgcagcggcctgcgatacgaagacaccacagggtgtgctgtgcatggtacagcagtatcattaccggttagaagacctgttgaagaaaaagaatccattgctgatgatcctggaaaatctgcaggatccgggaaatctggggacaattctgcggacagccgaaggtgcaggtgtagatggtgtgatcctgagcaaggagtctgtggatatctacaatcctaagacgatccgttcaaccatgggttctgtgtaccggcttccgtttctctatgtggacagcattgagtccatccttcctgtgctgaaaaagcatcatgtgcacacctatgcggcacatctgaaaggaaaaaacagctacgagcaggagaattactgtggtggaaccgcatttttcattggaaatgagggaaatggtctgactgatcacctgagcagtcaggcggacacattgattcggattcctatggaaggaaagctggaatcgctcaacgcggcagtcgcatctgcgatacttatgtatgagtcgtacagacagagaagaaatgcataaataaaatttgaaaaaatttaaaaaaaggtattgacttttatcaaaaatatgataagataaacaagtcagttcggtacagcaacgaacggacaacaagatggggtcttagctcagctgggagagcatctgccttacaagcagagggtcaca

SEQ ID NO: 2802 - DNA, 32759 bp, Unknown
  16S sequences of unknown bacteria
cacagctcatacatggagaacggcagggtcattatatcggctgaaataaggctcgccgccggtgacgccgacacgatcggagccgcgatgaaggactatatgtcgagaaggtgtgaaaagcagccgctcgacctgccgagcgccgggagcgtgttcaagcggggaaacggattcataaccgcgaagctgatcgaggaatgcggtctcaagggtcgcagggtcggcggcgcggaggtctctctgaagcatgccggtttcatagtgaaccgcggcggggcgaccgcgcgcgatgttctgacgctcgccgatatcgtccgggatgaggtctttgaaaagaccggaaagacgatagagcgcgagataaggacgctgccggacggaaaatactgaaaaataacccggtgcgccgtatgacctgttgcggtgtgccgatgacaataagaaaagagaagtgaaaaggtggaatttctgataataaccggtatgtccggcgcgggcaagtctcaggcggcgaacacgcttgaggatctcggatggtactgtatagacaatatgcccgctctgctgataccgaagttcgcggagatctgctccggagggaccggcttcggcgccgacccggcgccggggtggagacagggcggaaaggtcgccttcgtcgtcgatatacgcggcgaggatgagttcgacacgctgttcacaaggcttgacgagctgaagctacagaacttcaactgccgcacgatcttcatggactgcgcggacgaggtgataatcagccgttataagtatacacggcgcgctcatccgcttgtcgccgccaagaatataagcattacggaggcgctgaggctcgagagggagatgctcgcgccggcaaggctccgcgcggactatatcatcgacactacccgtttgactccggcacagctgaaggagaagatctcgggaatagtccagacaggcacggtgcatgagatgtttgtcacctgtatgtcgttcggcttcaagtacggcgcggcgagtgaggcggatctcgtctttgacgtgagatgcttcccgaacccgtattactatgaggaactcaaggagcacacgggacttgaggcgcctgtcagggactttgtcttctcacatgaggagacgaatacgttcatgggtaagctcattgatatgttcgatttcatgctgccgctttactctaaggaaggcaaggcgcagctgataatcgccataggctgcacgggcggaaaacaccgctcggtcgcgatagctgaggcgctcgcgtcgcatatcagaaagagcgggtacagaaccgtcacgatacacagggatataaacaagtaaaccggagattccggaaaacatattacgagaggacgatagaagtgtcgttcgcacacgaaacaaagaccgcgctggtggatacggcgctacagataaagcatcagtgctgccgcagggcgttcctttacggagcgctctacggggctgggacattttcaagacagaggataaagctcgtgaccacctgcgagcctttcgcggagctgcttgtcagatggctcgacgagcaggatcatataacagcgaatctttatataacagagcgcaagaccggcgccgagggcgagcgctcggggtgcaagataaccattccgcagaagcgggaggcggagaagctttttggttcattcggatacgcgccggacatcgccgagactgagataatgtccgggatgtttcattgtcagggctgtgagccgtcgtttgtcagaggggcgttcatatcggcggggactataaccgacccggagaaggggtatcaccttgagatgagcttcgctatggtggcggcggctgagagtttgtctggactgttgactgacgcggggctcgagccgaagatgatgtcgaggcgcggcgagagcgtgctttactataaggacagcgagagcatcgagaattttctcgcttatataggggcgaataccgcggcgttcactataatgaataagaagatcgagcgggagctcagaagcggtgctaacaggatagctaacggcgagatggcgaatatcggcaagacggtcgccgccgccgctgatcagataaacgcgataaataacctgataaggtcgggggagattgagcggataccggaggagctgaagcagacggcgtatctgcggcttgagaacgaggacgcgacgctggcggctttggctgagatgcatacgccgccgataacgaagtcaggggtgaatcatcggcttaagaagctcgtggagctcgggtcgggagtatgagggtgcttgttgacgcggacgggtgtccggttactaggattgccgtgcgggtcgcggctgagtatggggtttcatgcgtggtgttctgtgatatggcgcatgagtttcgggagattggtccggaggttgaggtcgttacggtgtcgaccgggtcggacagcgcggattttgcgctcgtgaaccgggcggagcggggtgatatcgttgtgacgcaggatttcgggctggcggcgatgtgtatggcgcgcggcactgtgccggttgaccagaacggacggatttacagcgacgataacatcggcctgctgctcgagcagcggaatatggcgaagcgactgagacgcggaggcgcgcgccttaagggtccgaagccgcgccgcgattttcaggacgccgcgttcgagcgtacgttgcgttcgttgttatcttccacagtttcgtgaattaattatttgtttgaagtttgagaaaaggaggggggcgggggaggaaaaacccttttcaaaggggtttccctcccccgcaaactaacaaatcccgtttcctcggaggtaggtatgcctgattttgtccatttgcatcttcatagtgaatacagtctgctagacggcgcgtgtcgggtcacggagatacctgtgcgtgcgaaggagtgcgggcatacggcctgcgctataactgaccatggggttatgtatggcgcggtggcgttttataatgcctgtaagaaggaggggataaagccgattatcgggtgcgaggtttatcttgccaggcggactcggtttgataagtcacatggggaggattccgcgagttatcatcttgtgctgctttgtaaggatgatgtcgggtaccggaatctgatttatatggtgactcgggggtttactgaggggttttattctaagcctcggattgatatggagctgcttgaggggcatcatgaggggctggtcgctttgtcggcttgtcttgcgggggcggtgccgaggatgcttgctaatggggactatgagggggcgagggcgcacgcggagaagatgcggtcgcttttcggcgaggattattaccttgaggtgcaggatcacgggattgaggagcagaagagggtgaatcggggtattgtgcggttgtcgcatgagttgtcgattcctatggtcgcgactaatgacgcgcattatctgagacggcaggacgcggacagtcaggcggtgcttctctgcatacagacgaataacgtgataacggacggtcggccgatcgggtttgagacggatgagttttattataagactaccgacgagatgcacaggctgttcgggtatcttgatgatgatccgctcgggagtccgcttgataatactgttaagatcgcggagaagtgcgattttgactttgatttttctaagttgtatcttccggcgttcaagccggaggacgggacgcctccggatgagtaccttgagaggctcgcatgggcgggctttgaccggagatttaaggacggacggtttgattttgagcttcatccggagactgagtaccgcgagagggtgaagtatgagctttcggtcatcaggaagatggggtattcggagtatttcctgatcgtgcaggatttcgtcaactgggcgaagtccaaggatatcccggtcggacctggaagaggttccggagcgggaagtcttatcgcgtttcttatcgggataacggatattgatcctctgcggtttgatctgctgtttgagcggtttcttaatcctgagcgggtcagtatgccggatttcgatattgatttctgctatgaccgacgggatgaggtcatcgggtacgtcaaggagaggtacggcgacgaccatgtgtcgcagatcataactttcggtactatggcggcgagggcggtcgtgagggatgtcgggcgggcgctcggtatgtcctattcggagacagacgcggtcgcgaagtgcattccgcgtgagcttgacgtgacgcttgacagcgcgctcgactattctaaggagttgcgggagatgtacgcgtcggacgagaaggtgaagcggctgatcgacacgtcgagagcgctcgagggtatgccgcggcattcgtcgacgcacgcggcgggcgtcgtcatcactgacagaccggtcagcgagtatgtcccgctgtcgatgaacggcgatgtcgtcgtgacgcagtttgatatggatacggtcgcgaagctcggtcttctgaagtttgattttctcgcgctgaggtacctgacgataattcacgataccgagaagcagatacgcgagagcgagccggatttttcggtcgataagctgccgcttgacgacaggaaggtctatgagctgatttcctccggaaataccggcggcgtgttccagcttgaatcgggcggaatgcggcagatgctgaccgggctgaagccggacagaatagacgatataatcgcggcgatatctctttatcgcccgggtccgatggattcgataccgaaatatatcgagaaccgtaaagacccgtcgaagatcagatacctgacgccgcttctcgcgccgatacttgacgtgacatacggctgtattgtctatcaggagcaggtcatgcagatctgccgcacggtcgctggttattcgctcggacgcgctgatcttgtcagacgcatgatggcgaagaagaaggtctccgagatggagaaggagcgcgcggtattcctcgagggcgcggaaaagaacggcgtcgacagagaggcggcggataagctctttgatgagatgtcatccttcgcgagctacgcgttcaataagagccacgcggcggcttacgctgtgctcgcttaccgcacggcgtatctgaaggcgcattatccgtgtgagtacctcgccgcgctcatgacgtcggtgctcggaaacgcggcgaagacatcggagtatatttcggagtgccagcgctacggcatacgcatcctgccgccggacataaacgagagcggaccggatttccgcgcgtaccataatgacggcgataagtatatccgtttcggtctgctcgcgctgaagaatctcggcgagggcttcgtgaagcgcgtgatcgacgagcggagggacagaccgttcacatccttcgaggatttcgtagagcgcctttggggcagcgacatgaacaagcggcagctcgaggcgctgatcaagagcggagcgttcgacaggctcggcgtctaccgcagcaggcttctgctcgcttatgagaagatagcggatcattatcaggagagaaaccgctcgaacgtcgcgggacagctcgatctgttctcgctcggagggtcggacgagaagccgaaggggtatgagtatcctgacgtcccggagctcagcttccgcgagaagctgagacttgagaaggagtgctccggaatgtatttctccgggcatctgctcgaggatttcagccggcacatagcgaagatcgcgccggtgaagatcggtgagcttgtcgcgtccggcgaggaatccgacgctgagacgcggttcagcgaccgtcaggtcgtcgtgatctgcgggatcgtgaataaacgtcagctcaagatgacgaagacgaacgcgcagatggcgtttctgagcgtcgaggacgattccggagagatggaggtcgtcgtcttcccgaagactctcgagaagttttcgcacctgctgaccgaggaggcgccgctgtgcattgtcggacagctgtctctcagggacgacgaggacccgaagctgctcgcgaactcgatggttccgctggtcgacaacgcgcacttctcggaagaaaccacggattcgcgtcagaattccgatccggcagcgcctgcgaaaacggcgccggaggtacggacgcgtcagccggaagctccgcgcacagccgcaccggcacagctggacgtacagcgccagagctcgccggtgtccgggtggcagccgtatcagccgctctgcccgtcgcgtatctatctgcgtgttgagagcgcggacgaaaactgccgggaattccgcaaggctgtcaatctcgcggagatattctgcgacggcatgaccgatgtcatcttctatgacaagtcgaagtcggcctatgtgaagatgaacggtattcgtctcgcggcgtcgccgttcgttgtcaatgaactgagggaacttctcggtgaggagaatgtggtcgtcaggcagtgatactgccaagacagaaaggtcgttataaaaatgggtctcggaaagtccggaaagaaaacaaaagataagacaaagcccgcgagtggctaccgcgcgatcgtgccgttcgcgaagatggcgtcgcccgtgttcatggcgctgtatttcgtctgcattgccgccgtggcgctgtcaggcattgtcgcgcttatcatatttcttgtcaacacgcctgttgaaaagatgcttcttccgccgctgatgacgcttcacggtgaggactactattcgatcttcatcggaaacggcatacgtatcgacgcggcttacgacacggtctcactcatggacgtgaagacggtcatctgggcggagcttatcatgtgcgcggcggcgtccgcaatgctggctcccgtctgcctcaatatgtcgaggctgatgaagaacgtcgccgccgagtctccgtacaacatgaacaacgcgaggtacacgatgtatatcggtctgtcggtgatgattggatacacggtcgtcctgacggcgcgcaggttctacaattacctgctcgtgaggacatttgtcgcggagccggagtcgatccacctgtcgatggggcttgacctcggcggagtggtcgtcgggctgctgataatcctgctcgggtgcgtcatcgggcatgtctctgagcttcacatagcggaggcgatgaagcccggacagaacacggatatccagccggttgacgacgaagacgaacgataaacgacaagatttgattaacgccgtgtttccggagtgttatccgccggagcgaaatgtaaattttcaggaaaacggcggagcaatatcaagtcgttcatcctgaattcataaagatgagctaaaatatagtaataaaacacgttcgatttcgtcttacagataaaaacaaaggaaggtaataccggaattgaataactattcaaaacggcccgccccgaacgggccgaaaaacaagatcgactggtcaaaggaagtcgccgggtccggaaggctcgcggggaaggttatcgggaaattcttctcgtatcttctgaacatacttctgacgataatgctcgtttgcttcatagccgggataatcgtcgtcacggtctttgccgtatatgtcaagaactatatcgacccggaggttgatctgtcacttttcagcgtgtcgaactcgtcgcagacgacgcgtgtgtactacatggattacaccgaccgtgagaaccgcgtaggcgagatggtcgagctcgaggacgagcgcatcttcggttctgagaacagtatctgggtcaagtacccggatatcccgaagaacctcgtcaacgctttcgtctgtatcgaggacaagcgtttctggagccatcacggcgtcgactggctgcgcaccggcttttccgcgttcaactatatcataccgataaagaaggcgcagggcggatcgactatcacgcagcagacgataaagaacatctatcacgaggacgactacacgccgcagagaaagatacaggagatcctccgcgcgctgaacctcgagaagcggctcgacaagacgcagatactcgagcagtacctgaacaacatctacctgtcccagaactgctacggcgttcaggcggcggcgtatacttatttcaacaaggacgtcagcgacctcacgctcatcgagtgcgcggcgatagcgtcgatcaccaacgctccgacaaagtacgaccctgtcctcaacccggagaagcaggctgagcgccgcaacagcatccttgacctcatgctcgagcagggctatatcacgaaggaagagtatgacggcgcttacggcaaggagctgaagctcgattatcacggccgcgcgcagcagcagaccgcgtcgacgaagtcatggtataccgatcaggtcatagtcgaggtagtcgccgcgctccaggataagcttggttatacggcggcgaacgcctggaactacctctatacgggcggtctgtcgataatcactcttcaggacccggaggttcagtctgttctagaggaggtttatctcgacgagaattcattcccgaagacgaacagcgacaagcagccgcagtcgtccgccgtcgtcgttgacccggcgaccggagacgttctcggaattgtcggcgcgcgcggtgagaagacgggcgacctgctccagaaccacgcgacaaagtccacacgttcccccggttcgtctataaagccgctgtcggtttacgccccggcgcttgaatacgggctcatcacctacggaagtgtcttcgacgacacgccggtctggttcaattacgccgaggacgacaccgcgaagacgaatccgatcgcctacccgcgcaacctgccggagaggtacaggggactcacgacggtaaacgtcgccgttgagcactcgataaacaccatcgcggtgcgcataatgaaggagctgacgccggagcgctcgttcgactttgtcaagaacaagctcggtatgcacagcttcatcgagtcggaggagatcgccggaggaaagacgctgaccgacaaggatatcgcgccgctcgcgctcggagctatgtcgaagggtcttacgaacctcgagataaccgcggcgtaccagatattcccgaacggcggcgtatacaacaagccgcgcacatggcttcaggtgctcgacgcggacggcaaggtcgtccttgacaacaccgcggacagccatgtcgtcataagcgagcagaacgcgtcgatcatgacgaagatgctgaaaaaggtcgtcgacaccggtaccgctaagagctgtaccctcaagaactcggtgaatgtcgccggaaagaccggtacgacatcgagcgatgtcgaccgttactttatcggttatactccgtactacgtgtgcggaatctggttcggctacgagacgccgaagtctatcggcacgaacatcgcgtggaatccgaccgtgcacgcgtgggatctcatcatgacgaagcttcatgagaagtatatcaacggcgcgacgaacggcgggacaccgcttaagacgttcacgacggcggacggcgtgatcaccgcgaaatactgcaaggattccggaaagctcgcgacggcggcgtgccaggccgacccgcgcggcaacaggattgaggaaggttacttcacggcggcgacggcgccgaccgagtattgcgacgtccatgtccttgtcaattacgataaggtcacgaaggcggtcgcctgcgacaagtgcccggaggcgaacatcatccaggtcggacttctcaaggtcgaccgcgagttcccggctaacatcaaggtcgaggacgcgcagtacacctggcgcgaggttcccgagggaactccgatgcctgacagggacgacgtgccgttctatatcggtctctacccgagcggaaagtacccgggctacagcgcgaccgacggaaagccggtctacaaccgctactgccacgagcacgctagcctgcccgaccctgagccggaaccagagccggagcctccggtcgatgacacgaccgataccggtgagccggacacggacgtgcctgtgaccgacgtgaccgagcctgacacctccggcgaggatacgtcgacagacactgagtccgcggcagacgacgcggcgtgaagacgtcagaataaaatctttgatcacctcatacattttttgtgtgaggtgatctttcatgtcattattcgggaggggacgcggatgcagattcgggaacatccgcgggaggatacgggcggagctttgccggatagatatccggtgcgtcatcgcgggtgcggtgatcgttctgctgtccggatttctgagcgcgctcgcgggcgggagcgccgacgcttatggcgagctggagcttccggcgggagcgccgcctgggttcgttttcgtgattgtgtggacggtgctttacatacttatcggcggagcggcgggggcggtggcgtgctgtcccgacaggtcgtgcgagcaggataagtataaggggctgctgtttttcattatcatgatggtgttcaatttcatatggtatccgctgttcttcggggctgaggcttatttttcggcgttcatggcgatcattatgatgattgtgatgagctttttcgctatgtgtcactttttcaggatatatatagtctgcggggcggctatggcggtgtatctcgtgtggctcttttacgcggcgtacctgaatctcgccgttttgttcctgaactgaccgcggcgaaaagattaacggtaggtataatacacaaaactgtcagaccattttgtgaaaacagacaatagcgggtaaaattgttttgggtaaagcaaaaaaaataacgaaaaaagcttgacaaatgaaagaagtcatagtataatagatgtataagtgaccgatcgggggatcggcgctttatatcaaatcaggaggaatagctctaatgaagttaacccgtatcttatctatggttctggcaggtatcgtacttgcgtttgctctcgtttcctgcggcagcgagcccatgaaggaagtaactgtcactctcaagatcgctggtcctgaaggtgaagacgccgtgcttgacactcaggttacggtaaaggctgccgagccgactgttcttgacgccttcatcaaagcttgcgacgagaatgagatcccgtacgttctgtccgacgacaatgcttctgtcaaggatatccaggatttcacgaaccatacggacgaaaacggaatcgctcactactggatgtactacatcaacgatgtggagcccaccagcggcaaggcaaacgccaacacgatcaacgacggcgacgtgattctttacagctacgtttcgtttgatcccagcgagtccaaataaaagctgaaaacaggaggatgacccggacaggcgtcatcctcttttcatacatgcggcgcgggagtcatgatgcccgcacggaggtggaaaatgcttgacaatacgctttataagctgaaaaacaataaggaactgacgataggcttcttcggcggttcgataaccgagggcgctggggcgtctgacgcctcgaggacgtcttggcgaggctcggtcatgaggtggttcagggagagatatccggatcatgagatacgcgagatacaggcggctatcggcgggaccggaagctcgctcgggatattccgctgtgagcgcgatcttctgtcgaagaagccggatcttgtcttcatggagtattcggtgaacgacggtctcggggactatgacaccataatgactgattccgagacgatcgtcaggaagatatacgcgtcggatccgcatactgatatcgtgtatgttcacacgacgacaaaatatctgtccgaccacatagcgtcgggcggagagtacacggcgcggagcgcgcattcggcagtgatgcaccgatatgggataccgcagacagacgttggtgagattctgcgctccaaggtaacctcgtccggcggagactggaagacgctgaccaccgataccgttcacccgaacgacgatggttatgccgtctataccggggcgataacgaagtttctcgctgatatgctcgacaaggcagagcctgtcctttcggagaaggttctgcccgaacagctgtcgcgccctctcaggcttgacgcgcggcttgtggacgcgtccgagggtgagctttccgggttcggagtggtccgggagacaatgtgcggacggtacgacgggtatatcgagggagaaccgggagcgtcactcacgtatgagtttgacggccgccgcgtcggtctgtacctgatgctcgcgaaggattccggcgatcttctctggagcgtcgacggcggtgaagagaagagcctcaggacgtgggacagctactgcaagagcttcaatcgcgccggaggaatgctgctcggcggagagctcacggaaggtcaccacacgctgcgtctgcgcgtcgcggacactaaggctgatgagtcggacgggaaagtcgtcaggataggcgctttcatggtctattgaataagaaaacgctcacggagaccattccgtgagtgtttttgtgtggtgcgctcaatatgtgttacaacaattgcttcggatcgctgtccggtaaacggactacgatctttttttcaacctgcggtttaataacatatcatggaatcaacatacatactattgcaagttgagctatgccgtgttataatattattacgaaccggttcgaaataacggcttagtgccggaaggatggtatgaatatgcttgaccttgaaatcttcggggcgaagctccgggaacacagaaaaaagctcggactgacgcaggaggcggtcgcggatcgcgtcggcgtctcggcgcaggcggtctcgaagtgggagtccggcgagtgcctgcccgactgtttcaatctgaagtcgctcggtgagatctatggcgtctcgctcgatattctgcttgacaccgataagagcggggatatagacgccgtggcggcaaagatagagcagaccgcggacgaattcatctgggcgaagaacagccgggacatgaacgcgcaccgtgatctcggcggcgaccttctgaaaatgtggaaggggatatactttaccgaggtcggcgaccatgagaagcagcgcgcggacttcgcggcgggaaatctcagggtgtgcagcgacttcgggctgaaggtctgggatgacgatggggtcgtgtgcgtcgtgcgggatgagctcagagaaaagctcggagaggtcggcgggaaagagcttggtgttctgagacagctctgcactgagaacggattcaggcttatatcctcgctcggaaccgcacaggtgacgacaaaggaggaactgaattctttcggaataccgccggatgagcttaacggaatgctgacctgcttcatggaaagcaacatgatagagtataaacagttctggaagaacggcgggggctacatgatctgcggccacgccggtatcgcggcgtatatggttctcgcggctgctttcctgctcgcgaagaagaagtacacgctgagcgaatttatgccggtataaatcgaagcaggaagctgatcaactgatggtcagcttcctaccaggttgttatcttgccctcagcccggcgagcgcggcgtgaagcggacactcaggcggtgttcctcatgaaaaaacggctcgaaatttcgagatatctctccggaatgtttatcggacgaatagtttttcccgcgtctgtccacttcgcgccctcgtgacagaggtttctcggagcaccccggctctggtcccgtggtcgagcgctttctgtccgtttttgcagagcccgcgcgcgagtatgtggttataaaattccctcgggcagacgccgcggagcctcgcgtggtccgccgagatcctgccccggtcgaacggctttccgtcgtatatgttcttgtcggctatcatttatttgttccattctgaggctctgccgcaggagccgtggcattcgcgccggggtctttctttatcataagtccctcgacgaccgccgtgcctttcttgccggagaacttcgtgtagaaatatccgagcaccgagaaggtcagcgcgccgatgaagttgacgaacatatcctttatagtgtcgataagtccgatgtcgagatagccgtttattccgagcggctgtccgttgacggtcgtgtcggtgatatcctttatctgcacggcaacgttcagtccgtcggggttgaggagtgttgacgagatggtcgtgacaatcgtgtcgcgctgcatatcggtcaggaatatcctgtccattccgaactcaaagaactcccaaagcacgccgatcgtcattgagaagcagaacgagaacatcgcgacaaagaacggcgaaaggttcagtccgaagaccttcttacgattaagaatgacgataagtgacagtccgatcgccgccgcgagaaatccggtcgtcacatgcagcatcgtgtcccagagtgcgaacttcgtgtaatagctgttgatctcgcccatgatctccgccgcgaagataaagaccagcacaatattctcaagcagtgccggaacgtcgaccctgaataccttctcgacgaacacggggacgagaaacagaacaagcgtgaacgcgcaaaggaagacgttctcatagttccctatgaagaactgacggatcccgacgagtatgaccagcgcgcggaggatcatatagattgtgaacgtgactttgttctttttgtattccgcgctgagctgaacgaaaaaacctggcttttttgctgcttttgccttcttttctttcattgacgttatcctttcggtacttttattgcagatacgctgccgcggtaatatcgccgcggcggtcgtacttatatcaggttatgacaatcagccggcagcgtttgagccgtctgccgtggttgtctccacggtttccggaaccttctcttttccgagataatccgggagcttcatgcccgccatatcgaacatctcgttcatcggaggaatggacttcatcattccggacaggaagttcgcggtcgcggtctttccgtccgcgccggtgtttccgccgtcccagacagtgaccttgtcgatcttgaggttctttatcgcgtcgacctggatcttcgtcagctcctcgagcttgtcggcgatcatgagccttatcgcgtcgtttgagtcgccgcccgcggacttgacaatttccgcgaaaccctccgcctgctttgtgagcatcgagcgcataccgtctgcctcagcctgcattctcatgagcgtagcgtcggattcacccttcgcgcggcgtctgatctgctcagcctctgcctcggccttgagctcgagctgtttcttttcgatctcagccttgacgatgacgtccgcctcgagagttgcctgttcgagggtggcacgcgcctgctcagccgctttctgcgcggaatatgcctcttcgagagcttttgccgcctggatcttttccgcggcggtagctctcttgagagcctctgcctcacgctcacggcggacggagtcggactcggctacctgaaccttcgcttcgttttcacccttgatagcctcggagttcgcgagcgagacgctgattctctggtctctctcggcgttcgcggcgccgatcgcgccttcgcggtcagcctgcgcgacagagatcttcgcgtcgtttatcgccttcgcggcagcttccttaccgagagcgactatgtatccgctctcatcggtgatgtcggtgacgttgacgttgatgagccttaaacctatctttttgagctcggtttcgacgtttctcgagacagcctcgaggaacttgtcgcggtcggtgttgatttcctcgatctccatcgtcgcgattacaagtcggagctgaccgaagatgatatccttcgcgagctcctgtatgtcgtcgagcttgagacccagcatacgctcagccgcgttctgcatgacgcccggctcggtcgagatgccaaccgtgaacctcgaggggacgtcgacgcggatgttctgcttcgacagcgcgttcttgaggtcgacgttgatcgacatcggcgtcaggtcaaggaactcgaccgactggatgaccggccagatgaacgccgcgccgccgtggatgcatttcgcgcttcttgaagttccgtcggcgttgcttccgactttaccgtagatgaccatgaccttgtcggacgggcacttgcggtacctcgacgcgatgacgatgagagttgtcagcacgatcagcgcgatcacgcagatcagaacgagaagacttgatgtgttaggcattttctatctccttaaaataaattaaaataaaattatttcactacacgttcgaccatgacaaggccgttctcgtcggttgagactacacgcacggtctcgccggtcttcagggtatcctccgacgccgttatagcgtcgacctcgatgtatctgtcctgcacggttatgtttatctttccgcgcccttcgcccttcggcgggatcgggatgtagacctgtccggtcttcccgacggcggctccgagctgaaggtttccgctcgattgcagcttcagcaccgacttcatgagataagccataccgaacagcgccgcgaccccgcagagcacagcgagcagtatcgcctcgacctgtcccatcccgaagtctatgaacactatcccggaccatcccgcgatgcagaacatagcgacgatcccgcgcaccgaaaacagcgtcagaccgtcatccgagccgccctcaaggtcatccggtatgccgtcgccgtcaaggtcgcatccgcagtcgcacccgtcctcgtgacccgcgccgagtccgaaaagcagaagtatagtctgaacgacgagcaccagcgtcgccggtattccgacgagcgcgaatatcctttgcaggtcggtgagaccattccaccacccgatcataaaatcctccctttcttaagtcagatatcgacgcctcactggcgtcccgggaacagattctcgtagagactgttcgccttctgcctgaccatagtcgaaaaatacgcgtagattatcatttcgcaggcgttctcgagtctgcgtctcgcgccgggcgtacgctcctcatagctttcaagcgtcttcgagatcagcccgcggaggcttggtgtttcgcccgcctcgtcgttcatcagctcgtcgattatccggcacaggtagtcgtagagctcagactccggtatgatatcgtccgatttatcgcccgcgactccgttcacgtatgtgaggagcccggcgatcctctcgagctgcatcgactcgcgcatcatgtttattatcagtatacgtgagagctggtcgatattgtatctcttgttgtgcgagttcgcgacccatccgcgcttcgtccagttctgcagcgtcgagccgtctatcccgcatatctcgcgtatctgcgagagcattatgccgtcggtgatatagaatatcttatttaagaactcgagcccggtgacgtttcccattcgctccttatccatccgtgtgcccggaatgagcgaggtttgtatctcaagcttcattacatgacttttcctttccgcccgcttggcgcgggctggttctgtgtaataagattatatcacataatcacgtgattgtcaagcggcatatgtaaattttccgtaataagctgaattttcaaaaaagttgcgcggaactgttgcattgccggaataaatgagatataatattcatatggtccgcgacaggacaacaaaataaagaaaacaggacggaagacaagcaatgaaggaaatacagcaccacaaaacgctcgattacgtgataaactatccagatgattacgaggaagggaagaagttcccgctgctgatacatctgcacggcgcggggacaagaggaaacgacatcagccttgtcgccgacacggcggtaggtccgctcggcgagataaaccgcggggtgaggctgccgttcatcatcgcggcgccgcaatgtccgggaaagacctggtttgagtacagtgagacgctgctctcgctgatcgacacgctggtcgcgcgggaggacgttgaccgctcgcgcgtttatctctgcgggataagcatgggcgggtacgcctgctggcaggtggcgactgtcagggctgagcttttcgcggcggtgatgccggtctgcggtggcggaatgccgtgggcggctggttatatgaaggggcttccggtctgggcgcaccacggggcgctcgacggggcggttgacgtgtcgaactcgatcgatatgtacaaggctctgaaacgaattggttcagaggcgaagctgacgatataccccgactgcgagcacgactgctggacccccgctttcacgaacccggaggtttacagatggatgctccgccaccgccgtgacgagaactggcaggtgataagcgaagacgcgctcgaggaacacgcggagctcgtccgtgaagcggtcatgggtgagctgccggagaacatgagcggggatacacggttcgggtgatatgtagttaagacaatactgatctaaggggctttcacgagaaaaagccaataaatccaagctttttttcgtgaagacccgttttgttcagtgtttccttaagaaaaaaacgttgtttcttgttttttcttctgttacatttaatttcatgaacagcaaaaaaatgtgtgagaaaaattctttgaaatatgttataataaaaaatacccggttttttccgggcgaatatttcacggaaagaaaaagaaagaagaaaaaaatgaaaagaactttgtcactgtcattggcgctcatgatgctgctcctcagcgtgtcctgcggggacacatcctcgaatggcggcaacgataccaccgcgtccggcggctcggaacagaacaccgcgtcggataccgaggctccgaagtcgctgctcgatgatctcggcgaaaagaatttcgagggcagaaccttcaccttcctcgactcaaacggagctcccgccgcacacgtcaatatcccgggtgagtccgagaacggcgatatcatcaacgacagcctttatgagcgtgacatctacatcgaggatcgctacaatgtgaagatcgactatatcgagacgaacgactcgaacctcggctgcgcgaacgtgaagaactcggttctcgcgggtgacagtgagtatgatttcatcatgtcccgtgccatgggcggatgccttgaatccctcgcgaccgacggctctctcgcgaacctctgcgacatcccttacctttctctgaccgagaactggtggagccattatatgtacgacaacctccgcattgacaataagatgtacttcacgaccggtgatatcacgccgaccatgtaccagatgccggcttgcgtctatatcaaccgtgacctcgccgaggactatcaggtcgacacggatttcgcttcgctcgttcttgacggaaagtggaccttcgacgcgctgaaccaggttgtcgcggacaaggacgatgacctcaacaatgacgatgtctataatgagaacgacgatttcttcggcttcgcggttcagatgcacggacttatgacccagtctctgctctgcggcgcgggcgtcaacctcagcagcgtcactgacgacggatcgaacatcgtcatcgatttctccggcgaccgcaccgcaaacgtcgtagagaagattcggcagctcatcccacagcacatcgtgtacggcggcagcggagtcaatgtcagcaagatcttcaccgagaaccgttcgatcgcgatgatgcactttgtcgagtcctcgatgaattctctgcgcgatatgaagagcgactactatatccttccggtgccgaagtacgatgagagccagaaggattaccgttctgtcgtcaacccgtggataaacgcgttcgccgctatcccgctcaacgctgaccctgagttctccggcttcatcaccgaggctatggcgcgctattcctatgagaacatcagaccgaaggcttacgacatcacctataaggttaagatgacccgtgatgaacacggcgcggagatgcttgacgttatattcaacaatgtttatctcgacttcaactgcatctacgatttcggtaccaccagatcgaagctcgactcgataatcattcacaacgatccgcttacttcaacgatcgccgctgtacagagcaaggccgacagcgagatcgcgaagttcatctcgaactgggacgctgaataagcgataataaaacggaagcatggacaataccgtgcttccgttttttatttgaaaaagtttttcagcccgagcatctttctgagctttatcaggtaaagagttataagctgtgtcgaggcgatgtcgtagagaacgaaaacgccgttgcacagcagatagacgagccatccgaacccgaggtcggcgtccggcagattgaagacatattcgctgaggaaaataagcagcgtcagcattgagttgaagaagctgagcttcagcacccacgccacgatatagtggagccgttcgaacatagccttgaatatcgggtagatcccgccgaacagcgcgtacagaagcgccggaaatttcgacggcagaagcagcagcgacagcgtcccggtcacaagccacacaagatacgggtagaacccgccgatctcgatgacagcgagcatcacaagcagtgaagccatggcgaccatagtgaggtcaagcatcgtgaagaccgacccgagcatcagtataatgacgccgagcgccgagaggatcgccgcgagcgcgatcttctttgagttcttcattccggcgccggtattgttcttttttggtctgctgtatggagcgtttctcatcggtttcctccggttaacagcaggagatcaggtctccgccgcagcactcgcacatacagtcggcgcagatcagtcccgagcagatgtcgcacggcgtgttcccgagtccctgacttgttctgtatccgccgccgtagcccgctacgtccgagcgtatgcggttgagcgccatcttgtactcgtcgttcgtcgggtcgagatagcaggcggtctcgaggtatttctgcgcgtcgtagtaccatccgcgctggatgaggacgcagcctttcagaaaattccattcagccccgcggttctgctgacccacggcgtcgagtatcagctccgcctcggagaatctgctctggtttataagctctctcaccttcgagtagtcgccgtatgtgccggacgtgtaggaggttccgtccgcggaggttgttctcgcggtgcgctccttctggatcgtgtcgtacgcctcgttgatttccttcatcttttcctcgacgagatcggacaggggattgttcacgtagttgtccgggtggtattttctcgcgagctcgcggtacgccttcttgatctcttcatctgtggcgtcgcgcgggacgcctagtactttgtatggatcgttcatatgctctcttttcctgtatcctgtgcggcacttgtgctttatacggcgccggtgtcctgatcgttgttgattcccgcgccctcgtcgtggcagacggcggatttcttttcgccgccgtccccgtaaagaacacgctttatcgtcttcggcagtccgagatagatgatgttccggatgatctccccgtgggcgggaagacatgaaaaatcgagaagctcgaccgcgcgcgaggcgccgacaagctccatcgtcagcgagtttccgacctcctcccggtgtctgtcaaagtattccgccgcgtcgtcacgtccgccgaacgggttgtaggagccggtctcaaggtcgcttttcagatcgtccgccgcgtcggttacatagacgaaccgtccgatgtggcgtccgatttccgacgctgttctcgcgccggggcttccgtccggaaagccgtatgagcagaccgccgccatcagccgcccgaacggctcggcggcggcgtcgggtgagtaaacgcgttctttctctatctcgccgagagcctgaagttcgcgctttattgtctcctcgagctccgcgaaaccggagccggcgtgcttccgggctttcttcaccattccgcggaagatggggacaagcagcttcgccccgagccttttgacgcctttttcgtccgagacgtcgtcgagcagcttatagtaaccgagcacggcgctcatccgggcgcatatatcgagctgctcagaatcgacaataaccgggcgctttttcatcgggtgcgcgatacatcttttcttctcgacgcgtccgctctcccccgcgatcgccatcctgacgagcgcgagaaagacaaaatcatagctcagcgacatcctcgacaccgcggacgtacatcttcccatcgagtcgcagagcccgcagtaaacggcgcggtagagcccgtactccctgacccggagctccccggtatcgggacgaatgtatccgaacaacagtattcacctcatcagagcgggcgtccgcaggatttcttcaagatatattttactacgaacttattctcatgggcttaattggcgttgaactttttgtaaatcttgacaaaagcccgcctctcagataaccccggaatcgcggatggcgtcaatgagtatccccgccgcgcgcgcctgaccgttgaggttcgggtgtccgcaggagcctgtctcgtccttcatctcgtatatcgggcggacaggtacgtagtggacatggctgtcacgcttctgaatatcgcttatcacggacgagagcacggcgtcgtacctgagccccatcattccgtagacccagaatatctcagccttcgggtatacctcgcggatgtgctctatgaacttacccgctccgtctctgaactcatcgtccgggacgcctccgccgcagtcgtttgttcccgcgttcacgacgacaatatccggaacccacgacgtgaaatcgtgctcctcacgtccgtgccttgtctcgaccgagaagaaatccgggatcctgaatccgacctcgccggcgcagttctttatgattccctgaccggatatagcctcgacgcgtatgtccattccgagctttgacgctgtgagtcccgcgtaggtgcgggtcgggtcctcctgataggtgcggaaatccgggtctgccgcctcgccgaggtcgccgaagccgcaggttatcgagtcgccgaagaactcaatgcgcttttccggagcggcgggcggcgggagaaatccgcagtcctcgccgaagacgctgagcgacgcgacctttatcgggttatcgccttccgagagccgcctgaaggtgagcgtatggctgccgccgccgagctgttcgagcaggacgacttccctgccggtagagagcggagttatcgtctcgacgccgtcgactatcgtcatgacatagaccggctggtcgtcggtgatatcaggaacgaacgcaatctccgcgcgctctccggcgaagctcgcctcaaagccgctgagcgaccagcagagcgcgagcgcgtcgttttcgtaaacgctccgtccgataagccttttttcgagttctttcaggttctttgtgattttcatgatagaataatgcctttctgtcgggtatgattcatgccccggtatctgttttttcagtcttcgtccgtgtcgttgtcatctgagctgtgctttccggcgagcttgtccgctatctttccggcgaggttctgctgaggggcgtcttcctcttcttccggctcggtcactgtcacttttactttttcgaccatcttgtctccggtctctgtgacctccacatggagcgtcttgtaatcgaacgaggcgccgggcgccgggaagctgcccatcgtctgagtcacccagccgttgaccgtctgcggcatatcgtcgtcgtcattgtatttcacgtcgaaatagtcgaacaggtcgtcggtgcgcgcgtttccgttcactgtgacgcttccgtccgggttcttcgtgaacagctcgactacctcgtcatgctcgtcccatatatcgcccacaagctcctctatcacgtcctcaagcgtcgcgatacccattgttccgccgtagtcgtcgaggactatcgccatatgcgccttcgccttctggaactgcgcgaggagcttcgatatcttcacgtggcacggaacatagagcgcctttccgagaacgtccgatatctttttgttcccgctcttcacctgatagaagaagtccttttcgtgcaggacgccgattatgttgtcgatcgtctcgtcgtaaaccggaagcctcgagaagccggttttgtggaatatatccgcgatctcgtcgttcgtgtcggtcagctctatcgctacaacgtcgacccgcggggtgattatgtccgccgcctcggcgtcgtcgaactctatcgcggagcggatgaggtctccctcccgctcgtttattccgccgtcatgctcagcctcgtcgacgattgtcttgagctcttcctcggtgatagccgccgtgccgccgaacttgaatatcttcgcgagcagcttcttccagttcttgaaaataaagttgagcggcgtgaagagcaacatgagagcgtttatgaagggagcggagaatttagcgaagctgtccggcgtctccttcgctatgcttttcggcgatatctcgccgaatatcaggacgatgaccgttgtgatcgcggtcgacataacggcgccgttcttcgggaaccagccggtgaacatgagcgtcgcgacagacgcgagggttatattgacgatgttgttgccgatcagtatcgtcgagagcagagagtcgtagttgtctgagagccgcatgacgagcgccgcgcgtttgtccccgtcagaggcgaggttcttcatcctgatcttgttgaaggacaggaaagcggtctcggtcgcggaaaaatacgccgagaatatcacgcatatcagaattactgttatctgtattatgtttgcctgtgtcattatgttttatgaatcctccgtattatgtcgtatcgtatcggttatctgtctgttttctgtcccgacatcatggcggagtgatgctgtcttccggcgttatgcgcggagggtgtcgagtaatgttacatcggtcgggggcgggtttgtctcccatgattaatggtcttccttttctgattcgatttgacgtccggcacacaccttcgcgtcatataaccattatactatatcgcggcgcattttgcaatgcttttccgcagatttttcaaaaaaagataagaaccgccgccggacgacgtatttactttaacttcatactatgtgtttgaaaagtcaatacgagtctgttatactgttattatcggaaacgtcagaataacataaaagggagaagagaaaaatgagcggaaggaacgagagattcgtgcactttgagaacgtctgtaaatactataacaacaaaacaataatcgccgcagatcatgtcacgtttgatatagccgagggcgagttcgtcgtgatagtcggtccgagcggcgccggaaagacgacgatactgaatatgctcggcggcatggacacctgcgacgagggcgtgataagcctcggggaccgcgtcatcagcggcgcgaccaaacgtcagctgaccgagtacaggcgcaccgacgtcgggtttgtcttccagttctacaatctcgtgcagaacctgacggcgcttgaaaacgtcgagatagcggcggagctatgccgtgacccgctcgacgcggcggagacgctgagaagcgtcggacttgagaaccgcatggacaatttcccggcgcagctctcgggcggcgagcagcagcgtgtctcgatagcgcgcgctctcgcgaagaatccgcgcatacttctgtgcgacgagccgaccggcgcgctcgactacaacaccggcaaggcgatactgaagctcttatgggacacctgccggaactccggaaagactgtcattgtcatcacccacaacagcgcgctgacgaggatggcggacagggtcatacacgtaaagaacggcactgtgcagacgattgagacgaattcctctcccctgccggcagaacagattgaatggtaaaggcgaaatgaagaaaacatatctgaaatcaatgctccgctcgataaagagctcgttctcgcgcttcgcggcgatattcgccataacggcgctcggggtcgggtttctcgcggggctcatgtcgacgacgccggatatgcgccggaccatcgatcattattacgacagtcacgacatgatggacatctacatgaagtcgacatacggctttaatgacgacgatatcgcggcggtcaggaacaccgccggggtcgcggacgctatgccgcactatgtgacagacgtcatggtgaagagcgctgacgactcgatggcggcgcgtatctacggctatgactatgaccgcctgaatatcggaaagctgacgctcatcgacggaagataccccgagaaggcggacgaggtgctctgcgaggagggcaacgggataaccgcgtcgcttgaaatcggcgacaaggtgacaataaccggcgacgccggcgacacgctgtccgacacgtattcggagactgagctgacggtcgtcggaattgtcatgaacccgtactatatgtcggctgagcgcgagggctcgacaaagggcaacggacgtgtcggcgtgcttctctacggcacggaggagctttattcgccgctcggtgtttataccgacatctacgtcaccgcggagggcgcgaaggagcttgacacctattccgaacagtatgatgagctgacagcggacctgacggcggcgctcgaggcgacaggcaaagaccgcgcggagatacgtttctccgagataaaatccgaggcagaggaaaagctcgccgacgccgagaacgagtacaggacagagcgcgaaaaagccgaaaaggagctcgcggacgccgggaaaaaactcgaagacgcgaaggcggagctcgacgacggcaaggcgcagatagccgacgcgaaggagaccctcgccgaaaagaaacgggaattatccgacggcagaacacagcttgagaacgcgaagaaggagctctcggacaacgagaaaaagctctcggacagcgaatccacactcgccgacagcaagaaacagctcgacgaagccgacgcgcagctgaaaaaaaaggaatcggagcttgaagcgaaccgcacacagcttgaggcttcatggaagcagctcggggcggcggaaacagagctcgcggcgcagaaggcgtctctcgaggatacgaagaagctcctcggcgaggacgacccgcgcgtcacagccgctgaggcacagatagctcagtatgaggcgcagctttccgcgaaccgctcgtctcttgaaacggctcaggctcagtttgacgacggtgaggcacagctgaaatccgcgcgcgctgcgcttgaagagaaccgcgcgaagctgacaagcgggcagaacgagcttgccgcggcaaagaaaaagatagccgacgcgaagagtcagattgcggagaacgagcagaaactcgcagacggtgaaaaagcgatatcagacgccgagactgaaatctccggaaacgagaaaaagatagccgacggagaaaaggaatacgccgacggtctcgccgactacaacgaggcgaaggaaaccgccgaccgcgagttcgcggacgcggagcggaagataaacgacgcgaaggacgagatctcaaagctcaaaaagcccgagtggtacgtgctcgacagaagcaagacgatgagctttgcaagctttgactcgaacgcagataagatcgccgccatcgctaaggtctttccgctgttcttcttcctcgtcgcggcgcttgtggctcagaccaccatgacgagactgatcgaggaggagcgcgggcagatcggtattctcaaggcgctcggctattctaggtctgacatcatgatgaaatacgtgatctacgccggcataccggggattttcggaagcgcctgcgggctcgcggcgggattgttcgtcttcccgtcggttgtctggaacgcttataaaatcatgtatcgtttcccgacgcttgagtacagcttcattccttcgatagcgctcggggcgtccgccgccgcggttgcctgcatacttctgtcgactgtctgggctggcgcgcacagcctcgcggaaactccggccgcgcttctgctcccaagggctccgaaggcgggaaagcgcgtacttctcgagagggtcggctttatctggaagcggctcggattcaacagcaaggtcaccatccgcaatatcttcaggtacaagaagcgcttcttcatgacgacgatcggcatcggcggctgtacggctctgctcctgaccggcttcgggctgagaaactcgataggcgacattgtgggcaagcagttcgaagacctgatgagatataacctgacgatagacctgaacagccagaccgaagaccttgaccgccttgacgctttcctgacgtccgacaggactgacggctcgacgctgattcactccgagtacggcaaggtgataagcggtaaggacacggtcgaggcgtatttcagggttccggagctcgcggatgactacgccggtttccagatactcagggagagaaaaagcaagaagccgctgacgcttgacgatgattctgtcatactgaccgagaagatggcgtcgatactcggcgtctcggtcggggacaatgtgacgctcgagaacgaggatggtctcacggcggacttcagggtcggcgggatcgccgagaactatgtcatgagctatgtctatatgacgtccgacctctacacgagcggcttcgggacagagcctgattacaacgtcgttctcgtgaaatcgaacgcggacgccgccggcgaggacgccgagaccgaggaactgctcggcatgaagtgcgtcagctctgtttccttcacgacgtcgatgtcgtcttcgtttgagaatatgctcgggaagatcgactatatcgtcatagtgctgataatctcggcgggcgcgctcgtgttcgttgtgctctacaacctgacgaacataaacatagcggagcgctcaaaggagctcgcgacgataaaggtgctcggcttcttcgacggagaggtcgccgggtatgtctaccgcgagatcgcggcgctcagcgtgatcggtactctgttcgggcttttcgccgggatattccttcacaagtttgtcgttgtgacggcggaggtcgacagcttcatgttcgggcgttcgatttacccgtcgagcttcctgatttcggctctggtaacccttgtcttctcggcgctcgtctgcctgttcatgcttaagaagctgaacggtatcgatatggtcgagtcgatgaagggcggggaataatcgccgcggaaaatcataagaggggctgagtggagacgtacggtttccgcccggtccctttctttctggcatattggcatgacagaggggggtaaataccacccccctctcaatttctctattattcagtttttgttcacaatcatgccgacatgaccggatttatcggagtcgccattcccggcttcatgcccctgaagccccggacgtacttgtacccgcagcgcacctgagcgtatgtaagtccgtactcatggcagtgcgcccggagatagcttatcacgcgcttcttgtcggtcgcctccacggcgttgtcgtcgcaccagcacttgtagatgttgtagaactccctcgaggttatctcgccttccgggtcgaaggtgaacgagccttttgaccgtaagaagctcacgacgttgttcgcctcgtccatcgcggacattatcgccgtcttcgacttgtcgctgaccgtgaagtggaagttgttcttcctcagcctgtaaagccctctgagcgcccacatggcgatctggtcccgctccgctctgagcttcttcgagagaaacgggtcgtcaatcctgtccttcggtctcggcttcgtcatgagaatcagctgacgccggaagaagccgtagctgtcgtcgttcgcggacttcaggtacccgttgctgaacgccatcaggcggcagtacatcagaccctgataggattgctgtcccttcttctcgagatccatcagtccctctactgttatgagcgccttcaggttgttcgtggtcgggagctgttctatgcgcatatcgtcgtcgaccatgaggagcttatgctcgaggtcggctttcgcgaaggagtttgtctcgagcttcgggatgcttccgctgttcatgttgtcgccgagaatctccttcatcacgacgcctatcctcgactttccctcgccgccgttgcctatgatgaggagcatcttctgcgccgccgtcgaggatatcaggcagtaccccatgtactcctgcaaagtgtcgacgtcatacggttccagaagctcgttcacgaacctcatccagttctcggggactttcgcgtcatcgcctgtgtataccaccggaagtctgttccggcagaagagcttctcttccgtccagctgctgtccgagatgttaagcgtgccgttcgcgaaattgatcaggtcctcgtcaaccagaagctcgtccgcgcgagcctcaatcttcagattctcgacgatattggaagccgtctgagccggatagctgcacacatggtgcttgatcatgtcgtagacctcagccctgatattctgcgccgggcaatacccatccggtgtgaagaacgtaccgttaatacacctcagctcatgcgtcttcaggtactcctgacaaaaaacggtagtgttgatagccttgccgttccaccataccggcgagccgccagtggcagagtcaaggtttctttgcgggtcggatgaagctcctgccacatcagacatagtgcgtcgggaaaggttcttttgtccgacaggtcttcctgtgctgacctttggtctgccaagattcgggtcaggctgggagttcaggaaagcctctcgcttctccttgtcctcgtcgcgcattgtgtaaacgacctccggttcagccgtgtaccagtcgtccggcgggttgaaagtcttgccggatgaagtttgtgccacatcagacacagtgcgtcgggaagctgaattctgtccggctctcacaaacgcctcgcgcctgtccttgtcaaggattcctccctgcttttcgtcgtcgaacatggacgcgacgtccggcgccgttgtctgccactgtctgacaggctcctcgaaaatcacgccgtcctcttccggcggctcgtatccgtcgaattcgctcgttaccggaattcccggatgaagtctggtttctgccatcttatgcctctttccgagttcagacgaaatttaagctgttcagcttttctgaactctgtgagtatattatagcataaccgaacgtgtcaccgcttgtcagagcgtatcagaaagtgtcaccgttttcaacaaagttccgggcgatacgatactatactttgtaagcaaatgttaatagtgtatgaagtgtcaggatatatgacgtgattacagatgtgaacagaaactgaataatagagaaacagagaggggggtggtatttacccccctctgtcatgacaatatgccagagaacaaacagaaaaagagactgtcacgagcggcagtcccttctatttctacagcatcctcttcagcgcgtcccacgcgatatcggcgtagaacctgtgaccttccggaccgatcacgtgggctatgctgtcagacatcccgagcgcgtcgtatacgcgtttcgcgtcggcgaccatcctcttcgccccgtcaagcgggaatatcgggtcaagagcgccggagacgaccacgagctttttcggagccgcgagcgccaggagctcacccatgtcgaagtatctgagaatccccggaacatagttgcaggcgcagtgccgcatagccccgatcgaacccgcgaaggtcgagaccgcgcaggacggaacggctcccgcgagcctcttctcgagcgccgccgcgtaaacagacgtcgtgccgccgccggagttgcccatcacgtatatcgctctcttgtcgacgatatccgcaaagtcagagataagcgtgtcgacacagcgcatgacgtcccagacccgctcgcctatgacggttctgccgatgaggaggtcagccatagccggttcaaagcactgaggtccgttctcgttcccgccgcactcgccgaaatcccgctgttcgagggctatcgcggcaaagccttccctcacggcgcggacacagaagtcgcggtctccgtcgactgtttctcccggatatttcgtgcgcccgagcgagatgtgcatacccatgctgtgtccctgaagggctattaccgtcgggagaggcttcgcggcactcttcggtatgagaaggtggcacgggacatagtagccgggctcgctctggaacctgaagcgtatctcgcggaactccggctcttctctgtcgtattcggtgacgacgtcgcgctcggcggttatcatgtagtcgagccccagaagctcggacagcctgtcccgcgcgagcgactgccactcgagaatcggcacgatgccgttccagcgcatcgagggctttctgttcgcgaggagcttttttgtgtattcgtaggg

SEQ ID NO: 2803 - DNA, 20078 bp, Unknown
  16S sequences of unknown bacteria
gttaaaatcgccgacaaccgaaacggccgacgcattcggtgcgaacacgcggaaaaagactcctctttttcggtttttcgtgcccgggtgggctccgaggaattcatatgcttcaaaattcccgccctcgtggaaaagacggatggcgtcgtttctgtttaaaccctttcccataaaatcaccgccaaaatatacttttttgattataattttattatacataacttgtctcaataaatcaagcatattttggtataaaataaatacttcttacattgtttttaaaagttatttgtgcaaactttataaatcaaggcggggatttttgacacatacgaactgccgccttattttttatgctttcgtcggcgtatttatgtattttctttgcggttttgccgaaaataaaaggggtgataaaatggacaaaataaaaaatgtttgggaaaaaagccgccgttcggccaacacgctcgccgtgctgaaatctcttgccgtgacacttgcttgccttttgcttcttgtgcttgggtttacggtgaccggctcgcttatagggcttttctgatgaaaaacacccttaaactgattttcgccctcctgctttgcgctatactgtgctcctgctcggcacggcaaaaggaggcaaaccgcggcgaaatgcaaagcgggtcggaaagctcggatataagccttgtcgagcgcgcatacagctacggcgacctttcccttccgaacgcctcctcaaacccgaacaacaatgtcagataaaaaagttccctgaccaaggtcaaggaactttttatcatattaccttataaacgtatttataaagtgtgttttttattttttcgaatttatcttttgagatttttttgcccgacgtcataattttaagcggcagagaattttgcccctctgacagcggcggctgaacatattcataatcgttaaaatacattccgttgcgctcgtaaaagcgaattcttcgccttgcgatgtcggttgtcggaggctcgacctcaagacagagcggcttttcaaaaagttttgccgtctctttaagcattttcgagccaagccccagtcctctgcagctttcggtcagggcaaaatgctcgacatagacaaagtcgtcgaactcccaaattgcgataaatccgataattttgcccttttgttcgcaggcaaagacccgatattcgggcagcgcaaagagcccgcgctgttcctcctttttgcggcgttcgtcggcgggaaagctttcgcacattatttcaaaaatttcttcaaaacggtcgacatatatctctttcatttcggccctactttccgacgcagaaattgtgaaacaccctgttgctgacctgctcggtcacccgttcgccggtgagctccataagggcggcaaggctgtcgtcgagacagaccgaaacggcgtcgagggttatgcccgatttaacggcgcactcgctttgttcaaggcttttgagggcgcgaagggcgcattcaagctgacgctcgttggaaatcatggcggccgtcgggtcaaagctttggagcgaaaacagtttttcaacctcccgagacagcagctcgagaccctctccctcctttgcggaaataccaaccacatgggaaaatttttctcttataaagccttcgtcaagccttccctcaaggtcggttttgtttatgacggcaacggcgggacggccgacgcaaagctcgcaaagctccctgtcctcgggcgaaagctcctttgagcggtcaaaaaccgccagcacaagctgagcctgacccgcccttttgcgggctctgtcgatgccgaacttttccaccgggtcggaggtctccctcagccccgccgtgtcggaaattttgagaattatgtcgccgagcgccacctcttcggtgatgacgtcccttgtggtgccctcgatttcggtgacaatcgagctttctctgccgcacagaaggttcatcagcgtggatttgccggcgtttgtccgcccggcaattaccgtgtcgacgccgctttttacgatttggcctcggtcaaaggtgtcaacaagcttttgaagccgcccctttgcaagggaaattctcgaaagcagggcctcgttttccacctcggggatgtcctcctcggggaaatcggcccaggccgaaagccacgccgaaagcgaaagaatttcttccttgattgcggaaagctcctttgaaagggctccgtcgcgggcaaaaagggcagccttggcggcatcctcgctttttgcgccgataatgtccataaccgcctcggcctcggtcaaatccattttgccgtttaagaaggctcttttggtaaactcgcccggctctgcaagccgcgcgccgttttcacagcaaaggcgaagtatctttttcagcaccacccgtccgccgtgagccgaaagctccacaacgtcctcccccgtgtagcttttcggggccgcaaaaacgagagcgattacctcgtcaacggggtctttgccgtcgtatacatgaccgtagagggcatgatagccgggggtgtctgcaatttttttgcccgatttggatttgaaaatcctgtcggccgcggctcttgccgaagggccggatattctcacaatgccgattcctcccgcagaagcggcggtggacggtatctctttccacttttttctccttattttcaaaccgcccggccgaaaaaggaccgggcgatgcaattaaaatttatgcctttattctctttcccgcgcccacgactctgacaatgacggggcaaagcacgatgttgacggcaagctcgataaggaaatttattcccacgaagcccacaaacatatatgctccgacgctttcggctcccgcggcgacggcccagcccttgacggtgtcgaggaagaacacgctgcagccgagaagaaagactcccgtgttgactatgggcgccgcaacggcggcaagagcggtggcaagcacggtgttggtcttctcaaacagcttataaaccgcgccggcgcaaaggcccgcaagagcacccttgagaaggcaggtcacgagggttccgaacacgttgacggcaagaaaggccgacgcgtctcccgacagaataaccgccgcgccgaacacaaatcccagccatgcgcccgctcccctgccgtagagcgccgctccgacgacaatgggaagaagaacgagtgaaatggaaaaggttccgaatcggattgctccgcccacaagctggagcacgattacgatggcggtcatgagaccgagacccgcgagggtccttgtgtttacttttttcataaaataacctcctgctgctgttcccatggggatacagcgcaattatttatttgcaagcgtaaaccgctttgcataccgtattaagttttattcggcgggcagacttattttgcccacggcgcactgaagtatcataagggcgtcggaaacgctcaccgacaaatcggcgtctatatcggaaagcgctctcgacagcacgccgagctccacctttccaaccgactgctgaagggcgaggagggcgtcggccaccgtgaccgagccgtcaaaatcgccgtctcccggcaaggtctccgtctcaccggaaagcataatataatttttaaaagtcgtatttcccgcggcgtcggcaagtccgacggatattatatcacccttttgcttggatgtacagtagaaatttttatcaaacccgctgcagccggaggaaagctgaacaaagaccccgtcaagccaaagataaaccggggtgaagctttcgtcctttccgctgatttttatgtgcccgtcaaagcggtcgggactcacaaatccgtcaaattctccgtcaagccgtttttccaaataatcggggatttcgaccgtttcaaggtcggtttcaagggtcggggcggtgccgtcgaacatgaccgaaagggtcctgtcggccgcgattcctccgtttttcttggctatgaccctgaatgaggtgtatttcccttcacggaggaggaaatcatattcaaaggttccgtctgacgaaagagggaccgaacggccgtttatttcaagataatccgccgaaacattgacccgcccgcgatcgcggtatgtcataaaaccgggcgtaccgtcgtccgaccgaccgcccaccgtcgaaaagttttgggaaaaggaaagaaattcaatatctccgttcccgaatgtcttttccgattgtgaaggcgtgtgaagctttccgtcgctgtcggtcaccgaaaagggcataatgtgacgttcgattttcgagccctcggccaaagccttaacctccacaacggcataatattttccgtttttaagggtctcatactcacccgttttcgtattgaaatattcggcggaaaaggcaagaccgttcaggtattccgaagccttatattccaccgggtcctcgtcgttttcgaacatataataatacaaatccgggtggagataggaggtatatgccgcattggaaataaacttcatattattcgaatatatgtccaccctgacatattcggcggccgtatcgagaaagaaaaacgggaaaagaaaatcgttcaccccgtcgccgtttgccgaaatcgtcgagtgttttgtatatttcagcccgtcgaaggaataaagggcaatatcggtgagaccgtttccctcggttatgcagtcctgccgacgtatatttccgcagtatccgaaaaagggcaccgacccgcccacgcggtttctctgcccgccttgctcaaagacagacaggtttccgaatataaaacagtcgttgcggcgcataagcctgatttgggcagagacggtttgggtttgccccgcggcgacgctgacctttttattttgaatttcaaggccgccctttccttggtcaaagttgtaaacgctgttaacccgcccgaatttattgttatcaacggcgactgtcaggtcggcgggctcgtcggaaatgctgcgaatttcgatgctcacgggcatattgtcggttatcttgccaagctcgataattccgctgccgttataggtcactatcaccttgcttttaagagcgctcccgacatttataattcccgacatggtgacccgcttgtcggcaatcggccgtgaggtgttttccagaagtgcgatcgtattgtcgcaaagctcggcgccgctcatgccgatatttttaagccgttgcatgacaagcgcagccgccgaggaaaccttcggagcggcaaatgaggttcccgacgatcttgaatagccctcgttgtcggccgaaagcacacccacccctcttgcataaaccttttctccgaaagaaaggtcggaaagaggacccaccgaggaaaaatcggcgacgtttccgtctttgtcggccgccccgaccgaaagcacgtttttaagatccccgggagtggaaagcagaccgtaatccgagccgtaggtactgttggcgtcgccttcgttccctgccgcggccaccacaaggcagccccgctctctcgcatattccaccgccgaggaatagcagttgtcattgtctcttatcccgccgggggaaccgagacttaaatttatgacgtcggcaccgagatcggcggcgtctcttacggcctttgccacgataagatccgacgcctcatcgccgccctcggggaaaacccgcatgagcagcagctgagcatttttggcataggaacggacggtgttgctgtttccggcggcgagagcggccgtgtgcataccgtgggaacggttgtccgactcttttatgttatagttgccctcggcatagttataataaaaagggatttttttgttgaaataggctccgtagcccagatttttgattttttccgtcatgtccttttcactcagagcgacatctacgccgctgtcaaggcgcatggtctcgtgaatcggattaaatccgctgtcgataacggcgatgaccataccctctccgcttaaagaaagaacctcagcgggaggatcgtcgtaatatatcaccctctcggtgtcggcgccggccgaaagaacgggtgaacagaacccaaaaatcaccgcaaagcagagcagcgacgaaaagaattttttaacgccttttgtcatttaaaaatctcccgaaactcttgaataatgataaagatattgctgggcaattcccgcatagggggtgaatttttcgggaaatccctcgggaaaaagctcggccgtgacccgttttatccaaacgtcgctgggaaaggagtccatgcgctcaagagaaaagagcagcacacagtcggccacctttttgcccacacccttgattttgcacagctcctcctccgcctcctcaagggaaaggtcgggccgcacggcaagagaaacctcgccgcttgccaccttttttgccgcgtccataagatatttcacccgaaatcccgcgcgcagaggggcaaaatcctcggccgacatggccgcaacggtctgcacgtcaggaaaggtgtattcgccgtccgaaagaggctttccgtacccttcgcaaaagcgccttattatgccctttatgcgggggatgttgttattttgggaaatgatgaaggagcagagcgtctcaaaaggctcctgattgagaatatgtatgccggcggcatattccgacgcctttttaagccgcggatcggcggtgagaattttgtcgatttttttatagtccctgcctaaatcaaagtaatgataaaacttctcgtcaaattcctctttcgaaacattgaattcaagcgtgcgctcggtttcctttattttgagcaggcggccgaaagccaccccctgccagcagccgtcctttttttcgaaacgaaagcattggccgcagtcgagagtgcggtcgaggctgaaaaattccggtttttcgattatgcatttttcggcttgtttttgcttttgaagcgttgccattgaccttcctccaatgttgctctgaaaagttttttcccgaattcgatttgttcaaaaccgcccaccctgtaaagccgcgccgcaagagggttttcggtcaaaagataaaggggattagcataattttcttcatattttcttgcggcaaaggcgaccgttttcgagccgaagcccgcgcagcgaaagcccggcccggtcagcacgtttgaaagacgggacagcttttttcccctctcgacggtgcaaaggctcacgccgtcgccgaaaaggcgagccacataaagctcggcaaaatccgaaagggcaagccttgacagcacagcgggaagaaaattttcatatcctccgcacaccgcggttttgcaaagatttttgtcgaattcccgctcctccgatataaccagcggcgcctcggcaagagcacctgcgggagaggttttgaccatgcagataagctccttttgcttttcaaagcaaaatcccgctttttttatgtcctctttcatcacctcggaaattccgtcgcaaaggggaaactccgccgcgggacgaattccgagagaaagataaaacccctttatctctgccgccgcacaaagcgcatcggcgttttcgtcggttatgacggcatggttcgagccgacgcacaggggattttcttcgtcataatacataacgccccagcttgtcatttcaaatttgcaaaaaagtgccggagcgttaatctcgttatttatgattttttcggcaatacccttcattcagttgttcactccgtggtgcacggcgggagtgtcctttgtgagcccggcaaagctgtagcccgcgtcgcgatagaactgaataatttgagggagtgcctcggcggtggttttttttgcatcggtgtcgtgcatgagaaccaccattgttgaagcctttgttccgccgtttcttatgtttgccattatcttgtccacgggaacattattgccggtggcgtctcccgaatcggaattccagtcaacataggtgtagcccttttcctccacctgctttgtaagctcggtcataagacccttgcaataattcgcgcttatggtgttggatgaaccgccggggaaacggatgatgtcgcacttttctccgattatgctttccaccgcgtcgcttatcttctgaagatcctcaaaataggcgttgaccgaggtgtagacctgctcatattcgtgggtatatgagtgaagagccaccgtgtggccctcctccttttcccgctttacaaggtcaagctttgaacggccgataacaaaaaaggtggccttcacatcgttttcctttaaaatgtcgagtattttttcggtgttgtttgacggaccgtcgtcaaaggtgagataacaggtcttggtctcgtttccgttctgcagcccgctctttttcgcggcaagctgagcttcaagctcggaaatgcgggactcatattcccctattctttggtccttttgggcgttttcctcctgaaggcggcttatctcgttatccctctcgtcgggagccgaggaggcggtctgttcgtcggcggttttacccttgcccccggccgagctcaccgccgcaattataagcacggcggccacaagcacggccacaagacccaccgcaatcggacgggcatttttacccagctttgcggtcacattctttttgcctttttttctctttttgggagccgaagcccggggttcaatataggttctcggttcgctgcgacggctttgctcaccgtgagtacttttgccgaaatattcgtcccaagcctcgtccgaacggcggcggcggtcgcctttgttgtcgtcataagacattaaactgtctccaatcatcatttaataagtaaattatagcaaatttaaatcggtttgtaaacaggaaaaactatcaaaaatcattttcccgtcgaaccgaagccgccctctcccctgacggtgtcagaaagctcatccgcctcgcgaaattccgccgaaagaaagggtgttacgacgatttgggcaatgcgctcaccctttttgacggtcttttcgctggccgaatggttgtgaagggcgaccttgatttccccgcggtagtcgctgtccacaacgcccaccttgtttgcgggggcaagaccctccttacaagcaaggccgcttctggcatagataagcccggcatagccctcgggaatttccattgcaagccccgttcctatcatgacggtttcgcccgctccgaccttaacgtcgtcctcgaccgaataaaggtcgctgcctgcggcaaagggcgaaccctttgttggaattacggcgtcttttttcagtttttttatctttatttccattgttttttctccgaaacgtttttctttttattgtatcatattaaagcacatttttccacataaaaagaaaattttattttatttaaaaaaatcggcttttgggactgttaaaacggggaattttgtggtaaaatgtcaaagaatacaggaaggcttaaaaggcttttccaaacaaaattcacatagaaggttaaggctatggaaaaacaatatgacgttataatcgccggctgcggagtgggaggactttactgcgctctcaacatcccgtcggataaaaaggttttgctgctctgcaaggacgaaatgatgctttcaaacaccgcccttgcccaaggcggagtcgccgccgtactcgatacgaccaacgactcctacgacctgcattttgaggacacactcattgccggccgccaggaaaacaatcacgactcggtccgggtgcttgtcaccgagggaccgaaggatgtccgcagaatttacgaggaattcgacgtggatttcgacaaaaccgccgacggcgcgctcaattccacccttgagggcggtcacagccgccgcagaatagtccaccacaaggactccaccggctatgaaattgcctaccgcctttgcgaggcggtcaaaaagcgcgacaacatcgaaatttcggaattttcggtgcttttcaatctcaagcgatttgacggcggattttttgcctatattctcaaggacggaaaggctcagatcgtcgccacgccctatgtcgtgctcgccaccggcggaatcggacaggtctaccgctataccacaaactccgccattgccaccggcgacggaattcgtcttgcctatgatctcggctgcaaaatcgcccatctcgattacgttcagttccaccccacctcctttgccgccgacaaaaccagccgtcagaagtttctcataagcgaagcggtcagaggcgagggcgcatatctgctcaactgccataaggagcgctttatgcacctttatgacaagcgtctcgagcttgccccccgcgacgtggtggcaaagtcgataattcttgaaagccgccgtcttgcaagcgaggatttctaccttgacatagcctacaagggggaggacttccttaaaaagcgtttccccatgatatatgaaaaatgccttgaaaagggcgtggacatcacaaaggagcccattcccattttcccctgccagcactatctcatgggcggaatcgacgtcaacctcaactccaaaaccgacatcgaccgtctttatgccgtgggcgaatgctcccacaccggcgttcacggcgccaaccgccttgcctccaactcccttctcgaagccctcgttttcggacgccgttcggccgaggacataaccaaaaagagcgagggcgagagattttgtcctccggaattccccgaggttcccgacatttcgggcgcgccggttcccaaggatattgataagaccataaatgatattatgcagcgctccacctttgttattcccgacctttcggcctgtcaaaccggaatcaagcaggttgaccgctatctcgagcggcttcgcagcggccactttgccgtcacaagggaatattgcgaggcgctttccctcgccaccgtggcgcacattatcttaaaggagaaattaagcaaatgatactgcccaaattcacggttgacgacattataaaaaacgcccttaaagaggacattaactatatcgacgtcgccacagatttgaccctcagcgacaaaaacattcaaaagggcgttttccttgccaaggcaagcggagtgctctgcggtatcgacgttgctctgcgggttttcgagcttctttatgacggatttgaatattcggtttataaaaaagacggagacgcggtggaaaagggcgatattattgccgaggtaaaggggcccgtcaccttcctgctcaagggagagcgaactgccctcaacctccttcagcatatgtcgggcattgccaccgaaacggccaaatgcgtcggtcttgtttccggcacaaacgcaagcatcgccgacacgagaaagacccttcccgggcttcgcgcccttcaaaaatacgccgttgtctgcggcggcggcaaaaaccaccgtttcaatctttccgactgcgccatgcttaaggacaaccacatcgacgcctgcggcggaattaccaaggccgtcggaattctcaggcaaacgctcggccacacggtcaaaatcgaggttgaaacgagaaatctcgacgaggtcaaagagaccgtcgaggcaggcgccgacatcattatgcttgacaacatggataatgcaaccatgaaggccgccgttgagctcatcggcggaaaggctctttcggaggcctcgggcggtataacccacgacaccattgccgacgtggcaaaaacaggggtcgacatcatttcggtgggcgcgctgacccattcggtaaaggccttcgacatttccatgaagataaaaaaactatgataattctctgcgttgactacggcgacgcccgaacggggcttgccgtctgcgacaagtcggaaattttggcaagtcccgtgggcaccgtctttgaaaaggacaaaacaaagctcatggaaaaaatcgccgaaacggcaaagcagcgcaaggccgagcttattgtggtgggcgaccccctcaacatggacggcagccgcggcttccgctcgcaggagtgccgtgaatttgccgagcagctatcggctttctgcgggattccctttgaaatgtgcgacgagcggctgaccaccgttgcggctcacaacgccctgaacgtcaccgacacgaggggcaaaaaacgcaaaaaggttgtggacactctttcggccgtcatgatacttgaaggctttatggctcggagaaaatctctttgatttcggggtgattttgtgcggcgcccgcttttcaccgtcgggttttcgctgtttgccgcgtcgtttacggcttttcttctccctgaaaacctcattgttttcgcagcctgtatctttcttgccgtcggcgccttcagcctgccctttctttcaaaatacaaacacagcgaggttctgcaaaatctttcggccgttctgttttcggcggctgcgggattttttgcggtgttcttatcctcgcttatttttatctctcccctaagctctcttgtcgggcaatcggtcgaaatatccgcctataccaccgacgaggtctcctttgaacacgattataccgagattccggcaaaagcggaaataaagctcggtcaaagcagccgaacggcggattttatcatctattgcgacgagccgataaatctcgagccctatgacagctttgtctgcaccgtgaatataagcggtctttcgacgggcaggagccattcggccttcagccccgtcattctcaccggcggctgcgaaagccttgacgtcaccggaaaggtcaagaaagatttgcggtattattcggttttgtgccgcggcaaaatcgccgagtcggtctcctctttgttttccgatgagatttcctcgctgctatgcggcatttccatgagcaaaaccgaaaacattcccacccgcgtcacgtcggcgctcaaagcctgctcgctgtcacatttgacctcggtgtcggggcttcatgtcactcttatatcgggctttgcggttttgctgctgtcgaagttcaaatcaaaacgcctttcggcaattctttcccttgctttcatatggggctttgtttttctcgcgggcatgagactgtcggccatacgcgccgcccttatgataacggtgctgaccctcggaaaatttgtctttcgcccagccgattcctgtaattctctcggtcttgcctgcattataatctgtcttttcattcccttttcggcaaacgacaagggatttgtgtgctcggtgctggcaacactcggagtcgtaacctgttcgaaacccatattcgcctttctttcaaagccttttgaaaagagaggtttcggcaaaaggctgctgcccatagtaaacaccgcctcgctgacgatttcgtccatggtcttttcgctgcccgttcttgtttattatttcggcgggctgtcgcttgtgggcgttattgcgaatattgcggtcactccctttgccgccgtctgcgttataggctgtatactcggcggcgccctttacgccgttccctttttgggatttatcggctatccctttatgctttgcgccgcctttgtcgccaagtatataattttcataacaaatctgatttcaaaaattccctatgcctttgttcacgcaaattacagctcgatttatatatggctcgcagtgttttacgggactctgctttacggttttgtcagatttcgcaaaagaggcctttcggcaaaatccaagacctttatcaccatggccgtttgctcggctcttgcggtctgctgcgtctgcgcctcggcggttgaaagcgcgacctaccgcgtcatcataaattcctccgaaaagttcgacaccgtcgccgtgattcacgcgggtcgtgcggcaattatcggctgtgaccgccgtcccgacataaatcgggaaacgctgtccgacattggggatctgaacgccgatattatagacttttttgtgccgctttccgacagtcctcctctcggcgcctacttcacggtcaaaaacggtcggccgaaaaccgtgcttttaccccaagacagagaggatttgcaaagacttttggctcctgccgatgtcgaattttccttttcaaacggcagcacaaagctttttgacaatacatatctgacaatctcgggcgatatgtcgtcggcggttctcgacattaacggaaagcgtatttttataggcagcggcgattttgccaagggcaattttgattttacaatatgcggcggcagcgtgaccccaaaaaacggcgagccgataaaaagcggccaggtcgaaatagagtcggtatttaacttcacatatgtcaggagcgatacaaattggcaaaaataaccgaaagcacccttaaggagcagctcaaaagcggcaagctttgtcccttttattttctttacggagacgaggattatcttgcgagcgtctatgccgaccgcgtaatttcgacggccgacggcccttttgccgattttaacatttcaaaatttcccgaaacggcaagccttaacgagcctgtaagcgccctttgccagcttcccgtcatgggtcagcggcgggtggttgccctttacaatcccgacattgcgaagttttccgaaaaagaccttgaggatctggaaaattacctgaagtcgccctgcgagtcgagcgttcttctgatatatctcatcggtaagggtgtcggcaattcttcgcagtcaaaaaagctgacggctcttgctacaaaatacggcggtcttttgaaattcggccgcatgacccgctcggagcttataaaaattctatgcaccggtgcggcaaaaagaggctcggatatgccctcgggggcggcctgcgcacttatcgactgctgcggagacgacctcaacacccttaacaccgagcttgaaaagctttgcgcctttgcatcggggcgaagcataaccgaaagagacatcgctctgctctgcccgaggagcataaatcaggatgcctttgacatgataagggaaataaattccggcaacgcgggcggagcgctgactgtgctcggcagactgtttgccgcaaggcaggagcccattgtaattttcggagcgcttgtctattcctatgtgaatttatacagaattgcggcggcgcaaaagtgccgcatttcccttgagcaggcggcaaaggatttcggcatgaaaagcgcatatccgctcacaaaatcgagaagagacgccgaaaaactcggggaagaaaaaatcagaaaaagtcttgagctgctcgacgattgcgacaaacggctcaaatccacctcggccgacgggcggcttgttctcgagcaggccattgttaagctgtttgaaatttcgaggggaaaaacggtatgataaagcttaaagaggccgtcatcgtggagggaaaatacgacaaaatcaagctgtcctccattgtcgacgggcttataataaccaccgacggtttcggaattttcaaggacagggaaaagcgtgagcttattaagactctggcaaaaaagcgaggcataataattctcaccgacagcgacagcgcgggatttctcatacgctcccacataaaaggctttgtctctgagggcgagataaaaaacgtctttattcccgacgttttcggcaaggaaaaaaggaaatccgccccctcaaaggagggaaagctgggcgttgagggaatggaccgcgagcttctcgaaaacgcccttaaaaaggcgggaattgttgaggaaaagacaaatccgaacgccaaaaaggtcttaaaatccgaccttttcgaggacggaatttcgggaggagccgacagcaaggcaaagaggactcggcttttaaaggagctcggccttcccgagagaatgagcgccaacgcccttcttgaaacagtaaacgccctttacagctttgaagaatataaggcggcggtctcccgcatatagcggccgtatgacgacaacgcaaaaatatgcccgtcgattatttcggcgggtttttgttataaaaaacagcgtttcgcttttgacgaaacgctgctttgtgttgcgggaaaaattatttggtctcgctgagtttaacgagatgctcgtatttctccttggcggtctcttccgcctcggcaaagagctccttggcgcgctcggggaaggctctttcaagggaggtgtaacgaacctcgccgtgaataaagtcgtcataggaagcggagggagccttggaatcaaggtggaaggggttctctcccttatcggccttgcgggggtcataacggaagttgaaccaataacctgcctgaacggcggccttttcctcggcctggcttgcgcccatgcccttgcggataccgtggttgatgcagggagcgtaggcaatgatgatggaggggccgtgatagctctcggcctcgtggaaggctttaaggcactgattgtagtcggcgcccatggcaacctgagccacataaacataaccgtagctcatggcgattgcggcaaggtccttcttcttgacctgcttacctgcggcggcaaactgagcaacggcgccggtaggagtggacttggaagcctgtccgccggtgttggaataaacctcggtatcgaacacgagaatgttgacatcctcgttctgggcgataacgtggtcgagtccgccgaagccgatgtcataagcccagccgtctccgccgaagatccacatggacttcttggcgagatagtcggaattttctttaagctccttgacagcgtcgcacttgcagtcgctcttggcaagctcagccttgaaggcctctgcggcgggagcgttcttcacgccgtcgtccatggtctccatccaatcctttgcggcggcctttaaggcgtcgttgtcggaattgtcgagaatatactgtgcatgatgtgcaagacgctcgcggagggtcttgttggcaagcatcatgccgaaaccgtactccgcattgtcctcaaagagggagtttgcccatgcggggccgtgacccttttcgttgacggtgtagggagttgagggagccgaaccgccccaaattgaggagcagccggtggcattggcgatatacattctgtcgccgaagagctgggttgcaagcttggcatagggagtctctccgcagcccgcgcaagcgcccgagaactcgagcagcggctgtctgaactgactgcccttaacggtggtgtcgtcaaatttggcggcaacctctgccttcttgggcagcttctgaccgtagtagtaaccctcctgctcactaagctgagtgtcgaggggctgcatctcgagagccttgttgcccttcattccggggcagacctgcgagcaaacgccgcagccggtgcagtcgagagccgaaacggtcatggcaaatttcatgccgggaagaccggtcatatccttcatcttcatgctctcgggagccttctcggcctcctcctcggtcatggcaaccggacggattacggcgtggggacagacataggagcagaagttacactgaatacaattttcgggaacccacttaggaacattgacggcgataccacgtttttcgagagcggcgctgccgagaggaacggttccgtcggccgagtcgacaaaggtggaaacgggaagcttgtctccgcgctgtgcattgacgggagcaagaattttttcctcatattccttaagcacgggagtctcggcaacagcctctttaacaacggcctcgtcggttgcggtcttccatgcggcgggaacggtcaccttggagaaaccgttgattccgcggtcgatggcagcatggttcatggcaacgatcttttcgcccttcttgccgtaggacttggtggcggcttccttcatgagggtaacggccttgtcggcgggaatgatcttggaaagagcgaagaacgcggcctgaagaatggtgttggtgcggtttccgaggccgagctccatggcgatgtgggtagcgtcgatggtgtagaacttgatgtcgttcttggcgatatactgcttcatcttggcgggaagatgcttgtcaagctcttcgccggtccaggagcagttaagcaggaatgtaccgccctttttgatgtcctcgacaatgtcgtatttgtcgacataggaggggttgtggcaggcgacaaagtcggcctggttgatgtaataggtggaggttatgggctttttaccgaacctcaggtgggaaatggtaacgccgcccgactttttggagtcataggcaaaatatccctgagcgtaaaggtcggtgttgtcgccgatgattttaatggagtttttgttggcaccgacggtaccgtccgagccgagaccccagaatttgcaggaagtggttcccttgggggtggtgtcgggatgctccttctccttaagagaaagcttggtaacgtcgtcctcgatgccgatggtgaagcgctttttgggggactttgcgtccatgttgcggtaaacggcgatgatctgagaaggagtggtgtccttggagccgaggccgtaacgaccggtgtaaacgggaacatcggagaacttggtatccttaagagcggcaacaatgtcgagataaaggggctcgccgatggagccgggctccttggtacggtcgagaacgcttatcttcttaacggttttgggcatggcggcaagcagatgcttaaccgagaagggacgatagaggtgaaccttgataaggccgaccttttcgccgtttttgttgagataatcaatggtctcttcgatggtgttacataccgaacccatagcgatgatgaccttttcggcgtctcttgcgccgtagtagttaaagagcttatatttggtgccgagctttgcgttgacagccttcatataatcctcaacaacaccgacagccttgtcataataaacgttggaggcctctcttgcctggaagaaaatatcggggttctgtgcggttccgcgctgaacgggatgctcggggttgagggagcggcgacggaatgcgttcacggcgtcatggtcgagaagctcgtcgaggtccttataatcccaaaccgcaaccttctgaatttcgtgagaggtgcggaaaccgtcgaagaaatggaggaagggcactctgcccttaatggcagaaaggtgagccacggcgccgagatccataacctcctgggggttgttggaacatagcatggcataaccggtctgacggcaggcataaatatccgaatgatcgccgaaaatggaaagtgcatggcttgcaagagcacgggccgaaacgtgaattacgccggggagcagctcgcccgccattttatacatattggggatcatcagaagaagtccctgagacgcggtgtaggtggtggtgagggcaccggcggcaagagaaccgtgcacggcaccggaagcgcccgcctccgactgcatttcggcaaccttaacttcctggccgaacaggtttttctgaccggcagccgacattttgtcggtctcttcggccatgttggacgaaggagttatggggtagatagccgcaacgtctgtaaaggcgtatgatacatacgcggcagcgctgttaccgtccatggtttttgtttttctggacatattttatcttcctctctataagaattcaaattatagtagtataaaaccaatgtatataatatcattttttttttcgaatgtaaatagtttgccgcggattttttaaaagaaaaagccgaaaaacaacgcatttccgcgcaaaggagtgattttaaaaaagacgggaaagggcgcaaaggccgcctcccccgtctttttctgtttttttctttttcgatcagagcgcaaagcccgaaaaaattccgtcggcggcgccttgtttcctgccgtccgcacagcctttgctcagcgtgcatttcacaaggcttatgcgtattttatacgacgaaatcattcgagaaaccgctgcaaaatccgcaaacgaagcctgcttttattaaaccgcctgcggctcaaccgcaacatgaggctcatcaactacaacgtaaagcattatctgaggattctcaacagg

SEQ ID NO: 2804 - DNA, 32759 bp, Unknown
  16S sequences of unknown bacteria
ttgccgacaccctctgtctggctattttcatgtatggaggataactgcctatggcgaataataagatgaatattgaaggaaaaaattactcggatgttccggtgtggcgtagatatacgcttaccattgaggaagcagccagatattatcatatcggcgaaggaaaattgagaacgcttattgacacacatcccaatgaggatttttatgtgatgaacggcaatcgtgccctcattaagcgtgagaaatttgagaggtatctggatcaggctactgctgtgtaaacagagctgacagatttaccaatttcacatgatataactatgcggagagctggatttgtgctatgataagagcgcaagtctggctctcttttttgaaaggagagttcacgatgagtgagaaaagacgagataaccgtaatcggattttgcgagagggcgagtaccagcgtaaagatgggaggtatcggttccgctatattgatgaggacggaaaagagaaaaatgtatacagttggcgtttggacaagaatgacccaatgccaaaagggaagaagcgggagccttccctgcgtgagaaagaaaaacagattgaagcggatttgtttgaccgtatcgtaaccaacggtggcaactatactgttttggaactggtagaaaagtatgtttcattgaaaacaggagttcgtcacaatacggttgccggatataaaacggtcatcaatatgctgaaaaaagagagttttgggaatctgcgaattgataaggtgcgtttgtcagacgccaaggcatggttgattaagctccaacaaattgatgggcggggatacagttccattcattctatccggggagtcctcagaccagcatttcagatggcggtagacgatgatttgcttcgtaaaaatccatttgaatttgagcttgcatccgtcattgtcaatgattctgttaccagagaagcgattacccgaaagcagcagagagatttgctaaagtttattcaggaagataaacattttagcagatactatgatgcaatctatattctttttcacacagggcttcgtatctcagagttctgtggactgacggtttcagaaatcgagtttggagaaatgcgtatcaaggtagaccatcagttacagcgtactgcacagatgcagtatgtaattgaagaaccaaaaacagataaaggcatccgctatgtgccgatgacggaagctgtcgcagcgtgttttcgcagaatcattgccaaccgcaagacaccaaaagttgaaccgatggtggaaggatatgcaggatttttgtttctggataaaaacgatatgccgatggttgcccttcactgggaaaagtatctggagcatatcattcagaaatacaacaggatttaccgtatccagatgccgaaagttacccctcatgtatgcaggcacaccttttgctctaatatggcaaaatccgggatgaatccgaaaaccttgcagtatatcatgggtcacgcagacatcagtgtaaccttgaacacttacacccatgtgaattttgatgatgcaaaggaagaagtatatcggatagcgaatagttaaaaaagcccgttggtaaggacgcttgctttaccaacggatttaccaagattgcagggaaaaacataagaaaatacgagaagatttgagaagataccttgaaaagaaaggaaaactcaaaagtcggaaaaccctgaaatatcaagcgtttgagaagaaatacaagacttaaatggagatataaaaagatgattaaagtattatttatttgccacggcaacatctgccgcagcaccatggctcaatacgtcatgcaatatttagtggacaagcggggcttatccgactgtttttacattgattctgctgccaccagcagagaggagatcggaaatggggtgcatcatggaacccgtgcgaagttgcgtgaggtgggaatcccatgcggagatcatcgggcacgacagatgacacgtggagattatgaggaatatgattatctgatcggcatggatacctggaatattcgcaatatgaaccggatcgttggagcggatccagatcataagatccataagctgctggagtatacgaaccggggtggagatattgcggatccgtggtataccggtaattttgatgagacatatcgggatgtgtcagagggttgcgaagggctgcttgcacatatcctgaaggaggacatggattgaaactgatacattgtgcggatctgcatctgggttccagaatggaatccggactgccgcctgcgaaggcgcaggagaggcgtatggaactgctgcatacatttgtgaatatggtggaacgtgcttccagtgaaggcgtggaagctatgttgctttgcggagatctgtttgatacggaacaggtgtctgtccggacaaagagtgtggtgagaaatacgatcgaggcacacccggagatcatgttttattatttgcgaggaaatcatgatcggatggagcggacatccacagaaaggatacaaaatctccgcacatttaatgacggatggactacttatgagcaaggggacattaccattaccggaatggaattatcaggagaatgggatccgacatgggctgatcagctgcaggaggagctttctgattatccgggcaaactacatgtcgtaatgcttcatggaatggtcagtgaatatggtcagggagaagaaggaatcgcacttcgggatctgcgtggacggggcattgattatctggcacttgggcatgtgcattctttccgacaggaaaagctggatgaacagggaatctggtgttacagcggatgtctggaaggcagagggtttgacgagtgcggaacgaagggttatgtgatgctggagacggtggctcagcatctggtgcccacatttgtgctggtggcaaagcggacgctgcgtgaggtggtgattgaagtcacagagacatatacagagcaggagatcatggctcagatacaagggcagttaacagagattccgtcgcaggatctgataaaaatagttctgaaggggcaggtaagtccggagtgtgatcttgatctgctgtggatgaagcggaagctggagtccgattattattttctgaagatcaaggatcagacaaaggtcgcagtgcgagcagaggattatcagtatgaccggtctttgaagggcgagtttgtgaggttagttcaggagacagatctttcagaggaagatcaaagcgagatattgaagcttgggatacaggcactgaagggagaggcatagcatgcagatcagacggatacagattgcggattttggaaaactgcatgatatggaactggatttttctgaagggtttcagacgatcaccggcgaaaatggctgggggaaatccaccatggcggcatttatcaaagcgatgctgtatggcatggaagcaaccaccagacgttctcttctggaaaatgagagacgccattatcagccctggcagggtggaacttatggtggaagtatggaatttacagctggtggaaagacttatcgtgcagagcgtacctttggcagcaaagaaaaggatgatacctttgcactgtatgatctgagcactggacttctgagcactgattattcggaacggctgggagaagaattatttcatattgaccgtggagcctgggaacggagctgctatcttgggcagcggaagctggaagtgctggtaaatgacagtctgcatgcaaggctcagtcatgcagaagaggatgcaggcgatattgaaaattatgagcgggcagcagcgtctctggaagagcgcatgaagtttctgaagaagacgggcaatcgaggggagattgcaaagcttcaggaggaacgaaggcaggtcagagaacagatggaggcttatgagattcagcaggaaaagctctggaaggcgcagcaggaactgttggagaagagattgaaggagcaggaggagaagcttcaggaagctaacgtgcgcctggcgggatatgaggagcttccaatgaaagagcaggaacttgatcggcttcgagagcagattttccggtttcaggctgcccaggaacgggagcagacagcgaagcagcaatatatgcaagcccagaagcaggaagagagacgaaaagcggaattggaagaggttcgtgagtgtgcacaggagcagaaatacagcgacagaaaatggatgctgacaggtgtgactggtctgatcgtgatgttgacgggtatggtgttgatggtatgttgcttttcagacaacatattcatgacagtactgcttggcattttgatactgctcggtcttgcctcgacaatcacttcatttctccggttatccagaaatcagcgttcctgtcatcttgcaaaagagatctacaaccaacgtgtggcagaactgcagcagtatcagaagcagagcaagcagttgaaaaagcagtgggatgaggcagaagcagagagaaaagaacaggagcaggatccgattctgcaaaagcttcggaaagcaacgggctatgtcatggagcagcttccagacggagagatgctggagcagtgctggcagcgggaacgggagcggagcagggagtttcagaatctacgtcagagctgtgagaatcatcgaaaagaggtacggaagtgtcagcaggaactggattcctatgaacagcagggaaaacatgtgggacagacggaggttcgtctggaactggaagaaaaactgacggatttatcagagcagattcaggagctggagcaaaaatatgaactgttatcccgaacgctggaacttctgaagacagccagagatcgattcctgggaagatatctgaccacactgaaggaaaaaacagcggagtatcttgctgttctggaaccggcatggaagaacagtattgagatggatgtgaatctgaagcttcggatccgtcagcagggactcctgcgtgatccggaatatttcagtacgggctggcaggacctgtttcggctggcgcaacggtttgcactgatggatgcgttgtgcgaaggagaatcatcggtggcggtcctggatgatccctttgtgaatctggatgaagagaagcgggcgcggacactggaattattgaatcaaataggaaaacagcggcagatcatttattttacctgccgccgttaaggtcagggaacatcattcgtttttgcttgtgaacagcggatgatgttttcttgcgtaaagatatgtaattgtgtggatcaatgtggtcaggatccaagaggtggcatagcaaaggtacaatacctgctgggtcgggaaccaggtaaatatggtggcaagccagatgatccggtacagacaggcaccggagacagccaccagcatgggtgtgatcgcgtatccaaggccgcgcataacacccatgaccacttccatgataccgcatagaaaatacggcatggcgatccagaacattcggatctgtccggcagagatcacagctggatctgtggagtagatggatagaagctgtctggaaaacagattggcagtaccacccataaggataccggttacagtgacaagtcctaagcaggagaaaaggatcttattgatccgttcaggtttcccggcaccgttattctggcttacgaagctgaccgttgcctgatgaactccattcatggaaatatatacaaaattttcgatactggcagaagcactgctgccggccatgactactgaaccaaaggagttgatggaggactggatcagcacattggagaaggaaaacataccactctggattccggctggcagcccgatccgcagcatgcggatcaactgatctttctgaatatacagctttcggatgttcaggtgacaggggccatctgtccggcacaggcagttcagaatcagaacggcacttaaggtctcggacaggatcgttgccagagcaacaccggccacatccatgtgaagcacgatcacaaagatcaggttcaggacaacatttagcactcctgcagcagacagaaaataaagcggccgcttggtatcgcccatggcacgcaggattgcactgccgaaattatatgccatgttggaaggcataccaataaaaatgatcattaaatatagagaagctttatcaatgacatcggcaggagtccccatccattggagcattggccgaccaaataaaaatcctaatagaatcatggcagatccagataaaatactgacactgacggctgtgtggatgccgtctttcgttccctgatcgtcctggtttccaagggttcgtgccacatttacattggctccgatggaaaatccgataaataatgtggtcagcaggcttaaaagctcagtagtggaacctacagctgccagggaagtacttccggcaaaacggccaaccacgatcacatccgcagcattgaacagaagctgcagacagcttgacagcatcaaaggcaaactaaatgcaatgaccttttgtaagaccgggccattgcacatatccattttataggattcttttgacatcattgtcccctccattttctgcgatattctcttgcagtgattccttctgctttttgaaatactttattgaaatagctgttgtcttcgattccgcaggctcgggcgatcgtttcaatctgctgatcactgaaacgtaatagttctttggctttcgtgatccgttgggaattaacgtaatttccaacggtgattccgaaggcttttttgaattcccgcgacatatggtatttactgatatagaactggtttgccagttcatcaagggatattttttcagtaaaatgctcatccagaaatccacggatctccagaagcttagaggtgatattatcctctttttttacaggaatttcagtctgccaggtcagaatctgtgtgaccagacggtgcagcagttcattttccagcagctctcggttaccggcacgatttttctccaggatcagtatctgctccaggatggactgaaaatcggaagggctgtccggatgaaagacagaagccttctggtgacgggtaaaataagcatgatatccggacattgcagttccgtaaaaatgcacccacaggagagtccagggatcgtcctcgctgctttcgtgagcataaggttcctgacaatccagaaagatatgatcgccaggaccgatttcccagaggttctttccgatagtgactgttccgcggccggacaatacaataaagaaaagataggattccagatgggaccgacggctgatatgacggtcccggctcttgagccgtccagtttcctgaatatacagaagattctgacgggcaaatgagcttggcgtatggatatagcgacagatctgatcattttgtaaaattactgccatgaacatacctccaggagtaaaatatataggagcaatataatactattttttcgcaaggatttacatagatttcttgtattttctatcttataatatagtccggtttttgtaaagtaaatacaagttattactattttttaggaggaatatatgagtaaaaaagcattgatcacaggtatcaccggacaggatggttctttccttgcagagtttctgctgggaaaagggtatgaggtacacggcattacccgccgttcttctctggcaaacactggaagaatcgaccatctgttggagaaacatgcagtgactcttcatgatggagatctgtctgattcatccagtctgatccgtattatcggagaggtacagccagatgagatctacaacctggctgcacagagccatgtacaggtaagcttcgatgtaccggagtattcaggagatgtagacgcacttggcgtcttaagaatcctggaggctgtcagaatcaccggtcttaccaagaaaacgaagatctatcaggcatccacttctgagctttacggaaaagttgaggaggttccgcagcgtgagaccactccgttccatccgtacagcccgtatgcagtagcaaaacagtatggcttctggatcgtgaaggaatacagagaagcatatggtatgtttgctgtaaacggaatcctgttcaatcatgagtctgagcgtcgtggagagaattttgtaaccagaaagatcactctggcagcaggaagaatcgcttgtggtattcaggatcacctggagcttggaaatatggattcattaagagactggggatatgccaaggattatgtagagtgtatgtggctgatgctgcagcatgagactccggaagattttgttatcgcaaccggagagcagcatacagtacgtgatttcactgagcgcgcattcaaagcagttggcatcgaccttcgttgggaaggaaccggcattgatgagaagggttatgatgtgaagaccggaaagatgctggtatgcgtcaacaaagcatggttccgaccgaccgacgtggataatctgtggggagatccgaccaaggcgaagacggttcttggatggaatccgcagaccaccacttaccaggaactggtagaaatcatggcaaaacatgacctggagctggcaaagagagaagcagcattaagaaacgtgcagtagacaggagagagaaaatcatgatgaataaagatggaaagatttatgtagcaggtcatcggggaatggtaggttctgccatcgtacgttctctggagagaaacggataccacaatattattaccagaacccataaagaactggacctgacccgtcaggatcaggtggaaaaattcttcgcagaggagaagccggattatgtatttctggctgctgcaaaagtaggtggaatcgtcgcaaacagcgaagctctggctgactttatgtatgacaatatgatccttgagatgaatgtgatccacgaagcatggaaaaataactgtaaaaagcttctgttccttggatccagctgtatttatccgagaatggctccgcagccgatgaaagagaactgtctgctgacttctgaactggagaagaccaatgaggcttatgcactggcaaagatcagtggtctgaaatactgcgagttcctgaaccgtcagtacggaaccgattatatcagctgtatgccgaccaatctgtacggaccgaatgataactatcatccgacccacagccatgtacttccggcattgatccgtcgttttcatgaagcaaaagagcagggactgaccgaggttacctgctggggtactggttcaccgcttcgtgagttcctgtatgtggatgatctggcagatggctgtgtttatctgatgaataactacagtggaaatgagactgtcaacatgggtaccggaaaagagctgaccattaaggaactgacggaactggtggcaaaagtggttggttatacaggagagatcaaatgggatccgtccaagccggatggaacaccgagaaagcttctggatgtatccaagctggaaggtctgggcttccattataagactgagctggaagagggaattcgtctgacttacgaagatttccttcacaatcccatgagagcagagagataggagccggtatgaaacattatggagtgattatggccggtggtggaggaacccgtttctggccgttgagccgtcaggcaatgccgaagcagatgctgaatctaagcggcaaagatcggatgatcaatgagacgatcgatcgtctggatggtgtcatcgagaaaagtgatatgtttatcgtgacaaatgagaaacaggcaggaaagatgttagagtgtgtggatggcagaattgcaaaagaccacattctgacagagccgtctgcaagaaatacggcagcatgcatcggatatgcagctatggagatcgtcaaaaaatatggtgatggcatcatgtgtatctttccgtcagatcattttgtgaagaaagaggctgcttttaaggaaatccttggtgaagcgatcaaggcagcagaggagcaggataagctgatcaccatcggcattgctccgaccttcccatccacaggctatggctatattaaatttgataaaaaagaagatgccattgcccgcaaggtagaggaattcaaggaaaaaccggatcttgagacggcgaaagcctatgtagagagcggcaactatgcctggaacagtggaatgtttgtgtggaaagcgtctaccatcctgaagaagtttgagcgtctcctgccggatatttatgagtgtctggtgaagatcggggatgctatgaatactccggaagaagagaatgtgatacaggagatctatccggtgatcccgaagatttccattgattacggtattatggaacgttcttctgacgttctggtgttatccggtgatttcggctggaacgatgtgggaagctgggatatgatgaaggtcatctacgatgcggaccagaatggaaatatcattgtaggagatcaggtgaacattgatacaacaaacacaatttctttttctactggaaaaatgattgcgaccattggcgtggataatcttgttgttgtggaaacggaagatgctgtcttagtatgcagcaaagaccgggtgcaggatgtgaagaaagtagtagataccttgcaggaacagggcagaacggaattgctgtaaaggatatgcaaaagcgcaagaggagaataagcatggattataaagcaaaatatgagcagtggtgtcaggatcctatttttgataaggagacgaaggctgaactttctgccattgcaggagatgaaaaagagatcgaggatcgtttttacaaagatctttcctttggaacaggtggacttcgcggcgtgatcggagctggaaccaaccggatgaatgtgtatacggtgaccaaggcaacgcagggtctggctaattatattaaaaaacagggcggcgaggataaaggtgtggcaatcgcatttgattcccgtcacatgtctgtggaattttctgagaaggcagcgctgtgtctcaatgccaacggaatcaagacctatcgttttgagacgctcagaccgactccggagctttcctttgccttgagagaacttcattgtatcgcaggtattgttgtgactgccagtcacaatccgccagagtataatggatacaaggtatattgggaggatggcgcacagatcacagcaccgaaggataaagaaatcatcgcagaagtgaatgcagtgactgattttgcttccatcaagatgatggatcgtgcagaggcagaagagaagggattgttccatgtgatcggaaaagagattgatgatcgttacatggaagagctgaaaaagctggtcttaagtccggatgtgatcaaagagatggctgacagcctgaagattgtctatacaccgctccatggaaccggtaatcttccggtccggcgcgtgctcaaagagcttgggttcacgcaggtacaggtggttcctgagcaggaactgccggatggagattttccaactgtgtcttatccgaacccggaagatccgaaagcatttgcgttggctctggaactggcaaagaaggcagatgcggatctggttctggcaacagacccggatgcagatcgccttggtatttatgcaaaagattccagaaccggaaattatatgccatttaccggaaatatgtctggtcttctgatcgctgagtatgagctgagtaccagaaaagagacggggcgtctgccaaaagatggtgcactggtgactaccatcgtatcttccaatatggcagaagcaatcggaaaagagtacggcattgatgtgattgaagtcctgaccggattcaaatacattggggagcagatcaagttctttgagcaggatcattctcataccttcctctttggatacgaggagagctacggttgtctggtaggaacccatgcaagagataaggatgcggttgtggctgtaatggctttatgtgaggctgcggcttactacaagaagcagggtctgacattgtgggatcagatgctgaagatctatgaaaaatatggctattacaaggaaactctggtatctgttaccatgaaaggtgtggatggagctgagaagattcagagcattctgaagcagatgcgcgaaaatccgctgaaacagatcggtaactacaaggtactggctgtgagagattatgatgcggacaccagactggatatggagacaggcaaggtaactgccacaggtctgccgaaatccaatgtactttattatgaactggagcatgatgcatggtgttgtgtgcgtccttccggtacagagccgaaagtgaaattctacatgggtgtgaaggaagaaggacttacacaggctgagcatgctctggaaggccttaaagaagccatgacaaagattgtacagtaacacccatttcggagaagatatatgaaatgtattgtgctggcgggaggaagcggggaccgtttatggcccctctcccgcaaaaattatcccaaacagtttattcatatcaaggaaaaccgctccttgtttcaggagactattgccagaaatatcccattttgtgaggaattttatattattacatccaatcggtatgccaatatcgtagaaggacagctgcaggtctttcagggacttcgttatcgatgcttttatgaggaagagggtaagaaaactgcccctgcggtagctattgcctgtctgtgtgacaaccgttcagaggattatctggtggtatccacagaccatatgatcgaaggtggagattataagggcgccatcgcaaagggtcgggaatatattccgcagggaaagatcgtgtgtcttggcattcctgcctggcggtttgagcctggatatggatacttcagacaggtggaagaacggacagagtttcggcacagcgatatgacagaagagatcccggcaggagaaaaatggtactatgataccggaatcttattgtttaatggtggggattttcttcatgaactgtccagaaaatcaccggctctctatgcccagatcagagaatgtgtggatcagcttgatacctacgggagaaatgttctggtgccgggcagacttgtggaagaactggagccggtaagcattggacgggcagtgaccagtgtgtcagataaagtgctgcttttacaggcagatttcaactggagaagaatcatgacgctggagtcattggatcagtattatcatggagaggattccggccgggtgatccgtaatgcctgtgaaaatgtgtcagtgatgaatgaagcggcgcatcagctggtggttgccaatggattggaagatgtgatcattgtcaacacagcagatgcggtctatgtgtcccgaaagagcgaagcggatcagatcaagagcattattcgggagaattacgagaagcagcagtcttattttgatgagggaacagtctattataccccttggggcatcaaagagaccatacattacggggattcctgtaaggtaaagaagatcacgatttttccgggaaaagagctgtccagacatgtgcataagcttcggacagagcattggtctgtgatcagtggagtcgcaaccattcagctggatgaacagatgggtgagtatggatcaggtgaaagtatttctgtgcccatgggaacacctcatcagattgccaacaggggaacggaagatctcgtagtcattgaagtaagtgtaggcgagctggaatatggtcatggaaatgatctgacccgcctggcaggtcagtctattgtgaagacggactgtgatgagatcgttcgcatggagcctgcctttaaggataatctctggggaggtacccgtctgcgggatgtctacggcaagaaatgcgactatgatattgtagcggagagctgggaattgtccacacataaagccggtcagagtatcgttgctacgggaaaaaataaaggtctgatgctgggcgagtatatcaaccggtttggcagaggtatattaggctggaaatgtgatccttatgagcgatttccgcttctgatcaagtttattgattccagagaaagtctttctattcaggtgcatcctggggatgattatgcactgcagaaggaagacgaatatggaaaaaatgaactgtggtatgtggtagattgtgaaccggagtcttatctgtattgtggattttctagagacacagatgaggcagaggtgcgccgccggatcgaggatggtacactgacggagatcctgaataagattcctgtaaaaaagggagacagttattttattgaaaatggaacggttcatgccattggaccaggtgtactgatctgtgagatccagcagagttctaatgtgacataccgtctgtatgattaccagagacgcgacaaatacggagaactgcgggaactgcatattgacaaggccatggaggtgacgaatttccatgagaaagatatggaagccgccaagaccatggaatgcaaatacttttcgattgagaaaagcgtgtttgatggagaggtttcctttaatctggatgactccagcttccgtgcctttgtggtactggagggaggcggtcaggtatcctgtggagaggagtcattagcctaccgtccggcggactgcttttttgttcctgcaggcaagaaaaccgttgtttttcatggttgcggaacggtattgaaggttcaggtttaacaggttcttaagatttatttaagatgactgcagatgattgacactgctggaacagattgtatataattcagaaaggaggagcttttgtgagcttctcctttatatacattagatgaacaggatataagtgcagtggtattttcaagtattgattttttatttaaatttttaccgattttttttgtaatctttatgttctgtccaaaggcatggaagaatctgtgcctgtttgcgggcagtcttttgttctatttgtatggggtgaaggatacgccatggtatctcgccctgtttttagtttccataattgtgaattacaggatgagtttctggatcgacggcagtttggagccggtacagaaaaagcgaagattggcggcgggagtgatttttaatctgtctattctggccgtatttaaatatacgcatagattaccgctgggaatcagtttttatacctttcaggcggttggatggctgatcgatgtatatcgggaaggccggatgcaggatgcgaattttgtgaaattcggaacctttatgactctgtttcctcatgtgatttcaggtccgattctgcgttggaaggataccagcagggatttgtcccggcaaaacagagggctggatgcattggaaaatggtctgcgggagttgaccatcggacttggcatgaaagttctgctggctaatcagatggcagatttatgggaaaagatccgggcagtgggctatgaaagtatctctacaccattggcatggcttggtattgtggcattcagcttcgagatttactttgatttttacggttattcattgatggcaattggtcttggcgaaatgttcggattccatctgccgaagaattttcaatatccgtatatggcgacttccatgacagatttctggcgccgctggcatatgacgctgggaagctggttcagagattatgtgtatatcccactgggaggcagtcgttgcagcaaatggaaaatgatccggaatctgctggtagtgtggctgcttaccggattgtggcatggtgcaggctggaactttcttttgtggggattcctgttatttgttctggtcacagtggaaaaattgtgtttactaaaagtattccgacgtgttccgattctgggacatgtatatatgattctggccatccccctgtcatggctgatatttgccatctctgatccaggacagatctggatctatgtgcagcggctgtttccatttttggcagcggcgggaagattttcctggtttgccggtgattatctgaaatacggcaaaatgtatctgatcacgctgctggcaggaatgattctgatcacaccacttccgcgaaagctttacgagcggtacaaaggcagcatgtggtcggcactggtactgatcctgatcttctggttcagtgtgtactgcatctggatcggacaggatgatccgtttatgtacttcgccttctgatattatgcatagtgaaatagcaatttcaaaaaaggacagacaacatgaaacaacgaaactggtatacgatctttttactttctacctgtattgtgacaggtatgatctatatagcgggagtatatgcgccggacagcatgaagatcgcacgggcggcactgcagtatgtgtttaatccttctgaaggaagcttttctgaggggaacttctggacggatggagtggaagaagagatgcagtcgacagatgatgcggcggctgatgatctgaattcgacagatgcagatagttccgatgggactgcttcagataatacggatacagtcacgtcagatcaggagctcacagagcagccacagagggagctgccacagattccggatgactttacaggtgttctttttatcggagattcccggacagtgggactgtctgaatatggaaagcttggaaatgcagatgtatttgcagacacagggatgagtgtctacaatgtgacgaaaaaagctttgcctgcgccagatggtgaaaaacatacacttgatgagcgactgcaggaaaagaactatcagataatccttctgatgctgggtatcaatgagcttggctatgacagaaatgtgtcttataagagatacgcagaactggtagagcacatccgggagatccagccggatgcatggatcgtgttggaagcgaatcttcatgtgacgcaggcacagtcggaaaaagataacatttttaataatgaaaatatcaatcaggtgaatgaaaatattcgtcagcttgcacagaaaaatggtctggggtatctggatgtgaatgtgttgtttgatgacgaaaatggatgccttaaggctgattattctgcagatggagcacatgtccttggctcttattatgatgactggtctgcgtggatcttacaggaattacagtccggcgatgccaataataggtagtcagacatttgcaaacagttgtaaaatcctccgtgatggggtattctatataggaatctacgataacggaggacttaaaattgcaggattttgatacagaggaatctgcaaggcagcaattaagagcgcagagacgggcaaagctgcgggaaaagagaagacgggaacgaagaagaaaacagatcctggtattgagctgtatggggctgggagtgataattcttctgacagcgggcggcagactgatcgcaggaaagaagaaagcagctgatacagcacagaatacgcagcacgaaaccatagaggaacagaacacagttctgacagaggtaacagcgaatatagattcagatgccacggaacagggggaagatgcggtgaaaaccgcatcggaaggttcagacacatctgatgaatcggacgcagatatgacagcaggcacagcttcggcagatattccatttgcagcaggctatgaattttcaactacggattccacatcaggaaccaatggggaagtacagagcacctatgcattgctggtggatctggatgataatacaattgttactcagcgaaatgccagggatcggatcaatccggcatctatgaccaagattatgacagttctggtagcagcagagcatgtgacagatctggaggatacatttaccattacccgtgagattacagacttcagttattccaatgactgcagtgcagttggatttggtgaaaatgaggttgtcacagtaaaagatctgctctatggaacgatccttccctcaggcggagatgcagcagccggtcttgcctgttatgtggccggttctatggacagctttgtggacatgatgaaccagaagctgagggatctgggcctgtcagacagtgcacattttaccaactgtgtgggactgtataatgaaaatcattattgcagtatctatgatatggcagtgatcctgaaagcggcgatggaaaatgaattgtgcagggaagtcatgtcggcacatacttatacaacatcttctacagaacagcacccggagggaatccagatatccaactggttcctgcggcggatcgaagataaagagacgaacggagaagtggtctgtgccaagaccggctatgtagtgcagtctggaaactgtgctgccagttatgaagtgaccaacagcggaaaacattatatctgcgtgaccgcaaatgcacatagcggatggcggtgcatctacgatcatgtggagatctataaaacttatacggaataaaatattgtcacttaaaaattttattccagatggcatgtgctacttcttctttgctcatcagtggaagttcctggatatcatttttggtgatcaaagtcaccacgttggtatcggttccaaatccggcaccggcggtcttcaggttattggcaacgatcatatctacatttttcttgataagttttgcctgggaattttccagcagatgctctgtttccatggaaaaaccgcataaaaactgaccagattttttatgctcaccaagatatttgagaatatcctgagtgcgggtcagagggatggacatgtctccatccttttttttgactttctcagtgctgacctgagaaggtgcataatcggcaacagctgcagcctttacgattgcatcctgctctggtgcaaggaaagtaactgcattgtacatatcctgtgcagaggtgacggacacgacgtgtacaaaaggtggtggagtcagagagacaggtccgctgaccagagtcacttcagcacctcgctgcatggcagcttctgccagggcatatcccattttgccggtggaatgattggagataaagcgcaccggatcaatggcttcctgagtaggaccggcggtgaccagtacttttttgccggtcagatctttttcgtaagccagttcccttaagatataggaaagcagtacttccggctccggcatttttccggctccagtgtctccgcaggccaggtggccgcaggcaggatcaatgatctgccagtgatagtgggctagtgtttttaagttatcctgcacgattggattttcatacatgcctgtattcatggccggagagatgagctttgggcatttacaggcgagaatggtagtggtcagcatatcgtcagcgatgccgtgtgccaacttgccgatcacattggccgaagccggtgccaccagtacaaggtctgccttctttgccacagaaatatgctccacctcaaaggtgaaattccggtcaaaggtatccaccagacatttatttccggtgagggtttcaaaggtgactggagtgataaactgagtagcattttgggtcatgatgacctgtacatcgcagtgtagttttttcaacgcacttgcgagatttgcaattttatatgcggcgatacttccggtaacgcctaatacgacacatttattttttaacatagattcctcctggacggtttggacagtcatttgtaaaattgcgcttgcagggttttgcgctgctttgcaattcccaagatttttcgaatatttatgagtaagctcatgtagtttcacactaaatattggcataaagaggtagaaaagtaaaggaaaagatgataaagtataaatattcctgcgtgcaggaacggaatcgcaaaacatggaggaatcaataaaagatgattttagcagtagatattggaaatacaaatattgtggtgggatgcatcaaaggtgaggaaatctgcttcgtggagcggatgtccacggaagctaccagaaccgagctggaatatgcgatcagttttaaaaatgtactggaaatgtatggcatttccattgagcagctggacggagggattatttcttcggttgtgccgccagtgacaaatattgtgaaacggtctgtggagaagattctgaatacggaagtcatgttgatcggtcctggtgtgaagacgggtttgaatattctgatggatgatccaagacaggtgggaagtgaccggatcgtcaatgcagtagcggtagtccatgaatatccggtgcctgcggccatcattgatatgggaacggcaacgaccatctgtgtggtggatgagaagaagaactatattggtggagcaatcattccggggatgcggatcgcagcagatacactgactgcccgcacggcgcagcttccaaagattagtctggaaccgcctgcaaagctgattgggaaaaatacggttgactgtatgaagagcggtgtcttctatggaaatgtggcgttgatcgatggaatgctggatcgaatggaagaagagatgggacagaaacttcatgtgatcgctactggcggactggcgaaagctctgattccgtattgcagacatgagatcacattggatgatgcattgctgctcaaaggtctgaagattatttacgagaaaaataagtaaacaaaaatgctgtggaagaccagaaaagaaattcaggtcaccacagcatttttatgtacaagagaaaatgattatttgataatggttccggctttttcttccagggcagcttttgcgtcgtccaggtcagcaatcacagttacgcggcccggctttccggatacgaaggaaacagcagcaacaactttcggaagaatggaagtctcagcaaactgaccctctgcaatgtaggagcgggctttgtctacactgatcgtatccagcggttcgcagttatccttaccatagttcaagtacagctttttctcgccagtcagaagcaggagaacatctgcgtccagaagctcagccagcttgccgcttgccagatctttctcaataacagcactggcacctttcaggcgatttgcctgtttgagaacagggattccgccgccgccgcaggcgatgacaacctgaccggcatcagacagagcgcggatactgtcgatctctacgatatcttccggcttcggtgcggatacgatacgacgataaccgccatccactttgaccacgtagtttcccttctcttcttcagcgtcagcttcttccttggtcatgatacgaccgatgactttgaccggtttgtagaaggagtcatcgtatggatttacaacaacctgggtcagaatggtagcaaccggacagttgatgccacggttgagaagttcttcacgaatggcgttctgcaggtcatatccgatatacccctggctcatggcagagcagacagatatgggtgcgaaggtgtaatccgggtgctgctttccgaattcgttcatagcagtatggatcatacccacctgtggggcattactgtgggaaataataacctggcaatcagcctctacaagatctgcaatagcttttgcggcgccttttactgcgtcctgctgctggggaagggtagcacccagcgctttgtgcccgagggcaacgacaacttttttcttgctcatgatgggtcctcatttctgtagtgtgtagtggagcctggaatctcagagatctgtggtattctcgctgcggtgtcccgctgcagagagctttctgcagaagtacctatgagcgcgagcattcactgtgcttctgtgtcaatctcctcaggctctaacggttactaacagtatacgtgtttatagacaaaattgcaaggataagacaattgtgatataataggcgcattggaaaaagagaaggagattctttcatgaaaaatattgcaggacttttacaggaactgaagtacacagtgatagacggaaagccagaaggagagatttcagagctggtctatgattccagaaaggtgacaaaggactgtatgtttgtctgcatcaagggtgcggcatatgacagccatgaccatacagaggagatcgcccgggcaggcgcaaaagtgatcgtggcagagcgtccggtgaaggtaccggaaggcgtgactttagtattggtggaggacagccgttatgcgctttccatgctgtccgcagcgtattttgatcatccggcgcaaaagctgaaagtgatcggaatcacaggaaccaagggaaagaccactactacatttatggtaaaaggaattctggagcatgctggatacaaggtgggattgatcggaaccattgagaccattatcggtgatgttcatattccgtccagcaacactacgccggaatcctatctggtgcagaaatattttgcacagatggtggaggcaggctgtcagatctgcgtcatggaagtatcttcccagggactgatgatgcatcgtactgccggtattccatttgagatcggcatctttaccaatctggcgccggatcatatcgggcccaatgagcatgcaagctttgaggaatacgcagcatgcaaagggatgctgttccgccagtgccgtcatggaatcgcgaatgtggatgatgagcattttgatatggtactggcaggtcatacctgtgatctggagaccatcggattctcagatagagctgattaccgggcatctgacatggaactgatcggaagaccgggctatctgggcgtaaaataccatgtatccggaaagattgatatggatgtggaaattgatgtgccgggacgcttcagtgtgtataactcactggtagcgattgctgtctgcgagcattttaaggtgtctcaggaggatttaaaagcggctcttaaagtagtgaagaccaagggacgtattgagatgatcaaagtatccgatgatttcattctgatgatcgactatgcacacaatgccatgagcttagagagcctgttgactacattaaaagaatatcatccaaagcggctggtatgtgtctttggttgtggcggaaaccgttccaagctacgtcgctatgagatgggcgaggtatccggtaatctggcggatctgaccgtgatcacatctgataacccacgatttgaggagccgcaggcgatcattgatgatattaaggtcggtatggcaaaaaccaaaggaaaatatgtggagatttctgacaggaaagaagcgatccgctatgtgatcgaacatggtcagaagggagatgtcatcgtgctggcaggaaaaggacacgaggactaccaggagatcaaaggagtcaaatatcccatggatgagcgtgtgctgatccaggaggtattgaaggagatggcagaaaaatagatggaattcgtcaatgtgatcgtagatatttcccatgagaagctggatcggatctttcagtaccggattccggaggaacttcaggggaagatcagcaccggtatgcaggtgcaggttccctttggcatgggaaatcgaaccatcaaaggatatgtgacaggtgtcacggatgtgccggattatccggtggaaaagatcaagccggtcaccggtctggtggatggcgctgtgccggcggagtcggagttgatcgcgttggcggcatggatgaaggagttttatggttccaccatgaaccaggctctgaaaacggtacttccggtaaaacaggaagtgagcagcagacaggaaaaatgtattgtgcttgcgattccaagagaagaggcggagcagttattaaaggaagtgctccataaaaattttcgggcaaaggcaagattgctggcaggacttctggatcatgacggaaaattgtcttcaaaggaagcagcagatcttaaaatcacatcttctgtcatacaggggctggaacgagatggcgtggtccgtcagatatcccgggtgcagtaccggaatccttttgccggaaaatttgaacagaccggtatacagcggacgctgacagaagagcagaagaatgctgtggatggaatctgggatgagtatgcacagggcattcgaaaaacctatttgctggaaggtgttactggaagcggcaagacagaagtgtatatggaactgatcagccgggtgatcgcagaaggaaagcaggcaatcgtgctgattccggagatcgccctgactttccagacagtccggcgcttttatgagcggtttggagaccgggtatcggtcatgcattccagactgtcggagggagaacgatatgatcagtttcttcgggccaaagccggagaaattgatgtgatgatcgggccaaggtctgcgttgtttacaccattttcacagattggtgttatgatcattgatgaagagcatgaaggagcctataaaagtgagacagttccccggtatgatgccagagaagtggcggctgtccgggcgaaaaagcatggggcttctcttatcttaggaagtgccacaccgtccgtggagaccagcaggagagccagggaaggaaagtttggatggtatcgactgacctcacggatcggccaggcaattttgccggaagtatcggtggtggatctaagagaggagcttcgggatggaaatcgaagtattttcagccggagacttctgtcggccatggatgacaggctaaaaaaaagacagcagaccatgttgttcttgaaccgtcgggggttgtctggatttgtgtcctgccgttcctgtgggaaatcgattcgctgtcctcattgtgatgtgaccttatctcttcacaaggatggaagccttcgatgtcattattgtggttatcggatcccgatgccgaagaattgcccttcctgcggatctccatatatttccggattccgggcaggaacccagcagatcgagcgggaggtgcacagattatttcctcaggcgcgagtgctgcggatggactatgataccacccgtacaagagaaagctacgagcagatcttaagtgcttttggaaatggacaggcggacattttagtgggaacacagatgatcgtgaagggacatgattttcctgatgttacactggttggtattgtagcggcagacatttcactgtatgcgtctgactatcgggctgcagagcggacttttcagcttctgacccaggcggtgggaagagccggcagaggaagcaaggcaggagaagcggtgatacagacctatatgccggagcattacagcattcagaccgcggcaaagcaggattatgacgcattttatgagcaggagatcctgtaccgggaattgatgggctacccaccggtggatgagatgcttggtatctatttgtcgggaaaagatctggaaaaattggaaagctgctcagaacaactggcagaatggatccgtaatgcccatgtggagggcttatgtctgatcggaccggctgatgcagctctcgcccggaaaaatgacagttaccgcaaggttatttatatgaaacatgaaaagaaaattatcttattaaaaataaaaaaactgctggagcagcagattgctggtacagataattggaacgatatttttatccagtttgactacaatccattgcaggcatattaggaggacattatggcaatcagaaatttacgttatgaaggagatccgattctccgtaaaacaagcaaagaagtaaaagagatcacaccaaagattgtagagctgatcgatgacatgctggagaccatgtatgaggctggcggtgtcggactggcagcgccacaggtgggggtactgaaaagaatcgttgtgatcgatgtgggagatggtccgttcgtgttgatcaatccacagattacaaagacggaaggctctcagaccggagacgaaggatgcttaagtgtaccgggaaaagccggaaccgtgaccagacctaacgaagtgactgtccgctttaccggtgaggatggcaatacctatgatctggaaggaacagaactgctggcgagagccatctgccatgagtgcgaccatctggatggaaagctgtatgtggatctggtggaaggagaacttcacgatactgtcatggacgaggaggaataagcgaatatgaaaattattttcatgggaacaccggattttgcagtgggaacgcttagatccatggcagaagccggtcatgagatcacattggtagtgagtcagccggataagccaaagggacgtggacatgcgatggttcccacgccggtgaaggctgtggctgaagagctgggaattccggtattccagccggtgaagatccgtgaggcaaaggatgtgttggagaagacggaagcagatgtgtgtgtggtagcggcttttgggcagatcattccagcgtccattcttcatatgaaaaaatatggatgcatcaatgtgcatgcttccctgcttccgaagtaccgtggagcagcaccgatccagtgggcagtcatcgatggggagaaagagtccggtgtgacgattatgcagatggatgaaggactggataccggcgatatgttggcaaaggcaatcgtaccgctggatgaaaaggagacgggaggaagtctctttgataagttgagtgaggctggtggacgtctctgtgtggagactcttgcaaagctggaaaagggcgagatcaccccggaaaagcagggagagtcaccgactgcttatgcatccatgctggataaaaaaatgggaaatatcgactggaacaagagtgcagtcgtgattgaacgtctggtccgtggactgaatccgtggcccagtgcatatactcatcttgacggaaagacattgaaaatatgggcatgtgatgtgctgccccaaagtgcatcaaagggagaaagtggtgagatactggaagtgacaaaagatgccattcatgtacagaccggggacggtatcctggtgcttcgcgagatccagcttgcaggaaaagcaagaatggatgcaggtgcatttttaagaggatacaaagtagttccgggaacggtactttcggcagaataggaggaaattatgccgtttttctattattatgaccctacgtatattctggtactcattggagcagttctgtcactgtgggcgtctgcaacagtaaaatcaacttataacaaatactctcgggtatatagttattccggactgaccggagcgcaggcagctgcacagattctcagacaggcaggtatctatgatgtgaggatcgagcatgtgagtggtaatctgacagaccattatgatccaaaagccagagtgcttcgcctgtccgacagtgtctatggatctaattccgtagctgccatcggtgtggctgctcatgagtgtggtcatgcgatccaggatcaggaggactatgttccgcttcggttccgttctgcatttgtgccggtagcgaatctgggaacacaggttgctttccctatccttcttctgggtgtatttctgggaagctctcatttcctgatccaggtggggctgctgtgcttcttctttggtgtactgttccagctgatcactttgccggtagagtttaatgcatccggccgtgcggtacggatcttaagagagacagggatgatgtctgatgatgaattgtctaagacaaagaaagtactgtcagcggcagctatgacatacgtggcagcagcggcagcatcgatcctgtccatgttaagacttattatcctgttcggaggtaacagaagacgtgactgatcaggtaaatacaagagggctcgcgctggaatttctgctggaagtggaaaaaggagccttaagccatgtggcacttcgtggtatgttggagcgataccagtatctggataagcaggaacgcgcattcctgacccgcctttgtgaaggaactctggagcgcagactggagctggatgccatcatcaaccatttttctaaagtgccggtgaagaaacaaaagccggtgatccgtaatctgctgagaatgtcggtttatcagctgaaatacatggatcaggtgccggattctgccgtctgtaacgaggcagtgcgtctggcgcagaaaaaaggcttcggaaccttgaaagggtttgtaaacggcgtgctcagaagcattgccagaggaatagaagagatttcttttgatgatctgtccatctgttattccacacctcagtggatcgtagaccagtgggtcgaggaatatgggaaagacaaggcagttcggatgctggcggatcagtatgcagagaagccggtgaccattcgaatcaatgagacgaagacaacaaagcagcaactgaaggcgcgtctggaatctgaaggtgtgaccgttcaggagatggacggcatggattgcgcactggcaatctccgggtttgattatctgcgggctctttcttccttcagggaagggctgttccatgtgcaggatgtcagttccatgcaggtggcattgactgcagcgccgaaggaaggcgacatctgtctggatgtttgtgcggcacctggaggaaagagtcttcatctggcagaacttcttcatggaaccggacttgtggaggcaagagatctgacggattataaagttgaactgatccaggacaatatcgatcgttcagagcttacgaatattcgtgcagtctgccatgacgctactgtccttgatgaatcctggatcggaaaggcagacattgtgctggctgatcttccatgttccggccttggagtattaaataagaaaaatgatctgaaataccggatgacaccggaacagcagcaggagctggtagagcttcagcacaggatcctggatacagtatggcagtatgtgaagccgggtggaaagctgatctacagtacttgtaccgtccacaaagcggaaaatgtggaaactgtggattggtttttgaaaacgcacccgtttttgttgaaaaaagagattataatgcttcccggtgtggataagtatgatggattcttcatcgccgggatggagagaaaagaacatgattgatataaaatcactgactcttccagaactgcaggaagagatggaaaagatcggagagaagaagtttcgtgcaggacagatctatgagtggatgcatgtgaagctggtggacagttttgatgagatgaccaatctctccaaaggattgcgggaaaaattaaaggagcagtatgaactgatatcattggagctggtggaagtacagacatcgaagatcgatgagaccagtaaattcctgttccgtctgtcagatggaaatgtgatcgagagcgtgctgatgaaatatcaccacggcaattcagtctgtatttcctcgcaggtaggctgccgtatgggctgtcggttctgcgcgtccacgttggacggactggagcgtgggttaaaaccatccgagatgctggatcagatctataagatccagaagtggtcccaggagagggtgcataacgtggtcgttatgggaacaggagaacctctggacaattatgattctctgcttcggtttattcatttgctgaccgatgagggaggacttcatatcagtcagcggaatctgacggtatctacctgcggtattgttccgaatatgcgtcgtctggcagatgagaagcttcagatcacgctggcattatcccttcatgcgtccagccaggagaagcgcaagacgctgatgccggtggcctataaatttgatttgaaagatgtgctggatgcctgccggtattattttgaacagactggccgacggatcacatttgaatacagtctggtaggaggcgtcaacgacagcagcgaggatgccagagaactgacggagctggtcaaagacctgaactgtcatatcaacctgatcccggtcaatccgatcaaagagagggattacgtgcagtcggacagccgcgcgatcctcaatttcaaaaataaacttgaaaaatcagggataaatgttactattagaagggaaatgggccgggatattgacggcgcatgcggacagctcagaaagagctatatggatactgaaaaagagaggtaagtggaagtgcagacatcggtcgcaatgacggacgtgggccgtgtgagaaaagtgaatcaggattatgtgtatgcttccgacacaccggtcggaaatcttccgaatctgtacattgtggcagatggaatgggaggtcataaagcaggagacctggcatcttcctatgcggtgcagaccattgtggaagctatcagccggagcgtggagaccagaccggcgctgatccttcagaaggcgatccgctacgccaattaccggttatatgaaaaatcggaagagcgggaagaatatcatggaatgggaacaacactggtagtgctgacagtatataaagatgaagcactggcagccaatatcggagacagtcggctgtatgagatctcacagaagcagatacggcagatttcagaagatcattccctggtggcggagctggtgcgaaagggagaactaagtgccacagaagccagaagacatccagataaaaatattattacaagggcactgggaatccaggacgaggcgcagattgatctgtttccgtttcgtgtggagacaggaaaccgctatctgctctgttctgatggactgaccaatatggtggaggatacggagctttgcaggttgatcagtcagaagaaagatatttcggagattggtgcggagctgatcctcaaagcgaacaagaatggtggactggataatattgcagttgtattggttgaaatagataacagtgaggtaggattatgataaagacgggaacgattctgggagaccgctatgagattctggaaaaaataggaaccggcggtatggcagaggtcttcaagggaaaagatcataagctgaaccgttacgttgcagtcaaagtactgaaagaggaatttcgtgacaatgacggatttgtaaagaaatttaaggaggaagctcaggcagcagccgggcttgctcatcccaatattgtaaatgtatatgatgtcggtgatgagaacggtatctattatattgtgatggagctggtggaagggatcactctgaagaattatattgagagaaaaggccgcctgaccatcaaagaggcaaccagtattgcaattcaggtatctgcaggactggaggttgcccataataatcatattgtacacagggatatcaaaccacagaacattattatttccagagaaggaaaagtaaaggtaacagattttggtattgccaaggcaaccacttcccagaccacgacttccagtgccatgggttctgtgcattatgcatctccggagcaggcaagaggcggatatgtagatcatagaagcgatatttattctcttggtatcgtcatgtatgaaatggtgacaggccgtgttccgtttgatggggagactgcggtgactgtggcagtgaagcatctgcaggaacagatggttccgcccagcaagtattgcccggagattccgtacagtctggagcagatcatcaagaaatgcacggagaagagtccggaccgcagatatcaggatatcggggatctgatggcagatctgaaacagtctctggtagatccggatggtgatttcgtacagatggtagatcttgatgagcaggccaagaccgtgattatgacaaaaggaaccacgtccaaggtcaaagagtcccgcagagtgaatctgagcaaggatgaggatgaggatgatgaggaagaagacgaagacagcgaagatgatgaggatgatgaagaactgagtccgaccgttgaacgtgccatgacgatcgcaggagtggttctggcagtgatcattgtgatcattatgcttctgctgttctcaaaagtgcttggaatcggcaaaaaatccaatacagataccagcgacagccagcagacagagcagagcgcggacgaagaagatgacagcagttccgcatcccaggggaatacagtgaacatgccgagccttcttggaaagacttatgcagaggcaagaacggttctggaagaacttggactgaagatcgagcgtggagaatctgaaaaatccaatcagtattctgcaggtcagatcattgcgcagagtgaagaatcaggaaacagcgtgaaggtaggtacaacggtgacagtaaccttggcggcagcaggatctactgcttcttcagatggaaccagcagtacaggaagcacctcttccggtacaaccaccacgaccactaacagcaaagtgacgattccgtcggtagttggtaaagatgaaaatgcagcgaagagtgcgatcacggcagcaggtctgacggttggtacggtcagcgaagcgtccagcgatacagtagaatccggtcttgtcatcagccagtctccgtcagccaattccgagacggagagcggtggaaaagttaacattgtgctgagcagcggaccgaataaaaagaaagtgaccgatgttatcggtcatgaatccagcagagcccagtcagaactggcgggggatggatttaaagtagaagtaaaagaaacatatagtgatgatatgcgtgcaggcctggtagtcagcaccagtccggacagaggaacctatgtgcagccgggaagcacagtgacgatcactgtcagcaaaggccgggaacaggtaacgattccatctgtcagcgtgggaatgacctatgaagaggcagtggaggcattgaatgatgccggattcaaaggaacagtcaaagag

SEQ ID NO: 2805 - DNA, 8795 bp, Unknown
  16S sequences of unknown bacteria
acaaacgtctgcgcgcagctggtgatcagcccgactgccgtcttcaggcaggcgagcgtgaccgtgatcgccaagatgatggcgccgccgctgccgaaataatgatcggcgatctgggccagcgcctctccgccgttggccgcagtctcgaacaagccgcggctctgcgcgccgatcatggtgaccagcacatagatgagcgccatcagcagggaactgaacagcccggcctttatggtgcttttggcgacttctcctggttcctcgacccccagtgaacggatcgcgttgacgacgatgatgccgaaggccaagccggccagtgcgtccatcgtattatacccttccagcagcccggtggaaaacgccgctgacgcataagcgcctgaaggcgcgatctgtgcgatctggcccatcggcgcgctcagcgcgcggatgacgaggatggcaaggaaacagagaaacagcgggttcaggaccttgccgatccaagtcaggatctcaccggggcgcaaagagaagaataagacagcggcgaaaaagagcagagagaagacggcgagcacgacggtctggtccgccgtggggaacaagctctcgatgccgacggtaaaggagaccgtggcacagcggggaatggcgaagaacggcccgatggtcagatagagcgcgcaggtgaagaagatgccgtatcgccttcctacccggctgctcagggcaagcaggccgctttcccggctgacgcccagcgcggcgacgcccagcagcggcaggccgacaccggtgaacaagaaaccgacagcggcaggccacatgtgcgatcctgccatctgtcccatggaaacggggaagatcaggttgccggcgccgaagaacaagccgaacagcatgctggcgacgacaatgatctcccgaaaagtcagttttttcatcatgatgatcctcatctctttctgtcagacgaccattattttatacgattcctggagacatggcaaatcctgccagcctgttcttttattgataactggatccgcaggcaaaaagatctatgtcatcatgatgaatcatcaccgtttttccttcttttggcggcggtcaacgcggtgtggcggacccagatgggctgccgatgacaaatttttacaacaaagtgcaattttttacaactcgatctgttttataatggataggctgtcatgagctagaggagggcatagttgcgaaaaagcgattgcagatgctgctgagcgcagcaatggcaggcacgctcatactgacagggatctccctgccgacagatgtgcgtgccgcacagtccgcagagttcacttcacttggcgcgatcagtgatgtgcgttatacgctgccgatggcagcaacagcgccgcagatcgcggagacatcttccagcgcgatcacattatcctttgatgtaccagaaggcatgcaggctgatctggagatcgatggcatgctgtatgagaatgtcacatctccgttcatccatgattcgctgaatccagatgaggagcacacctatcgcctgcgtttcacgaatacgctgggcagcggggagttcagcgagcaagtcagcgccaagaccgatctggatccgtatcgcaatgtgatcagcggagcggtggcaacggctaattcttatgaagatatcccaggcgacagttatccgccgcagaacctggtagatggcgatctggccagccagtggtattccaactgggatgatcagaagtattacacagaacctaagatcatcgatatcgatctgcagatggcgtatcagctggataagctggaatacatcaatgacggcacgagtcagatcctggatcatgagatcctcatcagcaaggacggcgtgcattatgagcaggtcgatgccagcgtatgggaaaagcagtatcagaatgattatgagtttgacggacgcatcgcccgttatgtgcgcatcatctcacatgatcagcgcttcaacagcggcaatgagatccgcatctataaggtggatggcacagacggcttctctgaggcagactgcaatggcgaccgcatcttgaaccacgatgatctgacgttcctgaagaattacatgggcgtggatcagaacaaccagcgcctgtggaatcaggtcaaggaagcagacttcagctgcaacggcatcatcgatgcctatgacctgatgttcgtcgcttcccgtctggacggcggcgtgcgcgatccgcaggacgaagtgagcggcatgacctccttcacggctgacaagacatcggtgaagaaaggcgataccgtgacgatcagcgtaaatgcgcatgatttcgtcaatgtctatgcactgaacttcgagcttctgctggatgctgaaaagctgagctctgcggtatgcccggacaatgtctgcacggcagattctccgtttaccgcgggtgagttcaccgaaggcatgctcgattattccaaatccggcgagacgcagatcgaaggcaaggatcacgtccgcttctatggcgcattctcctttgtcggtgacaatggcccgctgcagggagacggcgtgatcgcaacgatcgaactgaccgcgctgcaggacatcgaagagatcgacatgatcctcaacgatgtgcaggtcatcagcagcggcgggaccatcgctgatgcttcctggaaagatgacggcggtgaggaaggcccgggcacagaccctggagaagggggaaagccgggcgaaggcgaggacacaccgaagccaggcgacgatggagataccggcgtgaacacgcagcagggcatgatgctcgcactgttcgcggcagccggcgcatccgcagtgatcgcataccgacgcagacagcgccagtaaccaagagagagttctgaacatcgattcaggactcttttttctttgcgcatgcattacattcttcgggttctgtgctatagtgaaactgaatgtgacagtgaatggggaaatgcatgatgggacgatatacggaatatctggaaggaagagcggatgccatccgtgtggaagatgaaaattacgcagaagagctgctggcgatcgcgcagacgttccgcagcctggatgaagcgctgagcggcttcatccgcgcgcatggctatgaagggcaggaggatccggctgaaaagagcgcttttgtccgcacaaggtttgaagaggcgcagatccctgtgccccgcggcatcaaaaagtggtttgcctatgggcatcatacgatcagccgtccgcatgcggtgcagctctgctttgcctttcatctcagcctggcggaaagcgaggactttttccgcagggtctgcctgcagcgcccgctggactgccacgacatggaagaagccgtttgttactttgcgctgcgtcatgcgctgagctatgcgcggacccaggagatgatccgcgcgctgccggatgtgcagcgcacctgtgtggacctgcagggcgatgtgctgtacacgaagaccatcgtcagcgagatcgaacggatcacggatgccggacagctgatggactttctgcgcggaaacgcagatcagttcgcttatcataacgcgacggcctatcgttacatccagagcctgtgggaagtcatcagcgcagatgagggactggcccgccgcgaagccagatatctgtatggctggaaaggcgagcgcgacgcgaaggggcgaagcctgctggagatcatggaaaaccgcaagcgcacggtatgggacatctatctgcagatcctcggcctgctggaatatgactatgatcaaaagaaacggcgttatgagccgctgtttgcgtttgaggcagaccgcagcatccaggaagtgctcaaggacaaccgcctgcttcatccgttagctgtggataagttcccggaccgccaggggctggaggccatcctgcaaggcaggcgcaagcacgacgaggtggtgcgcaagacgctgatcctgctggtcttctatcagttctgggtgaatgatgcgctgcggaagggctatgcggaataccatgccgatgaacaggcagaagcccgcttccactgcatcgctgaccgctttctgagcgatgccggctacccgacgctgtatgccggcaatccctttgactggatcttcctgtattctgcccatgatgactccccgctggaggcgctgcgctttttcatgcgcgagctgtatctggtcaagaaggatgaactggagccgaaggtgtgacatcatgcgcaaaaccagaaatcaccggctctgcgatataatcatccgcaggcagaggatgtgagaatatggatacgagaacggcgctgaaggcgggaagcgtccttgcgttttccggttctgagagcggcttgtttcgctgcagcatcgaacgggagctggccaggggagccatgagcatcgtctatgatgcttcttatctgaacaatgccggtgtgcgcaaggcgatccggctcaaggaatgttatcccttcaggctgcagatcatgcggatggatgatgggacgctggtggcagacgacaaggagcaggaagactttcaggcatgccagcgccgcttccgcgccgccttcgatctgggcaatgcgctgttcgataccagcgggctgaccaactgtacgacgaacatgctcgatatttatgcggccaaccagacgctgtatgtcgtcagcgcctatcaggagggaatgacgctggagagcctggagccgcttacgctgaaggaatgcctgacgctggtgcgcagcacagcagaagtcatccgccgcatccatgatcatggctggctgtatctggacatcaagccggaaaatatcttcgtgctggaagggacgcacgagatcgtccagctctttgattttgactcgctggtgccgatggacatcgccagccgaagcggggctgaggaagactatcggatctcgcatacccgcgggttttccgccgtagagcagcagcgcggcgacatccgccggcttggccggcacagcgatgtctatggcatcggcgctttgttgttttatctgttgtttggccgcacgccaggcgcgatggacagcctgccggatgcggtctatgactttgagcgctcccgttttggctcccgggcttatcaggacaggctgttctttctgatgagcgatttctttcatcatacgctggcggactatccgctggatcgctatccagacatgcggcaggtgagcgaacggcttgcggagatgatcaagctggcagacagcacggccatgttcctgtatgagacgccgctgtatgcgccggcgctgctgctgggaagagcgcatgagctggaacagttggaggcgtggctcgctgatgcgcaaagcccgtgcctgatcgtcagcgggatgggaggcatcggcaagagcacgctggtgcgcggcttcgtctgccgtcatcatgaagacacggtggtctgggtccattaccgccattcgctcatgcgcaccatctgtgacgacacccagctgaaggtcaatacgctggcgcaggatgagcatgagaaagaagaagattattatgtccgcaagctgaacatccttcgttcgctgatccatggcagacgctgcatcctggtcatcgacgactgtgtgcgggaagaagactgggatctgcgccagctgctttcggtcggctggaaggtcatcctgatcacccgctccatggatcttgcggatgcgtatgcgcagctgcgggcagggccgatcaaggatcaggccgatctgcatgcgctgttcgcggcctatcttcgcgaacgtcccacggctcagcaggaaacggatatcgatcagatcatcacgctcgttcacggacatacgctggcgcttgaactgacggcgcgtcagatcgctgccagccacctctctctggaacaggcggttgagcgtatccgcagccgcggcatctttgcgctgggcaaggaaaagctgcaccacgtccgggatcatcatacgctcagcgaaagcgcggaagagatcatcagcgagctgttcgatttggcaaggctggatgagcaaagcatggtcatcctgagcgtgcgggcatggttcgatctcaggcagatcgatatccaccagttcgtgcagctgctcggcctctcctcgctcgatcggatcaacgcgctggaatcgcagggctggctgagctgcgatgcggatgcgctgatgatccacccgctgatcgcacagattgtcaaaaaacagccgatatccgcagcgatgcgggatgcggcgctctccgtcatgcgcacgctgcatgggcagatgcgaaaggaggtcgatgcggtgcgccgggaaggcctgcctgccggacgcggagagtctgcgcttctgaccttgagcgaggcgtttttgcgcggctgtgcccaggagaagacgctgtgggacagcgatatgtgcaggcatctgcggctcgtttgcgctgcgcatatccccagagagcgagaggaggacatcctgcgctatgccttgccgctcgtggacgcccatgagggattgtcggcagaagagctgcttcagctgtgcagcatgtgcgcggagatcgatgaggaacgccgcgaatttgagcaggcggcccaggtgatccgcaagcttcgacagcctttgctcgcgcagcgtgaccatcatctgtatgcgcagtattgcttcatcatttctggctatctcgatcagctcttggatgggcactatctgccaagggatgagcaagaccggaagctgctcaagcgcatgaatgaggcagatgatcaggctatccgccatatgcggaaatcgcgccgcaaggaaagcaggacactgctgtgtgcgtacttgcaagccagagcggccgtgctcatccgcagcgagccgcatcgaaagctgcggatcaggaagctgctcaaagagatgagcgcgatcttggatgaaggggatcaggagccgtggctgcatgcggcctgcgcgctgactttggcatggtatcacacctatgtggacgaagaccttgaacggacgctttcctgcctgaagaaagcatggcaggcagaacagaaggtctgcagcaatgatcttgacctgatcgatgatgtgcttcgtccaagcgccaacatcctgctggaatgggatgagatcgatgcctgcgtccaattgcttcaggacggcatccaacgctgtgaacggcatcctggcgtagtgccttacctgcgcaagaagctggagctgtatggctatctgctcgatgtctgccagctgagcgaagatcagtgcggagcggcccggatcagtgcgatcatccagcgggaacgacagaagctggagaaggaaaagacagcaggataacggatcgcggacggtgatccgagatggtgccatcgatgtcatgtcatgttataatgagggtgaaaaacgaggtgaggcagatgaagaagaggataccgctcggcttgcagagctatgacaagctgaagatcgggaattattatgtcgtagataagtcattgatgatccaggactttttgttgcggggcaatgaagtgacgctgatcacgagaccgcgcaggttcggcaagacattgaacatgtcgatgatggcatcgttctttgacatcacgaaggattcccgagagctgttcaaggataccgcgatcatgaagagcgagcatgcttcggcgatgaatcagtatccgaccgtctttctttcatttgccaatgcaaagggaagcaaacgaacgatcgtgcagaccattcaacaggtccttctggaactgtatcagaaacaccagcaggtgtttgcggatctggatgaatatgagcagccgatcttgcggcagatcaaagccagtttgtttgcattggacaaacaggatctcgatggattggaaggcgcgctctcctttctgatggcaaggttggaaaagcatcatggcaggaaggtcatggtgttcatcgatgagtatgatacgccgttcatcgaagcgcatgtgaatggattttacgatgaggtccgcagcggcctgtcctctttgctgcataatgcgctgaaggcatcgacgagcctgcagcatgcgatgctgaccggcatccagcgtgtggcgaaggagaacatcttcagcgacctgaacaatctggtggtctgcacggtaaaggacagggagtatgcgcagtatttcggctttaccgaagaagagacgaagacgatgctggaatattatggactggagctgaacgaagaagtcaaagcgatgtataacgggtatcgttttggcgatgaagagatctataacccatggtcagtgctgaactatgccagccgcagggcattggagccttactgggtcaacacgagcagcaataagatgatccgcaaagcgatggaagggcgggacctgacatttgcgcggggatatgagaagctgatcgaaacaggcaggctggaaacgctggtgcggatggagacgagcttctttgaagtcagcagcacggacagcttatggggactgttcgtgaatgcaggctatctgacgatcgaacgggtcatctcccatctggatggtttgtatgtcctgcggatccccgatcaggaagtgcagcgagaattccaggaattgacggcatgttatctgaatgtggaggatacgcagctggggaagctgttcatcgccttgaagtggaacaggaaagaggaattcatcgacaattaccgcgatatgctgctgaccctgccaagctaccatgacctgaaggatgagaacagctatcatgtgctgtttctgg

SEQ ID NO: 2806 - DNA, 21036 bp, Unknown
  16S sequences of unknown bacteria
acagatatttttcattttagcagctgcaccttctcttcgcccgcagccacatcgccgatgatataggcagtctcgcctgctttttttgcagcctctaacgctctgtctgccatgtttggattgaccactagcaccataccgatgcccatattgaaaatgttatacatctccatcacatccagaccgcccgtttgctgcatcaatttaaacagtggcggcatagcccaggctttcaaatcgattctagcacataggccgtccggcacgacgcgcggtacattttcaatgaaacccccacccgtaatatgggcaatcgcctttacatccgctaccttgcaaatttcctgtacagcgtttacatagatgcgtgtcggccgcagcaatgcttctcccagtgtgcagtccagcgcttcaatccattgggacagcgaatcctccgtcatagaaaaaatcttacgaatcaacgaatagccattgctgtgggcgcctgaggaagcaaggccaatgagcacatcgccggcctgcatgcggctgccatctatcacatccgccttatccgccagccccacggcaaaccctgccagatcatagtcgtccttggcataaaagccgggcatttccgctgtttctccgccaatgagcgcacatcctgcctgccggcagccttccgccacaccggaaacaattttggccgcctttactggctccagcttaccaacagccagataatccaaaaaaaacagaggctttgccgcatggcatgcaatgtcgttgacacacattgccacgcaatcgatcccgatggtatcgtgcttatccagcagcattgccagccttagcttggttccaacgccgtccgtaccggataccaaaacgggttggcgcatcttcagggcatcctcgatggagtaaaatcctccaaaactgcccagcccgctcaaaacattgtcatcaaacgtctgcgcagccatatttttaattctacgcaccacgtcgtagcccgcctctacattcacgcctgcgtctgcgtatgcttttgccatgtgtacttgcctcctaaatgattatagctctttggctaactgttgaatttttgcgtctttttgcgctacgccatctgccatttcctttttgtaagcagaaagcttgtcccacagctctggctggccggccgctaaaatctgcaccgccatcaaagcggcattttttgcaccgtccaccgccatggttgctaccggaatgcccggaggcatctgcaccgtggccagcaaagcatccataccacccagatctccgctgcaaagcggcacgccgattaccggcagaatggtatgccctgcaatggcgcctgccaaatgcgccgccttacctgccgcggcaatgataaccccaaatccatttttataggcgttttccgcaaattcgcctgcaacggcaggggtgcggtgtgcgctcataatatgcgtctctacctcgattccaaacgatttcagtgtctttaccgctgcttgcattacgccccaatcgctgtcgcttcccataatcactgctgcttttgccatttttgcacctctcttattttctggcattcatcgctgcctcgtataccgtttcatacgatacatttgctgctctggccgccctttgcacatcctcattttccggctttgccgtcatacgcccgcaacgcatagcagttttaacacggattgcaccataggcagtttccaccgtttcttctcctctgggcagtatcgtccgccttgcgttgtatgtacgtacacccagcgtagtggtatgctctagcatctttggtacaatctgcccgttgtccaatcgatagagagcgcagagctttgttcccatacgtccctttttcatatagataggctcggtccaaacatccaaagcgcctgcttcccgaatacgatctgccgcataggcaacggcttccggcgtcatatcatccaaatttgcttcggagatggatacctcatctgctacgccttccgtttccccccaaaagatgcgtaaaaagtttaaaattccgaaatcctttttgcccaggccatggcctaccgcctgcgttttcatcgttggcatggggccaaaatcatccgccatcgccgctgcaatggccgccccagtcggggtgcaaagctctccttttacctcggtttggtacatcggcttaccctgcaaaatcaaagctgttgctggcgccggtacgccgaatacaccgtgtgccgcctttgccatgccgctacccacatgaatgggagagcatacgattttttctacacccagcttatccaacaagatggcggttcccacaatatccacaatggcgtctgtagcccccacctcatgaaagtgcactttttctatggggttgccgtgtacggccgcttctgctttggctatggcatagaatattttttgcgcccgttcttttgcgccttgtgaaatggtgctgttttctataatctgcttgatctctccatatccgcgcgccaagcgatggatatggtcatgatcggattcatgcgtatgttcgtggtcaggggtatggtcgtgattatgttcatgagcatgcacatggtcatgatgctcgtgatcgtggtgatgagcatgctcatgatcatgatgcttgtgatcaaggtgatgggtatgttcatgatgctcatggggatcctcttctttggttaggtgcacatgcacgtccgtgcccgtaattccccactttgcttttttctcaatatgcagatcgtactcatcagaaaggcccagcttggccagctccgctttcaagtactcgggatcgatccccaaatcaagcagcgcgccgatggtcatatccccgctgatacctgcaaagcaatccaaatacagtgttttcatcgaaccaactctcccgtcgcaagtttattgatttgcccggccagataaccggccccgaatccattatcgatattcactacgctgatgccgttggcgcaggaattcagcatggtcagcaacgcggataagcctccaaagttggccccataccccacagacgtaggcacagcaatcactggcacctccaccaggccggccaatactcccggcaaagctccttccataccggccaccgcgatgatgacgtttgcctgtttaatctcctctagcttggcaaacaaccgatggatgcccgccacaccgatgtcataatatctagaaaccttatttcccatacacatagccgtcagcgccgcctcttcacacacaaataaatcgctggtgccggcagcacaaatggcaatatcccctctctcgtgcctttctccctgccaacagactgcaatttgggcctcgggataataggtcagcttgtccttcacgctgagcatatcaaatttatcagaagagatcctggttaccatgacatgggtagacgctaccttaaggatgtgctgcaaaatcccatcgatctgctccgccgtttttccggctccgtatacgacctccggcagtccctgccgcaattctctatgatgatcgatcttggcatagccgatgtcttcaaacgccaaagatttgatctgtttttctgcctgctctagagaaatatcccccgtttttacctgttccagtaacgtctgaagattcaccgcaccggctccttccctatgttcatattgcctgttttgtatccctgcatatccaacgctacatagcgatagccaaccgctttgatgcgctctgcaacgcgttgcatatcctcattctgtataaaggcctgcatactatctttggaaagctccaccctggccaaatcgccatgatggcgcactcttacggccgggtatcccatctcgtgaaagacctgctctgctttatcaatgcgctccaaagcctctatggtaatcgtatgatctgtagggatcctcgttgctaaacaagcataggcaggcttttgcgctgtcggcagccccatagcggcgctcagccttcgtatagccgctttatcatagcctagcatctgcagagggctcaatacccccagctcctttgccgccttactgccgggacggtagtcggatagatcatccacattggctccatcgcatacaacagaaaatccatcctgtctggcctgtgctgtgatggccccaaacacactttttttgcaaaggtaacagcggttgatcgggttttttgctatattttcatctgccaacacatccagaggaataatctgcaaatcaatttcatgttctttgcaaaactcttttgcttcgttcaattcccactccggtacgaaagccgaacggcatgtatatgctttcacatttctgcccaacgcctgcttcgcacaggccaatagaaaggtactgtccacgccgccggaaaaagcgatggccgccctgccctgctgacaaaaccaatctatgagttttcgttcctccattgccaaccacaccttctctgttttccttagccgtattgtaatattataaaccatatccccaggctctgacgagccttttccgaaagattcttggaaaaataaaaaacaccgcattgatagtgcggtgtttcttttttgttattggaccggatacacggatacctgctttttgtcacggcctttgcgctcaaactttacagttccgtccaccaatgcaaacagcgtatcgtcgccgccgatgcctacattgagacccggatggatcttcgtaccacgctgacggacgagaatattgccgcccaggacgaattggccatccccgcgttttacgccaaggcgcttggattcgctgtcgcgcccatttcgggagctacctacacctttcttatgtgccatggtttacacctctctcatccattgattatttgcccaaagattcaatctcgatcttcgtatacggctgacggtggcccgtctttttgcgatagttcttcttcggcttatatttgaaaacgatgacctttttgctcttgccatgcgccacgaccttagccttggctacgacatcctccacaacaggcgtgcccaccgtggttttttcgccatcgaccaccatcaaaaccggaagttctacggtttctcctacagcagcatccagcttttccacatacagggcctgcccctgctccactttatactgtttgccgccggtttgaacgattgcgtacattgttgcacctccccatccaaatattttgggactcgccaaaatcaggtagccttgcagcatttagacctgttctgagcggtaacactgaattagtatacagcacttctacgcgtctgtcaatcattatccaggcgtgttgcgccctctgtgttttctgcttgttccaatgtcatgccctcgcactccaaatgctctaagtgcatattatcgcacggcaaaacaaataccgctttgccctgtaccggcgggatcagctttgccccgccatgcatcatggattcgatttctgagatattggccggatgcgccttgataacaacggcccggcagtccgtttcgtaaaacagcttcatcacctgtttacgagccttttgcgccatcgtagcacgacttaccaccatcccaagcccatcgcaatacgggcatggctcatggataacagaatccagtgaaggcttaagctttttacgtgtcatctccacaatgcccagccctgtaatgcctagtatcgtcgtgcgtgtccgatcttttttcgtttcctcccgcaaggtttctacgaccttttcacggttttccgcgtcctccatatcgatgaagtctatcacgatgattccggaaatttcccgaagccggatctggcgcgccacctccacggcggcttgcaggtttgtgtttagaatcgtttcctgtaaattgtcattgcccacatatttgccggtgttgacgtcaatgacggtcaacgcctcagcataatcaaataccaggtatccgccgtttttcagccaaactttccttcgcagcgccttttctatcttgttttccaggccgtaatattcaaacatatcgtaatgcttgtggaatagatgtactctgtccaacaaattgggactcattacggacacgctttggcgcaccgcctgataaacatccgaattgtctacgatcagcgaatcgatctgttcggtaaataaatcgcgcacagtccgaaatactaggctgtcttcactatgaatcaaagacggtgcttttgccctggtaaagtgtttttgtatgttttcatacgtctgtatctgctcatcgcattcgcgcttgagctcctctacactcatccccaaagagactgtgcgcgcaatcagccccatgccctctggtttgatctgctctagattttgccgtaccttttcacgatcttcttccctctgtatgcgcctggaaacgcccaaataatccgccgtgggcattagcaccagcgaacggcttggaatggtgatgttggtagtaatcctggcgccctttgttccgaatggctgttttgttacctgcaccatgatatcctggcctactttcacaagcgaacggatatccggaatatattcttcctccgccttttccttttcatccccaaaggcaaaatcccctgggtcatagttgatatcgccggcgtaaaggaacgcgttcctatccagtccaatatccacaaatgccgcctgcatgccgggcagtacatttttgacctttcccttgtagatattgcccaccaggcgttctccgcccttgcgctctacaaagagctctgccagcgatccatcctcttcaatggcggcgcgcacttgatagggattgctttccaaatagatgatattagccatcggaattcaccttctgtaaaagattaaatcagggatggagattgagacaacggcgtaaaggcatccttttccttgcgccacaattctatacgaagtatctgcggctggctttgcacaccggatagatcacacaaagcctgccagaaagccttgggttgcaaattgtcattgccacaggaaagctgagcttcaatgctgacgtcttgaaattctgcctgcaaaattctcagtctcatgttttcttgtttcacaccggatttgctctttttttcaaatagatattccggtgctgccatcaattttatcaaagcatctttcattgccgtttgtagctgcttttccaattgaaaccgataggttgcagcctctacctggctcatgatggttttttctttctcttcggcttgccgggcttgtatcacatgcacacccggtgtcgcgcacgcattaaacgctgcagcaaaagcttcgggctctaaattctcctctaggccaacctcaaaataatcgccgatcgtcgccagccccactcccattgcctgcgcaaaggacaagatcggatgcggattaaagccttgtgaataggccaacggcatgttggcccgcctcaatgtgcgctgcacacaacgcagcagatccaaatgtgacatgtaacaggccgcgcccttgcggctgaattttgcaatcatcttcatgcctgctccaccccgcaaactttcatcaatccgcacccctgacaaccctttcggcaatccggtgttgtgatcccttgcacagaccgttgcttttccagccacaaatagcgtctggaaatcattggatccagatgctcaaacgggaatacctctttctcatccctggtgcggttggcatagaaggcggggtcaatgcccgtatcggcaaacgcctgcatccatcgatcatagtcaaagcattcggaccatccatcaaatctggcccctcgctgataagcaagcactacagccggcgccaaacgcctatctcctctggcaaatacaccttccagcgcgctggtttttgcattgtgtgtgttaaacttaatgcgcttatatggctttaccgcttccaaaatcaccctttgtttgcgctgtatctcctccagcgtgggctgaggctcccattgaaaaggggtaaacggctttggtacaaaaggagaaacgctgatggtaacgtgaggcggcagctttcttttttcctttggcatggaataataacattcaaccacctttttccccagctccacgatcccgcgcagatcgtcgtccgtctctcctggaaggccgatcataaagtacagctttaccgtagaatagccggactcaaatgcatccatcacagaatcaagcagattttcctctgtaacgcctttgttgatgatatctcgcaggcgctgtgtgccggcttcaggtgcaaaggtcaaccctgttttccgcacctggctgactccttctgctacctccttagtaaacgaatcgatgcgcaatgacggaagcgagagcgaaacccgctttcctttgttttgttcgctgagccggtcgatcaattccggcagcttaggataatccccggagcttaaagatgtcagggaaatttcctcatatcctgtggattggatcatgcaggcagcttgtcctaccagggtatccaccgttctttcccgtaccggacggtaaacatagcccgcttggcaaaaccggcatcctctcgtgcatcccctaaaaagctccagtgatacgcggtcatggatgatcgacatatacggcaccaaaggctttaacggatacggcgcatgctccaaatctttcacaaccgccttttttaccttttccggcgctccatgctgtgcctcgatcctgtctaccgttccatcctcatgataggaaacctgataaaacgaaggcacgtaaaatccctcaatggcactcagccttttcagcaattcgtgcttggaaacgccttcttccttggctctttttacttcttgggataaaatcactacagtttcttccccgtctcccagcatcatcacgtcgatgaagggcgccaaaggctctgcgttgagtgtacaagggccgcctgctgcaatgagcggtgcattttcatcgcgcttgtccgcataaaacggaatcccagctagatccagcatcagcagcacattggtatagaccatttcatgcatcagagaaaaagccacaatatcaaattgatccagcgcatcgccggattccagcgcatacagggcttctcctgcagccctcatttctttctccgcatctccccaaggcgcataacagcgttcacaggcaatatcctcgtgtgcattcaaaatatcatatagaattcttgagccaagatggctcatccctacctcatacacgtccggataacacaacgcaaagcgcaccttgcctttggtatctttcgtgcagatgttcagttctccccccgtatagcgggccggcttatccactctgttcagccaggttctttcaggcatacgaacattctccttcaaccaaacttatcatattattttacatgatatgccgatcaagaatcaagagccctctgtagtgtggtttgcggccccagcgtaaccaccgcatccaatatttccttttctcccagcgttcccaaaaacttcaagtcgtggtctaccaccgtaaccgtggtgtatacccccttgcgaaatttttccattgccttttgggccgtcatatccatgtgcatcacgatccgctgatcctttagcggttttttatgaatctgccttttctttgcattttcatgcaccagcgctgcgtatggactgggttttccttgtcgcaacgcagctaaaaacaaaaacatccctactgccaacagcgaaagattgatttgtcccagataaaacacacacgcaatgccggcaccggccaaaaatagccccaacaacataccgaatatagagcagatgcgttctgcaaaggtctgtcccaacacaggggaaagcatacagaccagtacccggcctccgtctaagggaaaggccggcatcaggttaaagatagcaatcaccaaattggcctgtaaaaatacgcatagccattcatacggattgtattttaccaagggcaaaaagcatagcacgatcagcgcattgcatagcggccccgccattgcgattagcgccatcttccatggcttgcaggattccatcagtgaaacgccgccaaacggcataagctcgatcttaaaagtattcactttcagcaattttcccgccaatacgtgtgccagttcgtgcaagagtagcgccagcagtgtcgccgccagggcgctccaaaacccaaaggccagcgccggtaaaaacataaagatcaataaggggctgatctgccaaaagatacggccagtctgcatcagcttcatcttatttgacccccaaatacttctgcgggtcttgcgccgcatcaccggacaatacctggaaacacaataatccattatcgcccagcgttcccagcgcctgcccctgcgttacctctgccccctccgccaaaggggattcctccatcccataatagacggtggtcagattatttgcatgacgaatctttaggtactttcccagggtatcattgattccccttttttcaacctgcccatccagcgcacataccacctctgctttgggctcagcctgaaattggatatactccttgccatcctctccaaatttttggatgatagctccggaaacaggatagctgaattgttgcctgtctccaaacacagccttcacatccggaaaaatcttttctacaaaatgcagcttgccaatcgattcttcgatatccaaatcataggtaaaggcgtttttcaaaaaatctgttgcctgctcagcaaacggaagctttatgtatttcaggcccacacatccaattgctatggcacagcagattgctatacggcggattgcacggcttttataagtagatgttccttttgtcgtctgttttcgatacggtctttttgttctctgcgcatgaaatgatgacctgtatgtgcgtgtatgtcgcttacgtacagcctctctgtcaaaaaaaagaggagcctgttgtttttcctgcggttctgtttgtcctatgtgtagctgtgcagaagactgcacatcccttgatacgaatgtggctttgttcggcttttgatccattatgacacctcttcctatacatcctcttggctatatgtatgtggaatccgtgtaaaatagagcaaaaaaagagcctgaacaggctctttttttcatatatgcactaccacttggtcgcaatattcaaaacaatgccgtaagccagcatattggtcagcatattagagccgccatagctgatgaacggaagcgggataccagtaacaggcataacacccatagccatgccaatgttttcaaacacatgcgcaaagatcatacaggccacacccacaaccacatacatggcatatttatcgcgcgctcgaagcgctatagagattgttctccacaacagtagcccaaataaaagcaccacgatcaatccgccgataaatccaaaggtctcccctgttacggcaaaaatgaagtcggattctttgaccggcacccaattcagctggctcataccgcctgtgccaaatagtccgttgcccgtcagctggccattgccaatggccattttagacatgttaacattgtattggctggcagagtcttgcgcgaggccaaaaaacacaaggatacggtttcgctgataatctttcataaatagccatgcaaccggaagaatcgctgccaccgccccaatgcaggacaaaacgatctttttatctacacgggccacaaagaatatcccaatggtgatacatgctaccaccatagccgtccccaagtccggctgtactgcgatcagtacaaagggaatgaccgcatattttaccaaatggaaaaactcccgaaacgaagtaatcttctcgtcgcctgaacgtgcagccaaagctctggacagcattaaaatcgttgagatcttcgccaattcgctgggctgaaagccaatattgccgaatttataccaacttaccgtattatttgtcgctgtcgccagtacaaacagtaacaacaaaataatgatattgatccaataaatgatgggggtaatctctttgagataattatagtctatgctaaaagcagccaccatagctactatacccaccaaaaaccaaacgcattgacgccataccgtagaaaagtttaggtttgcaatcttatccgctagggtaacctcttcccccgttgccggatcggccgtagctgccgttatgctaataagccccacaatcacaagcgccacaatgttggcaatgagcagccaatctattttcttccacccggatctatctagtaacttcgccataggtgcctcttttctattcgaccataccgcccggcgttgtcaccgtggtattggtttgctgtttttgtctgtcccgatagaattgaatgatgtccctagccgtataacccgccatagagccagcatatccattgggaataaatacgacgacagcaatctctgcttgctcaaagggagtaaatgccacaaaccatgcagagttttccaagtcaatttgactgacctgtgcagtccctgtcttagcagctatgtcgctggtatactcaaagcctgtaaagatatccgctgccgtaccaccgtcctctgccgatactacctcatgcatcccttctttgatgtattcaaggtatcctttggtatctcccagtgtgcttacaaccttcggatcattttgctccactgtgcttccatccggcgcaacaacctttttgatgatacttgcttcatagacattgccgccgtttgcaatagctgaaatatatcttgcaaccgcgattggcgtaaccgccgtaacgctctgcccgatgcccgtcaaaatagtttggaccctgttccacgtaatctcgtataggatagagttgatttcctgatgccatctcctggcataggaggtagattctggaatatccaattcctcgcgcatgatggaacgtatctgcggaccaatattggtagaggtacccaccaactgtacgatcctggtagcacagcgctccacctgttcatccgtataggtaacgccgcgcatcaacccatactttttcagctgcttttccacagataaccgtaccagatacggcttgctgttgagctgtccgccgttgatttctttggtattatcatacaatacctgctggttggccacatggctggtcacttcgccgggcagttcaatgcccgttttagaggatagcccgaacgtatctgcccactttgtcagcttgtctatacccatcctgtcagatacggtataaaaataatagttacaactatctttcaatgcctttacaatattctcgccctgatgattttgaggatagtctgtccaacaaccaggtgccttaccttgttgcacagcaggtgtatattcatcttgacagtcgatggtctcttccggcgtaatcacgccttccatcaatgcggcatagccagtcacaggcttaaagatagagccaggctctgaagcgctggaaatggctttattgaacagcggcgccgtatccggatcattcagcgcttggtaatccgcttcgctgatccctccgataaacatattgggatcaaacgatggataacttgccacggcaagaacattgccggtatttacatccattacaatggcagcgcccatagaggcaaacttggtttttctaccgcccctatcctgctctttttcctcgtatttggcatagttttgattatagagcttctcctgctcttgccgaatgatcttgatattgttttccagcgcgctttccagcttttgttggagctcgtagtctatggtcagcataacatcgttgccagattgcggctctgtgctttccaatattctcgttaccttgcctcggctgtttacctccgccttttgtttgcctacccgcgtaccgatggcagcgctaagctgctcttccatcgttgcttctacaccggaaacccctaccgttgcatcggtgctataccctttttcctccagctctgccaattcctcttctgaatatactttccccatatatcctacaatatgcgccgctgtcgtattctttggatacacacgcgtatagctttgctcagcgctcatacctatcaattcagtacttcgtgttgtaatttccgccacggagtttgcatccacatcctgtgcgatggtaacgggcacataactcttgaaagcaaggttttgtacctcttgccaaatcgagagcactttatgggccatctcataatccacatcatccgggatcatataacgctgccgcagcgtattaaaggcctcttctgcagtggcatcctcggaaatggtcatattaccacaccaaagctcttttcttcttttgattgcatcttcatcggtaataccgccccaataataggtaagctcgccgttttcatccttttgtatggacagttcatcgatgactttattcccatttttctccaatatctctatggtttccataatgatattggtatagatggcacgccacttttcccccgtttggtagggatctcgataaaagttaatgttataactggttttgtcgtacgccaaaggaaccccgttcgtatctaaaatacgcccgcggctacccatcaccgagattgtcctcgtcctattttctatgcttctttcagaatatttttctccctgtataattgccagattaaaatggcttgccattaaaaaaatcaacgccgccaaaataatccacaataaccggtgaatttgccgtaagttgttacccacacaacagcccctcttccgtgtttaaccgtcaaccaagccctgtcttctttttgcggttgcgcatcacattgagctgcgccatagcacggatcaaacgatacaccacatatcctgcaaaccccgtcaacactgccgatggcaaaatataccgcaccagcagcgtcggcacactgcccacatttacccccattagcaatgtgagcagcattgtggccagttctttgaccacatatgtacagcctacaaacaagctatataatactaggctgtcctgtaaacccttggaaaaaatggtagtcgatatataaccgaccaacatataaatcaacatataaaatccgcgcgcagggccaaaaagcaaatccatgatatagcctgctaaaagccccgttattgtgccggtcattggcccaaaaacaatacccagcgccacgacgacgcacagcgtcaaattaatctgtatatcccaaaccgcaaagctcgggatcaaagtgctgtcaaggccaacggtcaaaacaatcaggaaaaacagtatgatttttttagccatcactgcgtctcctgcggtgtagcggtaggtgtgacagaaggctgagccgaaggggttgcggagggggttgccgttaccgcgtcgccctcattcccttctgttgtcttctcttttacaatcagtacctcttccagatgcaaaaagtccacagctggcttgatgcgcactgttttgcccgtgctgcccgcctcttctgatacctcaaccacttggcctatgatgatgcctttggggaaaaggccccccagcccatttgtaatgacactgtcgcccggtagcagttctgcttccagcggcaggaatgccatctcacaaagtcctgacgaaccttccgactggtctatcccgttgatgatcccattgtccctggtacgctctaccgtagctgatacagagcttctggaatcaatgatcgccatcactttggaccatgtacctcctacttccgtcacacgtcccaccaagccgtctggcgtaattaccgcatcgttgacctctactccattgttaaacccggcattgacgacaaaaacatcaaaatagtaccctggatccttggcggtaacgcgcgcggtgatgtaagagtactccggcgtacgctctacataatttagcaaggattgtaggcgttgattttctgcctccaattcgctcatgccctgaattttttgctgggcctgtatcagttcttctttaagctgttcattctcctgctctatgctgttccctccaaacaaattggagaaaaatgagccgacactgttcgtcaccctgcttaaaaagctttgcgcacctgcagccacgcctcccggtacactttccacaccagaaatcttcgcgccgcctggaatgatgaacagcaacaataccaaaatgattgtaatcacgatggtaatcaacagcggtttattattaaaaagacgcatacttgtccctcttgcaaatttttagaaaatagaaggggatccaaggatctccctcagttcccctgtaagtatagcataaatattacgaatttgaaatatggattcatccggccgactcagttaccgaaggtgtggtcttgggatagatggccgccgcgccgtctataaccatacttgttcctttgaccacgcattccatgtggtcgtctgccaaccgtactggcatccccgtttccaaactaatcaaacgatccaatccccttaaggcggaggtgcctccagacaatacaatgcctgtctccattatatccccggacagttccggcggggtttgctccagggcttgttttaccgctgttacaatggtttgtgcaggctccctcagtgcctctctgatttctgcactgctgatcgttgctgtacaaggaaggccatttaccaggtcacgtccccggatctccatataccgctcttcctcctcttggtatacattgccgatattgattttgatctgctctgccgtgcgctcccctaccatcatgttgtatacgcggcgcacataatcggaaatcgcctgatcgatcttattgcctccgcaacgcacggattttgccgccacaatgccgccaagcgaaatcgtcgctacctctgccgttcctccgccaatgtccacgatcatgcagccgcgcggctcatatacatccaacccagcgccaatggccgccgccatcggctcctccatcaatactgcttccctggcccctgcgctgcgtgctgcctcctccacggctcttttttccacctctgtaataccgcagggaacgcaaagcacaacgcggggattaaacaaagaccgccctcttgggatcgccttgcgaataaaatatttcaacatgatttccgtaatgtcaaagtccgcaatcacgccatctcttaacggacgaatggcaacgatattgcccggcgtgcgtccaatcatttctttggcttcctggcccacggccaaaacctctctccttaggccgttccggaccgctaccacggatggctctcggatcacgattccttttcccctcatgtataccaacgtattggccgtgccaagatctatgccaaggtctcttcccatcaaatgaaatgccatcgtatttcctcctatgcctgttacgaatgaatcctcgtttgcaaaaagtattcccaatatctggctggcctatacaaaacaaaaagaaccctttcatagggttctttttccaaacttattctatggggtatcctgctttattcaaaagcatcctaacgccgtgaatgggaaggcccacaacattgaaatagcatccatcgattctctcgatcatcgcagcgccccttccctgaatcccataggcgccagccttatccatcggctcgttcgttgcaatatagctatggatctgcgccgggctcatgggggccatccaaacacgagtacaacgaaaatccagatgttctgtcccttgcggcgttatcaaacataggcccgtatacacctcatgcgcatgtccctgtaaaagcataagcatcctaaacgcatccgccttatccttaggcttgcccaaaatcctgtctccatataccacaatggtatccgctcccaagacatagcgccctggatgcttgttcgctacggcaccagcctttctttgcgctaccttttcggcatgttccattgggcccaaggcgcctattatagtctcatctacctctgccggctcacaacaatacggaatacccagcagctctatgtattctcttctccttggggatgcggaggccagcaacaagaccggcctttcatctaccaatacaggattatttttcatgcatcacaatcgcctttgtaggacatttctcctggcagatgccgcagcccttgcacaacaacgggttgattaccgccaccccagagctacagtcgatcgctccttccgggcaattcttttcgcataggcggcaggatatacatcccttcatacatacatcccgtactgctttgcccttttccatgtttcggcacaaagcaattgcaatggtgtggtttgaaaccggctgcaaggcaatcaaattgcgtggacatgccttggcacatgcgccacatccaatgcacttatccgcatcgatctgcgctaagccaaactcattgatggaaagcgccccaaatttacattgcgcaacacagtccccaaatcctaggcagccaaaccggcagccttttgggccgttggataagctgctggccgctttacaggtctgtagccctgtatactccgcacgaggcgggcattgcgagcgatctccttggcagtgcataacagctaccatcttttctgacgtaccggcctcgatacccaaaatcgcagccattttcgtcacgttttcctctgaggataccacgcaggtgcggggaggtacctttccctgcgccactgcttccgccaatgcatcgcagctcggaaatccgcatccgccacagtttgcgccgggcaacagctccctgattttaagggccgtttcatccttttccacagcaaacttcttgcttgcatatcccaatagcagaccaaataccaatcccaaaaccgcgacagccgcgactggggcaaatatggacatgttcgatcccctcctttacgccatcaggccgttggtcaggcctgcgaatccaaagaaagcgatgctcatcaaacctgcagaaaccaagctgatgggaaatcccttcatacattctggtatgttgctattttccagacgctcacggatgcctgcaaacaaagtgatggcaaacagaaacgacaaccctacgctggttccgttgatcagggtgttgatcaggttataaccctcttgaatattcaaaatggctgagcccaataccgcgcagtttgttgtaatcagcggcagataaatgccaagcgcattgtacaatgccggcgacattttttgtattaccatttccacaaactgcaccagtgaagcaattaccaggatgaaaactacggtttgcatatattcgatatgtagcggcaccagcaagcagtattgaatgatgtaagtaattacgctggataacgccatgacaaaagtaactgcaagccccatggaaaccgctgtatccagctttttggaaacacccaagaacggacagcaccctaaaaactgtgccatgacgatattattgacaaaaatcgcgttgatgatgattaccaacgaactgatgattccgttcatgccacacgctccttcttcttccggttatgtgcatcaatggcgtttactgtagcaagcaccaagccaaacacgatgaaaccgccaggggcctggctcatcatcagcataggctggaagctatcgccaaacagggcaaacccaaagatggttccattgcccaaaatctcacggatcgaggatatgatgaacagcgcgcctgtaaatccaagccccatgcctaacccatctatcacagaaggcaacggtttattcttgcttgcaaaggattccgcccgggctaaaatgatacagtttacaacgatcaacggaatgaaaatgccaagcgaatcgttgagcgcaggcacaaatccttgaatcaacagctggatgattgttacaaaggtggcaatgataacgataaaggccggaatgcgcaccttatccggaataaaatttctcaaaagggagatcactaggttgctgcccatcaatacaaacgtgacagccaagcccatgccgatggcgttcgttgcgctcgtacttactgcaatggtagggcatgttcccagcactaagcggaaaatcgggttttctccgaataatccatttttgaaaacgtctttcagctttttcatctttgctccgccccacctttcaaacacagattgcaattacgcatgtttttttgcctccccatacagttttgggtgcacaaagcgatcgatcagcggcgtaacaacattcataaataagatcgcgtacgtcacgccctcagcatatccgccaaaggtccgtatcagcgccgtgagtatgcctgcgcccaatcccatgataaactggcccttttgcgtcaccgggcttgttacataatccgtgcacatgaagaaagcgccaaacatggctccgccagacaatatggcaaacaatgcgtctccggtaaacaacccgtcttgcccgccaaaagcaaagatcatcaaagccagtccgcccagatagccaataggcgtagccaatgtgatgacatgacgcagcagcagataagcagcgccgatcaagatgcacagcttggaaacctctccaatgcaccctggaatatttccaaagaataaatcgccgtaagacgccatcgcgcccgtcgctttataagcagccagtggcgttgccgcagaaacagcatccgccggggcccaatgggtcatcaaagcgggccagcttgccaaaaggaaagcacgccctaccagcgccgggttcaaaaagttctggccgagaccgccaaacggcagcttcccgatcgcgatggcaaatacgctgccgataaacggtacccacaacggcacataagccgggcaacacatcgccaagagcagcccggtaatgattgccgaaaagtccgttacggtcacgggccgaccagttaatttattgcccacaaattccgtcaacacagcacctgccacgccggaaagcatcacaagcgccgcctggtatccaaactgaatcactccgtatatcgccgtgggaatcaacgcaatgacgacgtctcgcataatgctctgtac

SEQ ID NO: 2807 - DNA, 2798 bp, Unknown
  16S sequences of unknown bacteria
atccagcttctccagcagcggctggtagagcacccagaggaaaaagaccgtcgccgccgcgtgcatcatatccaccgggaagcctgtcaggtacgcagtgaagaacatcggcagcgtcggatcgttctggctcatcaaaacagacgcaggattcatcaagccgccgtagatgataataatcgtcagcgccgcatagacacacagggcaaagcggctgcgccgcagcacaccctttcggaacaaaacgccggccaaaaaaccgatcagccccatggcaaacatctgccacggcgtccacggcccctgtccaaagagcatattggagccaaacatcgtcatcgcgcccactaaaaagcccgtctcgccgccaaaggcgacaccagcaacaatcacaatcgctgccaccggcttaaagctaggcacggcaataaacgccgcccggccgacaatgccaatggcgcacaggaccgcgatgacgaccagctctctggcctggggcttgcggctctcaaagaccagcacaaagggtaccatcgtctccagaataatcaggagggacatcagcagatacttccggtccccaaagaaatgatagcccaggataaacgtcagcggaatcagcaggacgatcatcaccgccgcggcgatcgtccgctttgaaagcttgcccttctgccgggtcggcaccgtcgtccccgctcccttttgcgtgatggagacagcgaaaaccgccagcgccgtcagcagccaggcatagatgctggtatagctgttggaaacatccgacagccgatccgctgtcaccagctccgtcaaattaacactgctgatgatatggataaaaatacccagcgccgagagcccggagatcagcgcgataatccgccgccaccagggcagctttttctcctgctttggcgcactctttcccgtgggttccggcaggaagaagcttccggcatccttggccgggggctccggatttggctgcccgccgcaagctgcaatgacatcgtttaccgtgacggcgctgggcagcaggtgccgcgccatccggtttgaggctgtcgtatagaagtttttaccggagaagaaccgcaccggcgtatcctctgagacaacgccgccgtcaaagaaaaacgcgcagcgatcggcatattccgcgcagaattccacatcgtggctcaccatgacgatgcacacaccgctgttgagcagcccccggatgatagaagcaaaggtctgcttaaattccgcgtccagccccttggttggctcgtccagcagcaggatcttcggccgcagcagcagcaccttcgctagggccgcccgctgctgctcgccgccggataggtcatagggatgccgatccagcagcggaatgatatcgcaaagcaacgccacgccgccaatctgatcattcttttcctgcttggaaagcttctgatccgaaagcatctcctccaggtcctcccggacggtgtttttgacaaacagtgtctgaggattctggggcagcgctgccatgcagctccggtccagcgtgacccggccgcggtatggcttgttcgcaccggtcagcaggccgagcgtcgtagactttcccgtgccgttgccgcctaaaatgcagaacagttgcccataatatgcctgcaggttcaggcccttgataatgtcctgtccgtccttttcataccgaaaccaggtttcctcgatggagaccgcaggcttttggccgctgaaatccttgaccggatgctccggcaccggcgcaagctcccgctccaccgccaactcatcgagccaagtgcgcccctctcggacagtcaccgggcaaggcaggtcattgggcaccgccgaccagacccgcatcggcgcgggcatggccaggaacatcccgtggccgctgtttttcagctgtttgcccacctgctccggcgtaccgtcgcccagcagagcgccgtggtccatcaacagaacccggctgcacagggggaagacctcctccagccggtgctccgtgatgaggaccgtcgtccccaattcccggttgatccggcccagggtcgagagaaagtccgtcgcggcgatggggtcaagctggctcgtcggctcgtccaggaccagcaccgaggggtgcatcgccatgattgccgccaggttcagcaattgcttctgtccgccggacagctccgatacatttttataaaaccaggtctgaatgccaaaaaagctggccatctccgccacacggctgcgaatcgtcggcgtatcgtagcccaggctctccaggccgaaggccaactcgtgccagaccttatccgtcacgatctggttttccgggctctgctggacaaagccgatccgcgccgtctgcacggccaggtccgtctccgccaggggctttcccatgaactgcagctgacccgtcagctccccgtggggggccaggaccgttttcagctgccgcagcagcgtcgacttgccgcagcccgagggcccggctagaacgacaaattcccccggcgtgacggaaaaggagatatcccgcaggactggctccgtctgctccggaaagcagaatgtcagattttggaggttaaagatttccatttgagatcctccccgaaattgatgagaagcggcagcaggcacagcccgagatatgccgcgaaaatgctgatagaatacgcgctggtcagttcccccgataccaagggataatactgccaatagatcccatccgtcgcgtagccgacgatcacataggccaccagcagaacgatcgccgctagggc

SEQ ID NO: 2808 - DNA, 11099 bp, Unknown
  16S sequences of unknown bacteria
gtacagagagaaagatacccgcagggacggatccacaatacgggcggctacagcagcgacctcgctgcgggtaatttcgtcatccgggcgaaaagcgcccatagcgctgccggtaaaaatgccggcgcggtagagcgtgtagacgcttaaggaatctttctgctccatgtccaagtctggaatagcgcctaattccaccgtgttaatctgtgtatatgctgcttccggtaaggcgcgggccaaaatgccggcacattgcgcccgtgtggcgggaacagaataattttcgtattcgtctgcggaggcaagaatgcctttttcgacagcataatctacataggtctgataccaagggctgccctgcagaaaaggttctccatcattataataggtgctgtggatacggtcggccagcgtaatgatttcggccagtgtgatcgcgccgtcagggtggaaagcgcgttcaccataagtgttgatggaaccctgcatcaggcccatggaatagaccgtggatacatagggagcaaaccagccggaaacgtcggcgaaggattcttcagaaaaggtgttgacgggttggaagtgatcaaagctgcctttactcgccgcaaacgcgctgaggcagagcgatactgccaggcatagggaaacaaacgcggtcaagatgcgtttcaacgggttcacctctttcacagttcaaaaaagccgggagattttgggcggagaaaatacctgtaagcaatggcatgtagggcgtgccattgtatggcagagctgttcatttttgcaatggattggttttattatagcatggggaatatagtttttatgttacatcttcattacaaaaattggagcggtttgcatctgtccgcaaggaaacactaaagaaagaggtgacgaaatatgagtgaaaagaccgaattgctgaactttatttacaaaaatgccaacatgggagagatggcaatgccaatggtgatcggaatggtaacccggccggatctgcgggtggtattgagcagctgcctgatggattatcgcgccgtgggcggggcggctaaagagacgatgcggcgttgtgggcaccgcggagaggatcctggagcaatgaaaaaagccatgatgaaaacggttttgcactggaacgcgctgctttctccgccgccgcggcacattgccgaaatgatgatccgcggcagcaccatgggtgctatccagatgagcaagcgcatcaatgcatatcgttacacggctggggaggaagcgttgatgctggcagaaaggctgctgaaggtggaggaggagaccgttgagcggatgaaggcttttttgtgagggagggaagaatcaaaaatgaaaatagaaaaaacagtgtgatgggaatgaaaagtaaccgcaacttattcggctatgacggtgcatttcagaggggcttgcggtatctaatgcttctggcaggcagtggggttcatctatgaagcaaagtttcatgactggggccatggggtcaagcttatcaggagcaatattccatgcggtgagacaatggctaaaagaacggcttgaatgggatataagtccagataaagtgagaatgataaacccacgcacagattactcggaatttctgggattgaaagtataggctgtccgaaaagacaacaagccggggtgcaaagaatcaatgcccctggtggtgcaattatatattcataatgcgagaaatattatttgcacaattgcactgtttcttcgggcttatttgcagcatcgagttttgcgggtgcagctgccgtcgtgtttgaagatgggaacggaaaagtatgcgtcaccgggatgtgaccgcccgctcggcggcgcagtgcagattggtcaacgcaaagaaattttatagatttttcagaaagttgcacgttcgcgtgcgacttttttgcgttttgggggatgggatagaaggaggggaatgatgaaaggaacagcatggacacaggaaaaacagattttctgccgaacctatctgcagacgccggatgtggagcgggcggaacaggcgtctggagtggaagacgggtatgttttgctgcggcagaaagatgtgcggcgctatttgacgaaggcacgccagggagtgcaggatgcgattcaaaaagaggatgtggtgcgctgcctttgccgtctggctttttcaaggccaaacgatgcgatcgcattagcctgcgggcagattcacggcggcatcgaggcaatggatctggcggcggtggcagaattcaaacaccgggagggacagacggaggtcaagttcctggaccgtgtgcgggcgctgcaggcgctgggcgagctgttgggcggcgaaggcggggatgacacggcccaggcctttttccaggcactggaagatgcagcgagtgtggcggaaaagcgggggagcgaaacagtggattgaacttttcgagaaaacaaaaacaagtgttgacttggtggtgcgctgcgtcgccggcacatacctgcgatgcgctgatttgcgacggggcggtgcgcagcggcaagaccgtgtgcatggcactgagctttttgtgctgggcgacagcgtgctttgacggggcgcagttcggcatctgcggcaaaagtgtgagcggcgtgcggcgcaatgtggtgacggcggtggaaccgtggctgcggcggctggggttgcggtggacagaaaaccgcacagagcattatctggaactgggctgccgcggaaggagcaaccgcttctacctgttcggcggatacgacgaaaaaagtgcggcgctgattcagggcatcacttttgccggcgtgctgctggacgaggcggcgctgatgccgcgctcttttgtggaacaggcctgcgcccgctgctccgtggagggggcgcggttatggtttaattgcaacccggagagcccgcagcattggttttaccgggagtggatcttaaaagcgcgggagaaaaacgcactgcatctgcacttcactatggaggataacccggcgctgagcgaagcggtaaagctgcgttaccgcacgacgtactcaggagctttttaccggcggttcgttttgggcgagtggacccgggctcaagggctggtgtacgacttttttgatcgggagagggactgcgcggcacctgtggacgagccgtgcgaagcatatgcggtatcggtggattacgggacagcaaatccggcttctttcgggctgtggggcagacgggggacagtatggtaccgcatcgacgaatactactacgcttcccgccgggaagggaaacaaaaaaccgatgcggagtatgtggaagaattatggcacctgctggatgggcgcaggccggacgtagtggttgtggatccgtcggcggccagctttatcgaagctttgcggcgcacgggtttgcgggtgcagaaagcggataacgacgtgctgtggggcatccgtgtgacagcggggatgctcaaagagaaaaaactcattctttgcagcaactgcgccgattgtttgcgggagatggaactgtattgctgggaagagggggcagtgcgggacgttccccgcaaggagcatgaccacgccatggatgaaatgcggtattttgcggcctatcttgcacagcaggagcgaggagatggattttatgctgctgctgtggttcgccgggccggatgaaaaggaggggacaaacatgaaatggagaaaaaaacgggagcccggtgtgccggcgacagtacagctgcgcgcggtatcccgacagcccttcggcgcgctggaatcctatgtgccgctatacaatggggaaattgctctgtatcgggcggtgcgggaagcggtgccgattgtggatgcggcgctgatgaaaatcattcgtttggtgggcggctttgcggtgcggtgtccggaacggaccgtgcaggaagaactggcacattttctgcggacggtgccggtgggccgcgcgcagcgggggctggatcattttctggagcagtatttggattctatgctgacctgcgggcgggctgtgggagagatcgtgccctgcaaaaggggcggcggcatcgcggcggtgctgtgcgctgaggccgcgtcagtagaggtgcgcgagggcgtctcgccgctggactttatgctgtgtgtgcgcgatgaaaccggtgcgcttcagcctgcgccgcggcaggatttattgctgtttacgccatttaatccggaaaacggcagcccctacggtgtgtcgctgctgcgctctatgccgtttttgacggagattttgctcaagatttatcatgcgatcggtcagaactgggagcgtgtgggcaacgttcactttgccgtaatttataagccggaaggggacacggaccggacgctggccagggagcgcagtgaacagattgcccgggagtgggccagcgctatggaaagcgccaaaggcggctatgtgcgtgactttgtggcggcaggcaatgtggatatcaaagtaattggcgcggacaatcaggtgctggacagcgaagtgccggtgcggcagattctggagcagctgatcgcgcggacgggcattccaccgtttatgctggggctgaactggtcgagcacggagcggatgagttctcagcaggcggatatgctgaccacggagatggacgccatccggcgcacgctgacgccggtggtggaaaaggtgtgctggatgtggctgcgcacgcagggctatgcgtgtgatttcgaagtggtgtgggacaccatcaatttgcaggacgaggtggaggacgccaaagcccagctctatctggagcaggcgcgccagctgcggcttgccaatgacaaggaggagttcggatgagagaggttcagaaaagcctgccaccggagacactgtgtgcgcagcaggcggcagatatggcacagatcaacgcgctggccaaaagggaaatgacacccgaagaggtgtataccttttccgtgcggctgtgcgacaacgaaatcgaccgggacggagagcgctttgatgcacagacgctgcgggaactggcggcgctgtttatagggaaaagcggcatctttgaccactgctggtcggcccgggggcagacggcgcgcatttaccgcgcggaggtatgccgcgaggaagggcgcaccacggcggcaggggatggatactgctatgtgaaagccatggcctatatgccgcgcactgagggaaaccaggaactgattgaagagatcgaggcgggtatcaaaaaagaggtatccgtggggtgcagtgtgcgcgaggcggtatgctcggtgtgcggcgcggcgcggggcgaatgcgagcatgtgcacggaaaacgatatgacggcaggctgtgctatacggagctgcggggagcggaggatgcttacgaatggtcgttcgtggcggtgccggcccagcgggaagccggcgtgatgaaacgattttcgccccagacacgccggacgctgaaagcgttcctgcgcacagaaggccataaggaagctctgacggaactggaacagctggagtgggaagcggcgctgggcaaacgctatttggatcatttgcgcagggagacgctgcgctatgcctgcctggctgagccggaactggacgaaaaaatttttgcatcggccctgcaaaaacttaacgaaggagagcttttggagctgaaacgggtgtatcaggcaagagaagaacacgcggcggagcagccgcagctgtcctatggggcgcgggagcaaagcatggcggacggcagtgcatttttgatttgaggaggaagataaatgaaagtttcatacgagggaatcggcgcatggagcgccacatttgaaacggcggatgccagagagggccaggtagtgaagctgagcgcaccgcgcacagtaagcccgtgcgcggcgggagatgctttctgcggcgtagcggggcctgtgcgcggcggcgtgtgcggcgtacagctgggcggcttggcagaggtcagctataccgggacggtgcccggtgtgggcaacattggtttgaccgccgacggcagcggcggcgtgtgtgcggcggaaagcggagcggagtactgggtgttggcggtggatgaaagcgccgggcgctgtgtgatcaagctttaaggaggaagaaacgatggcatatcattttgacacgataaagctggaaaagggcatgtatgctgagagcggcaggagtttttcccgcgttttggaagaactggatcccggcgagcagtaccgcggcacggcgctggagggattggacgcgtatcagcgtcagctgaagcgctttgatatcaaggtaaaaggtgcgctgagcgatgtggtggagaagtttttccacactacggagtcggcagtgctgtttccggaatttgtggcgcgggcggtgcgccagggtatggaagaggaaaaccttctgccccatattaccgcggcggtgacacagtttgatgggatggattatcgctccattgcctcggtgccgaccaaagaggataaggcgctgcgtgtggtggcagagggcgccgcgctgccggaaaccacggtgagggcccagagcagcctggtgcggctgcacaaacgcggccggatgctggtcgcttcctatgaagcaatccgttttcagaggctggatctgtttgcggtgacgttgcgtcagattggcgcgcacattgcgcggatgcatctggaagatgccattgatgtgatcatgaaaggcgacggaaacaacaacgcggcccagagttataagatcggcacgaaacccatttccggtacggcgggcagcatgagctacgatgcgctgctggacttctgggcgcagtttgacccgtatgaaatgaataccatgctggtgagcagcgacgtgatgctgggccttctgaagttggaggaattccagaatccgctgacggggctgaatttccagggcactggtactctgaccacgcctctgggtgccacactgctgcgcacttcggcgatgccggcaggtacgatgatcggtatggataagaattatgcactggagcggatcactggcggggaagtgcaggtggagtatgacaaactgatcgaccgccagcttcagcgcgctgccatcaccagcgtttccggttttgccaagctttatcaggacgcgtcgagggtgctgacactgcagtaaacagacgcagaaggaaacaggagggacgggaatggacatggaaacagaaatccagatgctggcccaaaacatgactggcgcggatcagggagagcaggactatcttgcggcactgtgcgcggcgcagtgggaacgaattagccagatgctcccggaagaaacagagagcgggcgcagccgcctgatctgcgcggcggcaagcctggctgcggcggattatttcaataccaaaggcgcagcgggtactgcttcgtggagcgccggcgatgtgagcgtacacaatcgggatggagcatcctgcgccgcggcggccagggaactgcgtgctgcggcagagcggctgctggcgccgctgtgcagcgacggcggctttgccttcttgggggtgcggggatgacggaatcctttgctgatatcctgcggcattttggggcgagggtggagattgagcacgagaatgccttggcgcaaacgagagcgtttgtgcagctgattcggcgccaggagaccaaagaaccctgggaggaaaccaatttcggcgcggcggatctgcggcgctggctgtatatcggaccgaaagaacagccgctgcaggcaggcgataaagtgcgcgccggcggtgcggcgtatgtggcgcagcatgcggcggccatctatgtgggagcggaaaaatcccattggtggggtattctgcggctggaaagagaggggctggtatgagcggaggactggaaaccgtgcagacactgctggaacaggtgctggaaaagcatgggattcccacggtaggagcttgggatcgagcgcggctgccggctctttccggtgcggcggcggtgctgggtgtacaggagacgcaaagcgggcctgcagcactgtggaactatcttggtcagcagtgggatgcagaacggggcgaaatagtagagcgctacggtcgggtgctggaactgaagctgtatgtggatttctatgcgctgcacggcagcgcagcggagatcgaaaagggttttgaaatgctggaaaaggaattatttacgccgctggcggagggactgcgggcagatgcggtgcagcgcggcgagattggtgctgacggcaagagcggatatcttaaggggcggtgcactgtggcgtgccgggcctatttcacagcggtgcgcgccgaagaaggcgcagcactgactgattttcatttgaaaggtgtggtgcaatgaacagcacagtgatgcatgagcggccgggggtgtattcttcctatgatgcttcttcggccatcagcggaggtacggccaaaaaggtgatcggcgtagcggccagggctgcgaagggagaggcgaacagagccgtgcgcctcacaagctataccgcaggagtgagcgcttttggcgaggataacgaaagcagtgctatggaggggctgctgcggctgctgtatcaaaatggtgcggctgcagtggctgcagtggccgtggcggctccggcggataagcaggactatgaggcggcgtttgccgcattgagtgcgcaggaggatgtgagcgttgttgtgtgcgacagtgcggacacagaggttttgcaggcgttgcgcgacagtgtgacagcagcttccagcgcacgccgggagcgcattgctgtggccggcagcgaggaagaaaccgtgagcgccatgatcgagcaggccgaggctctcaatagcgagcgcgtggtgcttttgggcggtcgggcattggacagcggcggcgaaatgctgagcggtccggcggctgcggcggcggtggcagcggtgatcgcggccactgccgatccggcaatccccctcaatggtgcgccgttggagggcataagtggtgtggcggcagatttcagcgacgatgagatcgatctgctggtgcgcggcggcgtgacgccgctggaaggcaacgcgggaattgcaagccccgtgcggggtgtgaccacccgtaccacgactggaggagcatcggacagtacctggcgcgaactgagcacagtgctgattgtggacaatgtgatcccacagatccgcagcgcgctgcgcagaacgtttaatcgggccaagaacacggcgcagacccgcagcgccgtgcgctcccgggtgatcgtggaattggagaacaaacgccaggcagagatcattgacggctatggcgatgtgacggttcgtgcttcggaggaaaacgccacggtgtgcgaggtggaattttcttttgcggtggcccatgggctgaaccagatctatctgacggcgcatattacgatttgaaagaaggagggcgaaggatatggaggtttcgggttttcccaccagcagcgatatttatcttgaggtggaggggagaaaggtggccgtggtgcagagttatacggccaaagccagtaagaccagccagagtgtggaagcgttcggcgagagcgaaccagtggcgattctgccggggcagactcagtacagcctgacgctgaaacgcctgtacgctaccgatgaggctatcagcgatgggatcaatttttatgatttggcggatttttctctggtgatctgcaaaccggaccgtaaggtgatctacagcggctgccaatggggcagtattgccgaggaaggacaactgggtgccatggtggctgagagcgtgaacgtgctggcggctaaacgcatggaggtggcggcctgatggaaaaagcgctgtatcggcttctcaatgaagaacgagcgcaggatttcgtgctgcgagggcagaaggtgcatatggtgctgctgagtgccgcggagctgttggaactgcgtgccaaagaaagcgcagaggaaggcggcgacgcttttgcggacggagtgcacggctgtgcggcgctggcggcccggtgcctgtgcatccgcggaacgccagtattccaaagcgcccaagaagtgctgcagacgctgagcgcagaggaaatcaacgttgtggcggcggcctacagtacatggagcagggagattgaccccgggttcgactgcggtgaaaggagtgccgaagcgctaaaaaaagtttgaagcacgcgccggaagagaggctgcggtggcgtgtgctcaaacagtttggtgttttgcccggggaaaaacgggcaagacgcatgacgcggcgggaactgctgtactgcgttttgcagcagcagctggatggtgaagaggcgctttctgaactttgcccggtatgccgagccgccgctatggaacggcggtgcaccgtttgcggcgcgccgctgatggatacggaggggacggagaacacggcgtttgactgggaacgttatcaaattatgaaagagggaagatccgtttgacgtattggagggcgttggaggagcgcagcaggattctctggcagacgctgtttcgtcaaagtactttgattgagcagagcgtgccagtttatataaatacccgttctgcgccgaaaggtgcggagggggaggggcaggcggcgctgcagccgcctgccccggaagagtccgcctggacggcgggtgcagaggcagaagcgctgcggcagccgcctgcccaggaaaataccgctgctgcggtatgggcgcgtccggcggcgcggaaagagacactggaagatgtggaggaacggacgctgccggatcttctgcgggcaggaacggaacgtgtggagagtacgtttggctaccgggtcccgggaggaggaaatgcattcatcccggcttctggtgacggtgcagcgcagctgctgaaaaagcttcggcagattgagcggagcagcgcgccgccggcgcggcaggacagttatgcggctgcagaaaaagaaaacgaacggggccgtttgacggcggaggtggaaatggcggattggtcggcttggctggaacggga

SEQ ID NO: 2809 - DNA, 3835 bp, Unknown
  16S sequences of unknown bacteria
gaggacgtagttgctggtgttcgtactccgatgcacatcagtgagatggaagagaagttcccggaggcattcaaacagttcaaagaggtttgtgagactctggagaaacattacagagatatgcaggatatggagtttactgttgagcacggaaaactgttcatgctgcagacccgtaatggtaagagaactgcaaaagcagccctgaagattgcctgcgatctggtagatgaaggtatgagaacaccggaagaggcagtagctatgatcgagccgcgtaacctggatgcacttcttcatccgacctttgatgcagcagcactgaaggcagcaactccgatcgcaaaagcactgggagcagctcctggagcagcttgtggtaagattgtatttacagcagaagatgcagaaagctgggcagcaagaggcgagaaagttgttctggttcgtctggagacctctccggaggatatcactggtatgaaagtatctcagggtatcctgaccgtccgtggcggcatgaccagccatgcagcagttgttgcacgtggtatgggcgcatgttgtgtatctggatgcggtgatatcatcatggatgaagcaaataagagattcactctggctggaaaagaatatcatgagggagatgtgatctcctttgacggttccaccggatgcatctatgatggtgcgatcccgactgttgatgctaagatcgcaggtgacttcgatcgtatcatgggatgggctgatgagtacagaaccatgaaggtaagaaccaatgcagatactccggcagatgcaaagaaagcacgcgagctgggagctgagggtattggtctttgccgtactgagcatatgttctttgagggagacagaattgacgcattccgcgagatgatctgttctgacaccgtagaagagagagaagaagcactgtccaagatccttccgctgcagcagggagactttgaacagctgtacgaggctatggagggagaaccggttaccattcgtttcctggatccgcctctgcatgagttcgttccgactgaggaagaggacattaagaaactggctgaagcaaaaggcaagacagttgcagatatcaaagcaatcattgattctctgcatgagtttaacccgatgctgggacacagaggatgccgtctggcagttacctatccggagatcgccaagatgcagaccgcagcagtaatccgcgcagcaattaatgtaagcaagaaacatccggattggaagatcgttccggagatcatgattccgctggtaggcgatatcaaagagctgaaatatgtgaaaaatattgttgttgagactgctgatgcagagatcaaggctgcaggcgttgagatggaatatgaagtaggtaccatgatcgaggttccgagagctgctctgactgcagacaagattgctgaagaggctgagttcttctgcttcggtaccaacgacctgactcagatgacttatggattctcccgtgatgactccagcaagttcatggatgcatactttgatgcaaagatcatcgagaacgatccgttcgcaagactggatcagagtggtgtaggccagctgatgaagatggcaatcgagaaaggtaagaaagtccgtccgaccctgcactgcggtatctgtggagagcacggtggagatccgtcttccgtagagttctgcaatgagatcggtctggattatgtatcctgctcaccgttccgtgtgccgatcgcaagactggctgcagcacaggctgctatcaagaacccccgcaagtaagagttctgtcattcaccattggatttgatgaagcgcaaaccttctataaatcccatggatacggcataaaaccgtcaaaatggcatgatttgaccgtggaggtttatatctaatcaccaaaacccccgtacattcccaattgggcaatgtgcgggggttttttgttgttattttgggctgtttgtacaaatctaaatgggaacgcaaaaatgtattctgatttcaaaaatacattttgtccatgctcgctgctattttcacagcagccaattccgtaattttggacgaattcagctttcagtaaaggaggccattatgagacgagacgatcaaaggcaagcagtaaaaaacattcccttggaacaactgaagccatttaagaatcatccctttcaggtacgagacgatgaggaatttcggcgtcttgttgagagcattgaaattcacggtgtaattcatccagcggtggctcgccagattggtgaggattgttatgaactaatttctggtcatcgacgcaaagcggcttgtgaagtattgggttactctgagatgcctgttttagtccggtctatgacggatgatgaggcagttgtaaacatggtagatgcaaaccttcagcgtgaaacgattctcccaagtgaaagagcctttgcatacaaaatgaagttggtagctatgagccatcaggggcgtaaaggatttacttccgcccaacttgggcggaagtgtgtcggaaaagaatccagagagttaattgctgaacaagtcggtcaaagtcgcaaccaaatttctcgctatatccgtcttactgaattgataccagaaatccttgaaatggttgataatcgaaaaatggcattgaatccagcagtatctatttcctacttggacaagaagcaacagaggctactatataaggtaatggtagcactaaaagcaaccccatctatttctcaggcaaaagccatccgagaaaaggccagtgaatcagactttacagaagattacttggtttgtatcttatcggaaaagaaaccaaaccagagagagccgatgattgttgaagaagaagaaatcaagcagtatttcccctcgcattacaatagtgaacagatgcacaacacgattttactgttgattagaaattggagtaaaaagcgtggctacacacaataaaaggtcattataccttgtcacaacagggagcagaaaaattttctgctcctttttttattttttgcgcaacaaacggcctctgccgtggcctacaagtgagagttacatctcgtggaccttgaaaattcagaagaacatcaggtacaaccgtccctcggagagccactccggtgatacgccatgacgcctacgggtcgagcgacttccctatcgccggtaaagagcttgataacttgaggccacgatccagggacagggggaaaacttacactcagccacagtccgagcgttaaaagcgtcgcaggcaatgggagtgtccggtacagaaccgtgataaatgaatcctaaatcaaaaggatgccgaaatgttcttgattttaagaaaacccaagggggtagtttaccctctttacattccatcttctgttcaagacacaggaggaaactgaaatgaacacacaaattatcgccatcgccaaccagaaaggcggcgttggcaagacaaccacctgcgcaaatctgggtatcgggctggcgcagacggggaagaaagttctgctgatcgacggagacccgcagggcagcctgaccatcagcctgggccatccccagccggacaagctgccctttactctgtccgacgcgatgggccgtatcctgatggacgagccgatgcgccccggcgagggcatcctgcaccacccggaaggcgttgacctgatgcctgccgacatccagctctccggcatggaggtctccctggtgaacgccatgagccgtgagaccatcttgcggcaatacctggacacgctcaagggacagtattcccatatcctgattgactgtcagccctccc

SEQ ID NO: 2810 - DNA, 2801 bp, Unknown
  16S sequences of unknown bacteria
ctctgccatcggcttattcttcgttcttcgttgcgtcgtcctgctggtccagctcctgcagcttttccttcagcgcggcgcgctcctcggccgtcatatcggccaccttgtccagcaggccgccggctttgcccgccgcgttctcgataacgtcggatgccgcatccgccgcttttttgcctgcgttttcaatgctgtctgctgcagcgcgcagcttttcggacatattgtgcttcagctcttcattgacaactttgccctgctgcacggtcagctcgccttttttcaccaaatcatccaccagttcctgcgccttttcaaaggaataggccgtagcgccgacacctgccaaaaagatattcttaaaactgaattctgccatgatatacaactccttttcgttccgttccagtattattctggtttcttcttgtgaatgagccacatctatcatgtgcctgtaattgttattttatcattgcaccgcgcaaatgtaaatcttcccagcgcatacaagtgtaaacaaatcgtgaattttcggcacatcgctccgcgctcacttttcccgcgccgtttttccgcgcagcgcccggcgttcctcaccccgcagcgcccgcgcaataccgcggtgatggcgctggatcatcagcacatctgccgccaataccagcgcaaatccttccagcgccccgaagtgccaggccggcagcagcgccgccgtggtgatcaccacggcggccaccggcaaatatcccgtggccagcaccacaacacctcccaacacgatgcaggatccgcaccagagcggggaaaacaaaaacaaaaacgcgcaggtggtcgccacgcctttcccgccgcgaaaccccgcccaaaccgggaaattgtggcccagcgtggcgcccagccccgcccagagataaaccagccggcccaattccggaaacagcgctgcacacagccagcaggctgctgcggttttcaaaagatcgcccgccagcaccaaaaggccccaagcctttcccatttgccgggtgatattggccgtgcccggattgcagcttccgatcgtccgggcgcttctgcccaggcgcgcccgggcaatgatctccgcaaatagtaccagcccgaatacatagccaatgacaaggcaatagattctttccatatcgtctctccttttgcgcaaagggatgctccctgcatgcgtttctcccacagaagaacgccgcgcttttgtatcaaccgcttccagctgccgcctgcaggacaggatcttggatcctggctattccggccaatgacaggtttcatgcgatattaaagatagtttaccacattttccccattttcacaacaaagcccttgaaacacatccgtgttttgtgatattctaataaaaataatgcagacaaggaaattcggcaaagggtgaaacagaatgatgcatatttacgaatcggcagaagattatttggaagccatattgatgctgcaggaaaagaacggtcatgtccgttccattgacgtggccaatatgctgaacttttccaaacccagcgtttccatcgccatgaaaaagctgcgggaaaacggctacgtggaaacagacgccaacgggctgctcaccctgacaccggaaggcctggaaattgccgctcgtgtctatgagcgccaccgtgttctgagcgatctgctgatggctctgggcgtgtccgccgaaaccgcccgcgccgacgcctgccgcattgagcatgatctgagcgatgaaacctgggagaaaatcaagcagcacgcccaggatcacctggacagctccgcgcccggcgcgcacggtatcccatgaaagagaacagggctgcagaggcaaacactctgcagccctgttttgctgccaaaagccccgctttccgccaacagcggattcctcttgcttttttcggaaagcgtgctataataatatccgtcatatgtcggaaatagaggtgagaaccatgccaagacccagccggtgcaggcgaatctgcgacgagccggcttatgacagctttgcgccttgcggaaccgcagcgggagcgcccatttcgctcacgctggacgaatatgaatccatccggctgatcgatctggaaaagcgaacccacgcacagtgcgccgagcaaatgggcgtttcccgcacgacagtcaccgaaatttacgaacgcgcacgccacaagctggccgattgtctcgtcaacgggcgcccccttcaaatcaccggagggcattaccgcctgtgcgacggcacagcgcgctgcggcggtgtgccctgccgaaaatccgccgcagcacggacgcctacagcgcccatcagaacgaaaggagcaaacagtatgagaatcgcagtaacttatgaaaatggaaatgtgtttcagcatttcggccacaccgcatctttcaagctctacgatgtagaaaacagcgccgttaccgccgcgcaggtgatcagcacgaacggcagcggccacggcgctctggcgggccttttggccgcacagcaagtggacgccctgatctgcggcggcatcggcggcggcgcacagatggctttgagcaatgctggcatccgcctgtatgccggcgtttccggcagcgccgacgaggccgtgcaggctctgttaaacggtacgctgcacgccgatgcccaggccaactgcagccaccacgatcatggacatacctgcgcacagcattcctgcggcgcagataagcacggttgttccggcaactgaaccgccccgactgattcaaagcgcccccggggc

SEQ ID NO: 2811 - DNA, 22351 bp, Unknown
  16S sequences of unknown bacteria
caatttataaaaacgccccggatttttactacaaccaccaaatttggcagtacaccgacaagggatatgtaaacggtattgaaacacaggtggatttaaacatttggtttaaagaaaaagaaccgaaagtggtttattgatattttaattacaaaaaacgcaggttggcaattaacctgcgttttaaatttataaggggttttaatatttaatcttcggctttcttttcaagtctgctgtacagatttgtctgtaccgaatacaaacttgtcttgccgcttgccacaaagcatacgaccaccgcaagagcaaaataggccatagcggaagacccaaacatttcccgtgaaagtatgattgctgtcaacggagcatttaccgcaccgcagaacacgcatacaagaccgattgccccgccgaatacgctgtttaatccgataaacggtgcggccactgctccgaaagaagcgccgataaacatagccggtacgatttccccgcctttaaaccctgcgccgagggttgcgccggtgaaaatcatctttaacaaaaaggcgtatacggcaacagtgccgccggccatgatgccgtttacaacacccatgcctgcgccgttatagtcggtgccgaaaatcaaggtcaggcctattacaaccaaaccacctgccgcccggcgaatgtacggatttttaaatgtcttttggtaaatgtgatgggcattgtgcataagcagacaaaacgccacagaaacaagggcgcaaagcaatgccaaaattgcgattttaacagccgttacagggtcaaaagcagtgggtatagccgagagaatgttatatctcataggagtaacgcccaaatttacagccaaccgataggcactgagagaagatatgatacagggcaaaaccgcaaatgtgcttatacagcccacggttataacttccagcacaaagacaaaagctgtaataggcgtgccgaacaaagccgagaacactgcggccataccggccaaaattatgccgtttaccattgatttaggcagttttaaaagatatgcaatattacttgcgatactgccgcccagctgcaaagcggcgccctctctgccggaagaaccgccgccaaggtgggtaagtaccgtgccgataaaaattgtaggcgcaatggctatgggcaatttatcgccattttccgcagcgacaaaaatgccgtctgtgcccttgtcgccggggttaaactttgcatacataaatgcgattacagcgcctaaaacaggcagtgtgtacaacacccatggattttctcccctaaactcggtgacaaagtcaaccgccaggtgaaaagccacccctacaataccgcaaataatccccacaaaaagggatattatgccggttttaataaaaagaccggcagattttttaaattttatgaaattatcattcatttttattttctcctcttttcctaaatactattttatcaccggtaaaatatattgcaataaaaatatttcaaaaaataaaaataaatatatacaaatgaaacataagatatatgccattgtatataatcattaaaatgacaatattttaacgacttttccatgaacaccggcggacaaaataatatacataaatgataataatcatgcttaatataaaaataataatttgtataaaaacgagcgtctttatatgtaattcgtcgaacatatttaatatagctgaaaattgactgtcatggaaaaataaaattttatcattatcatattttaaaatttttccaaaagcccaaaatatactttaagttatataaaaatcagtgatttttgtgtattttgtgtatttattttttttaacattatgatataataagcaatgataatgagtatgatgaaaaggagtgttattatggaaaaaaatatcaagattttgtccaaggacagtgtttcttccagacttgaaagatttatatacagcgttcacagtatagcctacatttcggctgatacttgcaagtcatcaccaaaggaaattctgtcaaattacagaattatgatcgttgccgaaggcgaaaccgaaattgccataggcaatgcaaagtacaacgtaaaatccggagactgtgttattttctcaccgggttctctttacagcttagaaatgcttgccgacaaaaagtgcggtataatatctttcactttctcacttgaaacgcctatccaagaaagtgagtttacaactatgttggggcttaaagatattgttgtttacaacgacattatcccacagacaaccttggcctgggcatatgaagcgtataagaatgcaagcagcgaacgccgggattgctacttccctatcagtattttggtacagaggattgtaggccttgtggcgtaccacaaagacattaccccggttacggcaagacgcgtaaagggtaagacaagcagcgacgaacggcttgttatgaagtcacacaattacataattaaccatgtaaacagaaatgtttcggttgaagaactgtgcaaagaattttccgtttcacagagttatatttacaagtgcttcagaaatgtactgggtgtatccacaaaagagtttatcacaacccagaaaattcacatgacagaaatagcacttctccacaccgataaatccatcaccgaaatagcccttgaaaacggatacgcaaacagctaccagttctcaaacattttcaaaaaagtccgcggtatatcaccatccgcttacagaaagatcaaccgtgactaagggcttactttctctttaaaaaatattttataaagtaatataaacaaatggccgcattttacaatgcggtcattttagttttatattctaatctcttttaaggacatctatttctctgtgttcaaaaacaggccgattgccggaaaaatcaactattccgtaacaggttgtaagggttgccggggaaattgtaacgctgcccgggttaaacaggtaaagcccgttgtcatattcgtaatacggcctgtgagtgtggccgaaaagtgcaacatcggctttcagctctctgcaagccttttttataggcaataagcccatttttacataatagccgtcaccgtggcaaacaagaacacggtatccgtttatatttaaaatttcctgggaaggcacatcttttaggaaatcacagttaccggtaacggcggtaatattatattccggattttgcctttttacatcaagcatttcggaaagcccgtctcctaaaaatataatattcttaatatcaggcacctcagccaaaactcggtttaaataatttctgtccccgtgaatatcgcttaaaaccagatatttcattttccgttccccttactctttggtattttgtaccgctttgtacacttcgctctttgaaaattttgttccctgtgatacctttttagccgcctcgcttatggaaattccctcggtttccatgagctcaatgcacttttcggtcaatgtttcaagggtggcttcttcttccgcagggggaacatagccggccacaacaagtgcaaattctccttttggcggattttccgtgtaaaaatccaaagcctcgccaacagtggtaagttttatctcctcgtggattttcgtaagctctcttgccaccgtcaaacttctgtctctgccgaaatattccgcaaaatctttaagtgtgtttaacagtttatgaggcgcctcgtaaaaaatcatggttcttttttcgtaccttacttcttccaaatgccgggccctctgcttttttacaacagagagaaaaccctcaaagcaaaatctgcctgtgtcctgtccgcttacgcatagggcggttataacggcgcttggccccggtatcggcacaactttaattccccggcggtgtgcctgcttaaccaaaatttccccagggtcggaaacacacggtgtgcctgcgtcactgcaaacggcacaggtttccccggctatgattctgtctatgatttcatcgcccttatcacgcaaattatgggcataatagctgaccatgggctttcttatatcaaagtgattgagaagtttaaccgttacccttgtgtcctcggcggctataaaatccgcctcctcaaaggcctgccttattcttggggtcaaatcgttaagattgccgataggcgttgccacaacatataaaatcccctgttttccctgttccatgtgttttcctttccgtaaattgatgtagttattttatatacaatatgtaatatttattaaaattataatttaccgtagattttgagtatctcctgtgaaaaaccgccccgaggattttccacgattaaatccggcataaccgtaaggccggcaccgccgttttttctcccgtccacaagcacaagccatggttcccggctgtctttgcgttggcgaacaaatcttataatcttaggctctattttattttgcttcatcgcataaaaaaccgttgccaaccgagccggtctttggcaaatgcacagtttcccattgtcttttaacaacctgtaagccgcccgggcaacatcgttatcggttaaagtaaactgatgacgaaatgtggcctttactgcgtcgtccttgggtttgccggatgtaaaatacggcggattacaagttaccacatcaaacaaaatatcgcttttatacagtcttatatcgcagtttacagcctttaaattttcaaatccgttaagctttatgctctcgtttaaaagccgggtgccgtcccgatctatctccgcacctaccgcaagacctttatgtccgaaatctttccagcgcaggggaataattccgcagccggtgcctatatctattgccctttgccgatattttatccgggcaaagtcgcttaaaagaaaggcgtcggtaccgaaacggtgggtattgtttatgcacacctttgtgccgtgagccaaaatttccgttgagtattccataaattcaatttcaccatacaaaacaacaattacaaatcacggctcttttaaagagccgcaatttgttttatgttataaaattatacaaagtaattgcccagttcgctgccttcgccgccggcaccgtcggttacccaaagggctacggtattgatttcatcattattccgtgcggttttaagaggagatattccgctttctccggagatttcctccgttgtggcggttataacaaagtcatgtatgccaagctgatatggatgaactatatactgccgatagtcgccgcctgttaccgcccgccaatttatctgccatgagctgtaaccgccctgtgcggaaactcttgattgcaatgtgacgataaggctcttcatatttgcaagaacccggtcgttggttgtgccgaaatctcgcttgtcaaggctgtaaccggtaggagtctggaagcctgcaaagataatctcttttacccccaaagacataatttcttcggttatgtcaacaatatactgctgcataacggtgcttgccgggtttgcccatgccttgccgcctaacgccgcgctgttgtcaagccagcgtgtatctgtaccctgatacataaccgcagtggatcgctctatggtagaaatcatcttgtcttcaaatgtgtaaatgcgtgcaacaggtgttatgccgttctcggagcactttttcactaccgcttttacatctataacggtatccggggaaacaagctgtgaaccgtattgattagccgaccgatacaaaaggtatccgtcgctgtttttcaaatcaaatacaaggcagtttgcccctgcatttttggcggcggtgattgcgccgtcaatgccggcatcacttgttaaactttgagagtttacatagtggtaaattcttgttttgcctgtgggggttacaacattttctccgccgttgctgtcctcaggctgtgaggcgctgtcctcgccggtatttgagctactttcagcaatatccgactgtgtatccgaagaaactgcggaagatgctcctctgtttttaattattgccgaaatcgcctttgtgcccaaaaagcctatggcgaaaagcgccaaaagcaaagctaaaaagccgaaaattctttttgccttgccggctctttttatattcttttcacgaatatccccgtatcttttaattttaacgggtctgtctccttttgccatggaaaacctccattaaagaactgttgtgtggcctgtaaggccgtaaattgccaatgctataattgatatataaataagggttataggcaacccacgaaaactgtggggaaccatatcgtcgtgtatttctttttcgccctcgcttatcaaaagcatggccagtaaaaagcctacacttgaacccaatgcgtaacctattgtctgaggcaggtcaagaccccggcttgtgctgtaaataaccgtacccacaatggccgtgtttattgaagcaccggtaagggaatatataatcctcttaaaatcggattttttcataacaacagccagcaccgttaccacaacaaggtagcctaccgtgcagatgataacaaaaatcgcagggcttgcgtagcgggcgtattgagatattttttcacttctcaaaagcggagccacaagatagcccaaaatgctgtttaaaagctgaaaaaccgtaagagaaccgcaaaaataccaaaggtcttttttagggttattgagaacacgcaaaccgtttgagatacccaaacagcggtagaatataacattttccgccgcaagagccaaaaatgtgtagctgaaaaaagacaatattgctttttgcatttatcttgccccctttgtaccgtttaaaaattttgcgtggcgtttttccaccatggaatgccacagtgcgcttattacaccgattatcaaaaagccgccgaaaccggtttgtgccataggcaagagagaaacacttgttatttcaaaacctccaagtgtgccgaaagccaaaatttctctcacaccgccgatgataacacaggcaagtataaagcctgcggtgtttctcaaaccgtttataacagaatacttaaaagattcttttcttgttttttcaaagtttttaactataagcgggtcaacaaccaatatgggcagatatgtgccaagtgaaagagcccgtgtgcctatcattttatacatggcatagtagacaaaggcaaagataacagccgataccatagggtagaaaaatgttttcaacggcacactcatctttcttgttataaaagatgttaccattcttgttggtgtcagcaaaagaaaaacacagagggacaatataaggctgttttgcaatgttgttgcggcaaccgcaacaggcgcaagagccaaaccttttataaatatcgggtttgaaagtattaccttgtttcttcttgtaacgctttcccaatcttttgggtcatagggaatgtagctgtttttttccattatttaccctccccattgtctgttttcttttttatttttacacttttgtcgccgtacttttggtcaaaccgacgcagagcctcgtcaacgtctattgtccttgtggaaaattccacatcgtccaggtgatcctctgcctcgcctattatatccaaagtggatttaacagcagatacggtattctttgcctgaggtttgtccttggcattttcaatcggcttttcggtctttattttggttttagccgctgattttctaccggtacgttcttctttgcgccgttcaacacgcttttctatgttgtgttcggcagtttccgccacgctgtgaaccgcacgatgaatattttcaaaaacaactccgtcaaaaagtctgtcccagaagttttcggtggcatttacaatcaaaatagcaaagcaaacaccgatttcgtagctgccgtaatatctgaatatcattgtgagaataccggacacaatgccgaacaccacttttgccttaggggttttaggtgttgtggcaggctcggtaagcataaacacagcggcatacataaggctgcctgcgagaatttcaaacttaacgctgaaaagccttgaaacgccgtatatctgtgggaacaagaacgcaaatatcgtacaggttgcaaggaatgtaaccggtacatgccaagttatttttttatttattattaaaacagccccgattacccctatcaaaaggataaaggaagtgcccattgccccggcgtagtcgcctatgagcaaatctaaatttgaaatatacggtatgccgccggcctttatttgggaagcgccggtaacggtgctccgtgctgcgccggaccaaaaatcaacagatgtaaaaggctgcaccgccttaaaaacttcatccggccagtttaccgccgcaatacacattgccaaagcggacaggttaaaaggataaacatctttgccgccaaaggcatgtttacctatgacgataaccattgccaccgtcataacaactatgtacagcggtacagtaaccggcaacataagcgcaaatgtaaaagccgcaactatactgcttctgtcccgtgtgtcaagtgggatttttctcaaagacataacccgcacatcacaggcacgggccgtaaccgccgcaacgacgcaaatcaaccaaaccctggaagaatacaaaacgcttgcatacagggctatcggtaaaagtgccgcaaccatggaattataatggctgtcggacttagttatagtgttagtatttgccattctttactctctcttactcctttaattttgctatggccgcccgggggtaatcgctgccgaaaacataactgccggcaaccaatacatctgccccggcgtcggtgcaaattttacctgtctcccggtttataccgccgtcaacttctatcaaaaagtcgtacaaaccaagccggtttgctctctctcttatctctcttatcttgttctccgcccgggggataaacttctgcccgccaaagcccggttctacactcataaccaaaatcatatccacatctgggataaatttcaacaccctttccgcaggtgtgccgggttttataactataccggcctttgctccccggtcttttataagcttcacggtttcaagaatttccccgtcgctttcgcagctttcaacatggaatgttatcatatccgcaccggcttcacgaaaccgatttacatattttttagggtttacaatcataagatgaacatcaaaaaagccgtcgcaaaccttgcgcagactctttacaacaggcagacccaaagaaatattaggcacaaaaacgccgtccataacatcaatatgtacccaatctccccctgccaaaagaactttattaacatcgtcacccaaggcggcaaaatctgccgacaggattgacggagcaacttttatcatataaatcaacctcttttaaggatttgcatattttatctatgttattatacatttaaagagggcaaaaatcaattatacggcgaaaaatttacaatatatcaataaaattaccacatttttcaataaaaagcaggtgacaacataaaaaagtgtgataaaataaatttagggttaaaaatgtaaaactgtaaggaggctttattatggaaaagaatattacatgcaaactgggttttggttgtatgcgtttgcccgtaaaccgggatggtaaaattgactgtgttttggctgaaaaaatgatagactacgcctacgaaaacggcataaactattttgacaccgcttggccttaccacgacggagaaagcgaaatttttatcggcaaagcccttaaaaaatatccccgtgaaagtttttggctggcggacaaaatgcctatgtccaaaatcgaaaagaaagaggaagtacaggaaatttttgaaaagcagcttgaaaaatgtcaggttgaatatttcgacaactacctttgccacgctttaaataaagctaattggcaaaaggttttggatttcggggttttggactatttgaaagagcagaaaaaactgggtaaaatcaagcaccttggcttttctttccacgacagccgggatgttttaaagacaattcttgaccgggaagattgggattttgttcagttgcagctcaattactatgatgtggcaaacggcgacgcacagcagcttatagaccttgcggcggaacacaatgtgccgatattcgttatggaacctataagaggcggttttcttgcaagatgtgtccctgacgccataaccgaaattgaaaacgcttacggcaaaaacaccgcaccggctttgcggctttgctatgcttttaacattaaaggcgtaaaagttgtattaagcggtatgagcacaatggagcaggttgtggaaaatgtggcgacagccaaaaatcctatccccatggacgaaaaggcggaaaaagttataaaagatgttatggatgacataaacagctttgtaaccgtaccttgcacaaagtgccgttactgtatgccttgcccggccggtcttgatataccggagattttcagaatttataacgactggtgtctgtttaaaaacggcagaagaacattggacgaaatagaaaaacttgaaaagaagcctgccgattgcgtaaactgccaaaagtgtatgagggtctgcccacagagattggaaattcctgaaataatgaaaaaaattgcggcggagcttagcgaaatcaagtaatgaagggcaaaaagattatatcacggcttggggccgtgtcgctgctggtattctcggtacttgtatcggtgtttacggtggtgaacataaaaagtttttacataaaagagtacgccaaaaacaatgtggaacaggccaccggtatgaaccggcaggatttggaaaaaaccacccaactgtttttggactacttaaatgacaaaagagatgatttaagccttatcgtcacaaaaaacggcgtcaaagaacaggttttttacgagagagaaaccttgcacatgatagatgttaaggccttgtatcaaaacgcccaaagggcaatgtatctgcttggcggtgtaagccttggctgttatgcttttttgtttttaaaaaagcaagacaaaagggaattttggcaaaacgccaaagccggctataaattcagccttgtgctgtttttgctgattgcccttgtccttggaattatgtttgcggtggatttcaaccgtttttggatagggttccaccatgtgttcttccacaacgacctgtggctgttagaccctgctgaaagcaccatgataaatatgttgccggaggagctgtttttcagtatgtgcagtaaaattttaatgctgtttgtggctttgttcgggcttttgccacggtgtgtgtatcttttggcaaacaaatttaataatacaaaataatttttgacattgaaattgcaaaatgtcaaaaactaaatcaccgtctcggaattttccaaagacggtgattttttattaaatttttattttagtcatcaacgcacaattcgcaaagttccttgcttgtgtggtttaaaacttccgtttcgcctttttcgttgattattacaacatcttctattcttatgcctatatcgtctttaaggtagatacccggctcgcaggagaaagccatacccggcgcaaggtgcatttcgtaatcgccccttatgtacggcgcttcgtgttccgcataacctatgccgtgacctaaacggtggttaaaccgtgggccgtagccccggtcggcaataacttttcttgcggcggcgtccacatccggaatccatgctccgttctttgccgccttttcaccggctaaatttgcctgtaaaactatgttgtaaatttctttttctctctcggtggctctgcccacaaaaacggttcttgtggtgtcggagaacattcccttgtagatgcaaccgtagtccataagcacaatggcttttttgcccacaacaccgctgttgcccatatagtgtggcagtgcggcgttgccgtcaacggcaactataccgccccatgtgtagtcggcgccgttttccatcataatgcgggttaactcatcgtttatatctttttcggtgacacccggtttgatgaattttttaattttctcaaaggccttgtctgcaataagagaggatttgcgcagattttcaagttcttccggggttttgattattctcgtaagctcgatgtaatccttgccgtcaacggctttaaaatccaccgcattttgcgcctttataaggttaaaggcacggacatttccgtttatggcaacggttttgcctacaagcccctgttcttcaaatgcctttttaacggttttttcaaagccgtcccggtcgtgccaggagtaaatctttgcgccgtccacaaagtcgcttacctcatcggtgtacagggcgttgcagatgtaaaagcacgtttcgtcgctttttacaaacaaagcctggtagcgctcgcaaagcaaaggcttgtggccaagcaaaaataccatatccgcaccgggggcaatcataattgcgtccacgccgtcttttttaagctgagatgcaagttttttaactaattcttgatttatcatcgtcactgctccttttctttattaactataatatagcattattcggtttagttttcaataaaaaaagaacttttaaataatatccacaaaaagttgagaaaaaatttggttaccgaactaatttattttgccttggctatatgatatgcaaggtaacccgtagcggcggtcattgaccgccattttgtaaattgtttaaaacgatttccggtataaagcggtatctcaaataaatactcatctttcggctctctttggtaaagagagctgtcagcggcagctgactgagagattgattaacattttgattacatcctatatttgtttacaaataaacttgttttatgaaagtcaatccctccgatttttcttacgaaaaatcacctccctttacatgtcatgccccgtgggtacaagggcggcaaggttgcggatttttggggttgttattttttcccgtaatttgatgtaaacagattgtctgtgtgcaaacctgcggtttgcataggcgttcaatgaacgcccctacggcttgattttacaaatatatttgttcataacaaaaagttaatataaacaatttgctttaacaatcctcttgtcacccagagtgtgacatttctgtttttaaaaatttatctattgaaaattttaattccttgggacacaatttaaagaaattattgctaaaagccaaaggcggaatgtaacggataataggttacaaattctataatctgtaaccttaaaaattaaaatttgattaaatttccataatttgcctggggtttggttgcaaatttcacactttgctatggcaaaaaggcaaaaaatgttgtacaatgttgttatgcgcaatcagcgtacagggtttatggtatgttttaaggagatttaaggtgaaaatttcttttcagtctattgcagataaaattaaaaattttaacagaaatcaaaaaatagccgccggtgttttgacggttgccataggggcaggggttataacctctgttgtcacggtgtcaaaatatgcttcggcaaacggagagccggtaagtttttccgaactctcctcgttttcttcatatatatcctcaatggtttcttctgcctcatcggaagaatcttcaagcgagagcaaaaaagatataaagataacccttaggccgtcttccgttgaggaggatttggaagttcaaatcgtggacgaaaagggcgaacttatcacaaatgataagtttgttcttaccgtaaagggtaaaaatgtaggctacaacaaggactggacggttggcgacggctttttgaagttgacaaaactcaaggccggtaactacacggtaagcattcgggataaggacggctacatcatgccggaacctatcgagtgcaaagttgccgaaaaagttaagtatgtgaaaatggatgtaagcgacaaattggttgacgacagcaaggttaactcggcaaaagaggacgccggctacggcgcaaccgaggcgaagcctacaccggcaccggtaaccgacacagttgaatatgtggaaacaggcaaaaaagaagtcgaaaaagatgttgaagtaattaaatacaagccggttgttgtggaggacggaaccataaagaacaaaaacaccggcgagtcaacaaagtatcaccctattttggacagcgagggatacataacaggcgcatattacatagagcgtgtaccgaaaacacggagccaggctttaaatatgttttggcttagagtgtatgcggatgagccgacctctacaccggagcaggcctctacgccggagcaggtctctacaccggagcagccttctacgccggagcaaccctctacgccggagcagccctctacgccggagcagccctctacgccggagcagccctctacgccggaatcgacacctgcgccacggcctgatcctgatcctgcacctacaccaactccggaatatgaggataagcgtgtagatgtaaatatctttgattctaacggcaatcttatcagcgagtattcgtatttcgatcttaccgaagttaagacaaccaaaaaggaaaaggttacaatccttacaggctggcagaatattgacggcagcagatattactacgataaaaacggcaacaaggttataggctcacaggttatacagggcaccgcatatcttttcgactccaacggcaagcttgataccggcgtgggcaagggtatagatgtgtcaaagtatcagggtaatatcgactggaacaaggtaagggacgacggcatagaatttgtaattatccgtgcaggctaccgtggctacggctccggcgttttggttgaggatcctaagttcagacagaatattcaaggggcaaccgccgcaggcttaaaagtgggggtttacttcttctcacaggccattacaaccgaggaggcagttgaggaagcttccctttgtttgcaggccgtaagcggttacaatttggcttatccgatatttattgactccgaatactccacatcacggcgtgacggcagagcagacggtttaagccaggaacaccgtacaaagatagcccaggctttctgtcagacggtacagaacagcggttacaaggccggtgtttatgcatccaaaacatggttctatggtcaacttaattactccgctttgtcaggctatcatatttggatggctcatttcacacagcggacagacttcgcttacagatatgatatttggcagtattcaagcagaggctccgtaaacggaataaacactgcagttgatatgaactacagatatcgctcatattaaaattgtaaaattttgtgcaaaaacacaatcgaggcaggcttttttgagcctgcctttttatatattatgccaatagtatataaaatatgtttgtgttattatattaacaggcgcaaaaagcgccgaaattttatattgaggtgaaattatgtctgaacagacgaaaaaagacagagatttttccaaaatggtaatgggcattgcactacccattatggttcagaacggcataaccagctttgtaaatttgcttgacaaccttatggtaggtcaggtgggtacaatgcagatgtctgccgtatctatcgttaaccagctttttttcatttttaatctcaccgtaacaggaagccttgcgggagcaggcatctacacatcacagttcttcggcaaaaaagataccgagggcgtacaacaaaccgtaaggtttaaaatttatattgcaacagccgttttgcttattgcaatggtggcctttacaggctttggatcacagcttatcgggctgtacttggcagagggtgactctcggggtcgggtaagccaaactttggactatgctttggattacctgcgcattttgatgattggttttataccctttgcctattccggcattttatcgtcaactctccgtgagtgcggtcacacgccgttgcctatgaaagccggcgttgcggcaattttgacaaaccttgtttttaactggctgcttattttcggccacctgggtctgccacggcttggcgtaaacggtgcggctattgcaacggttatttcaagatttgtggaattttttgtaatgtttatcagcattaaactgaacagagagaaatatttctatttcaacggtctgtttaacagctttaaaatcaaacctaatttggcaaaacaaattacacttaaaggcatacctcttctggtaaacgacagtttatggggcaccggcacatcaatggttgttgcggcctacgcttcaagaggattacatgttgttgcggcctataacatatcaaataccgtgggcaatttcttcaacagcgtgttcttggcaatgggcatttccgcctctattattataggtcacgaactgggggcggacagaaaagaacaggcttacgattacgcaacacgcctgcttaaaatcagcgttaaggtatgtttgggattggcggtgtttatagcggcaacatcactgtttgtgccgaatttgtacaacaccgagccggaagtaaaggccttggcggcacagtttataatcgtctacgcattttacagcacaattcagggctacatattcgtcagctacaacacattgcgctccggcggtaaaacatttatcacattcctgtttgactccggctttgtgtgctgtgtgactttgccggtggcatactgccttacacattttacaacactgcctattttaacatgctacattcttgtatgctgtgttgaccttataaaggttgctttaggcaccgtgcttataagaaaaaagatttgggtcgtgaatatggtttccgaccggtaatgcgaaagcggcttgaaaaagccacttttgtcgtcttgatatttacacatatttttgatagaatacatctgtatattaaggaggtatgggcaatggatgatatggtaaaaagaataaacgaattgtacaggaaaagcaaggcagagggattgaccgaagaagaaaaacacgaacaggcaaagttgagacgggaatatgtaaaaggtttccgcaaggatcttatcagccagcttaacaatgttacattgaaaaaccctgacggcagccttacacacctgcgggacaagggcataaaagaataagggcaaagtttatgtttaaaatccgagagagccgaaaggctctcttttttaaagaatatgacatatttaagcaataaaataataaccaccggctcagccggtggttattgttcgattttatctgtgggataaaatcattatggcctcatatagaaattgcaggttgggagatgtcctgttgatatgagtttttctatgtttccattataccattgaaaatacatataataaagtgtataattgtatgtattatacttttcttttaaaaaaggagacgaaaaatgcctgtaaattcatttgaatactatccgcttacatggcgaccggacagaaataacctgacaagaccggtgtatctgtctttggcgcagcttttggaaaatgatattttaaacggcgttttgcgacgggatacaaaattgccgccgcaaagggagcttgcagactttttggacataaattttacaacggttacaagagcttacaccatatgccgggataaggggcttatttacggcgtaaagggaagcggcacatttgtttcaagggttaaacgcaagtcggttgcagtaggaccggcggcaccgggaagcaggatagaacttggatttatgaaatcatttgaagaatgtaacgaaattcttattccctctgtccgcagggttcgggggaaaaaatatcttggggatttgttgcagtatgattacccattgggtatgcctcatcagttggtagcggccgaacagtttttcgattacaaaggggacaactgtgcgattacatccggtgtgcaaaactcattggcagtttgttttacggctcttttttctcccggcgataaaatagccgttgatgaatacacctatcctaatgttatagagcttgcaaaagcatataacttaaaactttttggcgtcagtgccgatatagacggtatgttgccggaaaaactgcaaaacctttgtcggacggaaaatataaagggcatttatcttatgccgggctgcgcaaacccaactacattatccatgtccggcggaaggcgagagcaaattgcaaatatcataaaaaaacataatttgcggcttatagaagatgatattctcggctttttggcggaaaagagggaaaaatctctgtcaagccttgcaccggaaaattcggtatgcgtggccggcacatcaaaaatgatatgttccggcataagggtggcgtatataatgtatcccgacaggtttaaaaaaaccattgaaaatgcaatttttaacataaatgtaaagacatcttctttagacgcagaaattgtaacccaatttataaaggacggctatctgcctaaaatgacacgggagaaaagaaaaaaagcggttgaggtaaacaagatttttgaagaatatttcccgaacaacaaacaatattcaaaaatacctacgcttttccgttgcattgatataaatacatcacgaccgggagatgaaatagaggaagaactcagtgacagatcggtttcggtttaccactccgacagattttctgtttccaacggggaaaggagatttatccgtgtggcactggcatcggtgcgatcttacgatgaactccgtgaaggattaaacatactaaaaaattatcttattgaaaaaggatatatcaattaaaattatattatttttgtttttcagccgactgcaccgcctgctctctttgccaaaagggggcaggttttgtgtgttgttccccctgtaatcctataagatattgagattttgttccgtttacattgttaaaaaaatatcaatctatatgtaaaaaatatcgaactttttgtatatattacaccaaacaatcagaaatcaagagaaaattatattaaatttatcggtaaaaagcataaatatggatttttgattttgggaaatttcgacaaaattttaattgtgattaaaaaattattgataaattgttcataattcgtttataatttagtcaagaaaaacagtaccgcagtgataccggtgctgagggagaaataaaaggagaaaattaatatggctgaaaaatccacaatgcaacagctgaataagacccttggttttatggatcttatgtctatcgctgttggacaaattatcggttcgggcgttatggttatgtccattgccgccctgggtatgacaggtcgttcggttaacatcgcattcgttgttgctgctgtctttacctgcttcggcgctttgccgacaatcttcatgggttctacaatccgtgctatgggcggtttctactcacaggccgctatcttcgttggcgataaattcgccggttactatgctgtaacttatatctttaacagaatgtcacttgcccttttcggcacaggtttggcttcatacacaatccagcttgttcctagtttggcaccgtatgcaacacctcttgcaatcggctacctcgttttgttctttgttcttaacttcttcggtacagaatggatggcaaaggcacagacatttatgttctacttgcttgttgttgctcttattatgttcacagctttcggtcttccgaaggtacagtgggcaggctacttcggcaatgaactctttggcgaacctcttttcacaaacggtatttcaggtttgcttgaagctgctacatatcttacattcgccacaggcggtgccacagttgttgtaaacttctcagctgaggctatcaacccaactaaggatattcctaaggttgttatcatttctacattgcttgttgctgtattgtacgcatttatggcttgctgtatcggtggtatcttgccatcagcagatgttcaggctgcaggtaacttgggcgttatcgccttggaaattatgcctaagccttgctactacttcttcatggtttgcggtgctatcttcgcccttgcaactactttgaactcatcaatcgccaacgctatcagacctttgatgcgggctacagatgacggctggttcccggcattctttaacaagctttctaagtttaagacaacacctgtttggcttctcatattctttatagttaacggcggcgctatccttcttggtatgaacactgctatgataggcaaattggttctccttttgggcaacatcaacaactttatacttgccgcaggcattctcagattgcctaagctcttccctgaagcatggtctaagtcacctttccatgtatcagatacagttcttaaaactctcatcggtatgtcagaaattatcatacttattcaggcttacatgaactgtaaaggtcaggcaccatgggttcttattgccaacgctgtaatgcttgtattctcacttgtttacacacaggttctttataagagcggtaaaattcacgttgcaccttcttacgaatttgcataatcgcaagttaaaacaaaatagtatcacctataaaggtgcgccccaatcggggcgcactttttaatttaaataatttggtttatagcggtggcttctgcaataaaaataaagaagagattaagacttatcggcgatgaaaagcaatgaattcagcattgtagggagcatacaaaaacctctccgattttatcagagaggttaatttttgctgattatataaattttacttgtgggtaagataaacaaagtttattttggcaatacaaagccgactttcttgtaaaccttgtttaaagttctctgtgccgcataaatgctcttttcggcgccgtctttaagaactttttctatatacggtttgtccgccataatccgattatatctatcctggaaaggtgtcagtgtatcaacaaccgctgtgcccacagcctctttcaaagcaccgtagccaagaccggcaaactctttttcaatttcttcaaagctcttgcctgtgaatacattgtagatacccataaggttagacacaccgggtttttctgccgggtcatatcttacaatgccctcgctgtcggtaatggcacgtttgaatttgcgcataattgtgtctttgtcatccaacaaaagaataaaggcattccggttttcgtcggatttactcatcttctttgtaggctcctgcaaggacataattcttgcgccaaccttaggctgcatacattcgggcaaaacaaatgtttcgccgtatgtgttgttaaatctctgggcaatatcccttgcaagttcaacatgctgcttttggtcccgacctaccggcacctgatgcgcgttgtaaaccaaaatatccgaagccataagcaccgggtatgtaaacaaaccggcgttgatattatcggcgtgttttgcacttttatccttgtactgcgtcattcttgaaagttcgccgaacatacagttacaagccaaaatccaagctaattgagagtgtaccgggttgtggctctgtacaaaaacaaggctcttttccgggtcgataccactggctaaaagcatgcctgcggcctcataagtgcgcttgcgcaaaagggcaggatcctgccttaccgtaagggcatgctgatcggctatcatataaatacagtcatactcatcttgtaaaagaggccagttgcgcacagcccctatataatttcccaatgtaaaagtacccgttggctgaatgccgcttaaaacacgctgcttggcgttttctttttccatactgttatcctccttactaagtatagacttaaaatttgattttatcatcgcaatatgtatgataaaactataataccacagaattataagtttttcaattgacaaaatcaaaataaaataataatatatatactataatatactaacgccatgggcgtttaaatcggaggaagaatatggcacttgacagaatcagaacgagatttgccccaagccctacgggatatatgcacgtgggcaacctgcgtacagctttgtacacatatttgacagctaagaagtttaacggcgactttattttgagaattgaggataccgaccaggcacgccaggttgaaggcgccgttgacatcatatacaacacacttaaagaaaacggccttttttgggacgagggtccggatgtaggcgg

SEQ ID NO: 2812 - DNA, 32759 bp, Unknown
  16S sequences of unknown bacteria
gccagtataatgaagcccggacgtttacttaagcgttcgggcttctccgtttttgcttgttcgcatatacttactcccgctcgcgctaagtgcgcaatcagtcccccgcctcaatatcctgcggtttataggcgttgatttcagcgaatgccgtagtttatcctgccctcaaacgagctattgtgcgtatcttgtgcgcgtcataccgattgcgccccgcgcgaattttttcaccggcggcttcatactcgccgacaatctgccacagccgagacgtttttattccaagtatttgcgcggcttttcttgcagaaataaagtccgcatgagaatcgtcttcgcctttttgaatgcggaggatttcttcgacgcttttgcgcaatgctttcagctcggagagtatttccgagagtaataagatgatgctcctgagttgcattttttgcggtttcccttttagtgtgtcgcgggtgaatgcctgtttatcgcgcgccgattgcgtgttgaaaataaaaagacgcgcatagcaagcctactgcgcgccggtgaaaaaggcaacttgttttcgccaaattttaagtcgtcggctttccccttaatttctatgtgggatggtgttatatggatatatttcgcatggcgatcgggaaagtcacatcgagccgtctccgtcgttgtagtcgtcaaggtgagcgttgctctcaatatctttccatgttttccctttcaggagtatatcgagaagttcgccgagtattgctatgaatatcaatgctattaattccattttacctgaatttgcgcacagcatcacgcgcggttagagatttcttgcaatgctttttttcaaatattttatataattgagcggcacatagggttcgtttttccaccaagaaccctttgtgtctatcagcaacgtgttgtcggagacttcgattttcagaaacgcccgctggtagcctttgacatagcgcgccgatatgggattgccggcggagatgattttccatcccctctcttggagcgagttgagggttgcggcgtgcaatttggctttgggggcgccgccgaaatgctccgaaagcttggtattgccggcttttgccattctgatggacttctccgtgtttgtcgaggcgcatccgcaaagagccgccgccgttaaacatacaagtgcgagtcgtaagatagtcttcatattttctcaagttgctatgattaagaaattgccggcgggcggggcaagaatattctcgccccgctttcgcgatttttagagttcaaacctcactttgaccagccccaaatccgccgtattgtcttttttgaagatccagtgttggtagcatagcgataccgcccagttgtgcgcgaatttgtaggttccctcgacgctgatggtgtggcggtcgatatagcctatgtggtaattcccaactccgaaattgctgtttggcgcgtcggaataattgtattttagcgtgagagcgaattttttgtaaatcagggcttctacgcctccgccaagcccccacatgaagtttaccctgtcggaccaatatccgtcgttgtcggaggcggcgtacaaaccgccgcatccggcttcgataaacgcgtaagctcaaaatttttttccacgcgcagcctgtaatatccgctgatgtagaggggaaattcaaattcgtagccgtttacgttataatcgctagtttccagccagttaaacattagcgggacggaggcgtctatgccgaaagtatccgtcccgtccttgaacaggttccatttcagctcgaaatttgcccctgcgccggtatttgtatcgtaatcgttcagcgacgcctggttgacatttgcgccgaaagatatgtagtttttgccgaaggcggttgcggaggccgcgtagccgccgcgccttactttcccgtagcccgacctttcagtctgggcccagtcggggcggattgcgctttcggcggctgcgaactgcgcgacaagcagagttgagagaatgggaaggagcgtttttttaagatatgttttcatggtgattatgtatatacaaaagcatacattataatgcaagtgaaatcttcgtggatacgtaaatctattgtaattttaagggcatgaaaccaaagctgtcttctaacttaattttgcgggtggacgaggagctgaaaaggaggcttgccgacgtccagtcgcagaccggatattcggtttcggaagtcgtgcgccagtgcctgaactcttttgtggactatttcgacaaaaacgggtgcataattttgccgctcagcgtcgttccgacgcgggaattggaattgctgcggcactccaaacgcgccggatgcgcaaagaggccgtgagtttttcgcgaaaggggcgttgagaggacgctcctcgcgcgccgcgcggggagcggcttatttcgcgcgcttcgcctttcgcgggcgggcgggcatcgttgggcgtgcgtgcgcatcctttgcggcctcgcccccgccgacccacgtcgggcggatgagcgttataatgccggaattttcccccgcaaccgcggagtcgcggtttagcatgtcggcgagcctgcgcacggcgacctttcccacaacgtcgttattttgctccattcccgtccagtccggaggcgggggctcgcgccgctcgagctggaagagcctgacatttcttctccctacttccggaatttcttcaaggattccgcgggtgaaattaaagaggtagagaatcgcgtccggagagtttttccggatccactttgccagatttttcctgtacgttttagactcccgcggttcgagaaacggggggcatttgaatttggcgccgcctttcaactgcgcgcgcagaaagcccccgacgagcgtcccgcccacgaggtcgtccacgctctcgtcgatgacaagccctatgtttttgcacccgaggctggcggcttcaacgtacgcgttgtgcgaaatcagaaaatcgtccgaggccacgacttcgagggacgcgttgtacgaccttatccccgcgcttataaaatagaagtcgcgccagattttttcaaatccccgcgggaagatattcccgaaggagtgcccgagcactattccgccgcgtatgccgcgcgagcggaaaatccccgcaagcttttcggcgtccgtccccggggcgtgcatccaaaattcgttgacggcgtatccgaggcgggcggcctcctggcggatacccgcgtagtagcgcgggagcgtcgggtggtttttcagcgcgaattcgtcgaggttgccgtttatcacggcgatagtttccgagaacgacttttcggagcccgcgcggattttcgacatcagagacgagacgagctcgttttttttgtatcccatcgcccttgcggcggactgcaccctcctgcgggtcttctccgaaaccatcggagaatttttcagcgcgaaagacaccgcccccttggaaaggttggttttgcgggcgatgtctgcgagcgtgactttcttcgggcttggcatggtttgtattttgcggattgcgcgcgcgcagtaaagaaaaatgccctccggcgcgccgctttgcgcgttttgcccgaccgccccgcgacgggcgggtcagcctttccggaaatccggcgggttgtagtagtctttgcttctgtcgggatttaccgccggcactatgaatagaaatacaagccataggcaggacattgcagatgccatcagaaatacagactgaattgaggtgaaggacaatccaaacttatcccaccctgcggacagcattccgcttgcgagcaatgccgatgatataaaacctccgaacatccttccgccgcaaaagaaagtgttaaaaaatgagagcgacattactttgttgtcgggcgcagacacggaatacatttcggcggaagcaaaacagaaaaagcacgcgagcgcaacgcagtttagaaaaattattgcgcacacaatttcgagcagatgcggcgtattttcaccgcataaaaacagcgccgcaggtattgcaatgaaagccgcatgtattgtcagaagcattctttttgagcccagcagtttcagcagtttcccaaaaatcaggtatccgacaatgctccctgcaatgccgaaagttgcgactgtctggactgtgcttacgccgtggtcgagcgtctgttttagatatacaaaagtcaggggctgtaccagaaacgccactatcgcaattcccatcatatatattgaaaacgatgtgaggcagctgttagccgtagccgctttaagagagtcgagaattcgctcgcttttcttttcaagcgggggaaggtcgagaaaatatgtgaatagcgcccgcgcgaattgcaaaacggcgcatacggctatcaaaatttgaagaagccaaaccggcggatgctcgcccatcgcccgcgccgtcacaaagaaaaatgcgccggcaaaaaccgtataaaaaaatctcagaataccgaagtatccgccgcgttcggaaggagcaacgaaagaatcgactatcggataccaagttgctccgaatatcggccgtgctatgcaatatacaaagcacataccaacaacaaaatattttgcggagctccccattgcggccgcgcccgccatcaaaaggcaagccgcgcaacctattgcgcaggaaagatacatgctctttttcaatccgattttctcaacgagaaggccgctcgggatttgcaagagcagggcgatgaatccggtagctcctgccattagcatattcagggattcgtcgccgccgagcagagctacgtaggaaattaaaatcgcggaactgtcgagcataacttccgacaaactcccaaagcaatttgcgacaatagaccacgcctgtattttacggcgtttgctttttggcattctctcggcaaatgtctgctccatcaatatcctccctctttatacaagtttattcccaaccgcagtaatcgcgtatttccgctgcgttggagtagaaaaatttctcggcctcttccttctgcccccatcgccaatagactgagcctacaagctcaaaatacagtttccaaaattcaaatattttaagagccgccgcgttgtcggcttcggcgccgtagaattggtcggtcgcgaacaatgtcttttggttaaagaatctcagcgactctgagccgtcgttgcatttcttgtcgaagaacgagggcaggtcgcctacgcacctgcggaatccgcttacatcgcatgttatgtttttatagtagtatagattttgctcggtctgctcgatgtagggccagcccaagtgtccctgcattattttaagatccggaaaggcttcggctatcgccgccaaattttgcggctgcatatttatcggaccaaaagagcgcttgctcttttctatcccccatgccggcccttttgccacgagccccgtatggaataatacgggcattctaagcgcttgcgcgcgctcgtatatcgggaaataccgttcgtctgaatacgggaaatgcggcttgtagggctttaaccccacaaagcccatctccttcaacatgtccggctgctcagcagcgccgtctaggtcaagatagccaaaggccctcactacacctttgaaatcttttgtcgcctgcaatatttcttcgcgggtggcaaattcaattccgtttaaacgcactccggagagatccataagccagatctcctcaaatattccggactcgactatcttatcgaatcctttggcgtttctgcgcaggtgggcgtgggcttctatggctttcatcttatattagatattgaattttggcttttgcgctgtccctttgtcggtgacgataagaaggtttttgtggtagcgcgcatgtgtcactggataatcgtcgccgggctgtccgagcgccgatattcgcaatatcgtgtttgcccacaaaaattccgttgattcgtttctcgtcataagcagcattctgcgcgcctgcaagcattgtttcatgcccatggtaattgcgcgccgcgggaagttctccagattgccgcccacgccgcaatgccttgttgaatctattgtgcgggtgaactcgttgatttcaagaattcgcggattggattcggcgactccttcaccgggttcattgaaggcaacatgcccgtgaatgcctatgccgccgtagcagacttctatgccgccggcgtcctctatcattttgggaagatcctttatattttcgggggttgggaaaattatttgggattctggcatcattagatccgggcggattctattgaaaagcagggggcctatctgcccgcggaaactcagcggattgctcatgggaatgagctcgtccttttcatcgtccacgtactcgtccataaagaaaaaccgcacgtttttaaggctgaggttgcggtagtttattttttcggccataatgcggtaaggctgcgtggggccaacaggcattataaaagatacgattttatcgccctttgccgctttctcgaattcgtttaccatttcttcggcgagaaattcgtaaacttcgtcgagagtgtcgaatactttgagttgtccgttggattgttttattagttcgtcggtgtccagtgcgagaatcctgcggacttcctctttgcgtttttggcgcgtcattagttccattttttgcctttctttaaatttattcggcgtttcaataaatgcctgccgaaattgaatccttcttttatttagcaaggaatacgtccgcaagtgaaaagcccgcctttttttctaaacagttaagtagccgcggggcggcttgccgccatggaaaggggcgggaaacgccccgcagagagggcaaagctcttgcgcggttgccatcgcgcccgtcccctctgtttgccgacaaaaaaacgaatctcccgcagggaaattcgttttcgccgaaccgccgcgattgcgccgccgcgttcaagccccgcattttaccggattttgcgccgcctggagattgcgagcgcgagggccgcggctccgaagattgccgcaagcgttgccggttcgggcacctgcgttattgagaccgaaagggcgttctctccgaatagaagctcgtatgaaaatccgtcggggccgattaccgaaacggaggcgtcgtttgcgccgaagtcggaggattcataggttatcaattcgcgcacgatcgactcctgtgtttcaaggagggcggcaaattcctcggccacctcgtcggcaaattcaagctctatcgccagcccgtccgcattttcgccctttgaaagcgcgcccgagagcgcgatttgcgaattgaagtccactccaatagcaagttttatcgttccgccgctccacgacattgaatcggcgttcaatacgttgtcggtgattgttccgttggagtcgtaaaccgacaaagttccgcccgcgagcgatatggcgcccgcgttttttgcaaccatgctgagctcgccgctatttaccgttacggaagtcaattcgttttcgctgttggcaagatgctgaaccgcgccggcagaaccgttcatcgtgaggtggacggatttgtttgtcgagcctccccagttggggtttgacagcgatattttcccgtcgaagacgcgcgattgcgagtttgtaagctctatgtatcccgccgccgttccgtcgccgtcctttacggttatttctccctggccggttattccgccgagcctgatgtaagagttcccgctcgatcccgtcgcagttaacagcgagtcttttgcgaggttgagggttccggcgtcgattatcggattcgtgtttgagccgccgtagtccacttctatatacgcgcctttctcgcagttcaagatgtcggccttgatgtatgaggccttgaaatagagagagtttgattgcgacctcagcgtcatcgttccggtgccgttctcgtttgtggcgtcgaaagtggcgttgtaggagtaaaactggttccaatagttgccgccgtcgatagtgatcgaatttgctttcagcgtcccgccttccgcaaggcccttttggtggaccatttcgccggtaacattccagacgacttcatccaccacggcgactccggaaataacgaggttgttgttcgaaaggtcctgcaattctatgaggactttagaactttcggaaggaaccccgttcgaccaattcgcggggtcgttccagttatagttcgctccgctgccgcccgtaaaaacagtgtcataggcttgggcaaagagcgaggatgcaagaaatgcagaatatagagttgttttcattttcattaaattgcaacctaaccaagttttttaactatgtcaaacatttaatattactccactctccgcctccaatgacacacttaaagcctcccgcttccatagaaacggggcggcagtgccggtgcgagcttcggccgttaaagggggctggcgccccttgcgaagattggcttcgccaatgcttctattccctccccgttccccacaaaaaaacgaacctcccatgagaggttcgttagcacttccggagttcgttccgaaaagccaaaggtttccgatttggcgcaatgattttggatgaagagcgagggcggcacgggccgccagccattgaaggggcttcgccccttacgcccattgcttcgcaatagggctatccccactatttcggagttcgttccgaaaaaccaaaggttcccctatttggcgcaatgattttggagctaaaagcggggcgcaagcgaaacggcgggttgaagcgtattaaacatacgcgaaagtcgccgttatcgcgcagcaactcgtttttagcccaaaagcattcgccaaatcaggcgacgcgttccacaacaacaggcgagggattcggacggcgcggagcaagcctgtaagcgttcctaagatagtctatcgccgaatcgaggttagtttcgtcgttgtagtgaatcataagcagcggttcgccctgttttacctgcgtacctattttctttatttctgtgacacctacatacgggtctattttgcccgtcttggtttttgccaagatttgcacggcgcgggcaatcatgcccgagtttatgttgtggacatacccgcgcttgggcgccggcaacttgcggacatgctttggcatcggatacttggagggatcttcgagccacggcgcgcttccgccctgggcttttatcatctccataaattttttaagggccgaaccgtcttctatgacgcgctccaccgactgttttgccgacaatgtcgagccggcaaccccagcgagcctcaaaatttccattccgagcttcaatacgagttccttaatgtcgtcgctgcctccgccgcggaggaagtcgagagcttcgagaacttccagccccattcctacggagtcgccgagaggttggttcatatcggtgatgagggcgacacatctgtgcttcattacgcgggcaacgcgggtaatagtgcgggcgagttggcgagcctgttcgatatcgcgcaggtatgagccgttgccccattttacgtccacaaccaaaccgtccgcgccgattgcaaattttttgctcagcacgcttgcggtaataagcggaaggctcgggatagtagccgtcatgtggcgcatattgtaaattttttcgtcgacgggcgaaatggaattgtcgtgttcgcagattgcgcagccgatagtggagagctgcttttggaattcgtcgagggtaagttttgttttaaagccgggaatggaagccattttgtcttcgacagtcaggacgaagtcttcgtccgggctcgtcatgccggggactacaacgccgcaagcggcgcccacggcggcgaggattagcgaagttttgtctccgacacctccggttgagtattttgcaacttttggccttgtaatgtgggagaggtcgagagtttcgccggtgagaatcatttcatcggcgaaaacggcggtttcctgcgccgccatatctttaaaatagattgccattatgagggctgccatttgcgagtcaggcatttcgtcgtcgagaattgaatcgacaatattgcgaacttcttcttccgtgaactcgtgcccatcgcgcttcttttcgataaggtaggcgtatgatgctttggttgatggttttccgatgattttacgtatggccatagttggaagttattatctcgataattattaaaattgcacgaccttcgcaaaatcgagatttttacgcggtctatctccctcagtcttttaaagtgtatattttttgaaaaaagtcgagcttaaaatcgcgtgttttaggtacatttattgataataagcgacatttatcattttattgagacaatttcaaagtgtaggcgttcataatttttggaccaaaagtctttttttagcttggcaattctattcaaaaggctaaaaagtggtgaaaatgggtgaaaagttaaacaacgcggacggacagactttcgaacagtcgctcgaagagctcgaaaccattctgtcggagcttgaaaactcaaaagtccctctcgataagctggtggaaaaatactcccgcgccaaaaagtgtctggcggattgccgcaaaaaactcgatgcggcggaactgaaaatcggcaaattgtcgggcgggactatcgaagaattccccgtggattcggagtgatatccgaatcgcggcaagtacatgtgaaatatgtccatactctcaaatataaaatctcccgaagacgtaaaagcgcttgctccgcaacaattacaagagctcgcagccgaaattagaaaacaaattatcgacgtcacttcaaaaaaaggcggccatgtatctccaaatctcggggtcgtggaattgacaatcgcgctgcacagggtcttctcaacgccgaaagacaagatatttttcgacgtatcgcaccaatgctatacgcacaagctccttaccggcagaaacaacgagagatttgaggggctgaggcagaccgacggcataagcggattctgcaataggtttgagagcgagcacgacgccttcggagccggccacgcaggaacggcggcgtccgcggcattgggttttgcggccgcccgcgacagaaacggaactgacgaaaatatcgtggcggttctcggagacgcagcccttacaaacggtgtgacttttgaggcgttcaacaatatcgccacaactaccaagaaaatgattgtcgtgctaaacgacaacgagatgtcgatagcaaaaaacgtcggggcgattgcaaaatacctgaacgaagtcattacgaatccgctcaacaaccgcctctattccgatatgaacgctttcctgaaaacccttttcggagagccggcggtaaagttcacggaaaaagtcgcgcgcgacgccaagggttttcttttgccgtcgtcattttttgaatattttggatttatgtacctcggcccgatagacggccacgatatcccgctgcttgaaaaatacctaaattattgcaagcgctctacaaagcccattcttttgcacattctcacaaaaaagggcaaagggttggaggttgcaatgcgcaaccccgaaaaattccacggcgcgactccgtacgatattgtcaccggagagtcaacttctaacgccgacaagtctatacccaactaccaggacgcgatgggcaaaaccctcttaaagcttgcccagaaggatccaaagattgtcgggattacggcggcgatggcgtcggggacagggttgtcgtgtttgaagaaggaattgccttcgcagttttttgacgtcggcatagctgaggagcacgcggcggtctttgccgccggaatggcctgccagggctttaagcccgtagccgctatatattctacttttatgcagcgcgccttcgactgcgccatgcacgatgtatgcctacaaaaacttccggtgaccttctgcctcgaccgcgcgggattgagcccgaacgacggggctacccaccacggactttttgacatatcgtttttgaggccactgcccaacgctattgtaatgcagccggcaaacgaggacgagcttgccgatatgttctatacgtcggtggaatccggcaaaccgtgctttatacgctacccgcgcggcaagggcgagggcgttcctatgaaggaattcccggaaaaaatcgaaatcggcaaagcccaagagttgcgagaatcagattctaccgcggtaatttgggctctcggaaatatggtgaaagaggcgatgaaggcagcagaagccatcgagaccgagcttggagtgaaagtcggggtcgtgaacgcgcgttttgtcaagccgctcgaccgcgagcttctgcttgcacaggcggacaagaacaaacttatagttactcttgaagatcacgttgcggcgggaggttttggaagcgctgttgctgaggctctgcttgccgcgcgcaaaaaatgcgacgtatgcattatcggctggcccgatatgtttatcccccatggaacagatgtagccactctccgcgcgcagtttggaatgagcacaacccaaataatcgagcgcataaaaaaggcgatttccgagtgcgcataaaaaggcgtttttacggggcggaggtaataagaagttcccgcggcttgcaagaacgcggtgcatcgcaggcgcggcatattttaaatatgcttggcgctttttttatgcaggttgcggtattttttttgtatagtttccgaaccgttgcggcggaattttaattcgcaatgggagagaatgtagattttttgccgattgcctctaatttaaaatttttgcaacgcgcaaaagggtggcattccgtcaatattgcgagagttttattaccgcaatggatatagccattactattatggaaaacggcgcgccgaatttaaaaaagtccgcgaatttgtatccgccagggttcatcaccaacatatttacgggagacgaaagcggcgatataaaggcggttgacgacgccaccgcgactgccatctcaaatccgtgcggatcaatgcccataatttgagccgccgcaatcgcaacgggcgcgtacaaaattgctgtgacagtgtttgctataaacataaccgtaaacattgccagtgcaaacagcccggccatcacggcggtttcaccgtatccgccgagaagccctatcatcgcgtcggccgccagccgcactccgccggttttttcaagcgccgttgcaaaaggcatcatgcagataattagaattaaggcgggccaatataccgacttgtacgcttcgtccatgcttatgcacttgaatgcaaccatcattgcacagcaaatccccgccgctacaacattttcgacagcccccgtcaccataagtactaccattgtgagtaggctcagtatcgcagcccacgcccgaccgggcgaagtcacagccagatccgactcctccggcaaatttaaaattatgaaatcgcggttttgagatttcaggcgctttatagcggtccatgcgccaaaaacgaggagtatgtcgcccattctgaggcggtgtgtaagtatgtctccctcaacggcagcgctattgcgcctaaggccaatcgcgttgagtccgtgtgtgcttccgaactttacttctctcaaagtcttccctattaaagatgactccggaagaatggtgatttccgccattcccatttccgctgaatgctccgagaaatattcccccgatatcggaagcggattcagcatcatttcttcggcgccggcaaaatcgcgcgattgcccgtaggcattgcaaagcaaaatatcgccagccaaaatccgcgtaccggcagtcggggctacgagcgatttctcgagacggcttctgcgctctatgcacaaaatgctcgtcgcccaattttctctcagtttcaattctgagatttccattcccactatcggcgagcctgccgggacctcaaatatcttttgttgggagtctagggcatacgcgcggataaagtccgagaatttcagccgcggctcgccttttcgagcgtcgtttgccccgcgcaggaatttgcgcgtaaagagcatataaataattccggctacaagcaccgaaattccgattggggtgacgtcgaagaatccgaaaccgtcgtatccctcttttataagtgcgccgttggcgatgaggtttggggaggttgctatgagggtagtcattccgcttgtgatacccgcaaatgcaagcggcatcattaggcgcgagggaggcattccccgccggctgcaaatgcttagtgtgacgggtatgaaaatcgcaaccacgcctgtcgtgctcataacggagcccatgattgcaacggataccatgagagtaattacaagcgatgtttcggatttttttgagcgctttaaaatccagtctccgactgcggaagaaactccagtttttgcgaggccagcgctgattacaaacattagggctataattattatactgctgtcggaaaatgcggcgagcgcttcgtacggttccacgattccggagataacgaggataatgaaggcgcaggcggcgactgcgtccatgcgcggacgccctattatgaaggccgccatacacaaaagcagaagcaataatacaaaaattagttgaagattcattggatattgtcagtcgcaaacgttttttacactatatgtagaaataaagggaaaattttcaatctataaagggcggaggccgcccaataaaattttctcaaagtttttttataaggcgaataagaaagtgcggagactgggaagcgcgtaaaaaacggaaaattaaagcactaaaaaaggcttttttattcgataaatccgaaataagaaggcgcataagaagttagaaaaacgaaaataaaatagatgttttatatgtaaaaataaatgtttgacaatgaaatcaaatgaagcaataagtgatttactcaatcgtttgactgctatgaaaaaattactaatcgcctcattattcttatctggaacttgcgtgctgaacgcgactgatctgacttgggccggcggagaagtcggcaacaattcaggatttaatttttccgattttggcaattggtctccgatgggatattccccatcaagcgttgacaatgtcactatcggcaattttactgctacaaccgatggaagtacagatcagtataaaataaacggatttacgcaagttaatgacctcagaatagaaaatctcgtattgccaaagggtgtgaggtttttcatatacacgacttccagtgatacacctacaataaatgggaatatctatattgggaacatagatttagtagaagggggaggcggagaatggcgtagccccgacatacgtggtggtacgtttggaatggattttgttgtaaagggatcaatcacaatagctcctacaagtactacgacacagaataatgcttccgtgcttacttttggcggcaccaatacgagcggattcttcaaatctctttcaatcggcgaaaatgcggcagttgatgcctccactggatataagacagctgtgtaccttgatgcaacttacgcaagcgctgttttggagctcgcaggggtaaaccaagttggagacacttcaaactgggcggttgtccacggagttgtgaagatgaataattccgcagatggctctaaatacgcaagtctattgataggaaggaatgaggaaattggaaagtttaaggattcgtacgtttcagtcggcggtttgagcggcaccggcagaatactcacaaaactaataagcgatgcttccaacgcggcgacttcgcatttgactttcacaaacgccgaaggggtaaacactgtctttaacgggtatattgccagaacaaataacacttacaaagacaatgtagcgtttataatggacggcgcggggacgcagactctttctctttcgggaaatacggcaggtatagtcggcgtgactataaaaaacggtacgctgtattacggtaatactgattcatccggtaagctggttatggaaggcggcaagtttggcgctgtaaacgggagcgcagagttcgattctgcagtctggagcggcggcaaaatatcttacgcaaaccacgaggcgtttcttggcggcacccccgaaatgataataataaacggagagtttgaaaaggcgccagacggacagattgctatcgacttcgagggattggacgcgacagactttattggggactccttctatttgatatcggcagacacgacaaagggatttttggacgatgcgaacgatgactttattgctgagaatctaaaaaatgcccttgcgaactttgcatggaacggcggaactctgcaagtgacgtttacgcaggttcccgaacccgcggagattgctgcatttattggggctcttgcgcttatatttgcaattcgccgcaggagaaaataacggcaacatatgttaaaaaagaaggggctcctattttatgagccctttttattgtttgtgaaaggagaatttcttgtccgcaggacgagtttgaaaataaaaaatacgctcaagccgatattttttgcgctctgcgaaaattgaagccggttttagccgacttccttcttacccaagacgaaaaaaaagtataaaaacggctcgccataaaattccccatgagaagttttggcatattggggaagcgcaccttttactttattggaagaattataagcgcgttttcgcgcctaatgccgcgccttgtgcgtggacaggggcgtttatcggcgcagtttgtcgggcaggatttttacaagctctttcaggttctgggcgcattgctttttgcagaccaaagtcgcgtcgggcgaatgcactacaataatgtcttcaactccaagcagggcagtggcgcgccccgcagcgtcaaatacgaggcagtctttagaatcctttgcgtagagctcgccaatgacggtgttgccgtccgcgtctttcgggcagtgacgctcgactgcagtccacgagccaacgtcgtcccagtcgaatttcgcgggaactgtccaagcgttgtcggcgcgctccatgacggaaaaatctatgctgattttttcgatttgcggatacagttcgctcgcagtcttgttgaaatcggccgcggactcgatgcgcctaagtatatctccggcgccattcaaatttttgtctatcgccgataaaatggaagacattttccatacgaatattccggcgttccaaaaaaactcgccgctgtttaaatactcggtcgccctttcaaggttcggtttctcgaaaaaacgggaaactttgtagtattcaccgccgccaaatttttcgcccttgcggatatatccataccccgtggcggggaatgtgggggttatgcctattgtgacgagcttgtctccgctttcggcgaggcggaaggcctcgccaagcgtctccgaaaacgcccgtacgtcctttacaacatggtccgagggcagcaccgcgaaagagcagtcgctacctccggaaatccttttcaggtaggcggcggaaaatccaatcgccgcggtggtgtcgcgcccggcgggctcaacgagaattttatcgcgcgctatttcggggcaggcaagcgttatcgcctctacttgctcggggttcgtgactacaaaaatattttcgccgcccacggtttcgcgcgccctactgtaagtcatagacaacaggcaggcgtcgcccccgacgacattccaaagatgcttgggtttgctcttgcggctcagcggccagaatctctctcccgcgccgcccgccattatcacaacgtatctttccatttgtttgcagttttttatatagtatccccgcatagcgacagcctgtcaaattttttgaaaaaatatagaaggggtttacgaaagaatttgcaaaattttttcaaggctgctataacccaataggaaaggcggtttgcatggcgaaacatttctggactatcctattggcaatttgctatctggttttattcgttgcgttatttttcctgttcgtttcggacaatttttattcgtataaaaattacggaagctttacatatttttcctacataccgtttggaatgtttgttgtatgcgcattggcggtctatgtattgtcggcgtttatgcggtttatcagcgcgagggtctcggttgcaatagtcttgggatttgccgttgcgtgggttgttgtgttgtcagacgctaaccttttttgcggaaggggaatacacaagagttttatgctgtcgatgtgggcgctctcgatggtttttctcgcgggggcgccggcaatgcttgccgcatgcgcgctttctattgcggagtctggaagggcgagaagatcgtgggtggtttgcgcgcttgcggcggcggtattcgcatatttttgcgcaatggaaatggcgggtatggctctgtttatagctgtgggggttgggattgcgctcgcagttttgtgggtcgcttctcgggtgcgcgggaaagcggcgagctgaaatatgttccctcgcaaaattcgcctccccaaaaattgcgcagcttttgcctttttatgaaaagtttgccaataaccccgttaaaatcccgctcgcgtcagcatcgactttttgtaaataatgtacaatgcccatgtcggctaattgcgggtgcttcgccccgaataaaggcataggtagaaccgaaggacatatttaatgcgctctcccgctgcggtgaatatgcgcgcgcctgaggttttagagcgttatttgccgggagtggcggcgctgtttggcgcgggttgcgggttttcccctttcatagcgcgtattgttctaacgcgcggcaggaagtacgccactatacccaaaagcgggaagaaagaacacaattcgtacacaaattctatgctcgaatggtcggctattttcccgagaactgcggacgatatccctgctatcccaaacgcaaacccgaaaaatatacccgaaacgagtccgactttcatgggcaataattcctgcgcataaacgagtatcgccgaaaacgccgaagatattataaagccaattatgatgcttagtacaaccgtccaagtcagatttgcgtaaggcatcatcagggcgaagggcgccgagccgagtatcgaccaccatatgacgagccttctgccgactttatcgcccacgggtccgccgattagcgtccccagcgccgccgaaaatagatatacaaaaagcaatacctgcgccgtttggacgcttgtcccaaactttgacatcaaataaaacgtgtagtagtttgaaatgctcaccgtatagaaattcttcgagaaaaccagaaacatcagtatgaacattacaaaccatactgttttcgacggcaaggttccgcccgtctgccctgcgggttgggcaggcggaagcgtttgggcttttctctccgatatttgcgccgagtaccacctgcacgcgggtatgagagcgataattgcaagagctgcgagaaccccgaactttgcgactccctcctgctgccttacaaaaagcgcggcaagcagcggtccgaaggaaaatccgcacgaccccccgacctgaaatatcgattgcgccaacccccgccgcccgcccgacgccagggaagttattctcgaagcctcagggtgtataatcgacgagcctatccccgaaacaaagacggcgcccataagcgcatgcacgctgcttgccacggaaatcagaataagcccgctcatagtgcaaagcattccaagcggaagaaaccaccctatcgggcgcttgtcgaatgcgtatccgaaaatcggctgcattatagacgcagaaatctgataggtaagtgctacaattcctatttctgcatatgagaggttgaggcttgttttaagcagcgggtaaatggcggagatgatagactgcattgcgtcgttgagcccgtgcgcgagcgacaacgccgcgagtatcccaatcataaaaccgccgcgagcattttttgacatatattgaatatccacccgctttaatccgaaagcaagcaatttgccttttgttgaacagtattttttaattgcggctatttttgttcccgagcgcgaaaagttaaatagtttcgttattatataatagagaggttcgggcgcggggaatcggaaatttttttgcaaattgaatttgcttggcgcggcgggcatttaccacagctcaaagggtgagggcggcggcaatggcagaattttcctagccttttttattctggaaatatttatgggtcataaatttttcgcgctgagaaattttatgtttttttgaatcttctatttgggattcggaatttttatagatattgatatgcgcgcgcatcttggcgaagcttgccaatcgggcattgtcggcgctttttggaggaaaaagtaagcggagatatttcttgcgaacgattcaatctcccaagcggttgcgatgtttgataatgcgcgtaaaatggggcgttcttcagcgcggcttttttgattgaaagcggattttgacagtgttattttttaaggcgacaaagatgaaaataaaaaggttgaagatagaaaacttccgcgggattgtcgatgatacgatagatttcgacccgtcgttcaccgtatttgccggccgcaacggaggagggaagtccacaatattggaggcgatagcgataatgctttcaaggatatccgggcggatgtcgggccgcacgggcgactgcacgtcgttgagggaccgcgacatcacttacggcaaagaccattgcatgctttccctaaccatatccgcccccgacgatacaataacccttacgctcggccgcgaccgccgaggcgtcgaaagcgaagactccgccgcggcggacgcatatgccgcaaaattgcgcggagtgttttcaaaagtggacgatccggactacgagcttcccgttttcgcacactacggttccgacaggaacacaacgagcttttctgcgccacttccgtccgagggggcgaacagaatgggcgtatataaaaacgcattttccgcggggacgaattttgacgacttctccgcgtggtttaccgccgcgcttctcgagcgcgagtttgccgtcgcggaggcctccagaatgcccctaaaacgcggcaaccgcgcgagggaggaaatcgaaaaaaaatacgggttcatcgctttgataaagaaggcgctgaaagatttttcaccgtcgcttgaaggcttttatgtagagggaggcaggctttttgtgcggccgcgcgacattccggcggagtacctttctcagggggaaaagagcgtaattgttctcatcgccgacatcgcaatccgaatggcgggcgcaaacccaaatatgaaaaatccgctcgcgacggacgcgattataatgatagacgaagtcgatctgcatttgcatccggattggcagtccagaatagtcgaggagctgccaaaaatgttcccgaagacgcaatttatagtgtcgtcgcattcgccttccgttttttcggttgtgaaatcgctgtacaggctcgcagacggggcggacggcgtgacgcgcatagagcatacctcccaatacggccgcgcgccggccgacattctcggtacttttttgcacgccgacagggaaagctcctttaagcgcgaaatagacgccatgtacgcggctctcgacaagggcgactccgcaaaggcgttaaaaataatcgggcggctgcgcaaagtcattccggacgatccggaaatattgcgcggtgaatatctggcgcgcgcgatggaatcggcaaacggcaaagacaatgcggcacattgaaaaaccccgcgagagcgaggcgccggaggcgttcaaggcatggaagcttaggcacccgaactccaaatactaccgtttcaaagacgcgcgcataaagaggattgtcaaaaactccctcattgtgcgccaaaagtatttatgctgctattgcgagtcgcgcatagacgagaacaattcgcacatagaacatatagagccgcaaatgggcgggctttcggaaaacagcatggactattccaatatggcggcatcctgcatacgcgatccgaaaaaaaatgagcccaatttcattcccaaaacttttgacgagcttgttggggtgactctgcactgcggacacgcgcgcggctgcaaccgcgtcgtatcgccgtacgatccgcgctgcgagaaattctttgaatattctttttccggcaaagtgagtgtttcggagtccctgaccgatcccgacgagatagagcttgcgcgcgacagcatagaatatttgcgcctgaacgtgccttcgcttgtcctattgaggagaatcgcgatgtttgaggcggtaaaaatgctcggcgagggcaactctccggaattcatattggcggaaataaagggcaagctgcctccgtactattccgccgcaaagaccgcaatagagaaaactttgcgcgcgcaatttgcttgaaggttttgggcgatagtcgaatatcaataaaatatgcgggagaaatacggaatattgatagggcgctccgagataacaaggagagtcggggaactcgcggtagacatcagaaagtgggcgggcgagtcggcggctccgatatgcgccgtttggctggcggagggcgcgatgttttttgcggcggacttgctgcgcgggctgtcgggctgcggtctggaaatattctcggtgaaagtttcttcttacggagactcgctctcgccggaggggcgcccgaaaatattgacgccgctcccggacgttgcgggaatgcgcgcgctgttaatagacgatgtgctcgataccggggcgactgtcgcggaagtttcccgcgcgttgctcgaacgcggcgcgaaagaggttaaaatctgcgtattgctcgacaagcgcgtgcctggcgaaaagcgcgcggttgcggattttgtaggctttaaaacggaagggcgctttgctttcggatacggaatggacttgcgcggaaaaatgcgcgagctcccggatataatggcacttcaaaagtcggagtaaacatgcatataggatgtcatttatcgttctctaagggatatgcggctatgggcaaaaaagctctcgagctgggcgcagactgcttccagtttttcagccgcaacccgcgcggcggcgcggcaaaagctttcgaccgcgacgacgcgctcgcgctaaaaaaaatatcggaagaaaattcgttcgggccgatgctcgtgcatgccccgtacactttcaacccgtgctctgccgacgagtccctgcgcaaattcgcgtttgaagcgatgtgcgaggatatcgaaaaactcgaattgtttgaaggcgcgctttacaacttccacccgggctctcatgtcgggcagggtgtcgaaaagggaatagaactcacggcggaaatgctttcgcgcataggtgaacgcaatttctcggcgggcgtgcttgttgagacgatgtcgggaaagggcagcgagataggctcgacctttgaggaagtcgccgcaattatcgagaagtcggggggattcgcaggcgtatgtctcgacacttgccatatttattcggcagggtacgacatcgttgaaaatctcgacgccgttctcgaagaatttgacaaaactatcggcattgaaaggctcaaagccgtccatctgaacgacagcatgactcccttcgcatcaaagaaggacaggcatgcaaaactcggtgaaggttcaatcggattggcggccatagaaaggcttgtaaaccatccgctgttaaacagtctgccgtattatctcgaaactccaaacggcgaggccggatatgcgcgggagattgctctcgtgcggtcgatggagaaacgcgggtgaaaacgggctctacccgcaaggcgggtaaacgcccgagaaaatcccgccgcgccggcgcgtttttcgcgcgtgtgtgcgcgtctttgccggcaattcttgcctttttattgcgcgcattgtggggcatttttaaatttctcgtaaaattgtcgcgcaaatataaattcggcgcggcgattgtattagccgcagttgcgctattgatagttgcccattgcaggaagccgcgcggctatgtgaaaacgccggaggaaacagcgtatatcgagcggctgcgcaagaaatatgcggtggcggagcggaagttgggtatcgaagccgcgctgaaaattatccgctcggcttgcggatttataacccgcgctgacaacgctccgaaagggctttacgactccgaggaagctgaactgttgcttttgggaaccgccctcgttgaaagcgatctcgccccgcgcttccaacagtcgcgcggagacgccattgggctattccaaatagagtacggaactttccgcgatctctgggacaggtccataaaatacaagcacccaaaactctattccgcaattatccgcgaattcggaggctcaaaggcgtcgatagattttgaggacctgcaaaaaaacgacgtcctatgcgcaatttttgcccgcatgaaatacgcggaatttcccgacaaaattccgtccgatgccaaggggcgcgccgcctattataaaaagttcttcaacacccaatacggggcctcgaaagaatcagtgtatatttccaagaaagaaaaggctctctcttcctcaaaaaataaaaaactctttcaaaactggaaattgaattctaaaaaataaaaattctcagcgccgtaaaaggcggatttaaaaatcccgctgaggctcgcaccaaaagcagtctggcgctcttttgcggagcgcaaaatttaagtgtcggggttgagcacgaacatctggcagttggcgcagtcgaacctgagcggaaatttgccgtcgcgcgattttaggaaaaacggctccgaaaatctgcggtcaattttgccttccttgcggcacatgccaagctcccgcaagatgcagtggcgcgtgcgcattagcggaatctgtgagatgtcaccacctgcctcgggtgcgcgcgccaatattttgaatcccatttcggcgtacatattttcggcctcgcggttggcgatatttgtgcgggcgtcggtttcaaacggcggcttggagaactttattttgcgcggtagcgggcgctcataagatagcctttgcttttcgtattcttcgagaatccgcgttttcagcccctcggcaagctcgcgccgcagtgcgcctatctttgagacaggcatatggggaagggcgccgcactcgattttcggctcagcgcactcaaacggcgtgtcgccgagcctcgaaagcgcctgtaaaaatttattcttttccgacaaaaaatttttcgactcctcaaagtccgacttgcgctcttttagagagaatgtaatgccgcggttgtcggaagtagaaattgagaacaaataaaattcgcctgcgtcggagacggatatttgcacaggcattttgcgcgaaatttttcccgcaagagccctttcaaattttacgtcgcggttgcgccatattttcgcacggggcgggatgcaaagcctctctcccggccgcccgatttttacagtatctgcctcgactgcgctgacgcccgcgccgaatcctccgccaagcgccgtctcgaaaaaaaggccgtcgccgtttgaaaatatcttttcggcgtttttcattttaaatccgccagggaaaaccgcttctgcctcgcccaaaaattcgccgagtgccttaggtgtagaaaaacttccgcaccctttctctatgccgcgcaagtggtacagacagaattggcggttgaaagttttttgcaggtcgggggaaaattccgtgcggctctccccgtacgacgcgcggggaagcccgcgttttttcagctgttcgtcgagcgcggcgcggtatgcggcggtcgcgtttttaacatatccgtaatcttttagccgcccttctatttttaatatgcgcgcgcctgcgtctatcatatcggacagcgccgaaattctattcatgtcgcgcaggctcaaataatggcgaggcggggctatctccgccccgtttgcgtctataaattcatagagcattctgcaaggctgggcgcactccccgcggtttccgctacgcccgcctatcttgtagcttaaatagcattgcccgctgtatgaaacgcacagcgccccgtggacaaaacactctatcggaactcctacggctcccgccgcctcagatatgccttcgagcggagtttccctcgcaagcacgactgccgcaaatccggcggcttcaagaaatctcgccttgtcggcggagtcggcgtggcattgggtgcttgcgtggaattttatgcgcctcgacgccacttttaaaagacccaagtcttgggcgataatcgcgtcggctccggcgtcccagagttcctcagccatttttgctgccctcggaagctcggcgtcgtagagtatggtgttgagcgcaacgtaaactttgcagccgtacaggtgcgcaaactcgcagagcttttttatgtcttcggcggagtttgccgcgctcttgcgcgccccaaactcgggagcgccgatgtaaacggcgtcggctccggataaaattgcgtctatggcagtcggcaggtcgcgcgcgggactaagcagtttgggtatcatttctcttcggcgttcttcccgccccaaaatagggccgccgcgcacattactgtaagaatcccgagcgcaagccaaccatccgtcattccagccccgccgagaatgccgcgcgggccgttttgcgtaatgtcgaataccttgcggtatatcatcaggcagaatacaagtccaccgtgaaagcctatgcacggccaaagcgacttagttttaatatacaaaatgcacaaaaacgccccaaacataaacaatccggcaaattgcgtgaagctgaagttgtaagcgatgccgacggtgtcgtaccatgcgacaaaaaatcccatatcccaagtcgcgctcccgcctcccggcaaatggctccatatcgacgacggaactttaaaatgcttgtatgcgaaaaaaagcgagctcaaaattatcgcagtaatagggcctgccgccgtataaaaagagcgcataattagccccctcattattatttcttcaagaagcgccacaacaagagcgcccgtcaatgccccacatatggccgaaattattgcggatttttcaaattcaggatcgggcgaagaaaccccaaatgcccattgcaacccgaatattcccgccgcaagaataatcccgaacgcaaagaacccaatgaatgaaagcagggatttgcggtcgaatctaagcccgaggtttgatagggaaaataatccgcactctttcatcatccacgggaaccctattattattggaacccatcttatcctgtcgtagaatatgtcgagcctcttgcctaaaagccacgtagttgtttcggaaggattgacggaatgcagccactcgacagcccaatatacgggcggcgtcagtatcgacgcgacgagcgtcgcccccaaatatataaataggaaaaggccgacacccctcattgaatgttcttcggctgacaatccgaaaaacatcatttctttctcgcgcttcaatatcatattgttgagtctgacccaaaaaaaatttttttcaacgaattttaaacgggagttgattgagatttttattgaacggcattcttcgatgtgttagcaatcttttatgaagcgaattgcttgtattttcacggtgtatgccgcgctatttttttgtgctaactcttttgcgtcagtgtccattggggcggacgaatctaagattgcagttgaggtttatgtgtcctcaagcgcgggagacgactctaacgacggttctaaaagtaagccttttaaaacattttccaaaattccgagaaaaaacgcccggatttttctaaaacgcggggacgttttttatgagcccctaagtggcctcgaaaactgcgtagttgattcctatccgaacaacggaaatagactgccagtaatatgcgggttgcgttttataaaaaatccttctgcatgggaaaatatgggcggcggcatatggaggctcgacatgaatgccgacgccaattttagcgggcgcaatccccccgccgccacacgcggaaacctttttaacaatataggcggtatttacgacgcgtcttccgacactctgcacgggcgagtccttaaaaaacattccgacttgaaggataattgggatatgatatcatcccccgaatttcgtaaagacaaggtgacggaccagactttcagatacctgtacctgaagctcgatgaaaaccccgccaaatatggcgattcactcgccctcatgacatacggcaacggagtcagcaacattagaaattgcaccgtgcgcaatatagcaattaaggggttcggacgccacggcctcactggctgctcaggcggaaaaatagaaaatctcgagatagatttaatcggcggaagcgttttggtcggtttcccgaattgggtacgcctcggcaacggaatagagttttggatttcgggagggccaaacagcaatatacacaaccgcgtctctaactgcactataagtcgcacattcgactgcggctccacaattcaggggcgcacggacaacggaaatgccctcgcgctcgacatagtctttaccggcaataaatactatcggtgcaggcaggcgttcgagcattggctcgcgagttccggcaacgggcccattgaataccgcgactgcaaattcgtgcgcaatttcgcttgggaaatgggtgaaaacgagttcgactccccgtacctccaagacctgaatttccttacatacgacagaggagttgccgcaatgacaatccgcgaaaacgtctgctatggcgcgggcgcgtacacgggaatcccaaactggtccaccgacttcggcgacaacactttctatgttttgcgcgggaagccccttgtcgcggtgttgcgcggttccggcaatattgtagtaaacgccgaatccgatgcggatatagaaaaatacaggcaaattaccggcgacaaaaccagcaaaatttttattgtcgaaaaggacgattctgcgctgagagacaagctcttaaaaggcgatttcaaatatgtgcgaaattttcttaataaaaaaagcaataataaaagggagagtaaatgaacttaattaaagccatagcatgcgcggcttcgattctcgcgctgactccgatcttcgcccaggaatacggcgcggacgaatcgcaaatagcaacagttgtctatgtgtcgtcgagcgcaggggacgactccaacgacggctccatgaaaagtccgcttaagacattcgcgaaaattccaaaagaaaacgcgcgcattctccttaaaaagggcgacgtattttacgaaccgttgtcgggtctaagcaactgcgtggttgactcgtacggaaagggctcgaaatatcccgttatatgcggcctcaaactccttaaaaatccagatgcgtgggaggacatgggcaacggcgtatggcgcctcgacatgaacaagaccgagaatttctacgggcgcaatcttgaaatcaccaagggaaattaccagctcaacaacctcggagccctctacgacgccgcaagcgatacggtttacgggcataaagtaaaaaagctcgaaatgcttgaaaaagattgggacatcacaaccggtgaaatatacaagcccaaggacgtcaatgccgagagctaccgctggctgtatgtaaagcatgataaaaacccctcctccgacggcgccgagcttggcatactgacgtacggcaacggagtcagcggcattaaaaactgcaccgtgcgcaatatcgcaatcaagggattcgggcgccacggactcactggatcgttcggcgggaagattgaaaatgtgaaaatagacctaatcggcggaagcacgcaggtcggatatagaacatgggttcgtctcggcaacggaatcgaattctggatttccgggtctccgtcttccaacaatagaaaccacgtctctggctgcacaataagccgcacttacgactgcggttccacaattcagggaatagtcgaaaaaggggaaattgtcgcgagcgacattacctttaccggcaataaattctaccgctgccgccaggcgttcgagcacttcctctcaaaccgcgctaacggaagatcggaatatataaactgccactttgagggaaattttgcatgggaaatgggtgaaaacgaattttcaactccggaaccccgcgacaacaacttcctgacctacgacaacaagcgcaagggaatgataattaaaaacaatgtctgctacggttccggaatttacgcgggcacgcgcggctgggccgagcatttcggcgaaaatacgttctacgtggaacaaggcaaacacaatctcctctttgtctatccgtggaataagcagggtatagaaataccgtccaactcggaagccgacatacaaaaataccgcgaaacgctcggagatacgacaagcaaaatcattcttgtccccgaagccgagattgctgaaacacgcagcaaccttatgaaagaggatttcaaatacgtaaagaagttcctaaaacgcggcgcgcttagcaagtagccatcagcttcaacgcgcaataacgaaacgcggcgggattttccccgccgcgctttgcgtttctttttttcgaaatcaaaaaatttctgcgcgcctatgttccgctttccttcctgacccctattagatattccgtattcccgtcgccacccaatatgggtgaaggcatactgccgattatccgggcgccgcgaaaattatccgatatgtagcttgttattttctcaaacgcgatagcgctttcttcggggcgcaacactccctttcggattcttgcgagctttgggtcgctttcgaactggggctttatgaggcacacggcgattccaccgtcggaaagtaagccccacagattcccgaacaccttttcaagcgatatgaaagacaaatccgcgcatataaaatcaaatttcccgcctccgaaagacgatggcgacaatgagcgtatgtcggtcttttccatattttttacgcgggcgtccgccgacagctttgggtggagctgtccgcttccgatgtccacgcatacgctcgatgcggccccgcgcgacagggcgcagtcggtaaagccgccggtagaagcgccggcatcgagtatatcgacgccgcgtaggtctataccaaatctgtccaaaaacgcctccaatttcaatccggcacgcgacacgtacctcgactctggcgcgtctgccgagatttcgaggactgcgttttcaggaagtttccgcgacggcttgtcgattacttttccctcgaatttaacccgtcccgcctctatgagggcgcgggctttcgagcggcttggggcgagcccgctttccgccataatttcgtcggcgcgtttcatttgccgcccttgggtatatatatgacctgcacgtcgcgcgcgtcggcagggcgctgggccgctttcttttcaagcgtatcgacacctttcccggcttccgtagcgagagtccaaacgagcgccgccgtcccaaaaagcattgcggcagccacaaagataccgattgccaagcgcacggcttccagcgtatctgagcgcgcgcttttgcccttgtggaatttaagggaaggcattgtgcctttgcccctgcccacgagcttttcggaaacttttctcagtttgttttcgtcgataatcatattttccaaaaaaattatcgcccgcgggaaatgtttttcaaacatatattgtttatttgacaattatgcgggccaagtaataattttgtggaatacgtaagggcggaacgtataactttttctgcggggggagaggttcacgcgggagtgttccgcgtcagattgtaaaattatgaaaaaaataacactattgatagttgcgctattgtttgcgcaagccgttttcgcggaaataaaaatgccgaagattttttcggacaatatggtcttgcagcgcggcgagcaggtaagggtatggggaaaggcatctccagacgcagacgtgcgcgtggagtttgcgggaaagaatgtttcggcgaaggcggacaaagacggaaaatggtctctatttctcccccctctggaaacttccgcccagcctcgggaaatgctcgtatttgaaaacggcgcggtgtcgaaaaaaatcggcggtattttggtcggggaagtttggattaccggcgggcagagcaatatgcaattcggggcaaactcgatgataggctcaaaagaggaattggagaatttgccaaagaaccttcgctatttcgcccaagacagcggaaaaataagcgaaactccgctctcggatttcgcagggtgggcgcaatggctcgtggcggggaaagacaagcttggaaattcaaacgctatcgcgctgttttttggctcgcgcatatcaaaggcactgggggatatacccgtaggtatagttgaaagctcccgcgggggcacgcgaatggtcggatggactccc

SEQ ID NO: 2813 - DNA, 4756 bp, Unknown
  16S sequences of unknown bacteria
ggcgggcggcgggtaatgcgtgtatgcgcttgccgccgtagcgtcctcgctctcctgcgcgagaggggcaatctctcccgcgcgccgtgacgcgtcgttaaattcctgtgctgtgaaaaaaaggaacgggggacacggcgtagacggaaaacggcgaaacggggaatttactttgacatttttttcaaaaacgtgtatactgtaagaaaaataattgacggagaaaaaaatggacgaaaagccgtttgaaaaaattatcgaaaaggagttcgcttttcttttcgaggcagggttttgttacgaatatacctacgataaaggctcggattcctcctgcgtgtatatctatcgtttccgccgcgggcgggactttttcgattttcgcaccgtttcgggcggcaaggagagaaatacggtggcgtttgcaaacggacagtacgtttttccgaatctgaaactccgccataaaaaggcttttggcgcctttcatcgcaaacactttttcaaaaaggcgacggacgaagaactttgggcgtttgccgcgcagcttttaaaagcggaaagcgagtcgggcacgctgttcggaatcccgcttgactgaacgccccctcggaccgcttttctctcggcaagagaaaaagcggcccggattcgtttttgcggcgtgcggaaaaatccgtctgaaatttttttcggcacgctctgaaaaaaactgccaataaaaagggcgattcgttcgtttaataaataagggaagaatttgggaacaggaaacgcatgaacaaacaggggctggacgtactgatgaagaaggttgccgatggcgacaacgaggcgtttgcacggctttacgacgaggtcaaaaagggcgtgtttgcttttgcgtactcttatttgcgctgcgcggcggacgcggaggacgtgaccgaggaggtatttttcgccgtcaagcgcaaggcgtatctgtatcggccgggaacggacgcgcgggcgtggatattccagatcgccaaaaatttatcgctagacgaactgcgaaggcgaaaacggcgcgcggagcctctggaagaggcgggggagccggccgttccgccccgtttgcccgcgctggatcttttgacgaagtgcctcgacgaaacggaacgggaaatcgtgttgctgcacgcggtatggggatataagcatcgggaaatcgcgcagatgaagggaatgcccctcggcacggtcacatggaaatacaacgccgcgctggaaaaactcagaaaggagtgggaggaatcatgaaagaatcggattttttcaaacaactcaatcgtgaacttcaatacgccgctcctcccctgtccgagcgtctgaaagaggagccgatttgttccgtttcccgcgaaaagaggggcaacgggcgggattcccgcatccgcaggagaacggcggggcgcgtttcgaagaaaagactcacggcgatactcgcttcggctgccgcactgatcctcgtctgtatcgtcgggctcaccgcgtttttcttgggaccttccgtttccccgacggtctatgcctgtatgtatatcgacatcaacccttccctcgcgctgacgctggacgaaaattataacgtccgcaaggtcgtttcccgcaacgcggatgcggatacgctgatcggcgacgaatcgttcgtttcttccctgacaggcttgtccgcgcaggaggccgccgtcaaggtggcggagagggcggcaaagagcggttatctttctctccgcggctcgggcagcaaagacgattataacgagatcggcgtgaccgttcggagcaatgcggcggtgaaggaagaaacactcaattccatcgaggaaaaattggtcggatttttctgcgaaaacggcgtttacgtgtacgtaaacgcgcgctcggaaacggacttggaaacggcgtcgcacaatcgggctttggaaagccgtcccgtttcctatctccgatggacggcggactcgcagagcctgtccgaactggaacggctggtcgaagacacgatttacggctatgcggcggatcttttgacggacgctctctataaatacgacttgtttgcccggatagaggctctcaatcggcggatcaaagaggatcccgaaaatctcttgaatctcggctattggctggtgaatgcggaactgaacgagtccgtgcatgagttgtcggcggagatggcgccgctgctggaagagctccatctcctttacggcgtggattgccgggaacgcagcgtcgaggcgtttgcccgctatacggcgacttacacggcgtatcagacggcgatcgtcgcggcggacgtcgattcgcttcggactcttttaaaaaacggcatttcggaggctactttcggagggatagaaaatttttccgttcgcctcaattatttttattttgtttccaacgatcttctcaacaagattgcgacggaaatctggaacggagccgccctcacggcggaaaaactcctttcggatgcgggcgaactgatcaaagaccgtgctgcggcgcttacggagagatattcggcgctcttttccctcgaacgggagcctatcgacgaagaagcctatgcgcggtttttagagcgaatcggcaaataaccttttttccccgcccgtttaaccggcgggggatatggatagggggatgggcgccaacggaaatttctccgttctcggcagccttggagggggtgaatatttttttaacgctccataccgtctttgaaaaagcctttttaaaaggaaacgcttacggacgaatatttttgccgatttttaatcggaaaaagccgcgccgtgcgcgtttttacggttactttcggtaagaacgagccccgccgcgccgctttccctgttttttggacgcgaaaataattctcgccgcgtttttttaatcctcttttgtaggcggggcagtgttttcgtggagcctcttttcgaggaatcccgctttgaaaaaaagaccgttcgttccgccccgtctttcgcttgcgttttttcgttttcctttttcatcttctcttttaggaatcgcgcgtccttgaaaactcaaaaaaattttttatattttcccaataaaatcctcttttgtttcgtttattatatgaatccgaaaatgaatcggaagaaaaaattgaaaaaagaaagaggtgttttttatgaaaggtctgaaatatgtcgccgccgggctttccggcgtcctgttcatctctctttgcgcgggttgcgccgcgaaagaaagcaaagacgaaggagcggtttcttacgtcggaatcgacgttaatccttccgtttccctcgtgctcgacaaaaataataaggtcgtttccgtgatcgccgaaaacgaagacgcgcaggtgcttctctacggcgaggcttctcttgtggggatgagcgcggaagacgcggcgaaaaaaatcgcggagctttccgtgcgattgggctatctcggcgaggataatcacggcgtcaatattacggtggagggcaaggcgaacgcggaaaagctcacggacggcatcgaagcggcgtttacggcttccgcggaaggactggaactcaatttctcttccgaagggacgttttcgatcaaccgcgaattgaaagccgtcaacgcggaatataatttaaacctttccgtcggcaaattcaaattgattttggaggcgcaggcggcggacaaaacgctgacggtggatgcggctgcggatatggacgtgtcggaactgctcgacattgtcgcttcggcggcggaaaccatagagccttacgccacggaagcgtacaatacggcgaaagcggcggcttcctatacttatgaaatggcgaaagggcaggtcctcgacgctctttggctgactccgtatctcaaatatacgggtgagatcctttcgggaacgcgggtgaattacggcttgatctacaatacgtacgccgcttccgtccgcgccatgacggcgggactcgacgcggcagaagccgcggcgaaaacggctgccgaaacgcccgtttccgatacgacgcttgacgcgattgcggcggcgttggatatgaccgaggaagaaaaagcggcgtttatcgcggacgtcgcggcgggaggaaagacggtcgcggctctggataaatatttcgacgtttattttaaaaacatgaccgccgacgagcgcaaagccgccgaggaaaagatgaacgaggtgacggcgaaggtgcaggcggaggcggataagatcgacgcggcgattgcacaggaatataaggacgcgctcaacaggctctgcaaggatctcacggcgctcattcccgactcgattctcggtacggcaaacgtatatctcaccgaatttaaggcgctcgtaaacgacgtgcaaaaggcggcggacggtaaagagccgatggcggcggcttatgcggcgaaagaggcgatcgccgcccgttcggaaaaggtgatggaggcgatgaaagccgacctgacgcaggaagaagtggacggcgtgaacgcggcgacggaaaagttgcaggatacgctggcttccatagaaaaaacatataacgacgctctcgcaaaagccgaacagacggcgaaagaatatctggcctccttgaaggcggaaagaacgaaaaaggcttcttgacccgtttttctcctttgcttacacgcataatatatgttcccgttccgcctttcccgggcggaacatcccgaaagcgccgtgcgaatcgct

SEQ ID NO: 2814 - DNA, 32759 bp, Unknown
  16S sequences of unknown bacteria
tgcaggttcttccgcttcgggcacaggctcctccgtgagcgctgtttcggcaggagtctcgctttctgcagggctctcgtccgctgtctttttcttagccgcaaacaatacgatgtcggtcacgccgaccgccaggcaggcggcgccgagcacggccgccgcaatgatctgccaggctgggacagaagaagccaaaatcatcatcgatataatactattcatagcgttcagttgctcctccctttacggcgttttgcgatcgcgaccgccattacgacgatctctgcagccagcaggcacgcaagcacgacgatgacccacacgatactgctttcgcccgctccctgcgtaataaacaggaagtcggacaggctgtctgtcgtaaacactgcatatccgtcctgcacggtatattcgatctccgtccatgcaccgccgtgcagatgcagcagcgtatgtccgccggccgcgagcgcatccgtaaggcgtatcctgaccgtgatctccccgtccggctgtaccgccgtttctccgttcataaggctgatatcgtagccgcgcacaatctccgcattttcatatgcgctcagatcgtattcgccgtagccggcttcatctatcgaagcaacggtaagcacataatcgggatgcaggccgccggcggccgtcacgatcacatcgggataacggctctcgctttccgcagtccagctttccaattctgccaggcggagcgtccactccagcgtgattgcgccgtccgtgccgtctgcccaactgtaatttgcggtatccgcaaggtggatcgtgacgcggtaaacccctgccgcagccgccgtcagatacgtcttgccgcctgtttcggtaatgccgctttccagatcggttgcgcgcatcactgagccgtcgaacccgacgatctcgttatgaagcgtatcgcccgtttcgatcgccgcatcggcaggatcggagagcacgggtttcgcaacggagcgccttccgatctcaaaacggaccgccgcgctcgtcgccgaagaatagtttgccgttcccgctatgcgcacgcgcacccagtactcgcctgcattctgcggaacggtctgcgtatacgtaccgttttcgaccgccgagtattcaaagatgacgccgcctgcttcagagaacttcgcgcggtataccggcactgccgcagcatcgccgtacgtccagccggccgcatcggtgatctcggcactgttctgcgccgcagtgatcacgaatgaaagcgtgagtgagggcgcgctgacttctgcgccgttgtagaaccatacataattgttttcgctgccgccgacgaaagcaaagacaacctcgtagctgccggcgccgatgccgccgttgttttccacttcgtacacaccggccgccgcgccttcgacggaaatatctgccgtctgcgtttcgccgttatactctttggatgcaatcgcgccgacttctacatacgccctggatatgatgaacgcggccgtgttgctcccggatatctgataattgcggcttccgatcgatgccgttacgatatacgagccggcgttttcaggcacttgcttaccgtaatcctgcgccgttccgccgttgggcgtaccggcataggtgagcgtcacttctattccgagcggttcgctctgtcctgccctgactgcatatgcttccgctgccggtgcgcttccgtatgcgccgccgttcggcgtgatgacgacattaacgtctatgggcgtgatcgtaaagagcgcgctccgcgtaaacgttacgtcaaaattcttattcgtccagtcggcagtaatggcgtacgtgccggcatcgacggaatccgcagggatctgcagcgttatgccgagatcctgcccgtataattcgccgcgcacggcatactttgatgcatccgccgaaaccggttcgccggtaaattctgcagtttggtcttcgacctctaccgtcactctcgccggggagatcgtgcgcacagcctcagccccggatacgattttataatttttcgcatacgtgtcttctgccgagaacgctgcggtaaaggtataatccccggcatcggcaaacttgccgctgtcgttcagcgtgactgtgagcttccgcgtgcctgctccgaacaggagctgatacgaggcttcggggaatttcttttcctgcgcatcatatacgagatcttccgccccgttccagacaaccgaaacctccgcaggagagatctcgaaggattgcccgtacgtatattcaatcccttcgtaattgtctgtaccggcaacgctgatacgcacataatatgtgcctgcgtcggtcgcgttttcaaattctccttcaaacggaaccgaacagtcgctgtcgaggaagtattctaccaaaggcgtaccgaaagccgctgacggcagagtttccgccgaagggtcttcgccgtacgtccagccgctgcgcgcataactgccgagccactcgtttgccgccttcgtgatcttccaatccatcgtgacaggtgcagtgccgctcgcagtgtcgctcgttgcccagacgtaattgagcggatcgcgcagggtagccgttgcggtgtacgtatccgcgtctatgccgctcgtgccgctgacgctgtaatacgccctgtgttcgctgtccgtatatgtataggtgatggtactgctggtataaccgcgttcaaatccgctttcaaatacgggcgccgtgacggcgaacggctgaatggtccaccccacgcgctgtgcttccgtcgaagccgaaccgtcggaaagattccagcagtaattctctgtatcggtaagcgcgatcacgatataatgctccgcgctcacgatattgccctgcagcacccaggcgccgtcaatataggcgagcgtgacgtgcgagcagttgctgagctgccgcatcgtgctgccgtcatagcctgccagaggcgtgctgaccgtaacgccgtgcgcatactgcgaatcttcagctgtcggcacgtcgagcgccttgcggcggaccgtgtattcgacccagttgaacacagtctggccgtagttcggatcgtctaccgccgcgcacacgcggaaaacgcctgcggtaaagtagctgcttgcagtttcccatccgtcgccgatctttttattgaagtcgaatctgacgctgccggaatatgtctgcccgttgccgaaggtggcttcgtacccgatatcatcggccccgaaagattctccgtacgtcagttcatacgggagctgcgtaacgccttcgccgatgtcgtacttcgttccgtttatcgttacggatgtgatgcgtatctccacttcgccgtacagcgtgagcgaccacgatacggtgatctccgcgctgtcgggatgcgcttcgcccgcatcggtgaaccagacgtaattatcggccttctgcagcacaaacgttgccgaatatctaccggcgaccgaggccgacatggtaaacgtatttccgccgaccacgccggaagaaagtatgacgccgccgttggatgcgctcgccgagccttctttataactgatcgccgcagggttgaattctgcggaagcgatataggtgctgccgtccgcctgcgtcgtatctttgcctattccctcgatgaggaaccgcggcgcatcggcgcgctgtttgaggatgcggtacgtcatatcgatatataccgcaccgtcttcgcctgccgcgccgctggccagagtataattgccgctcgtcagcgcgatgcgcacggtgtacgtaccgggaaggacaggattcgccgcagaagggctttctgccgtatacgaccagctactgtcatacgacgtgccgaaataggtataggcgaacgtgccgatatcttccagctgttcccctgtgacaagaccgcctgcagggacggctatgaccttcgccgcgacgaccgcaagggcttcgtcggccggcaggatgccgccgtcatacatgccgtagatcgtctgcgatgtgaaattgccgttttcgtatgcgttcgtggtgacggagatctcgcgcctgaggacctggatatagccctgcgcttcttcctgcgcgttggcaaacacgtaattgtcaaattccgcatgcgccagcttgatgttcagcgtgctgcctgccgcggtaggcgtgccgccgctgtacgtataccgatactcatggctgaccgaaagcgcgctcttaatgccggcgatgaatgcttcctcatcgtcttcgcgaacgcctctcacgcgcacgttttcaatgatctcgctttcgggcagttcgttgccgtagcggaccgttacgggctgcaggccgtcttcgccgtcatccgcatcgaccgtaatggtcagttcggcttttgcgacggtaaacgcgaagctgtcgccctcaaacaaatagtttgatccgaccgcatcgtcctgtgcgatcgaaacggtgtaatagcccgctctgatgacatcgtcctgcgtgacggtgcttgcggaaccgccctgcgttttgctgaacatgaccgtgtattcgaagccgatatgttcacccaccgtttcgccggaaacgagaccgttcacatgctcttctccgatcgcctgccaatgattccggttctcatattcaagtccggagaacaggctctcgtacaaatctttcagcgtgacggtgcgccgaatgacggtaaagccgccgtataagccgccgtcctgatcataattataagttacatactcaaacgcatagttagccgccgtgagccctgccgccgtaacggcgaccctggtacctgcccgcgtgccgtcgacgcctgccgtatatgtatacgtgtatcttacgccgtctttattgaccttgctctcatcctctccgtcggcaaagacgcccgtgccggcgttcttgcgttcgtaatgcagggtaaagccttcatcgatcgcatccttcgcggtgccgtattcgacctccctgtgcgccacggacacaagcagcacacgcggcgtgatcgtatacacgccccagccggcgccttcgttctcctcattccggaagtcgatatcgtaattgaagctgcgcggacctgccgccgttccggtgatgtggtaatagccgtttgcaggagaaagtttcgttgcatcggtgctcagcgagaacacgtcggaagcggcgtcgtacagcgaagcttcgtcgtaaatacacgttaacgcagcgatgtcgtcgccgtattcgcccgtcttgttttcaatctccacaacgagtttcgcgcgggcgatctcatattccgcggtcctttgggacagcacatccggcagtttgtaatttccgtcttccgttttgaagtctgcgataaagatatagcgcccggcgtctttatacgtatctgcgtccgcaggcgaagaagagatcgccccgttcacatacgcgtagtattcgtccagcgtgacggcaagttcgacgcggtgctcggctgcatcgctcatgctgccgccgacccactgataatagtaggccttgatctcgccgatatggtcctgcccgtcatactttctgccggcgccttcccacacgacttcgatcgtgcgcggcgatatgatcagatcgctgctgacgacggcaggcaggtagttcgcatcctccgtataaacgcggacatcgtaagtgcctgcatttacgggcagttcatctgtccagttttgcgttccgagcggtgcatactgtacgacaaagtcgaccacatctcctgtgacaatgtcgtcttcattgatgtccgccgtcacttgatagccccgccccgtatacgggtgatcgccgctgagtccgctgatgtcaaagctgaccggtttctgccctaccgtgtgcataccggcggactttttctgctgggtgacgggatcggtataatctccgctgaaactgacgatgtagtttgcgttgatacccgcaccaacgatataatagacgccctggtccgccgtgggcccgaattctacggtctgcgacaaggctgcgctgtacgcggacagcgagaacacaccgctcttttcatctccggcaactatcgcatcccccgtgacccggccgctctgcgtgctgctgaagctgatgttgacatcggacgcatgcagagcgtacagatctttctctgtgccgtaaaccgtattgatattcgatgcgatcaaaacggtgatctcgcgtgcttcgacacggagcgtgccttctgccgcggtaaacacgtagttcttgaatttatccgccagagaagagctgaccgaaacggttatggtatagtcgcctgccgcgccgtattccgcgccgggctgataatccgcgccgtctttccgataggcgaacgtaaggccgataccgacagattccgcattttctccgggggcaaaggctgacgcgtatgcgtcgtccgtgctcatatagctgacggtgccgtccgttacagcctcgccgtagacggcagaattttcattcggcgtaacggtgaccgggcgccgcgtgacggtatacgccgcctttccgcccgcattgcgtatcgtgaccgcgtaattcgcattcggctgttccggatcgatgacgatatcatacgtcccgacgggtttatttgcctcttccgtgttccacacgatcatgagcgtatacgccgtatcgccctcttttacggcgaagtcggacaatgtcattccatccgccgcggcgccgatctgcgccgcagaggtaggatcggcaagcaggtcgcttccgtatgcgctcgtcttatcgtctatcgtcacgatgatcgggcggggcaggacgttcatgacgcccgtcttgcactccacgctgtaattggcggagtcgagccccccgaccgaaacgctcgtcgtataactgccgcccgccgcactgctgtctgtcgccgtcgtgccgtactcaaatgtaaggctgtcatctgcgacaaactcggcgctgttttccgcgtatgtatagccgagcgaaacgacgtcaggctcttccgcatagtacatggaagcgttgttcgcctgaatggtaacgctgcgccgggcgatcacgtagtcgatctgtgcgcccgtaagcgtgtaattgttcgctgcctgactgtcggaaagtgcaaacgcggcggtaaaggaataggtgccggcggcttcaaagacgtcgtggccgctgacggaaagcgtatacacggtattctgttccctgcctacacccttcgccgttgcggtaatctccgacctgtggtctgcgccgtcgtagacgtaatagctttctgcctgcgcctcgtgcgcccatacgacgtctatttcgcgactgccgatcgtaaattcataatcgtcgtcgcccgtaagcttatagttgttggaaagcgctgctccgagcgtcacggtcaccgtatattcgccggcatcgatcggctccgcttccgaaccgtcctctttgaggtatttgtatccgaaatttcccggcacgttgaggccggcgtcgcctgcgatcagtccgccctccgcaacagacgcctcggcatactgcgcttctcccgtatagtcttccccgttccactcgataacgaccgtgatctctttctgatctacggcgagcgtacccgactgcacatccaggatatagttcgcaaattccgtgccgcttatcagggtaatcgtatgcttgcttcccgctgcgccgttctgcgcattcggttgatacttgtcgaattcaaattcgggcgttccgagctgtgcgtcatgcgcactgccgtcggcaaagccgacaagggtaacattgccccatccgagatcgggcgcgctttcgccgtagacgacgcggtggctgccgatctcaacggtgacggtctttttcgtaatggtgaagtttgtgttaacgggattggaaacggtcacgtgatagttgccgttcgtccagccgcagtttgcagaagcgccgctgccgtaaccgtagctcgtgtcgagcatgatcttgtaactgccggcattctttgatgtaaggtctgcaatcagatgcacgccggggtcggcgccctgatacagcgacgttccgcccgtaagggtgtacttcgagctgtccagcgtatattcgccgtcctgcccattatattcctgcgtctgcttggaaaattctattgcgatttcccgcgcaatgaccgtgatcttaccttccgcattgaattctgcgtcatcgaaattgatggcgtaattgtccgaagcaagtcctctcaccgtgacagggaacgaactgccggcatccgcgcccggcgcatatttgtgcgcaaactgcgccgtacccgtgatctgcccgtcgggggtatcttcgatcaaacctttatatctgagcgtaaacgttccgggcgcatcgttgccgtactctacgtccaccccctcgacggaaacagacagctttgccttgccgatcgtaacggtgaactgcaccgtcttttcgctatggttgtcggcggtgatcttcacatagacggtgacagtcccttccgcattcctgaagtcgcgcagggtatcgctgtagtcgctgcccgttgtgctgtacagaaccttgagactgccgctgttcgctttttcgttttcgagcgcgatgctgcgttttgccccgtcgatgatcgcctgcgtatgcgactgcgcgttgtatgtttcggaataagcgtaatcgctccaggtgatatctgccggagatactatgtattccgcactctgctcatcaaggtgccctgcgcgcacaaagcggacggaatagttcggatttttacggtcctcaccgctgatgaaatacgtagcggcgggcgtgtactgcccgatctcctcggacgctgcaaggctgtacacatcggacgcgctgtcggaagacaggatcgcatcgccgggagcgactgcctgctctccggaaagtgcggccgaagctctgagctgcccgaaagattcttcgccgtacttgtggccgccgtcctcgatcgtgacaacgatctcgcgcgctatgactgtgactttgccgtgactgtactgtatcgtataattgtcagccgacaggccgctgagcgtgacggcgtacggaccgccgtttacggaaccgtttgtcgcgccgggttcgtatgcgcagccaatataaagctgcgtatcgaagcccaaactttcggctgtatcgaagtacactttgccgtcgtagacaagtttgccgtaattgacggtccactcggaaagcgcctcgccgtaaacgacagtctgatcctcaacgctgacggtgatcgttttgcgtgcaacggcgtaatcggctggaactgtcataccgtattcgccgccgtcctgcgtcaggcagtagttcatattgctgacagacgcgtaaaccttgtaaacgccggcgttgatcggatgattgatctgcccggccgattcgccgtcttttacatattcataaaaaacgggtaccgagtcgcccggctccgcgcctctgaattcgaactgcgccgcctgcgcgctgccgtattcgaagctgtacgcttttccgacggcgccacgccactcctgatctgtaagcagtttgggcgtaatggtgaactcgatctcagggttgttgtcgccgagccctgtaccgagcacagtttccgcatagttcatcgtttcagcaatgacgatgatcagattatatgtgccggcttcagtcggaactgtcgtcgtgccgtagccttcgccggattcgtcgtcatctcccttgccgtacgccgcgccgccgcgcgtggtgccgctgtaataataagttttttctgctgcctgcacttcggaaaggttcgggtcggcttccagatcaaaggtaacggaaggagtctgctctgtatcgccgtacgtccagccggaaatagaggcttccacattttccagatatctggtcagcgtgatcttgaaccaggcgtaaatgaccgggtctgaaacagtatccgtttcatcggcagccgtgccctggtcgccggcggccttttcccatacatagttgccgctgataagttcaaacgctatgtaataggaacccgtctgcgagggtttggagccttctgaaacgaatccgccgctttcgctgcggtaatatcccttcatctcataacggggatcctgttcgtccgccgccagcaatactgaaggccattccgtccatgcgtcgctgttgaattcgagaagcctgccttcgtatcctgtagccgccagagaaacagccttcggtgcgatcgtccactgcagttcaagcgtatcgccctcatcccaggtgaagttaccgctcttcagtctgacggtaacggtatacgtatccgcatccgtcgcgtacagcgtcaggtctttgccgtcaagcgccgtccgcgtgcccgtaaaggtgacttcaaacgcttccgcatcgccgccgtccgtcagcgtgacgaactgttcctgtccctgcacgctctggcctgcgacggtatcctgatataacgtactgctctcgttcagtacgggcgcgctgaccttttcgggaaggaccgtccatttcagttcttttgctccggaatccgccgccgaagatgcattgccgtcgtcccagacatagttgacggcgtcgctgttgttcagactgacggtaattgtgtacgtatctgcatccagcacggtgataaggccgccggcaacggaacagctgccgccttccgccgcagcgatcacagcgctcatcgcgtcggcgctgtagccgtctatgttcatcgtctgattgccgcgcttatatccgctgctgtattcatccctgtactcgctgtccgccacctcaaatgcaggcaggctgactttctttgcgacgatgtgccacgtgagggtataatcgccctcggcagtgccgtctgatgaattccagcagtaattttcgttgagtatgaaaacggcttcgtatgctccggcgtccgtgccggtgttgccgctgacggtatacgccgtaccgctctgatcgaccgcgagagcaagcactatctctccgcccgtatagacgtagcctttgatgctgttgatcgtatccgaaaccgcatcgccgtactctgccgcaggcttgccgatcgccttacgggcgaccgtaaaggtcttgaaggcttccgtaccgagataattgcccgtgtctttgagtgtaacgacaactttataaaacccagcgtcggagtcgctcgccggagaggcagataatttttcgttttcttcaaattccctgtttccgtttgcatcataataatacgttacagaggactctgcaccgtccgggaattcaaacgcataatcgggctgtacgggtccggaaagatattcccacccgtccatgtcaaattttttaaagctgttctgcgcctgcgaaatgttccatacgatctgcagttcgcccgtatcgccgcccgtccagcagtagttggaattgagcgatgcgacgagcgtatagccgcctgccgtatgcacattctgcgcggaaaggtcgccgctgaaggtgaagaatgcattatatgccgttccgtcggacgcgggcgtgataatgatctccgtgtcgttgttccacttcagctgaacgttctgtttcttcccgtcgtaggtatatgcgcccgtaagttccggttttgcaataggcgcccgcgcgatcgtccactccagcacaagcgcatctgcggccccgcccgtccagcagtagttggaattgagcgttattgtcagggaatacgggctgttgttgcttgcattccgggcggaaagattgccgctgaaggcaaagtacgcatcgtacacatccccggcatctgccggcgtgatggtgacgtcttccgacccgttgttccacttcagctgaacgttctgttcttcaccgttataggtatacgatccgctgacggaaggctgtgcgatctgcgcgcgtgcgatgacgaaaacgccttccttctcgccgccggcgtaattatcagtaccgttgaccttaacgacaactttataatatcctgcaggagaagccgcgttcggcgccgccgcgccgagatcggattcatacacgttgtcgtctgtggcgctgtaatagtaaactgcggtccaggttctgccgcgcatgtatgcagttatgatatccccatcttcaagcgtatcgctgtatgaaccgtatgtgccgttttccatagaaacggatgacggcgcattggaaggcgcttttgtaatctgccaatccaagccgatcgtcgtttcgcccttataagaggattccctccactcataattgtccgggtcttccaaagtaaaccggactttatatggaccgacgtccaggccgtgatcgctgtccatactgtaaacgtctgcccgtgcagcggcgtccgctgtctgataccagctttcgttgagagggttttccggatcctccgcatagactctgttcccgacggccggcgtatcgacctgcgctttgccgatgataaactgcacgacgagaggactgtacggactgtccagcccgacgccgttatagttggctgattccttgatcttcacgcgcacataataaacgcctgcgcgcgtgggcttttccctcgtcatttcgtccgcatcatggctgaacgtattatcgtaagaggtaccgtaataataccagaccagctctgcgccgccgggattataggaaaggctgggtgaatttccttcactgttcgggtcatattcccatccgtcaatgctgatagtaccgcgctgggttatatctatcttcgtgactgcgaaagaaaattcaaaatattcgccgtatccgtctgtcccggtcggtttgccctgccagatgtagctggcgctggcaagataaacacggaacgtatacgtatccgcatttaagacggtaagttcgcccgtttccgaatcgatcgcgacgaaatttccgaagccgtcggtggctacaccgtcttgtacggcccggatgatcatcgcttccccgttgtagccgtactcgggcgtgacggtctgctcgacggggctgccctcttcgtcgatcttgaaatcgatagaattattgctgtaatacggagcagaaatcggcagcgcagcaacgtcaacttcaatttttccgctttcattgtcgtcgctgaccgtgatgccgcattctctgtaggcaaacgatatatattcgtcgccgaagagataattgtcggtatgtacgccttcagtaccgacatccgtatcggtattgtgataatttacgataaaaggataaccggcctcaagggtaaacgacttggaaaatccgccctcatatctgatagaaaagccgaccgtcacgcctccgtcgccgggggcatattcggtaaaagcgaccggttccagtgtcgtattgttaaacagcatgactgacagcgattccggcgccacattggtgaccttgacctcaataggcagcggttcagcgttgcatgttgcggaaccggtataagtgagcgtaagcatttcagtaaactctgtcccggcggcccgattcgcctcatcgtacagatagccgctcagcgtatattcacgcgtcgcaagttcctgtctggaaccgtcgctcatgatcgcccagacagaaaaatccggtaaaagcgaattgctgacagacgaactggaatagatcttgtgttcgccctgtgtccaatctgtctgcagttcttcgaccgcgttttctgtaaacatgatctgtatcgatcccgttacggttgtagagccgtcgctgtaggagagggagatcgtacgcatagctccgggcgcggtcggtgcgtccgtgatcgtgtattcttcggctgaaagcaccttgaccattgtaccgtcgttattgtacgcggtcacgatcagatattctttcagctccgtctgagcattggcaaaattatcgtaaatgtagacagtttccccgtcttcgttcgtataattgccgtttccgtcgtcagtataaattaaactgacgtctatccggccaagcctgacggcggtggcattgcgcgaagcgttcgcctttaacactccgccggaaggattggtatagctcacctcaatcgtattggcatacgccgtctgcaatgtccagcctgaagccattccgtttaccgtgacagaatagtattcgggcgcaatgacttcctgttctccttccgccgtgctgcccgtgacattcaaacggcttttaatgagagctgccgtcgtatcggatgtataaatatccgatacgaacgaaacagttatgctctcatattcgactgttccgttttccgcgcgcgcaatcttgctttctgacatgccgaaaacgcccagcgcgaacgctgcggcgcatacaaacagaatcgagcagaataatgccagaacggtatttttcaccttatgacgcatttcgtaatccctcctcattacagctgcgtttgctcatgcatattcattttaaaccgagtgttttcggatagtattcgaaaacagggggtaccccttgttttcgcccgatttttatgacacatgcttgttatcttgtgtataaaatcagacaattttctatttatgcattttcattataccacaagaataatatacagtcaatactaaatttaatattttcacacaatttaaatttgattgcaatgaaaatctcaaatagatatacccccccccgcatattttatattgtaatatattcactttatcaagcaagctgaagccacatattttgctattttttgacgaaaacagagcatgataaaaatcctgcaaataatcatccacgtgcaaagcacgtggtttttatttttcgggcatagcccttgttcactggcgtaacgcaaatgcgttttttagttggcctgccagccatgcattggttacttgctacccgtcaacgggtcatgcgggtcaaacatgctcagctgctcgctctctctgtcctgctttaactgattcgctatatactcttttattgcatttgtattttccccgactgtgtccacatagtatcccttgcaccaaaattcgcggttacggtatgcaaacttcatgtttccccatttctgaaatatcatcaggctgcttttccctttcagatatcccatgaatcccgctacgctcattttgggtgggatacttaccagcatatggatatgatccgggcatatctctccctcgatcacctccactcctttccactggcacagctttcgcagtatctctcgtatctctatccgcttcccttcataaaatacttttcgcctgtacttcggtgcaaacacgatatgatacttgcaattccatttcgtatgtgctaaactgtttacgatattgttttgctcctgcattatgatatcctccgattgtgtattctttttctgactggcaggtcagttcttattctacacaatcggagcctttttttcaagactcatcggtaaacctcttttcaaccccgcgactatcgcggggttttcgttatacaaaaaaacggaggttgaccgtttacctccgttttacttaaaacccgctctcagcttttctattattttagtttccaaacgcgaaatctgcacctgcgatacgcttaattctttagcaacttcgctttgagttttatccctgtaatatcgtaaaattattattttacgctctctttcgtcaagcttaagaatggaatctttgattatcattttatcaatggtatcgtctgtcgcatcgccgtctgttaatttttcaaacaacgcctgtccttgctcgtcgtcgcctttatcgtatatcgaaaccggaatttttgacgaatccattgcaaaaaccacttcctgcggctctatggcaaaatgttttgcaatttcttcgacggtaggacttcttccctcgatgttttttatttggtctgcaaaatacgaaatcttacacgccaaagttttagtagaacgcgaaacttttacatatccgtcatctcgcaaataacgttttatttcaccggttatcatcggtacggcataagtagaaaatttaactccgaattcgggagaaaagttctttatcgctttaagaagacctatgctgccgagttgatacaaatcgtcgtattcaacgcctttgtttctgtaacgtcggataatacttttgataagcggagaattgttttcaagcagcgacgttttggcatcgttatcgcctttctgcgctttttctattaagttaatcacgtcgcattgttcaagcaattttacgcaccgccttttttagtttgcaaaatttttgctcatttttaccgttacgccacccgaatcgtttgtggtaacttccagctcatccataaaggattccatgatggtaaagcccattccgcttctctcttcatcgggtttgctggtgaaaaacggctgccttgcttttgctatatcttttattcccactccgctgtcctcgacttcgatatgtaaagttttcccctctacactcgcgcgcagttttatttcaccgcccttatatccgtaagcatggactatgcagtttgtaaccgcctccgacactacggtttttacgtcgtctatttcgtcaaccgtaggattaagttctacacaaaaagccgctattacgttccttgcaaaagcttcgtttttgctttccgccggcaattttaattccatgtaattttccatttaagcctccctgaaatccacttttggcataattccgtatattcccgatagcgacaaaaccttatcaatacttcccgaaggatttgcaatgtatacaggtatacccatcgctttaagttttttatatctccccagcagcacgcctattccggtactgtccatgaaagtcaattccgacatttcaaccaccacttttctcatattgcccgtattaaacagcgcgtccattttactccttataaatacggccgagctttcatccaactcgccgcttaagcctatatataacgtggagccgacaagcttgctttctatcataattcacctccgaaaagattcgcttaaattctaacactttgaaaaaatcgaattttcgggtttcgacacgaataaccgcatcttttgtcgaatcccgcgaaagagccaaaaaaacctatttttcacctgaaattaaatacattaaatagcctttataaatgacaaaaaatttttcttgaaattaaagaaattcccttgacaaacaaggtcgatttatagtatagtatctaagtcagctcaagatggtttcggggtgtagcgcagttggtagcgcacgtggtttgggaccatggggtcgggagttcgagtctcttcaccccgaccaaatttcatcgccgccttaagacttagggcctttagctcagttggttagagcagccggctcataaccggccggtccggggttcaagtccctgaaggcccaccattcccccccatcaagttgcctttgtggcctggtagttcagatggttagaacgctagcctgtcacgctagaggtcgagggttcgactcccttccaggtcgccattttattagcctcgatagctcagtcggtagagcaggagactgaaaatctccgtgtcggtggttcgattccgcctcgaggcaccacaaacaactgctggagtagctcaatggcagagcaactgatttgtaatcagtaggttgcgggttcaactcccatctccagctccaagcatgaacgggacttcccgcttttggcggaagtcctatcttaaaaatacgcccctatgcgtaataagcttggtctatggacgggttcccgagtggccaaagggagcagactgtaaatctgccagctccgctttcggtggttcgaatccacccccgtccaccaaaaaaggcgatatcctatcggatatcgccttttgtgttgttggaagatgtagtaaaaataaccgctgtattcgcggtagttcgtgcgagccttgcggtgttgatttttggggtgcgcccctgcttattccgcaacgtgacgctttgccgaaaccccgcaagcgggggttcggcaatatatacctcttcccaccacaaaaaccttatccgaaagtatcgagataaggtttttgtggtttttacattatcgctcccctatccggcagtatttaaatacagtttatataaaaaatttataatgacattttgtaagcaaaaacccgctcctaaaacaggaacgggcttttttatgccgtctatttaaaaattaacaacgactgctttttagcaactaaaatacttaaatcacttacttacgaataagacgcttatgaatgaaaaggacaatttgctttaagacattgcttattttttgaagaatatgtgcaaacgggtttttgctcttccataattattccgtatttttcacgcacaaaacgcgcggcaaacaacaaagacagaaaagcgtttcttttacagcaccttgccccgcctatcttgctcatctcgcggataacgcccgaggtgtattccatatggtccttgtaatattcgtccgtactaagcggtcccgttttatgaattatagacaacgccgcccctacagaagcaactgagccgcaaattccccagtaaccgcacattgctccgggcatggtcgccgcacgagtttcaagttcgcatagacaagcgcgcaaatcgatatcgcccccggcatttttatatgccgtcaaaaatgccgcaccgtctataaaatgatgttcgggcccgtggatattcacgcaatccagattcatcaggttttgaacgataatcaatggattgcgggatttttcgtttaacgcgcaatcgaaaatgatattgtatttttccttaagagttaaatctgctttcaagacctttctcctttgaatcgtttacttaaaacaacaaaatggttgtaattagacttatccccgtcgttatcgggaaaaagacaataaggcagactgtccgtatctctgtgctttttaacgcaagcacagcataatccgtgattagcacaggttactttaggacacgcacattcttttactttgccgcagaacacactattcctcccttttgcttccatttagattataaccgaaataatcggcaatacaagacagcgtttgagtattgaccgaataataattccacttccatttcttttccgcaataactaatcccgaatctaccaaatgtttcatatgatatgaaagcgtgggttgagttacggaaaaacgctccagaattttgcacgcgcaaagtttcccgtctgtaagcatttcaaaaatttccaatcgtacgggatcgctaagagctttcatgcagtttattatgatttctttattttcaacggttttcatatagataattttctatattataaatcgtaaatatatcgtgagtcaactttttgtaatataatatccaaaaaaaatttaatgtctgaaaaaactgtaaggatgaataacgtgttcccctttgatgtccaactcggcaagtcgagggtcttttttaactattgcaagctgaataatcttatttccgtatttttgtcttattttatccacggcttcgttaagattatttaaacgctcgtttgcagatattgtaccgaaaaaatcaagttgttcgggtccgaaataaaaatcggacacggaaactcccatagcacgcactttttcttcccaaggataaatttcacggaataatttgaatgcgagttcggcaatctcgcggacgtttcccgtgggacgcgaagttttgccctgtttatgataagattttaaatccgccgaacgggcattgacgtgaacgcttaaagcacggtttaacccggattccctcatgcgcgccgcaaccgaatccgcaagcagataaattacggtttttacgtcgtcattatttttcaggtccctgtataccgtaagactgttgcctattgattttacgttttgctcctcgtctacctttacgactttggataaatcctttccgtttgcgaaagcatgaagataattcccccatttgcccagtctttgggctacggcattttcgtctgataaagcaagctgccctatcgtaaaaattcccatgcggttgagtttttgttttgtagcccttccgacgtaaagcaattcttccaccggcaacggccataccttttgcttataattttcgattgaaattaccgtgaccgcgtcaggctttttcatgtcgcttcctaatttggaaaaaatcttgttccagcttacgccgatgctgaccgtaagcccgagttcatctttaacgcgacgcctgatggtttgggctatttcggcgccgctgccgaaaaattctgcgctttctgttacgtccaaccaacattcgtctataccgtatgcttctattctgtccgtgtaatcttcgtaaatctttctcactgcgcgcgaaacctgaagatatgtagaaaaatccgctttgacttccacaatatttttcccgcatttaacagccgcctcccagtatacgtcacccgtctttaccccggcttttttagctatggaattttttgccagaacaataccgtgtcggtcttcttttgagcccacaactataacgggtttatttcttatttcaggattacgcaaacattccacgcttgcgtaaaagttgtttaaatcactgtgaagaatagtacgcatatataaagtatatgcttttccgtataataaaataaaccgcttcaatttataagcggtttttcaacaaaccaacggttagtcgcggtttcacggtacaatattttttcctgtccttctattaaaacgtcgtatctttttgtcaacaccgcaccgacgtgttgaggcggcgacatacgaatactgaaagtcttgtctatatgatacactctcccgtcttcccactcaagcgacaaaaggctttcgttaccgaaagtatctacctttagctctaccgacacgtaaactttttcatattttatcatagataaagtatatgataaaactcggatattattaaaaaatcatatctatttacggctttattgcctgacggtaacttttcaatcaatatttaagcaaagattttttactgcgcggatcgtccagatactccacaactatagctatgaattctttggttttcagtttctcgccgtcttcaagaaaattgacgcctattatttcgttaaatcttttaaaccaacctctgcgacaagcgttttctattgccgtgcgcatatcacgctcaaccgagtccttggttacgttattaattttcgcgacatatgtacaaatcgcactcatatttccgttaaactttttatacataagcacggaactttttaaatatctgaagcctgctttggaaggcattattcccaccgacagcaaaagcgtggaaagcagcgcctcatcttcctgcgtataaactttatcattaataagcgtcatacaattccctctcttacttaaattccgtcatcaataagatgttttacgttcagataaccgtgattttgtaaataatcgcaaattatggcaataaattctttattggtgaaaccgtaatcatagtcgtagaccgagccctgcaataagtcgtcgatgtttttcaattttccgttataaacggcattatcaagacctcttttgatactcataacaatagtgttgtaaatcaaaccgtcttcttccgcgactttgatatatgctttctttgcacatgtcggacatgccgaataatatacgacagttcttttaacatagtttttcgacactgcaggctctatacccagattgtcaagaatcatatcgagataaacgtcatcataacttatctcataactctcattggcgaactcaatcttctttgtcataaacatatcacttcacgcaaacaaatcatcgacattattttaccaaatattgtaaaataaatcaacaaatttcatataatattttaaattaataaattttttaatgattatttatggtcgaatagtgtcaatattgttctatgaatgtaatttttaggtagattatttaattaacgacaataattcgacaaatttttattttacaaaagtatagattttacaatatttattaattttttttaataaagcttaataaaaaagcatcaaaaagaaaaaaatccgttaaaaaatttaacggacgaattaaacagtagtttgtttaaatgaaataagcccccgcaataatgcgagggctgaaaaatttatacatattatctgtctgaaagcggcacgtattttttaactgtggaaacgcatttgtaattcggtcttattattttgccgttattggaaagctcctctatacggtgagctgaccaacccactatgcgggaaatcgcaaaaatcggagtaaataattccataggaatatccagcatagagtttacaaatcccgaatagaaatccacattggctgccacgcctttgtaaatcgcccttttttctcctataatttcaggcgcaagacgctcgattttcgcataaagctcatagtcgtcctcacggtgcttttcaacggcgagcctttcgacaaattttttcatgattgtcgccctcgggtcggaaagcgaataaacagcgtgacccataccgtaaataagtccggacttatcaaacgcctctttatccaacaacttgcaaagataatccttaacgtctccgtcggaacgcgatttaatattggctttcatgtcgtcaaacattttgactacttttatgtttgcgccgccgtgcctggggcccttaagtgacccaagcgatgccgcaaccactgaataagtatccgtaccggaagacgaaacaacgtgcgtcgtaaaagtcgaattattgccgccgccgtgctctgcgtgcaaaacaagcattaagtccagaattttagcctctaattcggtatatttcccgtcggcacgcataagggccagaatattctcagcagtcgagagttcagggaaaggcgtatgaattataaggctgttatagtcgtgataatgcttgaatacctggtaactgtacacggcaagcaacggaaattgagaaataagctgcaaacactgccttaatacgtttgaaatcgatatgtcatccggcttatcgtcgtaagaatataacgtcagaacgctgcgtgcaagcccgttcatcatatccacggaaggcgctttcattataatatcgcgcacaaaagaaacgggcaacgtcctgaacgcgcttaaaatttcgttaaaaagtttaagccttttgggggaaggcaactctccgaacaacaagaggtatgaaatttcttcaaatccgaatcgattgtcttttaaaaatccgtcaacaagatcgttgatgtctattcccctgtatctcaagattccgtcgcaaggaattttctttccttccgcgtcaagcacggcattgccttcctcgtcctgcttgaaagcaacaatgtcggatatatccgtaaggcccgcaagaactccgttgccgttaatatcccttaagccgcgtttgacatcaaatttataataaaaactgttatctattatagtagattcttttgccaatatactcaatttttcaattttaggcatgaccgcctgtaaaagttgctcgaaatcagtcaataaaaaatacctcctttttttgaattataccatattttacattaaaattcaagtttattgcctatatctgatgaaaaatactttaaataactaaagaatttttacgagttatttgtcatttatataataaaacataaaaaattctatctttcaactttatagtgttatgtttttcattttaaaaactttattttaaaatttaacattcgttatttgaagaacagatataaaatctgatatatttcttaaaaacaagcactaaaaaaacgattttaaaacaaaaatccgacccgtttaaacaaaccgaatcggatatatttaaaaagttttatcgggtgataaactgataaatgcaacaatatttaaatttctatttttttatcttaatattgtgattacaaaaaattttattttttgaaagaaattcggtatttatattgctaaatcagcatcgggctgataatctttgtcaatcagtatgtaaggataatgatatttttggcactgacttaaatagtactcatttcccctcaaaataaactctttcgtgcaccacgaatcatcaacacgtttttcaatttcgcaggcatgcgctttaatgtctgaaaagtgattttcaatatattttctgctcattataagacaatagaaacggattcgtttcagatattccgccgaaaaactttcttcccaaccgaatgggatataaccgccttcaacaacaaggttttgctgattttctatggctgtttttatcatttcacgaataatcggccataaatatttttccaattcgcggtcatcttgcggtgttaaatttgtatatttacttcttatcattcccattttcagaagatcgaccgacaaataagggaatttatatttttcaagaattttctgtgccaatactgttttccctgtatgagatgcgcccgtaatcaatattatcatattctcctcccgatattttcaccctatgttattctttataagatgtgcggatcattaatcaaaactataaaacaagactaatccaaacctataagattatatatcttctataaaatgatttgagtacatattccaatattttttataaacaaactcatcacctacagtaaagttcagttgatacattcggaaaaatacagggatgtttttcggttgcacttgctcctcgtatgtatagcagtatttcattccgcaggcttgcattacccttccgcttctgggattatttctgtcgtgtgttgccgtaatatacggcaatccgtcttttttcacttgctcaataacagctttgccggcttctgtggttattccactgtgccaatattccttacgcagaccgtagccgaaatcgtgatgttcttccatatccactttaatgtagccaacgggatagttatcttctttcaaacagattgcgtaggcataagcctgcggctgtgcatatttcgccgcatatctttcctcgtaaaacttcttggtttcttcaagattcttcataggataccaaggaagaaattcattcacttcctcatctttcaaaatcaaaaaaagcgcttctaaatcgtcttttgtaaattttcttaaaatcaagcgttctgtcaatattgtaggcgtattcatatcatagcccccctaaaatcttatcttctctgttatatcttttttacttcgcttttataaacataatagtaacagcataattataacatattaatttttataagaaaagatattttcgactctacagtttgcacactaattttttaatattaacagtcattgaaaaaaaataatccgaacctgtcgccaatcggcactacaaggttcggattattatcaaatggtgtgcccggcgggaatcgaacccgcaacctacagcgtcggaggctgtcactctatccaattgcgctacggacacatttaaagcgttaaaaaaatttatatgaaaatttttaagcttaaagtcaaattttataacaaaaatgccagtttattgcctaaatttttgtagtcgtctattaaagtatagttaagtccgccggtcttaacgtgttcgtcgtttccgccgcttccgaaatcatcgccgacatacataacttcgcttttgtcgaatccgttttttctcatatattcggtcaaagcgttgtatttattaaacctctctttgacgatatcgaaagacgacgagccgcctatgaagacgttaaagccttcgaacagactttttacatagggatacataacggcacgctttttcctgtcggggtcaaaggcgaccttttgctctatgggggcggattttccaagcaacggaatagtcactgcacccgtttcatgaaattccacgttgtcacccgcgtattccgtataaccgaatttttcgcggattttatttgccgagtcaataaagtactgtttatccacagtatagaattcgcttcttactactttgagtacaccgttgtccataacggattcctgcataccgtagtaacctattatatctatgggaaaaaagttaagctgattgaatattctctcgcaaccgcccgccccaaccatgagcagtttatattttttgtcaagcgcctcaagaactttccggttagtgtcaccgagtttgcttctgtgctgagtaagagtaccgtccaaatcaaatgcaatcagtttatacattttattcctccgacgcaagatattatataataaatgataagataagtcaaagcattaaagttaaaaaaagcccgaaaagctttttaatctttacgggttttttcgtattcgttaattaaccgtttatcagaaccaataatctttaagatatttctcggtattgcaaaccattttatcaaacatttcgcgtgccgaagaaaaactcagagaagaaacctgaggatcgtttacatacactgcaaaaactttgtccacggatttctgaaacgccgcttttataaaggcttcctggttgtaaacgtgccttaaaatcaacgaatcgacttcttcaggcaacggttttgccatcagaggagttattccgtccaagccgaaaagcccgtttgtttccactacggcacccgtgggatagcctttcatctgcccgtaattgggcagattgatattcgttacaaaactgcccataccgaacaacgctttaagttgttttacgccctcttctccgcttttgcccaaattcacctgttttttacccgaaaggatatcctttgtttcctgaagtctgtcttttaggtcctgtcttctccatgaaacaggagtcaaagcgaatttccatttatcaagcgccttttcaggactttcaagaaaccagctttgcggcataaactcgcttaaatgtctgtcgccggccgcaggcaaaactccgtaacgacggaaaagctcgaactttatgcagttgccgcagtcaaaaacattatttaaccacgcatccttttttccgttggcgcaaaagccttcttccgcgtatttatcgccgaacgttttgaaaacttcaaataaatcgatgtctttgtatgaagcttttgtaatccatgtaaagtggtttattccgcaaacgtccactttaatttcatcgcgcgacgcaacgactattccgcaaacgtctttaagcgctgctgcaagcagttcctgagtgccgaaaacctcgtgacagcaaccgaaagctttgattttgggaaactcctcataaagcgtgcgcgtacaaagcgtcatgggattcgtatagttaatgacccatgctgaaggacaattctcacgaatttttgccgcaaaaaatctgaacatgggcacgcaacgcatggctctcaaatatccgcctgcacccaccgtatctcctacaggctgataaatgccgtacgactcgggcgtgttaacgtcgctttccatctcgtcaagagtgccgggcataacggaaataaccacggcgtcacaccctttaagagctttatcgatttcgtcaacggcaagataattccattttttgccctccgccgccatatcagctattttatttcctatggcttcgttatcctttgccgccgctttatctatgtcgtaaagccttacttcaccgcaaatatcgtcggcaacggcaagatcgcacattaattttctcgcccaggcccggcttcctccgccgatataagctattttaagatatttatccgccattattaatttcctccgctaaagaagtcaatttaattttttaaagtatgtgtacttaaagtgtttacatattttttgccttgtgttacaataaataggcattttgtgtgtcgtatcaatcaatgtaaacgtttacataaagaatgatataccataatttacgtaaagtcaatgatttggcgaaagttttcggagaattttattctgacaaaatgaacatacaggaagttgcaaaaaaagcgggcgtttcgattgccaccgtatcgcgcgttataaataaaaccgctaaggttaacgaagagacgaaaaagcgcgtactcgacgccgtcagcgaactcgggtatcttcccaatgctatggcaaaaagcctgaaaaccaacagttcgcttaaacttacgggaatagtctgcacggatgtgacggatttttattacgcccgcgcgctttccgcgcttgagcgggaactcagaaaacgcggctttgaaactttgcttgcctgcacgggtaacgatatcgagatgcggcacaaagccatttacggcatgcttgacaaaagcgtggacgcgataattttagtaggctccattttcgcagagaaaaatccggaacacattaaacacgcagcttccctcgtccccgttttcatcattaacggcatcgtcaacgtccccaatacatattccgtttactgcgacgatttcaatgccatgagtcattgttgtcaaaaactttcaaacgacggcagaaaaaatatattatacatatacgattcggattcatacagcggaatacaaaaactaaacggctttaattcgtctaaagaaaaattgaattttaaatcgtctgttgtaaaatgcgaaaagcacgctcttgtcggcgataccgaacaaaacataactaaggccttgacggaaaatcccgatacggacgctatcatcgcatcggaagattaccttgcggtaatcgcccagaactgcgtaatcaaatcgggcaaaatttctccgaaagacgttgccgtaatcggttacaacaattctctcatggcggaaatttcaaacccgaaacttaccagtttagataaccgtattgaagagatatgcgaaaaagcggtggaaaacctgacgcttgtattaaacggtaaaagtgcacctgttaccgaagccgtcaattacaaacttgtccggcgcgaatctttttaatttgtaaattcaaaaggagtatatataatgaaattcttaaacgacgactttttgcttgacacacctctttcgaaaaaactttttcacgaatatgcggaaaaacttcccataatcgattaccactcgcatgtagtgccgtccatgattgcagaggattataaattcaaaagcattacggaattatggctgggcggcgaccattacaaatggcgccttatgcgcaattgcggcattgacgaaagtttaattacgggtaaagccgacgacttcagtaaattcaaggcttttgcgtccgtgatgcccctttttataggtaatccgatgtacgtatggtgtcatctggagctgaaacgctatttcggattcgacggcgctcttaatgccgacaacgcaaaagaagtttacgacctttgcaacaaaaaactgaacgaacaggatttttccgtcaaaaacataataaaaaaatccaacgtggaaattctttgcacaaccgacgatccgctcgatgacctaagataccacaaaaaaattgcctccgacaaggaattcggcgtcagagttttacccactttccgtcccgataaagcgcttaatatcgaaagcaattcttttgttacttacataaaagaattggaaaacgcttccgacattgaaattaccggaattttagagcttatccgcgcgctgataataagactggattatttcacgcaaaacggttgttttatttccgaccacgcgcttaccgattatacttacgccgagtgcagcgacgaggatgcggatttaatcatgcaaaagcgcctttcgggcgaagacgtcactcctgccgaagcggaaatgttcaaaacatatcttctcatagcgcttggagaagagtatgcaaaacgcgacatggtaatgcagcttcacgtaagttgtttgagaaatcccaatacggtaatgttcgaaaaattgggaccggatacgggattcgataccatcaactcctctactcagcccgtaaaactcgcaaaactcctggatgagttaaataaggacgatttgttgcccaaaaccatcgtatactcgcttgaccccaatgataacagactgatagaaagcattatcaatgccttccagggctctgtgcccggcaaaattcaacacggcagcgcttggtggtttaacgacagcaggttcggcatgacagaacactttaaggccctgagcgaagacagcgtactaggcaattttatcggaatgcttacggactccagaagttttgtttcctatacccgccacgaatatttcagaagaatactttgtaaattcatttcctccattgtggaaaacggcgaatatcctgaagatgaaaacgcattgaaaaccattgtggaaaacatatcctacttcaatgcaaaacgttacttcgggctttaaatttttttgaggtattttatgggttttttcagcgctttaatggattttctatttggtcctgtcgaagatgaaaccgacaatgaaagcaaatcggaaaataaaaaaattactgtgccaaatgattcggaaaaatcagacgattcagaaaaaaagtatgttaaaaacacattaatgtccgattgtgaaaaacaattttttgatgtgtttaaaaatattttagctgataaatatttaatatatcctcaattaaatttagcaaccataattacaaaaaacaatattcatacatatcaaaatgaactttataggaacattgactttgctatattagataaagaaacatattctccgttgctcttaattgaaataaatgatgtaacacataattataataagcgaaaaataagagattataaagttaaaaaaatttgcgaagaagctgatatacctttaatctttttttggacaaaattcggaataaacagagattatatagaaaaaagattaaaaaactatttggacatataacataaaatactttctcattaacgtttaggaattagtcggaaagtgtttttatatttattgtattataaaaaaaggaaccgactttattgccgattccttttttgattcagattttttcggtaatctttgcagctttaccggaaaggttgcgaagataatacagttttgctcttctgaccttgccgtgacgcacgacgtcgatatggtcgatacgcggagaatgcaacgggaaagtcctttctattccgacgccgaaagaaacgcgtcttacggtgaaagactcacgaacgctgccgtttttcttggaaataacaattccctcaaaagcctgcaatctttctctggaaccctcgacgaccttgacgaaaaccttgacgctgtcgcccacgttgatgacgggaacctctttcttcatgtactctttttcaatagcttcgataattttgctcataatgactacctccttcttttgcaacgtgttcttataaaccgtctgtttacattggaacgcgcgagtcaccatagcattatactataaacaaacaaataaggcaagcgtttttaattaatttaaaaatgtttttaatcaaacggcatatcacatattctgatattccgcgctttccctgaactcgcggacaaaatcgagataagcgtcgttcattatcgcttcccgaattcgttccatcagtttaataagataagttatattatgaagactcagcattcttccgccaagaatctcgtccacgtttacaagatgccgcaaataagccttagtgtaatttttgcagcaataacaatcgcatttttcatcaagcggcgaaaaatcttccttatatttgccgtttcggacgaccactttgccagcggacgtaaacgcagtaccgttacgcgcgatacgcgtgggcaaaacgcaatcgaacatatccatgccgcgcaaaactccttccacaagacaatcgggactgcccacgcccataagatacctaggcatattttcgggatagtacggcctcatttcgtccatgatgcgatacataagttctttaggctcgcccaccgaaagccctcctatggcaataccgcattcggcataaggcactgtttccttcagcgactttaatctaaggtcggaatacatattgccctgcactatgggaaaaagcatctgttccttgcggttgtgatattttttgcacctgtcaagccactcaagcgtaatcttcattgccttttccgcctgaacacggtcggcgccgtattcgctgcagacgtcgaaagccataataatatccgaccccaaagaattctgaatttccatggatatttcgggcgttataagatgcttgcttccgtcgatatgcgaattgaaagttactccttcgctgttgatttttcttatccccgcaagcgaaaagacctggaacccgccgctgtcggtcagaatgggcttgttccacgccatgaatttatgaagtccgcccgctttttccacaagcttgtgtcccgggcgcatatataaatgataagtatttgaaagtataatgcttgtacctgcgtcctcaagctcatacggcgcaagcgatttaaccgtcgcctgagttcccacaggcataaaaacaggtgtacggataacgccgtgcggagtcttaagttcccccacacgagcgcccgattgcttacatacgtgtattgtcttatattcaaaattgctcataatatcagcgttgcgtccccgaaactgaaaaatctgtacttttctttaacagcggtttcatacatttta

SEQ ID NO: 2815 - DNA, 20700 bp, Unknown
  16S sequences of unknown bacteria
cggcagcccgcaccccaaccgccgcgaccccctctccctccaaaatcgcgcaacagatcccagttttacttccccagtaaaatccactatttatgcgaacatcacccataaatccccaatcctgtaaacttttcattaaaaaaagtgaaatattaacctttcacatgcaaaaaaggctcgattttgccgtattagtgaaaggacttttctcaccggcaaaaaattcttttccatcggcccctctcaccgaactaaaactgagagcctttcggccccaccggtcaaacaggggcgccggtctaaaactaaaatttttcagcagacctcatcgggcaatttgggggtctgccccagcgggaacctgcctcccaccgcaccttgaaaattgaataaaaaacctttgcgcctctccttttcccccgcaaaatgtggtatactgggaatagagccccctagagggcgggaaaggagaacctcccttatgtcaaccggtatctttgatatcatcggccccaatatgatcgggccttccagctcccacacggccggggcgctgcgcatcgcttatcttgcgggccggctcatccacgggggcgccaaaaaggtggaatttacgctgtatggttcctttgcacacacctaccgcggccacggcaccgaccgcgctttgctggccggtgtaatgggctttgcgctggatgacctgcgcatccgggattccttccagatcgcacaggagcgggggctgcagtacagcttccgcatcgataccgcgaccgaagtaccccaccccaataccgttggtattaccctggcgggggcggatggccattccgtgcatgttaccggggtttccattgggggcggcagcgtgcgcctgcgggagctggatggggtggagatcgacctttccggcgagtacgataccatcgtggtgaagcagtacgataagcccggcgtagtggcctttattaccaagacgctgagtgaaagcggcgtgaatatcgcctttatgcggctgtaccgggaaaaccggggaaaaatcgcctataccatcgtggaggcagaccagcccattcatcgggaaacggtgcgcaccatttttgagcacccggatattgtggcggcccggcgcatcaccccaagagaggaggccgaccgatgaaaaccaataccacaacagcggctaaactgctggaggtttcccggcagctggggctgagcctgcccgaagtgatgctgcggcgggaacgggagctgaacgagaccccgccggaggtggtctatgaaaagctgcgggtggcctacggcatcatgcggcaggcggtggaagaaagcctgagagagccccacaaaacaatgggcgggctcattggcggggaggccaggaagctggccgaataccgggcagcgggcaaaaatttgtgcggggagaccgtttcccgggccatctgctatgccatgggagtgctggaggtcagcgcttcgatgggcctgattgtggcggcgccgacggccggggcctccggggttttgccgggggtgctcatcgccctgcaggagcaatacggcctgactgagcggcaaatgctggacgctttactggtggcttcggccatcggtgtggtggtggcggaaaattccggcatcagcggggcggcgggcggctgccaggccgaggtgggaaccgccagcgccatggctgcggcttcctccgtttatctgatggggggcagcccggagcagtgcttcgcggcagcagggctggccatccagaatatgttggggctggtatgcgaccccattgccgggctggtggaggccccctgccaggcccgaaacgcggccggggcttccaatgccctggtttccgccgagctggtgctggccggggtgccggaggtcattccctttgatgaggtggtggaggcggcccgtcaggtgggccatgccctaccggaaagtctgcgggagacggccctgggcggcattgccgccaccccgactgcctgccggctggcggagcagaccggctgcggcagctgccgcgggtgcggctgaatatatcccttcgtttaacaagagcgtacacgcttttcgacggtgagaagtcctttggaagttttgcgtggcagaaatgttgtccgaggaaatgcggcatttatgtccgcaaaaaccgcatatgctcttgtagagtgttaggtaccttcgtttaacaaggacacacacgcttttcggcagcgaaaatcggcgctgactgcgtcatctcgtcgtcgcggactgcgcttcatgtcggggcgctattcctacggaataggcacccctccaacgcttcgtcgctccgcctctccccacgaggtcttacgaccttgcggggaccccgcagcagcatacgccagtatgccggcgtcctcttccttgtcatcatccggttttccctcgccgaaaagtcctgcggagtttttgcgcgggagaaatggcgccagaggaagcgcggagcggtaggcaggctggcgcctgtcaacgcgacgcgcaatgtcgggcggtatttatgcccgcaaaaaccgtatgtgctcttgttaagcgaaggtattttcacttgattaaaaaacagctcgcaggaaggttttgtgccctttatgatgagagcaaaaggaagccgggcgcgcccgcagcggggagggctgcccggcgcaaggcgcagggtcagcccgactgaagcggagggcgcgccctgcgtgggagcgcgggcggctttgccggcagagattctatggactccccccataggagaagtccgtgctgatttgcccatgtccggaaaacaattcgtaaacggtttgtaaattctgcgctgcttttcttgcagtttttcggccattccgttatgatagagtacagcagaaatgaacgggaaaggagagccggaaaggtatgcgggattggtttcgccgtttgatgatgggacgatacggggtggatcagctgacctgggtactgctggcgctctctttggtcatctcgctatgcggcagcatttttcagatcaaggggctcagcatcctgtgctgggcggtgctggtggtgtgctatctgcgcatcttctcccgcaacatttacgcccggcagcaggagaaccaaaagctgctgcaattctggtggaagctgaagaacgggcgcgcgaaccggcccagccgggaggaacgcagaaagtacaaggtattcatctgtcccacctgcaagcagaagctgcgggtgccgcgcggcaaggggaagatcagtatttcctgtcccaaatgcgggacgagctttatcaaaaagacataacgaaagggccttccgcggagggctctttttttgatgggtgggatgaaaaggcccccggcgggatcggagggatcgggccgggggccttatgttactgcattattttacgcgttggggtcagtcctcgtgctttttggtgagctttttagcgccgaggcagagagcgccaacggcggccaggccgatcgcgatgtagccgacggggccggaaaccgcgccggtggaggggttgccctccgcgggcttgctatcgcccggctgggtgggggtgatgatggtgatggtggaggatttggtgtaatcacagccggtgcacttgtcggaatcggggaggaactcgtgggcggcttcgttctgcttgttaccgcactttgtgcactcttcccagtgagaggcggcattgtactttagggtctggccaaaggtgcagacctcatgcgtcaactctctttcgcagacagtgcaggtctggtgatggtagccatcgccgacatttacccaagcggagggggtgtggacagccttatccaattgctcgttgcagccttcgcgggcacatactttccagtgttctttctcatctgtggtgacccaaggaccgttatgatcgtggccgagggcggctttcgtcacggcggcaggagttgtctcggtggtggcggtggcatcggagaacagcttaccacagttgcacttccagtaggcagcattgccgggtgcggtgcaggtggggtccttagccgctacggaagtaagatgactggtatggacatgaccgggggcgggggtgaggactttgccgcattcggtgcacttgatgggggcaccttcagttgcagcatcacggtcggggttatggctcgccgcatcatttattacggtacagccagtacgattgcacttgtgccagtgctggtcatcaccgatcgtccagacagtatcccaatcatggccaagagggctaccatcggtggcggtgcagccggtacgcttgcaggtcttaggagcggtacaggttgcatcagcccaatcatggccgagggcgctgcctcctgtcttaccgcaaatagaacaggttttggcagtggtgcagtttgcggcggtccagtcgtgctcttcatagccatctttttcgctattggcagtacctgctgtcaaggtgcagccttcggccgtacactcatgccagtggtgggtaccatcgctggtccactcggtagcccactggtgaacatggggggtggtgatggtgagagtgcacggatttatagtaagatctacaaggccatcatcaacatcagtcacagacaggtcatcatcatttttgattccaacactcatatctcccgcatctgcggcttccttaactttataagtaattgttacaatctcaaaatctcctgaaagctgtccgttataacagccaaaggttcctgtgcggtttgtatatactgcattttcgggaagtccagatgccagcgtatgagatacatattcaaaactatccgggacatccacattaaatccaattgccgcaatattctttgttgtattgctggacattgatattttaattacgacattttctccttgctgtacgcttgtagttgttgtctctacctttagtacagctgtttcatttgcaaaagcagtgcttgcaatcataaaacatatcagtgctattgcaagtgctatagaaacaattttcttcatctgttcaatcctccaaaattacaaagttgttatttgcttagtcgtgaacctaaacaggcgattgacatctgctatatttacttttttatcaagattgacatccgcggcaaaatactgttcatcactaagcgtaatttccttttttgatgtgtacctgaataaacggttgacatctgctatgttgattttcccatccccatttacatcgcctttgactacgaggatggcttcggtgatgccatcggggagagtgaaggcgtagccgctgccactagcaaccgctggagccgccacatatttgccgccggaaaggtagccgaccttgcagggcttatcgtaagtcactgtgaccacctgcccactgacggtataggtaccggacagtgcgctggagctgggggtaacgctcaacgggggctcctcctggatggtgacggtggcggatgtggcggtgaaggggacctcctgcaggctggcgttcatgatgtccaagcccgttatgccaattgtggtgacggtatccatgggggcattctccagcacacgaaaggttaaccggaggatgctgcaatcggagcctgtccagttctcaccctgagcccaaactgcattttcacgatctactttctcctctgtttcgtcctgttttgctttgatgcctacttcccagtctgtcagtaattgcccattcgcatcggtaagctggaggagtgtctcatcatactggaaagcgaaccttatgccggcgataccggggttattgtggatcaccagctctacggtgaattccccgcccggctggacggacgatgcggaggggcgcagctccaaggtgggggtgccctccgccagggaggggacactcacggcaaggcacaggatcatggccgccatgaggatgctccatatttttttcatagccaatctcctttctgccttgccgcgcttttatcggactgtgtcatccttctatcttctcttccacatactgctgcatcagcaggatcagatcggccagctttacctcaccgtcttcattcatatcggcattgagctggttgatcttgaccgagaagccggccaggtattttttgagatacaggatgtccagcaagctgccggtcttgccgtcatcatttacatcgccaaggacgcgggtaacgacctggaccccgccggaggtgacgctgaaggataccttattctcgctgacattgagggtctcctgcaccgcaagggtgatctccgcaaggccatcctctgcgttttccagcaccttgaaccggaggtttaagagtgtgccgtcttcgatataatccgctgcgccgacaaagaccgcttttccgttttccttgttgatataaagattgaatccctccggggccatttcacattcgagcagctccaggcgggtcttatcgtagctgatgtggaagccgagcgccgcaatgctggggatatcgtgcaggctgagcgtcacggcgaattcttcctgcggcttcacattctgtccggggacctcgatcttcagccgcggggtttccgccgccagggccggcacgcacagcagcagcgccgccaaggtcagaaggtattttatttttctcatgggttgcctctgctgattccaataaaatggatcatgtccgcatgcggacatgaaaatctccccggggagattttggattgggtaatcctgtactttagtttaattccaccatcagattttccttattgcaaccattaatgtaaaataaggatataaaaaccccggcctttttcccaagggccggggctggtttttcctcttcagcgctttttacggatgaccgtccgctcggcgtacctgccgaagaaatgatagccggagccgccctcgctgatgatattcaaaagctcatccggctttgttacctggatgccgcccagcatggtgaccccgcgggcgaagaaagcctccggcagcatgctggcggtgggcccggtgatgaccagcagatcggcctcggggacgcactccgcaggctatcaacggctattgtcgcagccttggtaagggtgctgccctcgatgaccttcgtttggtttttccagctttcgtccatcaagcgttcggaggtgtaggcgtagttgccattcccctgcactttgaacctgacgacataggtgcccacatccgttggagagcctgcataagcccagctgtactcgttcttcgggtagaaaaagcacttcacatcgtaaccgcccaagccgatgatgctatcgttgaccgtgggtgcggcctgcttgatgctgtactctacctcagcggtggcatcgcccactttaatgtgctggccttgtactggcccgcattggtgggtacggtttcacccgtgggaagtgtgacaaacactccgccttttttcacctggcaggtaatggtgggggtcacgccggcattgaacgctcccgtcagcggggcagtagttttttaggtgggccgaactccacaaaaatttttttactgcggtcccgttcgatctccgcgatgtacttcaccatctctctggcacttttgttggtgtagtacacgccggtctggtactggctgtcctggtcattgccctgccggttttacaccgtggggtcgatgacatggaagtaggccagcagctgctcggcgatggggtagctctccgatacatggagatttcttcctttatgaggagatgaattcgtttgtcagcccatatcggcggcaagagcctgatcgatgagcttttgcagcgtctccgcctgcttcttttccgtgatggcgcctacgatgggttcacccacgatattgccgttgcggtcaaccacataggtggtggggtaggcaaaaatgttggtagtgaactttcccgcctcgccgtcggaagcaaaatacacattctggtaggtcacgcccttcttggccagtacatcttttgcttcggaaattgccgcttcatcgccatccaatgtgaaggtgttgacaccgatgagtgcgccgcccttcttcgcaagctccttgttcagtgcgtccagctcggaaagctcgcccacgcagggattgcaggtggtgaaccagaaattcaccacggtgacggcgttggcggagaacagctcgtcgctcttcaccggattcccatccaaatccttgccctcaaaggcggggaaggggttgctgttctgctcgatgggcttgccgttttccgcagggacgctgacggttccgtccggggtctcgggcatcagctcggggaatttttcctctagcttggtcagctgatcctccagatcgcggatcttctcgccgccctcacgcagcaccttcagctcctcctcggtgaactgatccttggcgtcctcgatggtatccagcaggaactggccgtagtttttgccgtcctcgatcatgatcttatccttattggcggccataaagaccttttcccacagggcggagttttcgccgaggatggcgttttcctgcgccagaaggctatcgaacagggcagaggcctcctcaagggtcttgggctcgtcggtcatggtgttgccgccggggatatcggtctttttgtcgttttcctttgcgccgcaggcggccatggcaaggaccatcataacggccagcagcagggtgatgagttttttaacattcatttttgtttcctcctgaaaaatcattgggtattgttctgcggtgcaggcaccgctttttcggttttttcggtgtccttcccctccccgaagccataacggaagcgaatggcatcggtgggacaggcgcgtatgcacatcccgcagcggatacactcggtatggttgggcgccttcgtcacatccacatccatcttacaggctctggtgcatttcccgcaggagacgcacttgttttggtccaccttcatctggaacagcgagaccttattgagcagggcgtagaaggcgccaagcgggcacagccacttgcagaagggacggtagaataccacgctcagcacgatcaccgccagcaagataccgaatttccatgtaaacaggctgcccagcgccgcccggatgccggaattggcaagggacagcgggatggcaccctccagcacgccctgcgggcagaggtatttgcagaagaaggggtcgcccatgcctacatcgttcaccaggaacgccggcagcaggaaaaccatcaccagcagtatggcgtacttgagataggtcagtggcttgagcttctttgtggagagcttcttcgtcgggatcttatgcagcagctcctggaaccagccgaagggacacagaaaaccacagataaagcgtcccagcaggactcccagcaaaatgagaaagcctgtgatataataggagaagctgaacttggaagaccccaccaccgcctgaaatgccccgatgggacaggctccggaggccgctggacaggagtagcaattgagccccggcacgcagacggttttaccgccgccctgataaatggagcccttgaggaaattcggcagatgaatattagtgagaagggtggcgcccgcctggatccagccccggaagcgggacaggaggtgggagaccccggtatgttttttatccaatgccgacacactccaaacataatttaatcgccttactgaataccgttgcggcctcgccccgccaagcgccgaagcacagcatggcagcgcccgcaatcagcagcacgacctgcgccgcggctttttttgcatgagtcattttcatcatcctttccgaattactgtgcccatcatagcacggggaggttaaaatttctgttaagaacgaaaacttaacgcaaaccttatctatttttgctataatgaaagcaacataaaaacggagaaataaaaaaaggagggctctcatgcaccttttagtaattgaagatgaacgcgccctgtgcgagaccatcgtccgcagcctgcggcggctggcctacagcgtggactactgctacgacggggagaaggctctggagttgctgggcgtggagtgctacgatctggtacttcttgatctgaatctgccgaaaaaggacggcatgacggtgctgcgcaccctgcggcagaccgaccgggagacgcgggtgctgatcctctccgcccgcagcgaggtggaggacaaggtgcaggggctggacgccggggcaaatgactatctggcaaagcccttccacttggcggagctggaggcccgcatccgcagcctgacattgcggcagttcacccagcaggatgtgctgctaagctgcggagctttgacctttgacacccgctcccgcaccgccgctgtcaacgggcagctgctgacgctgacccgcaaggagacgggtattctggaatatttgatggtgcatcaggggcggcccgtgagtcaggaggagctgatggagcatgtttgggacaacagcgtggacagcttcagcaattccattcgcgtccatatctccgccctgcgtaagaagctgcgggccgtgctgggctatgaccccatccgcaaccgcatcggcgagggctatctgatgggaggcgaggaggaatgaagcggctttccctgcagtggcgcatcacgctgatgtccgtcctgctcatcggcatcacctgcgtggccatgaatctgctgctgtgctcctccggtgtgtactatatggacaccattgcggacagtttacaaggcggcggcacggtgatcctgaatgatggcggagcggcgagctttgacccgcagctcatagcgcccaacgaggagttgaccatcgtcgtcgatggggtgcaggggcgcttccgcaccaccaactggtacatcacggcggcggtaactctgctcagcggtttcctcgcctattttgtcagtggacgcgctctcaagcccctgcgcagctttgcctcgcaggtggagcaggtgcagctgaacaatctggcggatatgaggatcgatgaggatgtgttgccggaattccggcagctcagtcactccttcaaccagatgctggagcggttgaacaacgcctttaccgcccagcggcagttcaccggcaacgccgcccacgagctgcgcacgccgctggcgctgatgcaggcgcagctggagctgttttccgcggagcatcccgatgtgcggccggagacggcggaattcctcacgcttttgcgcgagcagacggagcggctgacgcagatgaccaagacgctgctggagatgagcaatttgcagcaggtggcgcggaacgagcagattcagcttatcccaatgattgaagaaatcttcacagaccttgcgccgctggcggagaagcgaagcatcacgctggaagcggagggcgacggctccctgactggcagcgacacgctgatctaccgtctgctctttaacctgacggagaacgccgtcaaatacaaccgccccggcggctcggtgcgggtcgggcttgcgcaaaggcaggaaaagtgcatcattcgcgtttccgacaccggctgcggcatcccggaggagtatcagcagagcatcttccagccattcttccgcgtggacaagtcccgcagccgcgaatacggcggtgtggggctggggctctcgctggtgtgggagatcgccgctctccacggcggctccgtttgggtagaggaaagctcggacaagggcaccaccattgcggtggagctgccgacaggggcggaaagcgatccctccggcgcggatatcccatagcggcccttggcggtttcatgataatcgtttttcaacccccacaaaattatcgcagcagctctcgatcagctccctgtcgtgggtgatcacgggaatggttctgccgtgccgcgcttcgcttttcagtttttctgcaatcaggcacatgttccgcccgtcaaggccgctggtgggctcatcgagtatcaatatcctgcggccggaaaagatggcacaggcgatggcagggcgctgcttctgcccgccggacagggcggacgggtgcgcagccctgtactcgtaaaggccaagctcgttgagcaggttccttgcattgcttttgctttcttctgtcaattcggtattcagcagcagctcctccgccacgcttgacataaaaatactccccatttgagtttctgcggattttctcgccgcttgtccactctatggggagcatatcaaagatatgaaatcctccagttcaaatccggtcagttgccccgaaacctccataaaaatctatggttcaaaagaagaaatccgggctcgaaaaagcccggaaacggtagatgcgcctggctttgcgccagacgcatctataccggtaattctttatggagctgatgatcagattcgaactgactacctcgtccttaccaaggacgcgctctacctactgagctacatcagcgaattggcaggggcagaaggattcgaaccctcggcacgtggttttggagaccactgctctaccagctgagctatacccctatatcacgctttgaaggcgtatccattcagtgccaacaaacaagattatacacaaatccccctcgcttgtcaacaccttcttgccattttgcaataggttttttacttttcctttttcgcggcagtccctcccgcaaaaaactccgttgccggtgtcttcctcacctccctccatcatacaatgaaccatccgcaaataggaggtttttatcatggatgaatacggattcggcagccggggccccggcgtgcagctgttacagcttggcttatcccgcgcgggctatcagcccggccgcatcgatggcagctttggcagggggactgaaaacgccctgcggcagttccagcaggcacagggcctgcccgccaccggccgcagcgatgccgccacctggcaggccatgatgccctggctcatcggcacccggtttgtgcagctccggcagggggataccttctggcggctttcccagcagtacgataccagcgtcgccgccatttctgccgccaaccccgaactggacccccgcgatcttcgccccgggcagaccgtcgccattccgctggacttccccgtggtccccaccggcatcgcttttacatcgcaggtgctggagcttgttttgaccggcctgctgctgcgctacccctacctcggctccggtgccatcggcagcagcgcgcggggactgcccatctggtcggtttccatcggggagggcgaaacccaggtcttttacaatgccgcccaccacgccaatgaatggatcaccaccccggtgctgctggcctttctggaggaatactgcctggccctgctggatggcgataccctctacggctacgatgccgccgagctgttccgccgcaccaccctctccattgtccccatggtggatcccgatggcgtcgatctcgtcaccggctacttaagcagcggtccctggtacgagtgcgcaaagcagtgggcggaaaattacccctccattcccttcccggagggctggaaagccaacctcaatggcgtcgatctcaacctgcaataccccgccggctgggaggaagcccgccgcatcaaagagagcatgggttttacctcccccgctccgcgggattatgtcggcaccgccccgctcacccagccggaggcgctggcggtctaccgccacaccctccgcaatgacttccgccttaccctttcctaccacgcgcagggcaagctcatctactggcgctacctcgattacctcccgccccgcagcgaggaaattgcccaggccatgggggaagccagcggctactcggtggaggaaactccctccctcagcggctacgcgggctacaaggattggttcatccagacctacgatcgccccggctataccatcgaggtgggacagggcaccagccccctgcccctctcccagtttgatgggatctacgccgataacctcggcattctcgtcctcggtctggccctcgccgcccagccgcccatcgcccccgtggaggaagccccacccctgaatccgtaattttacattgcctgcccgacgggggtccagtctgtagtcgcctgtcggcgtcgcggagccccctttacaaaggcataacctgtacgcctgcccggcgtgggcctacttttctatgaagaaaagtaggcaaaagtcattcagggctccgccctaaagacccgtaacgcgtcggtacaccccgtataatcggggcccccgcaaggtcgtaagaccttgtggggaaaggaggatgcaccgcagcggggagggctgcccggagcaaagcgcagggtcagcccgacttaagcgaaggttgcgtccgacgcgacgacgcttataaggttgatttttaatttggtttctgctgaatccaaattaaaatgcgccgcaggcaccttgagagcgtatctgtgcgcagcacggacgatgccaaagcatcgttcgtatccagcactgcaagcgactgaaaggggttcgtcaagggggaatccgtcccccttgaccgtgttttgcctacttttgcacgaacaaaagtaggcacccgccgggcaggcgtgcagattaaaaccttttataaaactatgcgatgccgccaggcgactacaaatccgccccaccggtccggcataccgtttatgccacaccaaaggctcccccaacctctcggtcgggggagcccttttctatcgcttatttatacagcccgcgctttacataggtggtgtgcaggatatggtgcgccaggtggctgcccggctcgcccaaatactccgcgtacagctccttcaccacggggttctcgtggctcttgcgcagggtcatggcctcatcttcgctatacagggccgccgcgcgcaaggaacgcagatcggtgaaattgcgcacatcgccgctctgatggggctgaccgccgccgttgacgcacccgccggggcaggccatcacttccacaaagtgatactccgcctcgccgctcttgatgcggtctaagagcttcgccgcgttggcaagtccgctggtcacggcaacccttaccttggtgccggccaggtcgtactccgcctccttgatgcccgcaatgccgcggacctcctggaattcgggacgctccagctccttgccggtcacgatctcggcaacggtacgaagggcggcctccattacgccgccggtggcgccgaagatgtgtcccgcaccggaggcaatgccgaagatggggtcaaactcctcatcgggcagctcattgaacattatacccgcccggcggatcatatccgccagctcccgggtggtgatggaaatatccacatcgggcaggcccacggcgctctggccctcgcggccgatctcaaacttcttggcggtgcagggcatcacgctcaccaccacgatgttcttggggtccagccccgccttctgggcgtaataggtcttgatcagcgcgccgaacatctgctgcgggctcttgcaggaggaaaggttatccacaaattcggggtaatagtgctcgcagaacttgatccagccgggagagcagctggtgatgagcggcagggggcctccttccttcagtcggtgcagcagctcggtgccctcctccatgatggtcacatcggcggcggtatccacatcaaatacctggtcgaagcccaaccggcgcagggcggccaccagcttaccctccacattggtgcctatcggcatcccaaagcactcgcccagctgggcgcgcacgctgggcgccggtcccacgatgaccgtcttggtcgggtcgttcagcgcggcccacaccttgtcggtgtcgtcccgctcccgcagggcagcggtggggcacacggcggtgcactggccgcaggccacgcaggctgtctcggaaaggggcatatcaaaggcgcaggcgatgtgggtgtcatagccgcgctcgcaggtctctatcacacccgcatactggttcttttggcacacggccacacagcggcggcacaggatacacttgctgttatcccgtaccaggtggggcatggaggcgtcggtgtggtagctctggtccttcttggtaaagcggttcatatccacgccgtattcccggcacagctgctgcagctcgcagtcggtgctgcgggtgcaggaaaggcagtcggtgcggtgggtggaaaggatcagctccagcgtggtgcggcggtacctttgcagggcgggggtgttagtaaaaacctccatgccctcgcccaccggcatcacgcaggcggcggccaggccgcgggcaccctttacctcgcatacgcagatgcggcaggcgccgatggcgttgatctccttgagatagcacaaagtggggatgcggatgccgaccagatgcgcggcctccagtatggtggcgccctcgggagcgaccacgggaatgttattgatcttgagatttacggtattcattgtcggtcactcctttcttatcgttttacaatggcgttaaagcggcaggtctccatgcaggcgccgcacttgatgcacttacgggtatcaatctggtgaggctttcttacctcgccggagatcgcattgacggggcaggcacgggcgcaggcggtgcagcccttgcacttgtcctcctcgatgacgaaccgcaccagccgcttgcaaacgccggcggggcagcgtttttcgatgcagtgtgcctcgtactcgtcacggaaataatgcagggtggaaagcacggggttgggggcagactgtcccagcgcgcacaggctgttggccttgatgtagtagcacagctcctccatctcgcgcagtagctccacggtgccgttgccggccgtgatctgctccagcatctccagcaggcgccgggtgcccacacggcagggcgtgcacttgccgcagctctcgtccacggtaaattccaggaagaacttcgcgatatccaccatgcaggtgtcctcgtccatcacaatcagaccgccggagcccatcatggagccgatggcgatgaggttatcatagtcgatgggggtatcaataagggaagcgggaatacagccgccggaggggccgccggtctgcgccgccttaaacttcttgccgttggggatgccgccgccgatatcctcgacgatctccctcagggtggtgcccatggggatctctaccaggccggtgttgttgatcttacccaccaggcagaaaaccttggtgcccttgctgcgctcggtgcccatgctggcaaaccagtcggcgccgttcaggataatgcggggaatattggcccaggtctccacattattcaggatggtgggcacgccaaagaggcccttgaccgccgggaacggcggacggggacggggctcgccgcggtggccttcgatggaggtcatcagcgcagtctcctctccgcagacgaaggcgccggagcccaggcgcagctcaatatcaaaggcaaagccggtgccgaagatatcgtcacccaaaaagccgtattcacgggcctgcttaatggcgatctgcaaacggtggatggctatggggtactcggcacggacatagatatagccctggtgcgcgccgatggcgtagccggcaatggtcatggcctccagcaccacatgggggtcgccctccagcacggagcggtccataaacgcgccggggtcgccctcatcggcgttgcagcagacatacttcacatcgcccttgctctgccgggcaaagaaccacttctgcccggtggggaagccgccgccgccgcgcccgcgcaggccgctgtccttgatggtctggatgacctcatcgggggtcatccccgtcagcacacggcccagtgcctcgtagccgtccatggcaatgtactcgtcgatattttcggggttaatgacaccgcagttgcgcagggccacgcggtgctgcttttcgtagaatttggtgtggtttaggttcttgatggtcttatcatccaccacagtctcctggtacagcaggcgggtgacgatgcggcccttgaggatatgctcctccacgatctcggggatatccgcctcggtcacatggctgtaaaagcagccctcggggtacactaccaccacggggcccagggcgcacaggccaaagcagccggtcttaatgacctgcacctcgcccaacaggcccttttcctccagctcccggttcagctcatcaatgagtgcctgggaatgggaggagctgcagccggtaccgccgcacaccaggatgtgtgttcttgctatcgccattggtttttgtcctccttattccatgtaggcgcccacggtgtactcggtcaccgggctaccgtttaccagatgttcggtcacaatgcgggagaccttctcgggggtcatcttcacataggtcaccttttccttgccgggctggaacacctccacaatgggctccagcttgcacatgccgatgcatccggcctgggtcactaccacatccttcagtccgcggcggttcacttcctccacaaaggcggtcagcaccgggcgggccccggcggcgatgccgcaggtagccatgcctaccactacacgggtggcggtgctgttatcctgccgcatggccacattatttttcatccgctcccgcagggcggccagctcttccaaagatttcatcgcttattcctccctctcactcacaggtatttatccaggatcttgtccacctcatcgggggtcaggcggccgtacacatcctcattgatggtcatgaccggggccaggccgcacgcgccgatgcagcgggtcgcctccagcgagaagcggccgtccggggtggtgccgccgggctctatgcccagccgcttctggatacgctccagcacatcgccggcgccctttacatagcaggccgtgcccatgcacacgccaatgttgtaggtcccgcggggattgagggtaaactgcgcatagaaggtcacaacaccgtaaacctccgccagcggaatattgagctcctctgcgatgatggtctgcacctcaatgggcaggtagccgtaaatttcctgcgccccctgcagcaccggcatcagcgcgccctgctgctccttgtgggccgctatcagctccagcagcgccttttcctgctcggtcgtcccgtggaacggcacgacggtctttctttttgccatgagaatggttcctccttagttccttccggaattgttcctctatatcgtcaactaccagcaccttcatttgacaaggacacacaccttggcggtgaaaacctgtgctgacttgtgtcatcctgtcgttgcggactgcgctccatgtcgagcggtattcacgcccacaaaaaacatatgcgctcttgtcaggtgaaggtggcgtagtctctgccatactcttcccgccggcccctgcaaggcgcaggtccggccccgcagggcatcggcctgcggccgatgtggtcgggcctccggcccgcctctgcggctgtgccgcagcccctgcggggccgccggcgcctttcgcgaatttacagcttctccggggcggggcagcactcggctatcccctcggccacctgcccggtaataaacgccagcacctccggctccgccagggagatctcctcccccagcaccgcacggtactcccgggtatcggccgcgaaccgcgccccatcatagtcaaattccagccggaaatccttttccgggctgcccccgatgagggtggccatggtctgcggcagatcgcccagcggcagccggtctatgtggctcagtccaaagaccgccgtcaccgtggtgcccacccccggcgcgctctccaccgtcatggcgccgccggtcatttcggccgccattttccacagcggcaggcccatgcccacccggcgggtggtgcgggtggtataaaagggatcggtcaccttccgcaccgtttcggcgtccatgccgcagccgtcatcggtgatggtcaccgtcagcctgtccgcggccgggcggtaacataccgccaccgtgatcagggaagccccggctttcaccgagttttcggcgatatccaggatgttgagcgaaagctcctgcaagcgcactcccccttattttagtaacacaaaatattgtaacaagccctgtgacaaaaatcaacattctttttatcgaattcccttttggttgcgcattttctacacggcggcccggattcggcggttttagcggggtttcattgtatattccttgtgctttctccacaaaataaaattggatcttaacatcccaaattccacgcaaaggagcgagtatgatgaaggtaacattggatcacgagggctgcatcggctgcgggctgtgcgtttccacctgcccggcggttttcggcctggcggcggatggcaaagcggaggtggtgcagacccccatctccgaggaggagaaggacggcgcccggctttcggcggaaaactgcccggtcagcgtgatagaggcggaggaataattgatggccgaggaaaagaaaatccccgcccctgccccggaggctgtcccgctgcaccgcccggaggtggatgccgcccccatcctgccggagccgcagacccctcccccgccgcccggcccggtgtaaatgggcttgtcccctttttccaccttgcaaaaaacccggga

SEQ ID NO: 2816 - DNA, 1878 bp, Unknown
  16S sequences of unknown bacteria
ccaccggcgcggacgagctggccaacgcctacagcgcccttttgttcgcgctgcccgttctgaacgccattttaatgcccattgtgatggcactgatcgccagccgcctgtgggacatggaggtcaagggcagcaccacaaaactgctgtacacgctgcaaagccgccgcagtctgtttgcgggcaaggcgctgctgggcacgggtgaggtcctgctgatggtcacgctggaaatggccgtatccatcctgctggggcgggtgcagggctataccgaggcgttccctgccgagccgtttgtgtacacgggcatttgcacgctggctgtcgatgtcatgctgtttttctcggagcttctgctgatgttgatttttgacaacccgctgcctgcgctttgtgtcggtattgtgggggcactgatcgggctgttttcggcgttcatgccgccccttgtcagttattttgtgccgtggggctactttgtcccgctgtcctgctatgaggtttcctactgggaccaggccacccacactgtgacctacggcctgcggccctacagctggggactgctggcgtttaccgtggtactggctgcggctttgtttgccgccgcctggcgcatgatgcgcgataaggaggtataacgaatgctgaagcgttgtataattgccgagaaccgcaagctgcatgcgtcgcccatctgggtgatcttctttgtgctgccgttgatttccgccgggtacgggacattcaactatctgcaaaatctggaaatcctgaccgagcggtggtacagcctgtggacacagcacacgctgttttactcgatgctgttctttcccgcgctggtgtcggcgtatgcggcctacctttggcggcttgagcaccttggccacaactggaacctgatcatggcagcacccgtgcggccctttgcgctgtttgcggcaaagctccttgttgttgtaaagctgatgtgctttacgcaatgttttgtctttgtgctgtacgtggcgtgcgggcggctgtttgccgggttcagcgattggccgccgatgagcatcgttttctatctggtgcgcggcattttcggcggtctggctgtggcggcggtgcagcttttgctggccatgctgatccgcagctttgcggtgccgattttcttagggctggtcggcggcattgcgggaatgctgatcggcagcaagggctatgccctgctgtggccctactgcctgatgcagcagggcatgaacgccaaccgcagcaccgacgtgctggccgggaatgtgctgccgtttttgctggcgtgtgcgggctggctggcggtggtgcttttgaccgcaaaagtgctgctggaaaaaacggatgtgaaagcgtaatgttttaccgcgcagcaggggccgcatataggcggcccggcggtatatggcgggtgggcatttgcaggagagcactgggccgggcatgcccggcccctgccgccgcgccctatatttctgcttgcgaaacgccctgccctgctgtataataaaagcatcaacaaacaggagggcacgccatgactgccaatgctgccgattttgccgggcctgggtgcgggcgccgttatgagaaagagctggagacccattttcgcgattgtctgctgttttatttggatggccgcatccgctttgagcgctactgctacggcgaggccgcctgtctggtgttcagcgtctgggcccacggctttgacgctgacgggaacattttatgggaccgcgaaccggagtttgagagccagaaaaccgccattccccgcgtgctgaccgacattcaggaggacgggaacgccctgcagtttgacggtgccttcaagcgctacgtcaagac

SEQ ID NO: 2817 - DNA, 27830 bp, Unknown
  16S sequences of unknown bacteria
ttctgctttttttaccagcatctttatcacccctcactattataccgcattctttccctcaattcgagaatctccaatgagaaaaaaggccaccttccggtgacctttttcgacaggctgaagcgtccattgcgcaagcaatggacgctgattgttgggtcaaggggctgacggcagggattacctttcgcctctttctctgcgagcctggtagcactcgctgcagtagacgggacgatcattcttgggaatgaaggggatcttggtgggcttgccgcactctgcgcagatcgcatcgtacatctcgcgggggcgagaatcgtcgcggcgggcgccaccgttagccttgcgagcatcgcggcacgccttgcagcgggaaggctcgttctggaagcccttttcagcgtagaaagcctgttcacccgcggtgaagacgaattcggcgccgcagtctctgcaaatcaaagtcttgtcttcgtacatggtaaggtatccctccgatagattgttgtgcctgttttttggtaagctgacctggtttttgcccccacactcgccaactggaaggttcgctcctaacggtgtctccgtccccactactacccctctcggattgctccggttggacttactcctaggacgcgccatgttcatcggcattttgccgacttatgtggatcgcttcgcccgcgtctggcatcgactttcaaccacagaccttgcctcggatcaagcaactgcccttattataaacgactttgttcaaaaaagcaacagggtttgtacaaaaaatattttcgtttgttaaaatgctgaaaaatacgatcttgggtgttaacggttggctgtcaaagcaatggacgccatggtataataaatgaaaacccaaatgttggaggcggaaatgaagaaatcggtctggttgctggatgcggatatgacgctgttcgattttgagaaggcggagcgctttgccctgcgcgaggcctgcgcgcgcttcggaatcgaaatttctgtgaaggagagcgcgctgtaccacgagatcaacgaggcgctgtggcgaaagctcgagcggggcgaaaccacgcaggcggcgctgcagatccagcgctttgagacgtttgcggacgccctgggcctgtccgcagacccccatgcgctggcggaggcgttcgtcgtgcagctgggcgagggctgcttcctgtttgagcaggcgctctccctcctgcagaacctgcacgcgcgctgccgggtggccatcgtgaccaacggcatcacgcaagtgcaaaagcgccggctgcagctctcgggtctgagtccctacgtcgacgcgctggtcgtctcccaggaggagggcgtctccaagcccgacccgcgcatcgtggagcgggcgctggagcgcctgggctgcgcggaccgcgcgcaggccgccctcgtcggcgactccctgacctcggacatggcggccgcgcgcaacgcgcgcgtggacggaatctggtacaaccccaagggactgccgcggcccgcggacgcgccgcacatcgtcgcggagatccggcagctgcacgatctgatgcaattcgtatagcggaggagagaagatggacaaaacgagagcgacctaccactttcaacccgagaaaaactggatgaacgaccccaacggcccggcggtgctcgggggaaagctccacatgttctaccagtacaatccctttggcgcgtcctggggcaacatgacctggggccacgccgtggccgagaacctcgtgcgctggaagcgcctggagcccgcgctgcgcccggatgcgccctacgacaaggacggcgtgttctccggctgctgcgtggtcaaggagggaatcccgcatctgctttacacgggcgtgcagcccgaggtgcagtgcctggcgatcggggatgcccgcggggaacacttccagaagtacgagggcaatcccatcatcgagcgcctgccgggggagacgctcacgggctttcgcgacccctttgcctgggaggaggacggaaagacctacgtcgtcatcggcagcggcgagccgaacaagcgcggctttgccttcgtctaccggagcgaggacctgaagacctgggagcgcgtgggcgagctctgctccaaggacgacccgcaggaggacatgtgggagtgcccgaacttcctgcgcttcccggatggacaggccctgctgctcgtctcgctgatgaaggcgcagggggtcttcgccatggagggagcgtatgaagaccaccgcctgcacgcggggcccatgcgcccctttgacctgggcgacagcttctacgcgcccaataccgtccgcctggcggacggccgcgcgatcctctttggctggatgaaggagaccgtccccgggcgcgagaaggcgggctggcagggcatgctcacgctgccgcgggagatcgtgcagcacggggatggaggcgccggcgcgcgccccgcggcggaggtcgagagcctgcgcggggaaaagcaaatcgaaaagcggaacttcaccctgcgctccggggaaaacccgctcaagggcctgcacagccgctgctgcgaggtcctcatcgagttcgaggcgggcagctccggccagctgcacctggagctgtgcaagagcccgcgcggcgaggagaaggtggaggtcctctacgacggcacggccgacgcgctctacgccgataccgggcgctgcggcggccgcggccgcacgggcggctacgtgcagggccgcggcacgacgcgcctgcgcgccttcctggacggctccgcgctggaggtctatctcaacgaccgcgaaacgctgaccacgcgcctctacccggagcgggaggacgccgacggcctgcgcctttgggcggagggcggcgtgcgcgtgaatctgctgcaggtctatgaaatgcaaagcgcatacgaggaggagaaaaaatgaaggcgagagaactgatggaagagctgtttgcccgggcggacgagcccgtccgggacacggtggacacctgcaaggccggggacccggagcgcgcgctgcgccgggttgccacctgctttatcaccacgcccgaggtgatccgggccgcgggggactggggcgcggacctgctcatcacgcacgagccgacctactacgagcaccgcgaccacctgggcgcgatcccggacgatcccgtgatgcaggccaagaagcgcctgctcgagggaacggggatgacggtctaccgcctgcacgaccacatgcacgccagcacgcccgacggcatcatcgagggcgagctgcacgctctgccctgggattgcgcgcacgacggccatttcgccgtgacgctgcgcgagccgcggaccgcgcgccaggtcgccgcggacctggagaagcactggggcctccggcgcgtgcgcatggtcggcgcgctggacgagcccatgaccggcgtatacctgatgatcggcgcctatggcgaggagaaccacctcaaggccctgcgcaagcccgagtgccagatcctggtcgtcggggagacgagcgagtggcgcatcgcggaatacgtgcgcgacgcggtgcagctagggctctccaaggcgatgctggtctgcggccacgtgggcagcgagcgcgagggcatgcgcttcctggcgcagagcatcgcaaaggcgcatccggacctggagacgcgctactttgagtgcggcgaggtctacacggacctcggctaaaaagaaacggggattccctctgcccgttgcctctgcttcgtcccgtgctgccgtcggcagcacgggatttcgtctgggaggattgcacgcggtatccaagggcttcagccccctcgaaagcgacacgccggcgtttcgcataggataagaagaaaacggggaaaccctctgcgcggcgtgaagaccggaaagcagtccctcatcctaccgcctctgcttcgtttcgtgccgccgtcggcagcacgggatttcgtctgggaggattgcccgcggcatccaggggctacagcccccctcgaaagcgacacgccaccgtttcgcataggataagaagaaaacggggaatcccaaccggaatttcctctgcgcggcgggccgggtggattgcgcgcggcatccaagggcttcgcccttgtcgatgcgaataaaattggaagaaagcggccttttcgaacaagaaaggggaatcccaaccgggattccctctgcccgttgcctctgcttcgtcccgtgctgccgaaggcagcacgggacttcgtctgggaggattgcacgcaggatccaagggcttcggcctcccgcgaaagcgacacgccgccgttgtggatagggcgggaagaaaacggggaatcccaaccggaatttcctctgcgcggcgggccgggtggattgcgcgcggcatccaagggcttcgcccttgtcgatgcgaataaaattggaagaaagcggcttttttcacacaaaaaggaggaaccccaaccgggattcctctctttttgtgcgtttgcgggcgctacgcgggcttctgcgcggagacgatgagcatcatcggccggcgcatctcgtcgcgcatgccgggaaggtccagcatgctctccggcggcgggggctcgaccacgcgcgcgaggcggaagccgttcgtcagcagcgcgtccagataggtcgtgagcgtgcggtgatacttggtcaccggctccccgaggaagaccgcctggcgcggcccctcgtagtagtagttgtccacggggaagtggaggatgttcccctccgcgtcgtagaaccagtcctgcgagccgtaggccgtgaagaccgggtgctccacggagaagaggaacgcgccgcccggccgcagccagcgcgcgatgttctgcaccagcggcacaaaatcccgcacatagtggaaggcgagggagctgaacacgatgtccacgctgcagtcgggcaggacgaggtcctccatcgcgcagcggcggtaggtcacggccggggcggcgttcttctcctgcgcagcggccagcatcttttccgaaaggtcgatcccaaggacgctgcgcgcgccgtgcgctgcggcgtaggcgcagtgccagccgtagccgcagcccaggtccagcacttccttgccggaaaagtccggcaggagcggttccagcgccggccattcgcccgcgcccgccaggccgtaccgggagcgcgacatctcgccgtatttctcgaaaaatcgctcgtcgtcgtacttgttttccttcatttttgcatcccccttgggaaatcagaatccgatgacggagccgtccgcgcggggctccgtggccccggcccagctctcgcccgcgcgcaggatcatctgcccgcggccgtactggccgcccgagagaacgcggatctcgtgcccgcggcggcgcagcgcgtccacgaccgcgtgggggaaggacggctccatgtcaaagcgcagcccgtccgtccagcagaagcgcggcgcgtccagcgcggcctgggggttgtgtccctcgtcgagcaggtggacgagcacctgcatgtgcgcctgaggctgcatgtaaccgcccatgatgccgaacgggcccaggggcttgccgtcccgcgtcaggaacccggggatgatggtgtggtacgggtacttgcgcggcgcgacgacgttggcgtgcccctcggcaagggagaagcacgcgccgcggttctgcaggcagatgcccgtgcccggcacgagcacgccggacccgaagccctcgtagaggctctggatcatggagatgctgttgccctctccgtcggcggcgcagaagtagaccgtgtccccgcgcaggggctcgccgggggcgtagacgcgcgcgcggtcggtgatgcaggccgcgcgggcgcgcgcgtattccttggagagcaggtcctccggcgaaacgcgcatgtaggcggggtctgcgatgtagtgcagcgcgtcggcaaaggccagcttcatggcctccatcatcatgtggagcttgtccacctcgcccgcgcccgcaagcggcagcgcctcgaggatgttcagcgccagcagcgccgtcatgccctggccgttgggcggcagctcccagacctcgcagccgcggaaggaggtgtgcacgggcgccacccagcgcggcgcatacgcggccaggtcctcgccgcgcagcaggccgccgctctcccggctgtaggcgtcgatgcgcgcggcgagatcgccctcgtagaggtcgcggcagtggctttccgccaggcggcggagcgtctggcccatgtccggccaggcgaagcggtcgcccgcgcggaaggtgcgcccctcggggttgaagccctcggcccagcggcgaaggaccgggtcctgcgcatgggcgaagaggtccgtgcaggtgttcagaatcggcgcgttgtccggggagagcgcgtagccgcggcagagctcgatggccggggcgaagagctcctgcagggactttgtggcgtagcgctcgtgcagcgcggcccagcccgcgggcgcgccgggcacggtcacgggcagccagccgcgcttgggcatctcctttgcgcccgggcaggccgccagcacgcgctcgcgcgtgagcagcgccggggagaagccgctggagttgagcccagccagcgcctcgccgcggaaggagacgatggcaaagcagtccccgcccacgccgttgtttgcgggatcgacgaccggcagcgccgcggccatggccagggcggcgtccacggcgtttccgccctcgtgcaggatctgcaggccggcctgcgtggccagcgggtgggaggaggcgaccatgccccggtgcgcgtagaccaggtttcgccgggaggcgaagggatagtattgcggatcaaacattccgattcctcttcctcgcttttcagcgtgttttctgttggggcgctcaggactgggcggcctcccattcctcgtagagcgcggcaattttcttttgcagttcgtcgtatttccggctgagcgcctgggcgcgggcgttgtccgcgtaggtgtccgggtcgctcatctcgatctcgagctccgtcatctgcccttccaggtcggtgatgcgcgtttccaggttggccacgagctcccgctgccggcgggcggcctcctgggcggccttttcgcgctttttctcctcgcgcagggcggtcttggtcttggcgggcgcgaggtcctcctcgggcagggccttctgcgcggccttttccaggtagtcgtcgtaattgccgatgtattccgtcacgccgtcgggctccatcacgatcacgcggtccgcgatgcggttgatgaagtagcggtcgtgggagacggtcaggatcgtgccctcaaagccgagcagggcggtctccagcatctcgcggctgtccatgtccaggtggttggtgggctcgtccaggatgaggaaattgtcctggcgcagcatgagctttgtcagcagcacgcgcccgcgctcgccgcccgagagcgtggagatgggcgcgagcacgtcgtcccccgtgaagaggaagccggccagcgcgttgcggatcgtggtctggtccgtgcgggggaagtcgtcccagacctcgttgagcacgtccttgtccgggtgcaggccctgctgctgctggtcgtagtagccgacctccacgcccgcgccgaagcgcacggagcccgcatccggggcctcctggccgacgaggatcttgagcagcgtggacttgcccacgccgtttgcgcccagcagcgcgatgcggtcccccgcgcgcacgtgcaggttcagcccgtggaagaggcggcgctcgccaaaggacttggacaggtcctcgcacaggagcacgtcgttgcccgtgccgcgcccggcgtggaagcggaagaagacgttgtgctcctctacgggcttttcgaggcgctcgatcttgctcaggcgcttctcccggctcttggccttgatgtgggaggcctccgtgttgtaggcgcggtactgcgcgatgatggcctcctcccgcgcgatctccttctgctgcagggtgtattccttcaggcggcgcaccatgacctcctcgcggagcttgaggtagcgcgtgtaattgccctcgtactgttcgatctttccaaaggacagctccgcgatcgagttgcagaccgcgtccaggaaatagcggtcgtgcgagaccacgaccaccgcgcccttgtaggcgcgcagatagtcctccagccactggatggaggtcaggtccaggtggttggtgggctcgtccaggagcagaaggtccgtgcgcagcagcaggagcttgcccaatttgaggcgcgtgcgctccccgcccgagagcgagggcacactttggtcatactgcgcgctggtaaagcccaggcccgtcagcaccccctgcaggcgcgagcgccagctatagccgtcctcctcctcgaagcggtcggtgagcttggcgtagtcctccgagaggcgcgcgtactgctccggatcgacgtcgtgcagctcgcccatgcgcgcctccatctgccggagctgttcctccatctcaaagacgccggcaaagcaggtctccatctcctgccagaccgtgcgctcgctcgtcaggtcgtccagctgcgtgtggaagccgatgcgcaggccgcgcgtcgtgctcagggtcccgccgtcgtaggcgtcctggccggcgaggatcttgagcagcgtggacttgcccgagccgttggagccgacaaggcccacgcggtggtgatcctgtacggtcagcgtcacgcccttgaggacctcgtttacgccgaaggatttggtcagttggttggtctgtaagacgatcatggtgctcccctttccctgggacgatgtactctcatatccttcattgtagcacaggacaggacttcatgcacggcttttttgccgccccctgcgcttcggttgacaccgggggcggcggaccgtataatcaaggcagagtgagcggaaaccccggctcgaaagggaggtttgcagatatggcagtcattcagatgcccagccgcggcaagaaggacgaaaccggcatgatcaccaagtggtacaagaagacgggagactgggtcgcagagggggacgagctcttctcctttgacacggacgacggttcctatacggtaaagtcgcagaaggcggggcggctcgtcgccatcttcgtccccgagggcgagctggtgcactgccccacagacgttgggatgctctcctccccctcgccggagtccgtgctgcacctgggccggatgcagttcgtggacgaggaaaagccccgcgtcgccccgcacgcggacccggagccggtctcccccgaggcagaggctgcccccctggcagagcccgccccagaggcggagcctgcccccgaagcagaggaggccccgctggcagaagctgccccggaaacagagcccgcccccgaggcagaggctgcccccctggcggagcccgcccccctggcagaggctgccccggaagcagaacccgcccccgaggcagaggctgcccccctggcagaggctgcccccctggcggagcctaccccggaagcggaggaagcgcccgaggagcttggcgacgcggagccgcaggaggacgaggcccccgcggagctggattcttccgcgcaggagggcgcggacgagaccgcgccggaggaggacgcgcagccggccgaggcggagccggaggaggaagcgcccggaatcgcgctctcctttgccgatatggagccggaggaagcggacgaggaggaggcgcgcgccgccggggcggaagcggcggaggacgcacaggaatccgaggcgccgcaggaggagacggcagaggaggcgccgtccgagcaggagccggagcagaccgaaccggaggccgcggcagccgaaccggcgcggccggcgagcctcacccggcgcgtggacgtggcgctctgccaggacatcgccgcgcgcacgggcgtcaccctggcggccatggtgcgctttgcggccctgcgcagcgcgccggcgggggtgcttgcgcccctggaggacgagacgctgcgcggcatgagcgcgcagcaggatctgcccaacgtgcaggacctgggcaagtggggtgtcgtgcgcgcgcagcgcacgggcgcgggcgcgctctgcttcctcgttccggcggcggcggagacggcgcggcgcaagggcgaggcggtcgagtgggttccgacgctggagctgacgctctgctttgacgaggcgaagctctccctggaggaggccgcgcgcttcctcggcgatacgtgccggaatctggagaacttctgggatctcctgctgtgatgggcgcaaaaaaaggacggcttttgccgtccttttttgcatgccgaaggcccgcttcctcgcggcgcacacgccgccggtgcggattttcgaggaaaggggcctctttctgcacacaaagtcagcacgcttcgaaagcatgattccgactggcattcacgccgctgaggatggaacagggaaggggcgaaagccccttccctgttccatctgcgaagcagcaaaggctttttgcgtcagtcgaggaggtaggcgccgtccgcgcggagggtttcgcgcaggaggttcgggtccaggtcgcgcggggcgatgccggccttggcgctcagcgccgcggcgagcccgcccgcgtggccgatcgcgccgacgatgggcgcggtgcggaacgcgccctgcgcccggtaggagacggaggtgcagcgccccaccgtcagcaggttgccgacctgcgcattgaccaggcagcgataggggagggagcggatctttccccagtaatagcggttttcctccgcgtggctggcgaagcggcgggaggcgtcgttctgcccctggtttcccgcctcgtgcacgtccacggggtaggcggagaaggcgatggcatccgggaactcgcggcaggcgtacacgtcgtcgtccgagagcgtgtagagcccgacgatctggcgcgagctgcgcacgcccacgaacggacccgtgtagagcaggcgcgcctcctcaaagccgggaatgtacttgcggaacatgcggtagagctcgttggcctggcgccggccctcgatctcggccatcgtcagggagtgcgggtccaggttgtcaaacccctccaggtgcgaggtgttgatgatgacctcgcccggattgctcgtctcgaagaagagcacgtcccgccgggagaagctgagcgcgccctcggccacggcgcgctccgtggtgcgggtgaagccgccgatggagaggcggcaggcgcggtccaccttgtgggtgtcgtgctccaggcgggggaactcctcgtcgtgcgcgcggatgtaggcgcgggtgcgctcgacgtccacgttgttgacgcgcagcatcatggtcatggcctggggcgtgccggtgctcgggctgccgatgtggaagggcacgcccgcgcgcgccgagaggtccgcgtcgcccgtggcgtcgaggtacaccttggcgcgcacgcggaagagcccggccttgccgcagagctgcacggaggcgatgtccccggactcgacctgcacgtcggccagcatcgtgtggtagaggagctcgacgcccgcctccagcgccatctcctccagctcggtcttgagcccctcggcgtcaaacggggtcacggtgtaggtatagcccgtcgtgtcgaagatgtggccgggggagaggcccttgcgctgcaggcgctggatgacctcgtccgcgatgccgcgcacgatgagcgtctcgcccgcgtggaaggtcatcatggggcccacgcccgcggcggtgagcatgccgccgaggaagccgtattgttcgacaaggagcgtgcgcgcgccgcagcgcgctgcggcgatggccgcgatggcgcccgaaaagccgccgccgaccacgagaacgtcgtagatgtcctgcatgaacggttcccttccctttttctatgaagctctatgcggggaacgcggggatcagaccccgctgcgccaggccgcgcagccctgccgcagcagccgggcgaactcctgaccattcgaaaatggagggcagaccatggaagcgccgcccgcgtcgcccacctggtggacgtcggaccccgccgtcatgaggaggccgtgcgcctgcgcataggcgagggcccggtcgttgtggctgtcgtggcgggggttggcgttgagcacctcgatgccgtccaggtggcgggcatcctggcaggtgaggtagtcgcggtaggggtgcgcctggacgaggacgccgtccggcgtgctgcgcacggccgcgtgcagctcctccagggagaggaaggccaggcacggcagctccgcgagctgctccggcgagacgccgtagacgaggtagtcctccggcccgtcgtacaggcgcacttccagcccggggaacacgcgcaggcccgccttgcggccggcttccgctgcgcggcggtacccggagaagtagcgctccagatagatgcggtagtcctcgcccgtgggatgcacggcgaagaactccggcgtgtagtgatcggtgacaaacagggcgtcgtacccggcggcgcgcacctgctcgacgagctgctccggcgcaaggcggccgcaggggctcacgggcgcggtgtgcgcatgggtttccaccctccaaagcgattccatgtcgttcctccctcagtggaatagatcgcgcaggtcgccgcgcgcggcggcagcctgcgcgcagaggcagacggcctctgcgtcaaagcgcgcgtcgtgcgcggcggtctccgcgccgaaatccgcccgcgccgcgcgggcgatggcctcctccgaaacgccgtagtgcgcgcacagctcgagaaggctcggcatcttgtaggggcggccgccgggcaggcagagcacgcgcgcaaagcggtacatcgtgcacaggccgtagcggttgggcagcgggccgaaggcgcgctgcagcacgcgcttgtcgcggttgaggtggtgcgctgcgagcgtcgcgccggaaaaggcggcaaggacctcctcccgcacggccgcgggctccgtcccgacgcggcagagaaaatcgggcgtgagcccggtcaggcgctgcacgcgcgcctccacggcctcggcgcggaagaagaagttccggcagacgcggcgcccgccctgcacctcgatgtaggcgagctgcagcagcgttagcgtcccgggatcgtactccgtgtccagaaagacggccttcacgcctgcgcgcgcaggtaggcggcgatgcggcccacgccctcctcgacgagccggggcggcgcggccaggttcagccgcacgaagccgtcgcccagggggccgtagtccgttccggcgttcaggcgcaccttcgccgtttcctgcaggtccttaaccaggtcctcgctgcccctgtgcaggtgccggaggtccagccagagcaggtaggttccctcgttggggtagaccttcgcgcccgcctcgcgcagcgcctgcacggcgaagtcgcggttgcgcacgacgagggccttgaccgcctcgagccactcgtcgccggtctggtaggccgcggtcgtggccagcacgcccagcaggttgccgccgcccatgccgatctcgttggccttgtcggagagggccttgcgcaggtcggggtcggggacgaggaaggtggagtggttgaggcccgcgatgttgaaggtctttgtggcggagaccgcgacggcgacgcccgtttccgcgccgtccagcgtcagggccgagacgtggcgcctgccgtcgaagacgaagtcgcagtggatttcgtccgcgatcaggggcacgcggtgtttcttgcacaggtccagcacggcctgcagcgtctcgcgctcccagacgcggccgcagggattgtgcggcgagcacaggagcatgagcctgcactccgcaaggcgcgcgtccaggtccgcaaggtccatctcgtaccggccggacgcggtctgcacgaggggattttccacgatctcgcgcttggcccggcggatgacaccggagaacggcccgtagaccggggactggatcagcaccttgtccccgggcgcggtcagcgcgtgcacggagagcagcagggagtcgaccacgcccggggtgaagagcatctcctccccgcgcagcttcatgccgtggcggcgggcgtagtagtcgacgatggcctgcttgtccgcgtcgctcatgcgcgtatagccgaagaccgggtgctccaggcgcttgcgcagcgcctccaggatgcccggcgcgcagggaaagtccatgtccgcgacccacatgggcagcacgccctcgggcgtggtgtcccacttcaggcactgggtgccgcggcggtcaatgcccgcctccagagagaaatccatattctgtcgtcctttctgtttccattagcgataggtgttcagcagcgcgtaggcggcgcgggcgtccgcggcaaagtcgccgcagttcccctcgatgctgacgcggccggcgtagccgcccgcgtggagcgcgcggaaaaaggcttcgtactccggctccgatccgtcgccctggcgcggataggcgcgctgcacgcgctcggcgatgtgcgcgtgcaggatgccccgctccacggccgtgcaatcctcgccgccggacatcatgtggtagaggtcggccagcgcgccgacgttgggcaggccgacgcgcgaggcgaggtactgcgcctcggcgacgtggtggaggatgttgcactcctgcgcgcgcaggggctcgatggcgatggacaggccgtagtcctgcgccatgcgcccggccagcgccaggtaggcggtaaggtacgcgtagccctgcgcctgggtcatgccctccggcaggcggcgcgcgccgccggagccgaagaccacgacctgcacgcccagcgcctgcgcgcgggagaaggccgtctgcaggtacgcgcgcacgcgctcgcccgtcccctccggcccgcagagggggtattcggcggggatcatgctgttcatggcctccaccggcaggggcgaggactgcaccgcggcgcgcaggccggcataggccgcctcgctcatctgcgcgacctgcgtcatgttcagctccaggtagtcatagccgatctcccgcaggatcggcgcatggtcgatggacgtgcaaattcccaggcgaatcatggtggttccctccttgcgacaaaacgtaggttcctgcatgttcaatgcgccggacagccctcaccggatggcgacgccggccgcgcgggcgatgccctgcacgcgcgcgaccgcctcgcgataggccgcgtccccggtcaggtgctcgatgatcatgggcgtgtcgggcgagagcgcctccgcgcgctcgatgtagtgcgcgatgtccagaccgcccaggcccacgggcacctcctccagcaggcaggtcatgccgtcgtgcagcttggagtccttgaggtggcagctgcggacgcccgcgcccagcaggtcgaacgcctcgtcgatgaactcccggttgtagaggtaggtcttggggctgtagacccagttggtgatgtcgatgtgcacggcgaaggcctcgcggtccacggcgcgcagaaggtccaggtactgctgcggcgtgtccgggatcatccactgcatggcctccatgcagtaataggtcttcttgggcttgacgctgtcgatgatctcctggatcgagcgcaccgtcgcctcgaaggcctcctgcgtgtaattggcgcggtggaacccgtcccagcgcgcgccgcggaacgccccggcaatgttgacgcagcagcgcgcgcccagctcctcggccaggcggagctggcccttgcacttttccagggcggcctggcgctgctccgggatctcggacaggggattgctccaggcgccgacctccgcgatgcacaggcccgcgccccgggccgcgtcggcataggcggcgatctgcgcgtcgcccgccgcatactctacgggaaataccgccgccgaaagccccagcgcgcgcaggtcctgcgcccactgctccggcgtctcatgcgaaagcacgtgggaaatgccaagtctcatatttgctcacctctcgatgtggtttgcttcgtccgcctcgtcctggcggtaccaggttgggcgggaaaggccgtaggggccgtcgtaccaggcgcgcacctggcgggcctgacgccgcaggatctccacctgttccccgccccgggggatcgcccagggcagggaggagatctggttcaccgctacgtacagggcgagcagcggccagaacgcgtcgggcggctccccgcggaagtaggcgcgcaggagcgcgcgggagaaggcgggggagcaggcgacgctccagggcaggcggctgaactcctcccaggggtcgccgtagtccatgcggtcaaagtcgatgaccccgaggcggaaggcggcgtccaggaccatgttggccacggaatagtcgccgtgctggaaggtggagggccggccggagagcagcgccgcgctgtccagcgcgtaggccgcgaactcgtcgagctcggggagatgcagggcgcaggcgcggtaggattcgaccttgcgcgccatcttgcggccataggcttcggcccagtcgggcgcaaggggcgcgggcacggtgtgcagcgcccggaggatcgcgccggcctggcggccgacggcccgctgcccgcgcgcgggcagcccgggcaggatctccggggagggccggccctccacccagctcaggagcgtgtagacgccgccctcgcagtcgccgaaatcgagcgcgcgggggatgttgacggagagcggggcgagggcgcgcatggccatgtactcgcgcaggcggcgctcccgcttgtccgcggggctgatgcgcagcaggcactcgccgccggggccggacacgtgaaacttctcgtccccggaaaagccctcctgaacgggatcgatctccgtccagagatcgctttgcgcaatgccgcggaacatacgacgcccttccccctttttcctgaaaatccaccttcagtatacaccgcaaatcccgcgctgacaaggacggggaaaagcccgccccaccaaacaaagcattcctatgcagggatggcaacagggaaaaatttgaaacaagttgtaagatttgagtccaaaagttgtgtatataagggaaaggacaaagaagaaagcgaggggaacgccgatggatgacggacagatcgtccagttctactgggatagagacgagcgggccatcccggctacggcggacaaatacggaaactactgtaccgcgattgccaagaacatactgggcaatccggaagacgccgaagaatgcgtcaacgatacctacatgcgcgcgtggaactccatgccgccgcacaggcccaatgtcctgtctgcattcctgggaaaaattacaagaaacgtatccttaaaccgctacaaacagaatactgccgacaaacgaggaggtggggaggttcccgctgttctggaggaaatcgcagagttggtatcggatacggacagtgtggaacaggaagttgaccgcagggaacttgtaaaggcgattgacgcctttctggatgggcttccaacggagaagagaagtctttttctctgccggtactggtattttgacagtgtgtccaaccttgcgtcccggtttggaatgacggagaaccatgtatccgtgacgctgaatcgccttcggcgaaaattacacaatgatcttttagaaaggggatttgacctatgaaaaaagaagaattttgcgaagtcctcggggacattgacgagaactatgtgaaagcggccagagcgtttcgcaaagcaaagaaaccgcggtggatgcagtggggagctgcggcagcctgcctatgtttgcttgttgccggtggagtcctgttcacgcggaaccatggaaatgttgcgccggatccggaccctgtgcaaattccgaatccgattcttacggttgcatctgtggaggaaatggaagagtatctcgattttgaagttcctgttctggacaaggaagctgcgtcttatgccgtttttattgaggacgggtatcccacaatgggacagatagagtatgcagacggttcggaattccgcatacagtacggaagtggagagattagcggcattcacggcggcacactggagaaaagcgaaaagattgacggcgtggaagtcgaacagtatagatacgaaaatacgacctatgcaatttgggaacaaaacggatttacgttcagctacgtatacaccgacagcgaagccatagatgtggcgagcatcattcagcaatttgcgtaaatggtcttgtcaggctgcaacccaaaagagcggcggtttccttcagaaacggcggctcttttctttttccatttcccctgaaatcgcggctttccttgaaaagggaggaaaagtccgcccctgtcctattgacggggcgggggcgggaacgtatactttccttaagaagcgacccatttggatacgaccgaacacaggacaaaaagggggttcgaaggaacatgaccatgctgggctttgccgcgctgaaagagggcggcgccgcgcttgtgaccctgcccatcccggagcccgcgccctatcaggcgctcgtgcgcatgcgggcgtgcggcgtctgcaacgggaccgactccaagatcattcaccacaccttcaagctcttcgaccaatacccgacgctgctcgggcacgagggcgtcggccaggtcgtgcgcctgggcgaaaaggcgcgccgcctgcgggtgggggacctggtgctgctgccgtttgtggagggggagctggcgggcttttcctcgggctggggcgcctactgcgaatacgccgtggtctgggacctgaaggccatgctggaggacggcgtcaccccgccggacagcgcgtacgcccagaccctgctcccgccggacatggacccggtggacgccacgatgatcgtcaccttccgcgaggtgctctccagcatcccgcgcttccacatcgagtcgggcgagacggtcgtggtctacggcgcggggccggtggggctgagctttgtcaagttcctcaagcaccgcggctgcaccgtcgtctccgtcgacatctcggacgaaaaggtcgagcgcgcgaagcgcttcggcgcggactacgcggtcaattccacggcggtggacgtcgtggcctttgtgcgggacctcttcccgcagggcgtgcagtccgtcgtggacgccgtgggcgtcaacgccctgctcaacgaggccatggggcttctcgccgaccacggcaagatctgctcctacggcatctcccccaagctcgagatgaacctgagctgggcgccggcgccctacaactggagcctgaccttcgtccagttcccggaaaagaaggaggaggccgcgcagcacgaggaggtcatggagatgatccgcacgggcgagctcgtgccgcgggacttcatctccctggtcctgccgcagggcgagatcgccacggcctttgaccttgtggaacagaagaagacggacctgaagaccgtgatcgaattccgggcatgatcccagaaaggaacgcatccgcatgcagcaatcgaaactcttccagatccttccggactacatctgcacgcccgatggaatggccatagaccgggagggcaacctcgtgctctcctgcccgaacttcgccgacgacagcctgcccggctgcgtggtcaagatcgacaagcagggcagcgtccgcaagtggttcgacgtgccggtcaaccccgcgcacggccttgcgcgcaccatgggcatcgcctttgacgacgactggaacctctacctctgcgacaaccccggctggctcggccggaaggagacggacttcaccggccgcctgctcaagatcaccgcggacgaggacggcatccgcgaatggaagaccgtcgcctacggcatggagcaccccaacggcgtgcgcatccgcgacggctacctctacgtcacccagagcaacctcacaaaggtccaggacccgagcggcaagctcgtcagcgccgtctaccgcttcgcccttgccgaggagaacgtctgcgtcgccaacaccctggaggacccgaacctctttgtgacgttcctgacgcagaaccccgactgccagtacggcgcggacggcatctgctttgacgaggcggggaacctctacgtcggcaacttcggcgacggcgcggtgctcaagatcaccatcgagggcgggcgcgcggtcaagaacgaggtctgggccagggaccccgagcagctcacctccaccgacggcatctgcgccgggccggacggctgcttctacgtcgcggacttctcggccaatgccgtggcgcgcatctccaaggacggcaaggtcacccgcatcgcccagagcccggacaccgacggcctccacggcgagctggaccagcccggcgagcccatcgtctgggacggcaagatcgtcgtctcctgctttgacctggtcacggaccccggcaaggtcaacaccgcccacgagatgcccgcgaccatggcgtatctcgacttggcgtgatcgtttttttcgggaatgcaaggaggaggcgcagcgtctcctctttgtttttgtagaagaaattgacaaaccgtgcagaacgatgataagatcaaattacaacagggaagaaccgcttgacgaatagcggaaaatgcgcttgcgcaaaagacggagaccgaaaggggggcgcggaaatgaaacgcgcaaaggcggcagtcgccgtgctcctgttcgcgccgctcctgctctgtccccggggtgcggttccgacggaagatccaccggctgtagagtatgtgtcgatttaccccgttcaaccagacgacccggaatgggccgcgttcacctctgcatcggagatgctggcggcgctgatggagcgggaagatgcggccagcgccatcgcggcgcgcctggagcagccgaggacaagagcgggaacttcgatggaggagctcaccttgcttattatcgcctcggacccgcgaatcgagcagcagctcactgccgaagaaagggatgtggtagcagaatgtgtggaatatcgcatggcggcggcctcggcgcacgcggaaaaggagggcatatgagaaagtttcagcggttggtcctggggttggttctcgtgggcgcggccctgctgttttccggatgcgggaaaccgccgagcgaggagagcctggagctggcgaggaacgtgttcgcgcaggaggggccgtatgcgctcctgttcgcctacacgacggaggagcagggcgcggaggcgctggcgcgggagagcgaggactttgccgttctccttgcgagggaggacgcggaggcggcgctccttaccgtcgccgcggagtcggacgacgcgctcgtccgacgcgcggtgcgcatcgcgctggaggccctcccctgatcccggggcggacggcgccgcggaaagcctggactttccgcggcgcctctttttgcgcggcgcgcacttttgcggccattactggaaacttgcaggtgcagatggtataatggaaaaaaacgtttggaggcggagacccatggcggaagatatgctcgcgcggtgccgcgcgctggagggcgcgtgcgcctgcggaaggacccaccgcatgcgcacgcgggagatctacatcggggaggattggcaggcgcacttgcaggcgcaggcccaggcgctctgcggggacggcgccgtgacggtcgtggcggacgagcgcacctgggaggtcgccgggcgcgcggtggcgcaggcgctgcgcggccgcgaggtgcagacggtcgtgctgcgcggcggggagctgcacgccaacgccgacagcatcggccaggtgctgctgggcgtgggcgacaggacgcgcctgctcgtcgcggtgggatcgggcacgatcaacgacaccacgcgctttgtcgcctaccgcgtggggctgccgtacctggtcgtgggcacggcgccctccatggacggctacgcatcctccgtttccccggtcctgcaggacggcatgaagatcacctacgaggccacgcacccggaggcggtgctctcctcgccggcgatcctctgcagcgcgccgcagaacatggtggccgcgggcctgggcgacatgctgggcaagcacacggccctgctggactggaagctgagcgccatcgccacgggcgaatccttctgcgagggcattgccggcaggatgcgcgaggccgtggagatctgcgagcggaacgccgggggcctcagccgccgcgagggcgcggccgtctccgagctcacgcaggggctcatcctctcgggcttggccatgcagatgatgggcaactcccgcccggcctccggctgcgagcaccacctctcccacttctgggagatgcgccagctcctgcgcggccagggcgcgagcctgcacggcgacaaggtcggcgtggccacgctcctcatcgtggagatgtaccatcgcttctttgcgaaaaagccggaccgcgttatcccggcggatcttgcgcgctgggaggcgcggatgcgcgcggcctacggaccgcttgcggaggggttccttgcgcgcaatccgctggaccgcgccgaggcgaccaccgcgcaggagcagctcgagcgcatcctcgcgaactgggacgcgctcaaggccgaggccgacgcgctctacgccaagaaggacgccctgcgccggatgctcgaggagagcggcgggcccacggaccccgcgcaggtcggctgccgcggcgaggacgtgcgcgacgccctgctgtgcgcctggctcctgcgcccgcgctttacgctgctcaagctcgcctttgacttgggatgtttggaggaaatcgtcgatgaagtccttgcatgaccgctccccggagcagatccgcgcggcgctgcagcgcgtgcgcgccttcctgttggacatggacggcacgttctacctgggcgaccgcgtgctcgagggctcaatggagttcctggacgcggtggggcggacgggccggaagtacctcttcctgacgaacaactcctcccgctcggtcaaacactacgtggaaaagctccaccgcctgggcctggacgtgggggaggagaagatcctcacctccggccaggccgcggcgcagtacctcctgcgcgagcacccgggcaagcgcgtctacctgctggggaacccgtcccttgcgcaggagatgcgcgcctacggcatcgccctggaggaggaagacccggacctcgtgctcgtgggctttgacacgaccctggactatgcgaagatgtgccgcgtctgcgacctcgtccgcgcggggctgccctacgtggcgacgcacccggacttcaactgcccgaccgagacgggcttcatcccggacatcggcgcgatcatggcctttatcgaggcctcgaccggccgccgggcggacgtggtcatcggcaagccccacggcgagatcgtgcgcgcggcgcaggagcgcctcggccttgcgcccggggagatggccatggtcggcgaccggctctacacggacgtgcgcacgggcgtggaccacggcctctgcgcgatcctcgtgctctcgggcgaggggacgcttgccgacatcgagacgatgcacatcgagccggacctgatctttgcgcgcctggggagcatgatcccctatttataaacagagaaaaagaggaggagaccttgcatggaacggatacccctttgggagcgcgccccgctgttcgaggagagctttggccagcccgcgccgagcctgatcccctatcttctgcccggcgacggcgcgcgcggcgcggtgatcgtctgcccgggcggcggctacgtcatgaaggcggatcacgagggcgcgcccatcgccgagcggctgaacgaactcggcttccacgcctttgtgctggactaccgcgtcgcgccccaccgccatcccgtgccgctgctggacgtgcagcgcgccatccggctggtgcgccaccgcgcgcaggaattcggcgtcctgccggacaagatcgcgatcctgggcttttccgcggggggacacctggtctgcaccgcggcgacgcactacgatgcgggcgaccccgccgcggtggaccccatcgaccgggagagctgccggccggacctcttcgtgccctgctatgcggtggcgtcgctgacgggattctggcacgagggctccgcgcacagcctgctgggcgagaagacggacccccgccagctccgggccctgaccgcggaattctgcgtgaccgaggacacgcccccctgcttcctctggcacacggccgaggacggcgcggtgccggtggagaacagcctgcgccttgccgcggcgctcacggcgcacaacgtgccggtgtccctgcacgtgttcccctttggcccgcacggcgtgggcctggggcgcgaggactcgccccttgccgaggactggccggaccttctggcggacttcctgcggacgatgggcttttgagggagggatagcgtatggaacggattctgctttgggagcgggacatcccgcagtttgacgagaagatcggccaggcggcgccgtcgctgacgccctttttgctggacgatggaaagaagcacggcgcggtgatcgtcttccccggcggcggctacaccatgaaggccgcccacgagggcgcgcccgtggccgagcgcctgaacgagatgggcctgcacgcctttgtgctggactaccgcgtcgcgccctatcgcttccccgtgccgctgctggacgcgcagcgcgcgatccggctggtcaggagccgcgcggcggcgtggaacattctgccggacaaggtcgcggtgctgggcttctccgcgggcgggcacctggcgggcatgtgcggcacgcactttgacgcgggcgaccccgcggccgccgaccccgtcgagcggcagagctgccggccggacgcctttgcgccctgctacggcgtgctcaacctcaaccacacgcgccgcgcggacctgttttcgaccatgatcggcaagggcgatccggaccttgccaccgtccggtccatcagcccggcatacgccgtgacaaaggaaacgccgccgtgcttcctgtggcacacggcggcggacagcgtggtccccgtggagaactccctggactttgcgcagcggtgcgcggacatgggcgtgccggtttccctgcacgtctaccccttcggccggcacggcatcggcctgggcgacgaggcggaggccccgggcgccggcacgtggagcgcgctgctgggcaagttcctgcaccagatcggcttctgagcggtcagtccagcaggttcacctggccaaagaggcagcggatctccatctgcacctgcagcccgtcgcccaccacgcacacgacctggccaaagcccggctgcacgcccttgggcgtggagatggagccaaaggcggtcgagcagagggcgcgcacggaatacccctgcgggatgcgcacggtcatgtcgctgaagaggcattggatgcgcgactgcgcggccatggggtgggaaaagtccaccgtcgcgttccccaggaccagcgtaaggtccgggctctgcgcgtccaggcggatgcttccgttgaagaaggcgcgcgttccgccgccctcctcgcggcggaagcggttcaggccaaagctccccgtgagcaggaagatcccgctctccagcaggaggatggcgatggccatggtccagccggaaaactccagccggaagaagatcttgaccagcagggcaatgccaacgagaatgcaatagatcgaccaaaaaatgcgggtgcgcgtcatgctcatccctccctatgctctttcaaatactccgtgtgcgcggaaaaaccctttcgttcaaagaaaagttacgattttgacaaacccaaaggaggaggattcccatgacggatattgagatcgcgcgggcggcaaagccgagaaagatcctggacatcgccaaggacctgggcctggacacagagcacgtggagcccttcggccactacaaggcgaaggtcgaccccgcctttgtgcccgaccggcccgagggcaagctcatcctggtcacggccatcaaccccacgcccgcgggcgagggaaagaccaccgtctccatcggccttgcggacgggctccggcgcctgggcaaaaaggcggttctggcgctgcgcgagccgtcgctgggcccggtcttcggcgtaaagggcggcgcggccggcggcggctatgcgcagatcatccccatggaggacatcaacctgcacttcaccggggacctgcacgccatcaccacggccaacaacctcctggccgccatggtggacaaccacatccagcagggcaatgcgctgggcatcgaccccaggcgcgtctgctggcggcgctgcatggacatgaacgaccgccagctgcgcgagatcgtctccggccttggcggcaagaacaacggcatgccccggcccgacggctttgacatcaccgcggcctgcgaggtgatggcggtgttctgcctggccagcgaccttgcggacctcaagcgccggctggagcggatcgtcgtggcctatacctttgcgggcgaacccgtcaccgcgaaggacctgcacgcccagggcgccatgaccgcgctgctcaagaccgcgctcatgcccaacctcgtgcagagcctggagggcacgcccgcgctcgtgcacggcggcccgtttgccaacatcgcgcacggctgcaactcggtcatcgccacgcgcacggcgctcaagctcggcgactactgcgtgacggaggcgggcttcggtgcggacctgggcgcggagaagttcctggacatcaagtgccgcgcggcgggcctttcgcccagcgccgtggtcgttgtggcgacggtgcgcgcgctcaagtgccacggcggcgtgcccaaggcggagctcggcaaggagaacctcgccgcgctggaaaagggcctgggcaacctgctcaagcacgtggagaacatgcagagcgtctactccatgcccgttgtcgtcgcgctcaaccgctttgtgacggatacgcaggcggagctggacctcgtcgcgcagcggctgcgcgcgctctcggtcaacgtctgcctgtgcgacgtgtgggccaagggcggcgagggcggcatggccctggccgaggaggtcgtgcgcctgtgcgagacgccctcgcagctcacctacgcctatcccctggaggagacgctggagaacaagatccgcttcatcgcccagcgggtctacggcgcaaaggacgtcgcctttgccgccggggtcaagacccagctgcgcaagctggacgcgctcggccccctgcccgtgtgcatggccaagacgcagtactccctctcggacaaccccaagctcgtcggccggccggagggcttcaccgtgaccgtgcgccaggtgcgcctgagcgcgggcgcgggctttgtcgtggccttcacgggcgagatcatcgccatgcccggcctgcccaaggtccccgcggccgaggccatcgacgtcaacgaggcgggcgagatcgaagggctgttctgatccccccggaaaaaggctgcaaaaaggccccggccgcaaggccggggcctcagcttgtcgaaaaacctgctgtggcaattaagccagagcaggttttttgcgtgcaagcaagaccgaaaaaaggaaaaatatcgaaatagcagctgtattttt

SEQ ID NO: 2818 - DNA, 3676 bp, Unknown
  16S sequences of unknown bacteria
gctggcggcgcgcgggaaggagcgcttggtggaagcggtgcgccggattgcagaggaggtggcgtctggatgtcgatcgtgactatggaacatgtgtcgtttgtggtggtgcagcaggagtatagcgcactgctgatgcgcctgatgcatctgggctgtgtggagctgcatacggcggcgatagagccggtaccgcctctggccctgcggaacgaagagggcgagttgagccgcgcgcagcaggaatatcaactgctgatccaggcgacagaagatctccggcagatcggcggcgtacgtgctccgctgctgcagaaacggcgggaagtggctgaaaagcgtatgtggaatgaaggggagctgcacaaggcgctgcgtctggctgaggagattcggaggcatgccgaagcggtggagcatgcccggcgcggtctggcgaagcgggaggaactctgcgctgcgctgatacactggacgccgctggatctgcctctggccggggcagatacagaatacacccaggtggtgctgcagacgctgccggcaaaaataaactggaaacgcctgcaggaagcggtgcaggaggatgcgccggaaagcgtgctcatcgaggtgtcccgaaccagagagcggcgctacgcggtgctgctgtgccaccgtgtcagcacgggaaaagcgctgcgcgctctggctcatgtgggcgggcgcagtgcgtcgctgggtgagtaccgccgcacggcccggcaggaaattgaacaggcccggcgggagcaggaggaactgcgtggtgtgatcgcgcagaatacacagcagctgcgtgatttgggagcacagcgcccggttttggagttggcgctggatcaggcgcggacgcggctggctctggaagaggcccgcgccctgggcttgagcgacggtactgtggtgctcctggaaggctggatgccggtgcagcaccaggacgcgctggaaaaagtgctgcaggatttcgcctgtgctgtacaggagcgtccgccgcagcaggcggagcagccgcccacgctgctgcgtaacccgaaatggatgcggccgatcaatgttgtcacagaaatgtattccctgccggattaccggggcattgacccgaatccactgattttctggttttacattttctttttcggctttatgtttgcggatgtggcctatgggctgattctgacagcagtggctgcttttgtgcggaaaaaatgggatcctcagggggcgctggggcagttgatggggctgggcgtctatctgggcctgtccacttttgtatgcggactgctgaccggaggctttttcggcaatgccatcgaagtggtggcgggcacctttttcgggcgttctttgcaggagctgccgctttgggtgcagcgcttcagtgcaggatttgtattcagcccgctcacggcacccatgacggtgctctataccactctgattatcggtgtgatacagttgctgttcggacagtttgtccacatctatatggaggcccggaatggccatccatgggacggactgctggacacggcgccgtggtgggtgttttttgcaggcatcgctctgtggttgctgcgcggcagtgcatggttgtttttgatcggtgttttgttgctggtgctgacccaggggcgcaagcgtaaaagccttggcggcaaactggctggaggacttgccagcttgtacagcgtgacgaactggctttcggatgtgctttcgtattcgcgcctgatggcactgatgctggccacgtcggtgattgccactgtaatcaacacgctgggtgcgcttccggggagcctgatcgcctttatcccggtttttttgatcggtcatctgttcaatattgcggtaaatctgatcggaacgtacgtccatgcagcgcgtctgcagtatctggagttttatgggcgtttttacaaggagggcggcgtgcctttccggccgctcagttaccgcaccaagtatacgcaagtgcgtaaggaggaaacgttatgacaagtttgggaacgggcattgcctttttgggcgccattctggctgtgggtcttgcctgcgccggctctggccggggcgtaggcctggcgggtgaggcgggtgctggggtgattgcagaggatccgagcaaattcgcccagtgcttgattttggaaattattcccggtacacaggggctttacggcctggtcatctggttttttgccatgatgaagatgggcttttttgccaccggtgtgccggatttgagcctgagtgtgggattgcagtattttgctgcgtgcctgcctatgggtatcggcgggtattttacggccattgcccaggggcgctgtgccgcggctggcgtaatggcagtggcccggcggggcgatcagatggccaagggcctgatttttgccatcatggtggagttttatgcgattttatgtttgctggcgtctttcctgatgttgaacagtttgtgaggtgagcgcgcttgaagggaattgaagcgattgtggctcatattgaagcagacagccggcaggagtgcggcgcgctgctgcaggcagcgcagcggcaggcagaagagctgcgtgaacacgggcggcagaaacaggcgcgctttgccgaccgggaacacgagcgtatggaggagcatttggcgcagatcgaacagagccggcggcagcttttgattatggagcgccgcagcgcgctgctgcaggcacggcaggcggtagtggaagaagcctttgctgcagctcgcgccagcttggaggggctggataccgcgcggcgggaaaaactgtatcttaagctggccgaagcggcggtggaaccggaaaaagaaggtgaagcgctggtgtgccgggaagaccgggcatcgttcggcgcagcgctgcagcggacgtatccaaagctgcgcctgagcgcagaaccttgcatcgcggcgggatttctcctgcgctacggcgctgtggaagtagactgcacactgccgacgcttctggctcaggtgcgccgtcggaagagcgctcaggtggcggcactgctgtttggtacggaggacggcgatgaaatgcgataaaacagatccgctgctctacctttcggcccgggtgggagttctgagcgccgcgctgccgtcctgggaagagcttatgcgccggccggaacgggaagaggccgcgccggagcggcaggatgcgctgcctctccgggaagatgcgcagaccggtgcgttgctggaatctctggcccggggcgcggggcggcccattgtggatttgttccgctttccctttgactgtcacaacgcaaaggttctgcttaaaggagcgtttaccgggcagggcgcggcggcgcgggaactgctttcgccctgcggcagtgtgccggaggaaaccatgcgcgaagcgctgcgagaggaaagtggtgccaaggcgctgccggcatggctgcgccttggcattgccgaagcgcgccacgcctggacggaaagccgcagccctcagttgctggatgcggcgctggatcgtgctctgtaccgcggaatgagcgaaagcgctctgtacagcggcagcactgctgcgcaggagtatgtgcgtgtgcgcatcgatggcgtcaatctgcaaaccatgctgcgcatgcaggaacatgcgccgga

SEQ ID NO: 2819 - DNA, 9334 bp, Unknown
  16S sequences of unknown bacteria
gggagcgaaacagacaggcatgtattgaactgtccgcaaaaaatgaccgactgatctggaagcgtaagtatatatttttgcattgaaagatgccagggacaaaaggtatttgaccctggcatttctattttcgttttctttataagattcttttctagcagcagaaaatcggcatcgcccggccaccacagcagcagctgcaaaacgcattcagaaggcagagcttcatacaccaatctccgcttccatcgaatggattgccatactcctgtcccatcgtctgataccactgaccgccgttctcaagccgctgcagcagctgacggtaaagcatattgttcggctccatggagacggcacgctgcgcatgctcctttgccgtgatgttgttgccctgtccggaattcgccatcgcacttaaataataccaacgggcgttacggttcgaaagctctgagagcacatggagtgcctcatcataggcgtggttacggatataattttctgctgcctgcatccgcacatcctcctctgaccatccggttccggaagaagactgtgaaccacctgtattcccatatccgccaaagccgccaaagccaccaaaaccgccaaagccaccgtaaccgccataatttccataactgccggttccggcgctccctgttccgtaggaggagcttccgtaacctccgccatagctgcttccctgctccttttgctgcatgatctgctgatacgcctgctgaatttctttaaacttttcctctgcttctgctttattcggattattgatattggcatccggatggtatttccggctgagtctccggtatgcctttttgatctcatcctcggaggcattttccggaacccccagtatctcgtatggatttttcatactctctcctcacttctgacggcgctgatccatgaccttctccttgcgctgccgctcccgctctcccaccatcagataccggcaccagacaccggagtacagaatattgcgcagaatgtctgcacacgtgatgatcgggagacgctcaaaggagcgcgcggcctctgcggccattgctgtcagtatttccttatatttgggcgcctgttccctgctccagacctctccgctctccagaaaaagattgtaattgcccttcttccgatccttttctacgtcttctaacgcatccatcaggtacacaaactttccaaggtagaagcccatattccgcagttcctcctgccagatatcatccttccagacaaaaatctccgccaaaaagcgcccggtcagaccggatacatagtcgatatccttctgattctgctgctccgcctctgaaagcaggcgaatattttcttcaatcgcgcgtccctgccgcgggtactgctccatcagcttctgataatccttccgaagcagcatggatacggcgaatccgggtacgctcttttcatccttccagtcgtcctgcattttctgataagacagcagcaccgtcatatccgccgcgtatgctacggcttcattctccgtcatccgatgcttctgaaagggatgcggaatacagcggtactcctctgcctttgtctccggctcatacagcccggtcagcaaaatggccagaaacgtcaggtcatagtttaacatcatctgagcagtacgtccatacctttgatgcaaattacggcataatccgcagtaaaaactgcggtatgccgtatagtccttcagcttgagctcctgctcatttacataaatatatccgaacatatctgaatctctcacctttcgtggtcagcttcgcttttcaaactcatgtctgcacttcggacaggtgatacagatttttccttttcctctcgggatgcggatcttctgtccgcaggccggacatttgtaaatatggtagtccttactctgcacaatgcggttctttgtctgcgtaaagctcctgcgaatcccggccgtccaggaaagatatttctggttctcctcattgcgcccggaaatattccgcgaaaacatgcggaaatagcagtacccgatcagcaccagcgccagccagtacagcagcggctgccttgtaaatgtattcgccagcaacaggatcaggcagatcgccatcagaaacttcgtcagttcatctgtcccatagcgtccctgcataaattgttccaatcgtcttctcatttaagaccatcccccttgtgtttgttccatgctaattataacactttacccccgaaccagaagaatgtcaacgataccggtcttcatttcacagaaatttcagataacttccattttgtttataattcaggcttctgcggcctttctttttgcgggaaggtaatgatcgctgcaaaccggtcttcggatacccgcagggaaaagtctccgccctgcagctctgtaaggcttttggcaatcgaaagaccgagcccgctgccctccgtatttcggctgcggtctccccgtacaaagcgtcccatgagatcctcagctgaaacatgcagtgcctccttcgccgtatttgcgacggtgatgatgacctgttccgcttctgtctttaccgtgacagaaaagctgctgtcctcttttgcatatttgcataggttgccaaaaagattttccagtacccgccagaactgtcggccatccgcttcaatcatcaccggctccgccggcagattccataccggtgtcagccccttttcctcaaagcgatcctcaaattctccatatgcctggtcgaacatcgcctgtacctgcagaatggtcatatgcagctccacattgccggagctgatcttgctcacctcgaccagatcttccgtgagctgcttcaggcgctgtgatttctggtcaagcacttcgatatagtgctgtaccttctccccctgcagattctcccgcttcaggagatctacataattgacaatggaggtcagaggtgtcttcagatcatgtgaaacatttgtgatcagttctgctttcagccgctcatttttgatgattgcttcgaccgcttcctgcagcccgtctcccatctcattcaccgcctgtgccatctcataggattctccggtcagcgtcgtcgtatcaatcttataggacaaatctccctttgatatctgatggattccttcccatacactctgtttccccgccatgtcacgcaaaagaaacagcagcacaatcatgtcgatgacgagcaccggaaaaatgccggagcgtttaaagagcagcagaaacagaaagttcaaaacgatgaccatgatatagaaaaacaaaagctgtccggatgccgcgcgcgtagaagtaacctgtttccacgtatagagcagcatgcggcagatgctgttgtgccagagcttgtgggagcgcagacgccgcataaatcccatacaggcagagagaaacagctgccagagccctgccgcaagcagcgcccatgcgacccgttccggctcaaacatatcctccgggctgtgccatttccagttcagaaaaatcacaataagcatgacaagcaccgcatagatcccggccgccagctcggtcggcaccttatcgactgcataaatccgaggcgccagacgcccctcctccaggccggctccgacaagcgagagtacaaagcagatcaaaagaagtaccccactgatcccgatgcctgtcaccgagacccatacaatcgtctcccggttcgcaaaatagtccgcataagtacgcagctcatcattcaccggatagctctgatcgatcgcaagcagcaccttctcattcgtgctgacaaagcgatcattcaaaaaccacgcctccgcctccgcattcagcacattatcctgatttgccaccatgatgttatagctccgctcaccctcgtagagcatcgtatattccggacgctcctgcaaaatctctgcaccggcgtcatagctctctgctccaaaattcgtatacagatctcctgttgccgtattctcaatacagtagcgcagattcgaaggcgcattttcagaccagagtgactgctctccgtccgtatactgctgataacgggtcgcaatgtcctcacacacctgtgccagacgcacataagtgttgaatacaaagctcgcggaatcagaataccaccttgagcactctgataaggtgatcccggtgaccggccggatcgtctctaacgtatcggactgcccatccagaagctccccggcctcctgccggttctcgatcgcagacgccttctgcactgcggccttcagagccgcaagccctccgttttcactgaatgtaagcagatctgagagcagatacgtcgtattcatatcctttactgtattgccggtactgccataggactgaatatcgatctctttttctgcattgtactgtccatcctgttcaaacagctccctgttctcctgcgcgctgattttatttttcagtatcgtatccacctgccgaaaaaaaagatcgctctgctcatagcttttcgacagctcgctcaggctgcaggaatcctccgtccagaatgcgaacgtcaaaaaactccaggccagcacggcagccagaaacgcctgcagtaccagcagcacgttcttgacctttttccggtaaatccagttgccgtctcttcggtgcagtctgacagaaaatttactcggatgcatttgcattacagattctccactttatagccaacgccccagatcaccttcagatacttcgggttcttcgggtcgatctcgatcttttcacggatatggcggatatggaccgtcaccgtattatccgcaccatacgcctcctccttccatatctgctcgtaaatctggtcgatggaaaatactttgcctttgttctgtacaaggaagagaaggatgttgtactcgatcctcgtcagcttgaccggctctccgtctaccgtgacttccttgcggtcatcattcatcacaagcccgccggtgcgatagatatgctcggattctgcctgctccgcagagccgaaatttgtatatctgcggatctgggatttcacacgggccagaagttcaagtggattgaacggcttcgccacatagtcatccgcaccgagattcagtccgagcaccttgtccgtatcctgcgacttcgcagacagcacgatgatcggaacactgctcgtctcacgtatcttcatcatcgtatggatgccatccagcttcggcatcatcacatccagcaaaatcagatgtacctcctctgtctttaaaatctccagcgcctgcaggccgtcatacgccttcagcacgcgatagccctcctgggccagatatatctcgatcgcatcgacgatatctttttcatcatcacataccagtatggtaaacataacgttcctcctcccatttttgatccatatacaaacggctcctgtcccgaaggcagagaccgcatacagatccctcctatcagtttaacaggagccaatgaatttcgcatcaaaaatttattaatcttttcttattttattttgcctcaatgacatgcatcatattcgtcatcgcgccttttcctttgaccatgttcgtcgccgggtcacccgctgtaaatacgaccatgtcgccttccttgacataaccctcacgctttacgacatacattgcatgggaaatgatatgctccgtcgtatcttcctcgtagcccttcagcggcgttacgccccagtagagctgcattttgcgctgcgcccactcattcggggtcaccgcatagatcggaaccgccggacggaaattggacatcagtcgcgccgtctgcccggataccgtcggagtcacgatgcaggcagcctgcacattcgtcgcagtacgcaccgctgccacaccaactgcattcgatacgtttgcatcaccgcgcagagaacggtactccggcagcacgtcataatccatgtactgctccgtggactctgcaatctttaccatcatcttcagcgcctcgaccggatattttcccatcgccgtctcgccggagagcatgatcgcatccgtgccctcacgaatcgcatttgccacatccgtcacctctgccctggtcggccgcggattgcggatcattgaatcgagcatctgcgtcgcaataattaccggcttatacttttgattgcatttctcgacgatcattttctgtacatgcggcacctcataagccgggatctccacgcccatatcgccacgtgcaaccatgattccgtcggatgcctgaatgatcttatccagattctcaatgccctcgctgttctcgatcttcgagataatctcgatgtgctcagcattgtgctcctttaaaattgtgcggatctcacgcaccgcatcggcattgcgcacaaaggaggccgcgatgaaatcaatgccctgctcaataccgaaaataatatcctttttatccttcgcggtaataccaggaaggtttacactgacattcggcacattgatacccttgcgctgtcccagttcgccgccatttacgacccgacagacaatgtccttgccctgaatctcttttaccttcagcccgatcagtccgtcatcgatcagaatggtatcgcccggcttcacatccttcgaaagctgcggatacgtctgatatacctttttctcagtgcctgccatctctgtcgcagtgagagtaaactcctcgccttctctgagcagtaccttcccgccgttttccagtactcctgtgcggatctccggtccttttgtatcgagcagaatcgcgatcggcctgtgcatctccttgcgcacgcgcttcagaagatccattcgtgccttctgctcttcgtaatccccatgcgaaaaattgaatctggcaacatccatgccattctcaatcaacgcgcggagcgtctcttcattgtctgcattcggtcccatcgtacatatgattttcgtctttttcaccttgtctgcctccattatgcggcccaaaccgtcttttctatttcctgttcttttttacctgcctattgtagcacagattcttctgagatgaaaataccttttccggcgtatttcaatactttaacagcaattttacctattcttttcaatctcgatctgatcgccggacatacgcagtacgtcttcaatctctgctgccggcatctccagataagccgacagctcgtctaccgataccttatgctcgagctcctcctccagattgtgaatcgcctcatttaaatggttcacgcggcttacaatcccctcattactctttttcgtctcctcatttgcgtggatggcatcctccattgcctgattcacacaattcaacaaatgcgcctggcaagctgccggactgtcaaaggtatctaacgtatccattgccaaaagcagaccgatattgccctcctggatcagatcctctgccgggatctctcctccgtcatactcgtctgccatctggcagatcagcggcagataccactcgatcaggcgttcccgcgcctgcggctttttctccatcacatcgcgcagcagctcattttcatcgacatctgattcctcaatcagacgcttaagctcttccagataaatagaaaggctcagctcctcctgttcctttggaagctcttctgcctcctttgcatcatccggcacacgcacgccctgctcctccaggtacttgtaaatcatctgaaaatgttcctcagtgagcggcagctcctttaatcgctcccggatctcttcttttgtaatgacatttcccgccgcatccgcagcatctttaatctcacttaatacttcccgaaatacgtatctgttttccatatctcttctcctcgttctatctgcaacgctatcgctcctgccccgccgcttcgtgcttcgcgcacggaaggtgggggaatgcttattctgcgttcaaatcttctgctaatacctccagcgctttttccagcacctgatctgtcccatctccggccgattccggcgttttcccgcttcctgtatcgtctttgggatcctctactatgatatccggtgtgattccatttccattaatatcctgtccattcggcgtatagtacttttccaccgtcattttaaatgctgatccgtcccggagcggaaaggtgcgctgtacaatgccctttccgtatgtctttgtaccgataaccggtcccctctcatagtcctgcatcgctccggcaaagatttccgacgcgctcgcagatcctccgttgaccagcactgcgatctcgcagtccactatccggctctgatctgaataatactcctcacgcccgccattcttatcctctgtatacacaagcagcttctccggcagcacctcgtccagaatgtcacacaccgaagtcagcagcccgcccggattgtcccgcagatctacgatcagggcctgcatattctgagcttccagagcctctaccgcttcacagaactgatccactgccgtctctgtaaactcttcgatctttatatatccgatcccattctgcttcatctcatacgagaccttttgaagctccacatcaccaagcatgatcggtaagatgacttcctttttgtctgacggacggtaaaccgtgatcgaaaaatctccgtcctcactcttaatcatagagaccagatcactcagctgtacatctgtaagcgctgtatcgtctatcgcaagcagctcatcgcccacctgtagtcccgcttcgctcgccggagtattttcgtacacatcattgaccgtaattgtcccggactgtccatcctgtgcaagtgtcgctccgataccggtataactgccacggctcgaatcaagcacggattccagttcttcctctgaatagtaattcgcatatacatcatccagtccgaccgcaattcccttaaataaatagtcggagagcatatccgcgtcgacatcattcagatagtattcttcgatcaggcttttcacctcatccagcttctgtaacgtctcagcatcggtgaggatctcagccccgttttctgtctcctgctccgctacatctgccggatcgttcatgtactgccccgcattccatcccgcaaaaaacatcgctccggtaaaaagtgttgccagcacgcctgctgcaaagccttttccaaagccatccggcaatggtttttccggtatctcctccggcatttcatttatatcaggcatctcatgcctttccttcttttttaatctcatactgcctctgatcctttatctgtcactgcatccgttgcatctgatacacggattgcttcgcatttcatgctctcgcaatcctaaaacacctcaaat

SEQ ID NO: 2820 - DNA, 21406 bp, Unknown
  16S sequences of unknown bacteria
gccgacgctgcggacctcttctaagaggaaatcgtcgtgcgaggagcgtccctttgtggcggcgagaagcgtgggcaggtagtactccgaaagattgcatgcttcgagtgcttcttggaggttcgcgcggtcggcggggatcgttcggctgaaggcccagagcttgacgggagttccctcgacaagccgctggccgcgggcaaggtagccgccaaacgggaacggcacgtcgtcttcatctgcccattcggcgatatccaaggagaagtgctcgttgctcggctcgtagcgcagccagcagcaggcgcggcgtgtgcgcacgagtgcgttatagaccgcgaagacgcgcataggcacgccacctcccccagatgatgtcccacatcgcatcttggtagagcttgggaagtatgcccctgaagccgcaaaacagcagctcccgatgttcggggagcagcggctgtacctcgaaggcggggtccacgaactgcaggttctccacgagcgagcgcgacccgaggaagttgtttgcatcgaggtcgagcagcgggtcgaagcgctcgatgctcagctcggtcgtgcagcacgaggagatgagcgagcatgcgttcgcgtacaggggagcgagctcgcatgttccgtccggcttgcggacgacctcgatgttgtccccggtcctgctgcggttggcgatgaggaagtcgacgagcagcagggcgcttacctgatgcgaccagccctggcgcaggcagaactccagcggcgtctcgtattgctgctggcccgcgtcgaagacgagctcgagcgctgcactctgcatgcccttttcgcggtagcacttggagcggagcagccacgcatcgcgctcgtgcccttgcactttgatgcgggcgtgcacgaggtgctgcttgacgtgcgcgatgccgaggatgtccatgaggcggcaggcgacaagctcgttgaagggggcctggttgtggatgtcgcaggcgcggtcctcgtcgcagagcttgtagaacgtcgcgttgacgcccgtgccctcgcgggctttagggcaggtgcccgtaaggccgctcggctgggtgtgctcgtcccaggaaaggtagcgcaggtcttgccgtgcctttgtcatgtcatatgcgcgcatgtgtgctccaaaatatgatacgaaaatcatagcacattgtagtatgtgcgacatgttgcatacatcgaactctatacttctcggcacaccacgtcagatggcgcgatccgcgcactgtccgcgcgtgttcgccaagagagaaacctaggaggaaccatggcgcgcaagattgacattttcgacacgacgctccgcgatggggagcagtccccgggtgcgagcatgaacgcacaggaaaagctcgtgatcacccgacagctcctgcgcctcggcgtcgacgtcatcgaagcgggctttcccgtctcctctccgggtgacttcaagtcggtgcaggacattgccaaggtcgtcggcgaccaggcagtcgtctgcggcctgacgcgcgcggtcgagcgcgacatagacgtgtgcgccgatgcgctgaaggtagccgcacgcccccgcatccacacgggcatcggcgtctccccgcagcacctcaagtacaagttcaagggcatgaccttggacgaggcaatcgatcgcggcgtgcatgcggtcaagcacgcgcgcaagtacgtcgacgacgtcgagttctatgccgaagacgccggccgcgccccctacgaggatttggccaagatgatccaggcggccgtcaaggcgggcgccaccgtggtcaacatccccgacaccacgggcttcaacgtgccgtgggagttcggcaagcgcatcaagtacctgatggagcacgtcgacggcatcgaggacgtgaccgtctccgtccactgccataacgacctgggcatggcgacggcgctggcgctggcaggcgtcatgaacggcgcgacgcagatcgagtgcaccatcaacggtctgggcgagcgtgcgggcaacaccgccatggaagaagtcgtcatggccatcaagatgcacggcgacgacttggatgcctacacggacatcaaccccaaggagttcacgcacgcctcgcgcctcgtctcctcgatcaccggcatgccggttcaggcgaacaaggcgatcgtcggagcgaacgcctttgcgcacagctctggcatccaccaagacggtgtcatcaagaaccccgagacctacgagatcatctctccggaagacgtcggcgccgcgggcacgtccatcattctgaccgcgcgcagtggccatgccgccctgcgcaagcgcctggccgacctgggctacgtcgacatcccggacgagaaattcgagaagatccacacggctttcctggatatggcggaccgcaagaaggaggtctacgacgaggacctgcactcgctcatgggcgagcatgaccgcaacgagaacgccatctaccgcctcgactccgtgcagatctcctgcgggcaaccgctcgtcccgacggcgacggtaaagctcacggacagctttggccagcagcgcaccgcatgcgactttggcacgggccccatcgacgccatgtacaaggcgatcaacaaggtcgtccaggcggaaaacgacctgaccgagtacacggtgcagtctgtgacgcgcggcatcgacgccctcggcgaggtgaccattcgcatcaccgcaccggacggcgaggtgttcacgggccgcggctccgacggcgacattaccgtctcgtctgcaaaagcctatgtcaacgcgttgaatcgcatgctagagtggcaacgtaaggagagcggcgcacccgccgagggcggtgcacccgagcacatctagcaagaacggttctgcgtggctgtatttccgcattttcatgtaattgtcctcgccgatgactacggcgaaaaggcgcccgcctgcttcgcgccgttggcgcccgattcccctcaaagcctgctttccgcaacggtgagcagcatctccgaattcacggcataccccatccgcatcgtgacgaccggcgcgctgcgcgagctcgtcgcagacgagatcgcggcacggacgggtctcgacgcgagcacctacgacgtcatggcgcttcccgtgcagcggggcagcgcgtttggcatcgcgctcgcgtgcgcgtgtgcccgccgcgaagaccccgacgcggtgggggccgtgttcagggcagacgagcgcatcgacgccgacgacctcctggaaagcctgctgtaccgcgcctaccaggtggctttgcgtgaccgcatcgtgctcgtcggcgccgagcaggcagaaaagcccgccgacgtcgcctatatccgtttcggacgccagtacgccaacgtggagggcgccttcgaagtacgctactttgccgcggatgcgaagctctcggcagcacagcgctccatcgacgagggcggctgctggtacacgggcatcttcgtggcacgcgcggcgcaggtgctcggcgcgctcgcctattcgagcgattccgacgatgcgccgggggagttcggcacgggccgtatcggcgacacggcgggttttctcgcgctgctcgaccgcagctcctggctgcgtcccgaggcgcgcgagctcatcgaggcgcttcccgtggcaagcttcgaggagacggtcctcgagcccacggcgaacctcgtcgtcatgcccacctccatccgcttcaaggccctcaactcgctcgaggacatcgacgcgcaccttgcccccgacgtcgcgggcaaccgcaccgacggctcggctgccatcgtcgaaggacgcgacacgacggtcatcgagcagacgggaacgcggtctgtcgtcgcctacggggtctccgggctgctcgtcgtcgacacgcccgatgcgctcctcgtggcggacaaggcccaggcacgcgatgccggcacattgctgcgcgagctcgaggcggcccggcttccgcagcttacgcaggcggcccgccggccgttctcgtggggcgaggcggtgctgctcgccgtgaacggggcgtcggcgacctggcagatcagcctgcgcccgggcgcctccttcgacaccctgcacataccggccgcctacggcatgttcgaggggccgtgggagcacttcgagggcacgctccacgaggagtacacggtggcgcagggcgcggtgcgcgtggaaggctacggctccgaggcggcgcggcgaccggttccggcggcgcgttcgttcggagtcgacggcagcgaggcaaagcgggtcacgtgtaccggcgagacgggcgcgacgctcatcttgacggcggcgcttgtgtagcggtccgcctgaccgccgaaaaagtcccgaaattcgtttataagtggaaaaccgcccgaggggcagctcatcgtaggtgcccgaatccacagagcgtgtggaatcccgccgcgcggccaacctgtgtctcagcggcggagtactgtatataccctgcacgaatatgaaaagcacgagagagagcagcgaacgtactatgccagagcttgcctataccaacaattcgaacaacgtcgagcgcatcatgccgcagaacatcgatgcggagaaggccgtgctcgcggccatgctcctcgcgcccgatgtcgtcgaggaggcaatggcaaagctgagcgccgacgtgttctaccgcccggcgcacaagaagatctacgaggccatggaagacctctacaaccgcggcgtccccatcgaccagctgtcgcttgccgaccgcctgcagagcaaaggcgagctcgatgccgtcggcggcaagtcctacatcgtcgaactcggcaacaacacctacgccctggcaaactgggcgcaccatgcggacatcgtcaagcgcgaggcgatgctgcgcgacctcatcggcgcgtctgtgcgcatcacggcgctgggctacgatgcccccgacgacctcgatgccgtcgtcgagcagtcggaaaagctgctcctcgacgtcaccaacaagcgcgtcgcgacaaacttccaatccatcgagtcgctcgtcgtcgacacgttcaacgagctcaacgagctcgccaagaacaagaacccgtaccttggcgtgcgcaccggcttcaaagacctcgacgacctgttcggcgggttccgcgggggcgatctgatcatcctcgccgcacgcccgtccgtcggcaagacggcgctcgccctcaacatcgcgagccgcgccgcccagctcggaacggccgtcgcgttcttctcgctcgagatgtccgcccagcagctcgtgcagcgcatcatcgcgaccgagtcgcgcatcaacggcaagaagctccagacggggcgcctgtccgcgcaggactggacgagcctcgtcgacgtctcggagcgcctctccaagctcaagctctgggtcgacgacactccgtcggcctccatcctcgaggtgcgcgcgaaggcgcgccgtcagctccgaaacgtcgagccgggcaagggcatggtcatcgtcgactacctgcagctcatgcagccgcaaaaccagcgcactgaatcgcgccaggtcgagatcgcggagatctcccgcggcctgaagatcctggcaaaagagctcgacatgcccatcatcgcgctgtcgcagctctcccgcgcggtcgagtcccgccaagacaagcgcccggtactgtctgacctgcgcgaatccggtgcaatcgagcaggacgccgacattgtcatgttcctggaccgctcgaaggacgagcgtgaggcggaaaacgagcagcgcccgccgctcggcactgcagacgtcatcgtcgccaagcaccgcaacggtgcgctcgacacgattcatctcgcgtttcaggccgactgcacgcgctttgataacctcgctcacgagcagtattagctacaatacgggtgatgccgcaggcagcggctttttcataggaaatttcgggcagctacatacctttcaagcaagggagataccacatgccaggaacgattgttgtcggtacgcaatggggcgatgaaggcaagggcaaagtcaccgacctgctcgccggaaaatacgattatgtggttcgctaccagggaggcaacaacgccgggcacaccgtcatccacaacggcgtcaagctcgccttgcacctgatcccctctggcatcatgtacgatacggtcacgccggtcatcggcaacggctgcgtcatcgacccgcaggtcctgtgcgccgagatggccgacctcgaggagaagggcatctccaccgacaaactgctcatcagcggcaacgcgcacgtcatcatgccgtaccaccgcgacctcgacggcgcttccgaagcacgtctgggctccaacaagatcggcacgacgcgccgtggtatcggcccatgctaccaggacaagttcgcgcgctatggcatccgcgtccaggacctactcgacgagaagatcctgcgccagaagctcgaggcggcgctcgcggtgaaaaatgacatcctgtcgtccatctacgacatgcccacctacacggtcgaccagatcgcgacggaatacctcgagtacgctgagaagatccgcgcacacgtcgtcgactgcacgaggctgctcaacgacgcgctgcgcgccggcaagaagatcctgttcgagggcgcccaggcgacgcagctcgacatcgaccacggcacctacccgttcgtcacgtcgtccaattgcacggcgggcggcgccatgaccggcacgggcgtcggccccacgaacgtccagaaggtcctgggcatcgccaaggcgtacctcacgcgcgtcggcagcggtccgttcccgacggagctgttcgacgactacggcgcgacgctgggcgaggcggggcacgagtacggcgtcacgacggggcgcaagcgccgctgcggctggttcgacgcggtcgtcgcgcgctacgccgtcgacgtcaacggcctgacggacatcgcgctcaccaagctcgacgtgctcggtgccgtcgaccgtatcaagatctgcactgcttacgaggccgatggccagacctacgattacgtgcccagccagcagacggcgttccaccacgccaagcccatctacgaggagatgccgagctggaagtgcgatatctccggctgccgcacctacgacgagctcccgcaggaggcaaaagactacgtcgagcgtctcgaagagctcgtcggctgccgtatcagcatcgtcacggtcggccccgaccgtgaccagaccatcatgagaggatgggagtaggccatgaatatccttctgctgggctcgggcgggcgcgagtgcgccatcgccacctcgcttgtcgcctcgccccattgcgacgagctcttcgtcgcgccgggcaacggcgggacggcgggcatcgcgcacaacgtggcgctcgatgccgaagacgggcaggccgtgacgcgctttgcccaggagcatgactgcgagctcgtggtcatcggccccgaggcgccgcttgtcgccggcgttgcggacgtcgtacgcgcggcgggcatcgactgcttcgggcccggcgcggcaggcgcgcgcgtagagggctccaaggacttctcgaagcgcctcatgatgaaatacgacctccccacggcggcctacggcacgttcaccgatgccgattctgcccttgcctacctcaacgagcacggcgcgccgatcgtcgtcaaggccgacggccttgccgccggcaaaggcgtcacggtcgcgcagaccaaggaagaggccgaggaggccatcgtcgagtgctttgacgggcgctttggcgctgcgggcgcgacggtggtcatcgaggagatgctgaccggccccgagtgctcgctgctcgccttcaccgacggccagacggtgctccccatggcgcccgcgcaagatcacaagcgcgcctacgagggcgatacgggccccaacaccggcggcatgggcgtgtactcgcccgtcccgatcgtcaccgatgacgagcacgagcagatggtcgacatcatgaaccgcgccgtcgcgggcatgagggccgagggaatcgactaccgcggcgtgctctacggcggcttcatgctcaccccgcaaggccccaagctgctcgagttcaatgcgcgctttggcgaccccgagacgcaggtcatcctgccgaggctgaagaccgacctcgtcgaggtcatgctcgccaccgccgagaagcgcctggacgaggtctcgctcgactggcgtgacgactgggcggtcagcgtcgtcctcgcgagcgagggctacccgctctcctacaagaagggcttcgagatcacgggcatcgacgaggcggaaaagctcgagggcgtgcacgtgtaccatgctggcaccaaactcgacggcgacaaggtgctcaccaacggcgggcgcgtgctcaacgtgacggcccttggcgagagcttcgaggcggcgcgcgacctcgcataccgggcatgcgacctcatcgactgggagggcaagaccctgcgccgcgacatcggcgcacgcgccctcaaggggagaagcgcatgggactaggcatcgagggcgaatgcgacgaggggctgctggcgcccgaggataaccccgcgctcgacgagcgcatcgtcaactcgcgtccggtgtaccgcggcggattcctcaacgtcgacgcggtcgacatcgtgcttcccaacggcaacgagaaggttcacgaggtcatccggcatcctggggcagttgcgatcatcgcgctcgacggcgaggggcgcatcctgctcgtgcaccagtaccgcaccgcactcgagcgggtgacgatcgagattcccgcgggcaagctcgacccgggcgaagatcccgccaaggctgccgcgcgcgagctgtccgaagagacgggctatcacgcggggcgcatggagtatctcgtcccgattgcgacggccgcagggtacagcgacgagatcatccacctgttcatggcggcggacctgacgccgggcgaggcgcacccggacgacgacgagtttgtcgcatcggagtgggtgccgctcgacacccttatcgactccgtgctcgacgggaggatcgaggactcgaagacggtgatcggagcactcatctgcgattccctccggcataggatctaatgaaacagtgcgcggggcccacggcgggtcccgcgcgtcgactaagagaggtcttgactatcatggctgacgaaaaaccgctggttggcatcattctcggatccaaatccgacctgcctgccatggatggctgcaaggaaatgctcgagaagtttggcgtcccctacgagctcgtgatccattccgcgcaccgcaacccggacgacgtgcgcgcctgggccacgagcgcggaagagcgcggcatcaaggtgatcatcgcgggtgccggcaaggcagccgccctgggcggcgtcgtcgcgtcgttcacgccgctgccggtggtggcaatccccatgaagacgagcgacctcggcggcatggactccctgctttccaccgttcagatgccgacgggcgtgccgctggcgacggttgccatcaacggcacgaaaaacgcggcgatccttgccacgcagatcctgggcgtggcgctgcccgagtaccgcaaggccatcgtggactacaagaaggaacttgccgagggctagcttcgaaggctcgaaaaactctggagaggggtcgtggcagtcgacatgccgcggcctctttttctgtagagaaggggtcgggaagaggctcgtgtgctggctgtgcgggcctcctgagagcgagcggaatcccggcccgcagaacagcaagacgcggcaatgcaaagttgctagcgtttgtcaagttatgggtattgtttgtagccaatttttaaaaccgcaggtcagaggcttgcaggtaaaattcgcgttcacaggtcctccacatacgtttgcgcttcgaacgcggtttcgcgtagcctttttgaccattatgaagcattcaaacgcagcacgactcatcgcgacgctcggcattgccggcgtcatggcattcggaagcttgaacgctccgatggcagcgctcgccgacgagcaggactcgcagagcgcacaggacacgagcggtcttgtcaccgccgtcacacgcgacctgcccggtcagctcatgggcaaggtcaatcagatcaccgaacagcaatgcagcatggagagcctgctcgccgctggcagcgcggtcgacgcggacgcctaccgcgcgacgcttcccgactcggtctcgtggaagagctgcggtgtgagcacgtatggccttggagatgggctcatgggctccaattgctccgacggctcgaaggtcaccacgacgtccatgggcgtcgcgcacaagacgctgccgctcggcgcctccatccagatctcgtacaacggcaaggttgtcaacgcgaccgtacgcgaccgcgggccgttcgtggcaggccgcgacatcgacctgcagcccgccgtggcgagcgcgctcggctttagcggggtcggcaaggtcgagtaccgcgtcttgtagccacctcacgtgaagcccctcgcaatcaggcatatccaggtcaagcgtggcgccctcgttctcgaggtagaggcgcccctctcgacgatgcgcgtgccggcggacgccgcgcgccgcatgctcgagctgctccccaaccttgcgcaccatgtctgcgtgaacgacaacggcgataccttcggagacgagatcgcgggcaccgaagccgcgcatctgctcgagcacaccatcatcgagctgcaggggaaagcgtacgcgagctggggcgcgaaccgtccgctgttcacggggcgcacctcgtggaagaggagccttgtcgaggcgcgctcggccggcgagtccctcatgctcacaactgtgacgttcgtgaatgatttcgtcgcgctgcaggctgccgagttcgcatgcggtatcatcgagtgggcgtacgatcccgatacacacaccgcgcctgacattgccgcgctcgtcgatcgtctcccgcagctggtctgagcgcgcgctgcacctgcctgtgcggcgtgaggagaggagccgaagcgtgccctacaaggttgcagtactcatcgacgacgcttcccgcacgagtccgctcgcgcaggaggcaaagctcaacatctgcgacgcgctcgagcaggcggggcacgaacccgttttgtttgaggcgaactcccagctcacggcgatgctgcgccatgagcgccccgatgtcgccctcaacgcgacgagcggcaaatccgccgtcgacgggtcgatacagtcgcttatggacctgctcggcatcccctgcatcggcagctcggcgagcattttgcgccaggcgtgcgacaagagcgcgcttccaacgatgctgcggcgtttccagtttggagaatacggcgatgccgacttcgtcttgggcgtgagaattccaaaaagcgtctacgaggggctcgggggatcacaggcgctcgacctcatcgcgcaccgcattccggcgggctatccactcgtcgtgcgtgccggtcaccagggcaccaacgtcaagcccatcaaggtcgacgacccagcgcagctcggggtggcgctcgcgatcgtctacgacgccgaccacgacgcgctcgtggaagagtgggtcgacggcgtccaccttgcggttggcgtgctgggacacggccccgaggcgtttgccctgccgccggtcgagctcaccttcgacgaggacggcacgacggtagccacgcatgctcccgtgcgcatggagtcgctttcgggcgacgaggcgaacgcgcagggcatccgcagcgagatagagcgcgccgcgctcgaggtacaccgcgcctacagcgcccgtgacctctcgtgcatcgacatcatctgggacggcgcgagcgcgcgggtgctcgagataaacctcgccccctcgctcgccccctcgtcgggcttcaccctctcgtgcgctacggctggtatcagcctgaaggcactgctcaacgagctcatcgagcaagcgattgctcgcggataacaagtggaggagcatcatgtactgttttgagaaactggctgacgggctgtactggatcggcggagaagacgcgcgcctcggcaagttcgagggcctgatccccgtgccgtatggcatgtcctacaacacctacctcatcaaagacgagaagacggtcctcatcgacacgatcgaccgcgcggtcgaggagcgcttcctcacctcgctcgactatctgatcggcgacggcacgctcgactacatcatcacccaacatgccgagcccgaccatatggccacgctcgggtcggtcgccgcgcgctaccccgaagcgaagattctcgcctcggccatgtgcaagcgcatggtctcgcagttcttcgacgacgagctcgccgcgcgcgtcgaggtgatcaacgacggcgacacactcgagacgggcaagcgcacgctcaagttcctgagcgcgcccatggtccactggccggaggtcatgatgacctacgacgcctacgacaagacgctgttctcggcggacgccttcggcatgttcggcagcctcgacgggcgtctgcgcgatatcgaccgcgacttcgagcaggacatgctgcccgagatgcgccgctactacgcgaacatctgcggcaagtacggcgcgcaggtcgacgccatcctcgacaaggtcgagccgctcgacatcgcacgcgtgtgcacgctgcacggccccgtcgtggagcatagcgccgtgcaggcaatccattcctaccgcatctgggcgggctaccagccggaggtcaagtctgtcgcgatcatgtacgcctccatctacggcggcacgcgcgacgtggcggagaagctcgcgttcctgctgaccggcctgggcgtcgggggcgtcaagatctacgacgtcagcgaggtcgacgccagctacctgctcgccgaggcctaccgcgtgagcaacgtcgtgctcgcctgcgcgaccatgaacatggagatgaaccccaagatggccgacctgctcgaggtgtttgcgacgcacggcctgaagaaccgcaagttctcgctcatccaaaacggctcgtgggcaccgcaggccggcaagcgcatgctcgaggcgctcgagaaagtcccgggcacgcagatcgtcggcgatatgttcacgatcaagtcgcgcatgaaaaacgagcaggaaggcgacctcgagaagctcgcccaggctatcgccgaatcggtcggcgccgtcgtgacggcatccgaggtggagcagcacgagaaggctcccgaggcaagtcccctgcccgcgggcttcgtgccccctgtcgccccgcccaagatcaacgacccctacggtgcgggggcggcaaccaagccgacccaggtcatcgaggtctggaagtgcacgtactgcggctaccaggtcgaggtcccgcggggcaccgacatgtcgaacttcacctgcccggtgtgcctgaaggtgggcatgttcaagaagatccgcgagaagatcgtcgaagtcgagtcataaggcacgagctgccccacgcgggcattttgacctgccgcgcgtggggcagtgatggtactcttagagctgctagatattcgttttgaagcgaagggcgtgaacataatgagcaaggctgtttcctttatcgcaggtgccgcggttggcgcggtcgcagcgctgatgctgagccccaattccggcgaggaaaaccgcaggatcgtcaccgagaaggcggcgtactacagctctcatggcgacgagctgttccagcaggcagctgatgccgtccgcgacaaggtcaagggcgctcccgaggcaagcgtcgcgaccgcagacgatatcagggaaaagatcaacgccgcccgtgatcgcatcgcagagcaggtcacccgcaaccaggcggcccagcaggtcgaggcagacgtctccgacgtcgccgcagcggagtagcgcgctcctgtgacgttttgtttgcagtaaaggcgtgatacccgcatgatcacaacgacccagataggaaagaagcgcgtctacctgcgcaacaagaaggggcgcctgaaaaagttcggcaaaatccgcgcggtggtgttccacccatcaaagccgcaggccatcggcgccgtcatcaagcgccccgacttcttgctgatgttcaagcgcaaggagcgcttcgtcgcgctcgaccgcttcaggcaggtcgaaggcggcttggaggttgtcgaccaggccgattcgtgggacacggcggcgtgcaagcgcatgggcgtcgactacgattcctgcatcatctgggactacatgcccatcgtgaccgatgcaggccgcgagctcggcaacatcaccgacatcgcgctcgacgaggacacgtacgcgatcgatcacgtcgacatcgcgccgaacagcctgaaccgggcgatactcggcagcgcgaacatccccgtgaacatgatccgcggctacagggacaacgccatcgtcgtcaaagacgagatcggcgaaatcgaggagaccggcggcgttgccgcgaaggcgggcgaggcgtgggcaaagaccaagcacaccgcggcgactaccggcaggaaggcggtcgaccaggcgggcgaggccatcaacgacggcgccttcgccgcgggcgaggccgtgggcacagcccgtgccaagatgaacgaggctttcgatgcccacgaggcaaagaaggaggagcaggctgcccgaggcgagcgcaccggcgtcgacaaggcggcaaacctctttggcaagcagcttggcagggcctcgcacatgttccaggacttcaaagacgaatacgacaaagccgcccacgacaagtaggcacccatggccaaacgcgacaggaagcggtaccggcggcacgcgaggcgcccgcacggcgcgcgcctcggcaactacccttctggaaagatagagatcacccgcgctgggtacggcttcgtcgacaccgaggaaggctcgttctacatcccggcgacccgcacgggcggcgcgcttcccggcgacatcgtcgaggtgcgcccgaacccgccgcatgaggggagcagcagccgccgctcggcgtcggtgagccgcgtgctgcaccgcgcgaccgacttcgtcgtgggcgtcttggagctttccgacccgctcgccgttgtcgtgccgcaggacccacgtatccaacacgacctgttcgtcacactcgaaggggcgcccgaggtacacgacggcgacgtcgttctcgccaagatcacgaccttccccagcaggcacgcctcgatggaaggctacatcgtggaggcgctcggtcgtgcggatgccccgggcatggacgtcgacatcgtcatccacaacgccgggctgtctacggagttctcgccccaggcgctcgagcaggcgcgcggactgagcgccgatatcgaaggcgcgctgcaagaaccagaccggcgtgacctgcgcacgcggaccgtgttcacgatcgacccggtcgacgcgaaggacttcgacgacgccatctcgctcgaccacgtcgaggggctcacgcggctcggcgtccacatcgccgacgtctcgagctacgtcgaatggggcagcagcatcgacatttgcgcgcgcgaccgctcgacgagcgtgtacctcgccgaccgcgtgctgcccatgctccccgaaaagctctcgaacgacatctgctcgctgcgcccgggcgaggagcgccgcacgatgacctgcgacatgttcctcgacgagcgcgcgcgtgtcgtgcgctacgagatattcccgagcgtcatctgcagctcacggcgctacaactacgacgaggtccaagagatcctcgagggcaggcaagacgatgccaacaagggcaagcttttcgagttccacgagctggcggtcaagctcgccgcgctcaggtacgcgcgcggcggcctcgacttcgactcggtcgaggcaaagcccgtgctcgacgagatggggcatcccatccgcatcgacctgcgcgtgaagaccgatgcgacctccatgatcgaagaggccatgatccttgccaacgagacggtcgccacgcacgtcttcaagcagaagctgccgctcgtctaccgcgtgcacgacgccccgcgcgcctcctcgctcgaggcgctgctgcccgtgctcaaggagctcggataccccatcgaggggctgggcggcggcgcgccggcggcgcggacgagacgctcgtgaactacgtcgtcttgcgctcgatggaacgcgcgcgctacagcgtggagccgcttgcgcacttcgggctcgcctcggagcactactgccacttcacgagccccatccgtcgctatcccgatctgatggtgcaccgcctgctcaaggacccgcgcgccatggaagggcaactcgaatggctcgcgcggcacgcctccaagatggagcgcgtcgccgaagaggccgagcgcgacagcgtcatcctcaagatgtgcgagtacctgcaggggcatgtgggggaggtgttcaaggggacgatctcgaacgtctttgcgcgtggcttctacgtgcggctcgagaacacgctcgagggcatcgtgcgcttcgacgcgctccatgacgaataccaccagttcgaccccaagctccagacgctcatgggcgaggaaacggggcgcacctaccgcctgggacagcaggtgcgcgtgcgcgtgcgcgccgtggatccgcgcgagcagcgcgtcgatttcgagctcgcctaaacgcttttcccacgcagctcctcgggcgcttgtttatcgcgtgaaatggggtgcatattctcgtgtcggtggtaccctatacactccatggaggcgcatcgccgcccccgtgtttcgtaatacgaaggagaatcgtagaacatgaacctcaatcctgtcgtcgtcatccccacgtactggtgcgggcgtcgcaccgcccattcagtcgaccgcgggcctttgtatgatcacatgactcccatcgacaagcagggcgaactgccgcgctgcctcgactctttgcgccaggtcgttggcctggggcgcatcatcttgctcgtcgtctccgagcccggcatcgagacgcaggccgaagaccgcgtgcgtgccatggcagaccacttccgcgacctgaacatcacgatcgtcggcgagaccggccagcgctacatccaccgccgcctcgagcagctcggcatcggcgcgctcaaagatatggcatgcctgtccggatacggcgccgtgcgcaacatgggcctgctcgcagcctccatcttcggacacgacaccgtcatcttcctcgatgacgacgaggtcgtcacgagccccgactttctggaacgcgccgtgtacggcattgcctaccagacgccgggcggttcggtcatcacggcaaagaccggctacttcttcgaccgccagggaagccccctggccgatgagaaggtcccgtggtacgaccgcttctggaacaaggcgcatgggttcaacgagtacatctcgaaggcgctcaaggggccgcgcctgtctcgcgcgaacaccgcatgcggcggttgcatggtgctgcacgccgatgcgtacggcagggtcgcgttcgacccgtggattgcgcgcggagaagacaccgactacgtgttgtccgcccatatgtacggggtcgatgtgtggctcgacaaccagctgagcgtccagcatatgccgcccgaggacgcctctcctgcaggccgcttcgagcaggacgtctaccgctggttctacgagaaccgcaagatcgagtttgcaaagacgcagatcgaccttatgcaggtcatgcccgcctcgctcaacccgtacccgggtccctggctcacgcacgccatcaaccgccgcgcacgcctcaccgcgtacctgcgcgtcatcggccgtgcggagcgcggcgagtactggcgcatcggcaacaagtcgcgcaaggaggccggtgcgttcgcgcgcgagaactgcgccaactacttcgagttccagcaccagtggcccaacatcgtgcgctcggtatggaactacacgccgctcgcatcccagctggtcggcgcgcgcaatatccagagcgcggccggcttcacgggccgcttcacagccatcaacgtcgacggacagaaccgctaggacggctctatggatgtcaaagaagtactgctcgccatcgtcttaggtacttgctgcgtcgtcttttccgtgacgatcgtctttggcatcgtcaactacgcgagcgtctcgccggtcgtgccccttgcggccatcatcgggttcttcatcatctcgatggtgggcctgcaggtcgtgggcgacccggaccacgcgagcgcgcggcagatcaaccgcattctcgagctggtcagcgagacgctcccgttcatgagccagggcctcactgtcaagagcgcccagtcggtctgcaacctgctgctgcccaacgtcaaggcgcacgccgtcgctttgaccgaccacgagaaagtcctgggctttgccggtgtcgaccatgagaatcacatgcccaactcgccaatccagaccgacgccacgcgcctgacgctcgaagacggcagaacgcgcgtggtggacacgtcgcacgcggtcgggttcgcccacgacacgggcaagctgtgcgcgggcatcatcacgccgctcgtggtcaacaagcgcgtggtcgggacgctcaagttctattacaaatcgcgccgcaagctcaacgacaaccaaaaggccatggcggagggcttcgcccagatcctctcgacgcagctttcgctttcgtatctgcagcagcagaccgagctcgccgcgcagatggagctccgcgcgctgcaggcgcagatcaacccccacttcctcttcaacacgatcaacaccatcgcggccatcacccgcatggacccggccaaggcgcggaccatgctgcgcgagtttgccgtgtactaccgccgcctgctcgagaactccgaagacctcatcccgctcgcggccgaaatcgagcagaccgagcgctacctcatgttccagaaggcgcgctttggcgaggagaacatcctcatggagaccgacatcgagcccgggctcgaaaacgtcagggtccccgccttcatcgtgcagcccatcgtcgaaaacgccgtcgggcatgcccgccgcgacgacggctccccgctgcatatcacggtgcgcgtgtaccacgcgagcgacagcgtgatcatctccatcgccgacgacggcgtgggcatcccggctgaccgcctcgagcacctggtcgacggcagctcggaggcccatatgggcatcgcgctcaaaaacgtcaacgcgcgcctcaaggcgtacttcggcacgatatccggcctgtacatcgattcgaaggtcggggtcggcacgacggcgtacctaagcctgtacgacgtgctcgagcagcagcacctcggtgccgaagaagatgaggagcgcgaggacgatgccgagcaggagcttgccgccgccgagccggagggcgtgcgcgctccgaaaagcgaagctcgggggaccgtcttccacagcctgaagaagtaggcaattctccttttgctgtctgtctgtcctcgcgggtaccatccccgttttgctgtacactcacatctgtactgtgtttgaacggagaccatatgctcaaagcgattattgttgacgacgaggctcctgcccgttccgagctcaggttcttgctcgacgagacgggaatggtcgaagtcgccgccgaagccgcgaacgttcgcgaggcaatagagaaactcaaagaagtcggcgcggacatcatgttcctcgatgtgaacatgccgggcgtcaacgggctgcagctcgccgaggcgctgggcaagctcaagtacccgccgtacgtcatcttcgtcacggcatacagcgagcacgcggtgaaggccttcgaggtcaacgcggtcgactacctggtcaagccggtcgagaccgagcgtctcgcgcaggcgatcaacaaggtccaaaacatcatcgcgtcgcagggacgccccacggcaaacgagcgcatccccgtggagaagggcggcaagaagctgctcgtccccgccagcaagattcactacatcatggccaaggacgactactcctacctccacacggagtcggatcgctacctgtcgacggtctcgctcgcccagctcgaggcaaagctcgagccgctcgggtttttccgcgtgcaccgtcgctacctggtcaatctctcgtgcgtgaacgaggtcgaccccgtgagcggcggcacgctgctgctcaccttgagcggtgaagaagagcaaattcccgtctcgcgtcgacgcgtcgccgcattgaagaaggcactcggcatctaggagaaacagcggagatggattctgcacttcagaccgacatcactgaaaaacgctatatagacggattcgaagacgaccatctccacgacgagtgtgccgtcttcggtgtttatgacgagcaccgcgacgtcggcaggctgacgtactttggcctgcaggcgctgcagcaccgtggccaggagtctgccggcatcgccgtcggcgacggctcgaccgtcatggtcaacaaggacctcggcctcgtgacccaggtgttcaaggagagcgacttcgccgcgctttccggcaaggtcgccatcgggcatgcgcgctactccacgagcggcggcgcgggttcgtgggaggcggcccagccgcacctctccgccatgggcgacgagatcatcgccctcgcgcacaatggcaccctcgtcaacacggcgcgcctgcgcgtcgagctggtcgagcgcggcatcgagttccgctcgggcaccgactccgaggtcgccgccaagctcatcggctactacacccagaaaagccaccatatccgcgagggcatccgccggacgatggagctgatcgaaggcgcctacgcaatggtgctcatcacgtccgacgcgctgtacgcgttccgcgaccccaacggcatccgcccgctcgtcctcggcaagttcgagggcgaggacggcggctacgtcgttgccagcgagacctgcggcttggacatcgccggcgccacgtacatgcgcgacgtccgtccgggcgagatcatccgcataaaccacgagggcttcgtgtgcgagcaggcggtcaccgcccgccgctacaccccgtgcatcttcgaacacgtctacttcgcacgccccgacagcatcttcgacggcgcgaccatctaccagtcgcgcgtgtggatggggcgcatgctcgccctcgaatccccgtgcgacgccgacatctgcatcggcgtgccggacagcggcatccccggcgcgatcggctactc

SEQ ID NO: 2821 - DNA, 8428 bp, Unknown
  16S sequences of unknown bacteria
aaagccgatatcgacaggctgcttgtggagttcgggctttcgggcatggggcagcgtcatccctacgacctctcgggcgggcagcagcagctgctcgcgtttgcgaaggtcctgttgacgaagccgcgccttctgctgttggacgagccgtcgaagggccttgatgcccgggcgaaggcagaagttgcctcaaagctgcgcgcgtgtgcggatgacggcgcgacggtcgtcatgaccacgcacgatctgccctttgccgcgctggtcgcagatgccacgtacatgatgttcgacggtgcctgcgcctgcgcgcagccgacgggggagttcttcgagggaaacctgttctaccgaccggtgccagacagcttctctcgcctgctcgccgcatggagcgcgcaggaagacgggcgggcgtgatggagcgagtttttagggcactcgaggtccccgcgctcgtcatggccccggtggtgctggtcttgtgcgcggtggtcgcatatgaccaggcgggggtgatctccatggtggcggtctgcctcaccatcgccgtcatgtttggctcgtttgaggtgtcgagacctcccctcaggcagattatgcccacagtggtccttgccgcgcttgccgcggcggggcgcattctgtttgcccccatccccgacgtcaagccggtgtcagcggtgtgcatactggcaggagcggtctttggcaggcggcagggctttctcgtcggagcgattgcggccctggtctcgaacttcttctttggccagggcgcatggaccccctggcagatgtatgcctgggggctcgtcggctatttgggcggcgtgctcgccgaccatggtgcgtttcgccaccgctgggtgctctatgcatgcgggcttgcttcgggctacctgttcggcgccctgctcaacgcctggtacatcgtcgggttcgtacaccccatcacctgggaaagcatcctgctcgcgctttccgccgcgctgccgctcgacagcgtgcacggcattgccacggtcgtcttcctgcgcatcgtctacgtgccctgggagcgcaagctcaggcgcatcaagaaaaagtacgccttggccgagcgctctgatgctgtggcgggatggacgtcgcgttctccagagagcatgcgggctgaagaaacggagcgaatatgacccagttctacttttccgacctgctcgccgaggaggaaatgcgaggattgctcgctcagacccgagcgggcttcgagagcatcctcttctccattgcagacaacctcgacaatttcgatgctacgctcgcacgggagcgcgagcggcaggagcgcttcgggcatccgccgctttcgctgcacggcccgtttctcgacctgaacccgatggccttcgattcgtacgtgcgcaaggcgaccatgacgcgcttcaaccaggcgtacgaggcggccgttgcactgggcgccgagcgcgtcgttttccacagctgcatgattccgagcgtctacttccttcagggttgggcagagcgtatggttgagttctggctcgagttcttcgaggggaaggcaggcgttcaagtctgcatggaaaacgtgctcgaccgggaagccgcgccgcttgcggaggtggtccgcgaagtggcccgccccgatttcggcgtgtgcctcgatgtcgggcatgcgcactgctattccgagttgtcgctcgatgcctggatggatgccctcgggggcgtcgtttcgcatgtgcacctgcacgataacgacggttcgcgcgatcagcaccgcggactgggcaggggcacgatcgactggggacacgtgatcgcgcgcctgtcggcggaaaaccccacggcaacgtggacggttgaatgcgcgaacgcagcagaggcgctcgaatcctggcgctgctgggcgtctcttacggcgcgctgatgccccagcacgccccggctccacaaccggggcagaatgtccccatgctatgatttcgtggacagacctccacccgaaaggccatccatggaatcgttcgagctcgtcttggtgctgcttgcctgcgtcatcatcgccgcggtggcagagcgcgtgatccgccgcgtttcgctgccgctcgtccagatcgctgtcggccttgccgccgcgctggtcgtgccgcatgtggccgaggtccacatcgactccgagctcttcttggtcctgttcatcgcgccgctgctcttcaacgaggcgcgcgagtcgagcaaacgcgagctgtggaacaacctgccctcgatcctctcgctggccattgggctcgtgctcatcactgtgctcgtggtcggattcgccctgcactggatggtgccctcgattccgctggcggcggcgtttgcctgcgccgcggcgctcggtcccaccgatgccgctgcggtcggggcgctgggctccaccgtctcgctcaccaagcgccagaagatcctgctttcgggggaatcgctcatcaacgacgcgtcgggcgtcgtgtgcttccagtttgccatcgccgctgcagtgaccggcgcgttttccgcggccgacgccggcgtcacgtttctcgtgctcttctttggcggcatcgcgtttggcatcgtcgcgggctttgcggcgttcttcggcatcacgctgctgcgccgccgcggcttcgagaacaacatcgtccacgtgctctacgaggtcttcacgcccttcgtcgtctttctgctcgcagaggagctgcacgtgagcggcatcttggccgttgtggcagcgggcctggtcatggcgcgtcatacgccgcgcctcaccaccacgtcgctggccaaactcaacctcgtgtccaacggcttttgggagatcatcgtctatgtgatcaacggcgtcatcttcgtcatgctgggcatgcagctcccgcaggcgatgtcgcccggcatgagcgacggctacggcccgctgcagctgctcggcgtcattctggcggtcacgctgctcgtcatgctcgtgcgtttcgcgtgggtcacggtaaccgagcttctgcacgccgatcctgccacggggcagcggggggcttcccatgcggtgcgcacgctcagggaagcgctggtcacgacgattgcgggacccaagggggcggtgacgctctccatcatcttcaccatcccgctcacgctcgaatccggtgcgcccttccccgagcgcagcttcatcattctcgtcacggccggcgtcattctgtgcacgctcgtcatcgccgatctctctcttgcacggcttgcgcccagcgagcatgtgggcgcgaccgaggaagagctcaggcgcgcggaggtcgcggtgctcggaaacaccatcgccgaactcgagtcgaagattgctcagggcacgcacccggagttcgagccggcgacgcgcgtggtgctgggcagctaccgcacgcggctcgtcagggcacggctcgagatggggcagtgcggggatgtgctgggcacactcgtgcgcgaggtgctcgtgcggcagcagcagcgtgccgacgagctggaggcagagatcctcgagcagacgtccgccaagtcggcggctccgtattatgcactgctcaagaggatccgcgggtcgctgggctactacgagaagggcgccaaggtggggccgcgcggcaacgggctcaagagcaagctccacatctaccgcttcgcgctcaagccgcacaaggtgacggacgagaagacggttacgctttgccatatggatttcgcggtcatcctacgtctcatttaggccaactccttcacaatccctatttgaatcgattaacgaacaagtggtatttgatcttctcccacagcatcgcggcgaaatagacgacggcaaagaaagccgcgaaaccggctatcaccgttaggaaccccaaaatccggtcaagcaagcttggctcatcgtcgtcgggcggctcatcgtcgtcgggcgtgtaggcgtgcgcagacagcgtgctcgaattctcgggtctgcttgcgttgttggcaacgccataaggcgactggaggtgctgcgatttcccacgaaaccatacgctaacgaagccagaatcggatttcgagccagcacggatagggctatatgatgtttcgagattgcctccaacgcagcggtatacagcgtacttcggcatctcttcgtccaacggaaccgttaagctatactccgcttcatcctcgatatcagggataatctctacacgatacagaccgtcaatatcaccggagcggtacatatcacgaagttcgtcgcaagcttcacaggacccctcaccgtgcaggcactcctccccatgaatcacaatcaaagcatcgatagccggtgcggcaaactcctctgactcggtctctgcattggaagaggcatcaggataatgggaaaggctcgccccggagccttcatccttaaaagtgaagtcaggtgatacggggtcgggcagctcgacaggtatctcgatattatccgggcggtactgctcccaattgtactgatgcgcataatcgtttgtgtgaactcgcctcgccaacgccacgtcaacgggcgcgaagacaagaccgaccactgcaaccagaaggaacgcaacgctcacgcgcttgaccgtcctgattggcgatcggaggttttctgctttgcccgcttcgttcgaatgcaacgtctgccaccttgctgcttacttgtaatccgcgctagcgacaattgagtcgaaatccgcagcgagagtctcgtttgaaatgtcggagtctccaagacatgacaaggtgtactgataaagagacgaattggcgtagcaataataggatgtgtccttcatgggcgaccccgagtaggtgccctccgttaccgccttccagtaatcgacgccgtttatctcgaccaagctcgccgtctcgttatcaaccgtgtccatattcattcggttgcgctccaagacgacgtcttcgttaacggtgcgaatgctgagattgtccccgtactgctttacgaattcgtccgtgacaaactcagatgtgtcccacgccatcgcgaataccgccgtgtctttgcctgcgtaagagggatacagcaaaagagcctcatagggcgattcgttcccttgcccatatgtctgggagtcccatccgacaggcacggtgacttgagtatttgtcgacggtatggacgcctgatacgaaccgttgttctgtgaaccgttcgatgtcccgctttgcgatgctgtggcgtttgatgtgttttgcccagagggctggttgacatacgtgtaggagccatcggggttatgtacgagatgaggggtattctcataccagaacatgaggccgatcatcaggcagaagtacacgattgccacaatgtacgatatgcccatcttcggcgtcttggtctcatggctcgtcctgaggttccggttccagcaccacccgatgatgacactaacgaagttcgaggagaaggacaccgcgtagttcaagaacgatatcgctttgctggaagagatgcgtgggctatccgtgaagtatgagcggtagaagacaatggcgtagacggcgagcacaaccgtctggattatccaggctgcaagcggcccgacgaggaccgcgagcataatccaaacgaatgcccccgccaacactccgagcgcggagaagcctggcgccggtcgccaatcccttacgaccggcatattgtcgatggcgctcttttctgaaggtgttccctctacgaaagacgccgagtgctgccagctttgatcgctttgacctgggttcaacttagccaaactttcattgctagctggctggggatcagtcggttgcgcttgagcgtaggcgctttcatgcagaggggctgtaagcctatcctgagaactgaatgcatcatgaggagtaggtggctgcgtcagaccgggcacaccattctgcgcatcgtccatagtcgatgacctccattcgcgttgaatctaaaatggatgtcatcggtgccggcgactaaggaggacatccacccatgtcgccagacaacctgataatacgcaaccacgcattagaggacggacagatgccctcctctgtcgtggttagcgcacgtgattattaggttgtctggcggggttaagtatagcatcgagcatttcggtcatctatcgcgcgaaatagaaatgtcgattgcggcgcgcatatcggcatgaaaggtcggcgatagctgatgccgataatgctagggctcgtaaaatggcaagcacctgcggctatggtcgcgtcagagccgcaggttttcgacaatggctcagactgcagaaatctgcgatagcgattctggcatcttatcgactaaaatctcgagccaccaggagaaatgatccggatctgccttctgaaggagatcaagcattctagcttgggcagccgggggcatagcctcgaagtcgcttctcatcgccgcgtcgatttcagcagtgctcgcttccatttcctcgcatatctgccgcttctcgtcgaggctgtaggactggggcgagcccaggcaaacatcggccctgaagtaagcgagttcgtgctcggtcatgaggtcgttccaacgggagtctgtggtgtacgtcatttcgcttctcctttataattcgtcctgttcggattgctgttttgccaggctcttgctaggcaagaatttaggcaagaacaatccgaataggagtgcctttttgtgtgacaaacagttataggaaaagcgggttgacctggcattttgttctagagtgtcccagagtgaaatgcccaatcaatagaggcggagctcctgtactaccagacctgcctgttcgccatcgagctagagcgcgttgccatcgagtacctgggcggggtcgtggagcaggcggacgtggcgggcgacgagctcaccgcgaaggcggcgcgcacgctcatcgaggagcatcaaagcatcgagcagacgctgcaggagcgcgtgggctattcggacgagcagccgggcgtgggcgcgggcaagatgttcgatccgtcgacctgcgtgctgagcgagcagttccgcctttcgcgcgagtacatcgagatgattaccgcgggcgctctctcggtggagctcgacaagatcggcgagctgcaggggcggggagagatcgacgaggacatcgcccaacagctgcgccagaacgtctacgtgctccagatgaacgccgaagccgattagcatcccgcgtgaggcccgcgggaaacgtggcagtgccacaaatcccacgtgagatgcgcgagaaccgtggcagtgccacacatccggcgtttgctgtgcgagaaacgtggcagtgccacacatccggcgtttgctgtgcgagaaacgtggcagtgccacgcatcccacgtgaactgcgcgagaaccgtggcagtgccacacattccacgcgctcacgcgcgcgacgcgcttagcgcgcgcggtctccttcttgcccggcgccgcggtcggcgtcggggccttcgacgatcgggccttcgagcggctgtgggctcgatgcaagcgccgcgggctctccgtcgcccttgaagctggagccgtcggcggcgtacatgtcctgcttgcccggcagcacgatgttcagcacgatgccgaccagcgaaccaatcgccaggccggacaacgagatggcggtgctgcccgcggggatgacgatcgcgccggcggcgctgtaggagataccgatggatagcacgatgatgagcgcggcgatgagcacgttgcggctgtgcgtgaagtcgacgtggttctcgatcaggttgcggataccgacggcggagatcatgccgtacagcacgagcgacacgccgccgatcacacacgcgggcatgacctcgatgatggccgagaacttcgggcagaacgagagcagaacggcaaagcacgccgcaatgcggatgacgcgcgggtcgaacacgcgggtcagcgccagcacgccggtgttctcgccgtacgtggtgttggcgggcgcgccgaacagcgatgcgaggatggtggccaagccgtcgcccagcagcgtgcggtgaagcccgggctcggcgatgaagttgcggttgcaggtcgagctgatggcggagatgtcgccgatgtgctcgatcatcgtcgcgaaggcgagcggcatgatcgtgatgatggccgtggcggcgatgcctccgtcaaacgagggaccgaacagcgaaaacacggtgttgtcccacatcacgggaaggccgatccacgcggcttcggcaacgggggtgaaatcgacgagccccatgacggcggcgaccacgtaggagatggcgacgcccagcagaatcgggatgatcttgaccataccgcggccccagatgttgcacacgacgatgacgacgaccgcgacgatggcgacgaacc

SEQ ID NO: 2822 - DNA, 3852 bp, Unknown
  16S sequences of unknown bacteria
gtgactttcgacatgaatatgcgcacggacgcgctgggcggcagatacgtggagccgtcggtctatatttatatcgtcgtcgcactgctcttattggcggcggtgattttggcgaacgtattcacgaaaaaagagaatatcgtgcccgtcgtcaacttttccacggaaaaggatccgctgtacgtggggctcgtcatcgacgggaagaccaaccgcgaagatctgacgtcgctcatattttactgggcgaacaaaggatatatccggctcaatctagaaaacgaggacgacccgatccttttaaaggataaaaacctgcctgacggcacgcccgattacgagagcattttgttcgacggcattttttctcgcggcgacgaagtggcggtgagttcgctcaacgaatctttctacacgaccgcaaacagcgccgtgaacgccgcaaaggcgcataaaatgccctgttttaaatcgaagatcaccgctctttccgtcttattcgcgctcgcagccgcgcttttggcggcgctgccgccgttcattgcggcgcaaaacgtgcatccgacctttatcaacgcgtggggatttctgatgtttttgcccgtgatcgtcctcgcgcccctcggcggctatatcgtgcagaccgaactcaaatggacgaaagcgaaaaagatcggttacgtcgtcctgttattcgcgctcgcggcggttgcggcagccgtttacggcatctttacgcccgcgtacgtatttcccgtgtgggcgcggttcgtcgtgggaatactcacggcgggcacgatggcattttccgcgctctatcgccgccgtacgcgcgagtacgccgaggcgctcggcggcatcgtgggcttccgcgactatatccgcctggcggaaaaagataaaatggaaacgatgctcgaagagaacccctcgttttattacgacattctcccctacgcgcaggtgctgggcgtttcggatatctggacggataagtttgcggggctttcgatgcagccgccctactgggcgatgaacacgcacgtgagtctgttcgacgtttacgtcatccactcacttctccgcagtacttccgcgactttgtcgcattccttccattcgctcccgcagggcgcgagcggtagcggcggcggtttcggcggaggaggtttcggtggcggcggcttcggcggtggtggcttcggaggcggcggcggacgcagtttttaagcgatgaaaaagacttcccgtatttgcggaagtcttttttttcactcttttcttttgtatctctcgagaaagggatattcttgtcccttcgtatcgaaagagatcagcgtatccgcgtgcacgttgtacatactgcggaatatattgatatctacgttatgatcttcttttttcagcgcggcgatcagttttttgaccgcaaggcgcttggacgtttcctctttgtcgttttcgcaggcttcggtaaaccggcaggcgcagcggagaaattccagatcgttataatttttccaggcgacgatatcgcactctttgacgtaatacagcgggcggatgagttccatgcccccgaaatttttgctcttaattttgggcggcatgccctgcacctgcgcgccgtacaaaatactcatcaggagcgtttcgatcacgtcgtcgaaatggtgcccgagcgcgatcttgttgcaccccatcttttgcgcgcggtcgtacagaaagccgcggcgcatacgcgcgcacatatagcacggatttttcccgatctccgccaccgcctcgaaaatatcgctctcgaaaatttccgcgggaatgcccagaatttcggcgttgcgttcgatgagtttacggttggcgggattgtacccgggatccatcaccagaaatttcagtccgaatttcacggggctgtggcgctgcaattcctgcatgcacttggcgagcagcatggaatccttgccgcccgaaatgcacaccgccacgttgtcgccctcgttgaccaattcgaattccttgcagccctttaaaaagcggctccatatgagtttgcggtacttggtgatgatgctgcgctcgatctccttgctgcgttccatatcagccctttaagcaggcgggaacgcgcgaaaaggcgatgccgctctccttttcccaggtttcgagttgcgcgcggtatccttccgcacaaaaatctccttcgcccttttgacaggaaacgagttttacgccccgctttacaagggacaaaaactgcgttttccccgcaacgagaaagaaatcgccgtcccgctccgcgacggcgatcttgccgtcctctttcggagaaagcgggtagatccgtttgggagagagcacgtatttatcgaactttttcccttcccgcgccatcttataatatttgaggacggtgtccgctactttttcgggcggcacgaaggaagtgtccagaacgaggtcgtagttatccatatttttgatatccacgccgtacatggaaaggtagcggcggctttcgctggcgcggcgcaggctgatggactcgatcgcctcgtcgatgctcgcgaacggctcgctgtcgcgtttggcgttcatgatgcggcgcgcggagatctcggacatggtcgtcatatacacggcaaaggaactcggcacgaaatgccacgcgagccgcgaatcgatgacgaggtttttatccgagttttccagcgctttcagcccgttgtcgatctcgtcgtcgatctcgggatggtcttccatatagcggttgagttcgtacgtggtcatgccgcgctccagcgcgatctttctctgaatggtgcccgtcgaataaaattccaggccgcacttttctccgatgatgcggccgacggtgctttttccgctccccagatcgcccgcgagtgaaattttcatgctttccatactattccctttcaaacaataatgtgtattttatcacagatcccgacctttgtaaataatatgagccgcgttttccatcggataagcgcggctcgctttcggatttattcttaaacgctgaacaaaatgtcgccgtaagtcgggaaaggccagtactttttggcggtgacaagttccatttcgtccgcaaacgcgcggagttcgttcattgcggggatcaccttttccgcaaagaacaccgagcagacggcgacgtcagaacacgtctttgcctcggcgagcagtttttcgatctcgttcgccttatcgtacatggattcgttggcggcggaaagtttttcgatgagttcgcattccgagcgcacggaaatagttccgaaaacggcgcgcttttcgcgcacgcacgcgcacagatcggttatataggcggcgacggcgggatagatgtcctttttcgccatgtccagcatggtgaggcattcgatattgacgaccttgcagtaattttcctgcatgatctcctgtctggatgccgcttcccgctcggtaaacacgcccatgcggcggaagagttcgatatttttcggcgcggtgaagtacggcagcgcttcggcggtatttttaaggtttaaaagcccgcgcttttccgcctcggcagtccattccttgcaatagttgttgccgttgaaaatgatgcgcttgtgctttttgatggtatccacgaccagacggtgcagcgccgcgttgaagtcgggggcgttttcgagtatatcggcaaattcgcgcagggtatccgccacgatggtgttgatcatgatgttcgggcccgcgatcgaaaacgtcgagccgagcatacggaattcaaacttgtttcccgtaaaggcgaaaggcgacgtgcggttgcggtcggtcgtatccttggga

SEQ ID NO: 2823 - DNA, 11305 bp, Unknown
  16S sequences of unknown bacteria
agattgtccgtcaggctctgaaaaaaatggttaagtaaacgatatgtgcctgcaaaggaagtgagtttttgagcatcgattatggccacgatattacagaagaaccgctggtaaccaaaacgctgctcggtgaggatttgcgcagtgaagtgtctctgcgcccccattctctggaagaatatgtggggcagcagaaagccaaagaaaatctgcgcatttttattgaggcagcaaagcggagaacagaaccgctgaatcatgtgttgctgcatggccctccgggcctcggaaaaacgacgctggccgggattatcgctgcggaaatgggcgttaatattcgcattacctccggcccggccattgaaaaggccggagatttggcagcccttttaaccaatctcaacgaaaatgatatcctgttcgtcgatgagatccatcggctgaaccgcagtgtggaggaaattctgtatccggcaatggaggattatgccattgatattatcattggcaaggggccttcggccaactccatccgtttggatttgccgaaatttacgttgattggcgcaacgaccagagcagggcagctttctgcgccgctgcgcgatcgttttggcgttacgttgcgcctggaactttatacgcccgaggaactttctggcatcgttacccgcagcgcagggattctggaagtccctatcgagccacagggagctatggaaattgcttcacgttcccgcggaacgccgcgaatcgcaaaccgtatgctccgccgtgtgcgtgattttgcgcaggtgcgcggagacggtgtgattacaaaagatattgcagatctggctctaacggcgctggaaattgattatctcggcctggatgccgtagatcgccgtatgatgcgcgccgtcatagaaaactacggcggaggtccggtagggctggaaacgctggcggctaccattggcgaggaatctgtcaccctggaggatgtgtatgaaccgtatctgatgcagatggggtttttaacgcgtacgccgcgggggcgctgtgtgacccgcaaggcatatgaacatttgcatctgccgttgccggacgctatcaataacggcgggatggagcagatttcgctgtaatgtgcaaaatcagacatgaaagggaataagttgaactatgggtaaattatttggaaccgacggcatccgtgggatcgtcggagaaacactaaccgccgatatggcgtaccgtgtggggaaggccgtcgctgtagtgctggctgaagataaaaagggcgcgccggagattactattgggaaagatacccgcatttcctcggatatgctggagtcggcgctgattgccgggatttgttctgtaggaggaaacgtgattccgctgggtgttattccaacgccggcggtagcatacctcacgatacagcgcaaggcagacgcaggcattatggtttccgcatcccacaatccatatgagcacaatggcatcaaagtgttcaacagccgcggctataaactgtcggacgaaacggaagcacgcgtggaagcattgctgttgagcgatgctccgattatggaaaaaaccggaagcgaaattggaagaatgatccgcggtatgcgggaagcccatgaaaactatattgatcatctgtgcgctacggtcgaagatgacctgtccgggcttcgcgtctgtgtggactgtgccaacggcgcggcttcttccacagcgccggatctgttccgccgcttcaaagcgcgtaccgatatcatgcacgccgtcccaaacggaattaatatcaacaaccgctgtggttctacgcatttggaatcccttcaggaaaccgtggtcaacgatgggtacgatatcggtgtggcctatgatggtgacgccgatcggtgcctgatggtagatgaaaaaggaaacatcatcgacggtgataaaatcatggccgtatgcgccatggatatgcgccgtgccggtaagctgaacggtaatgccatcgtggccacagtgatgtccaacttgggtctacacgaattttgccagagagaaaagatccagctagtttgcactgatgtaggcgaccgccatgtgctggaggaaatgcttgcgtgcggatactgtatcggcggcgaacagtctggccatatgatttatacagagtatgccactaccggcgacggagagttgaccagcctgcagtttctgcaaatcctgaaacgaagcggaaaaagagcgtcagaactggtttcctgctgtgcccagtatccgcaggtgctggtcaatgtgcctgtggcgtcacgtcgcggtgcaaaagaagagattatggcctcggaggtgttggcggctgccatccgcaaacaggaggaaaaattggggcaggagggacgcatcctgctccggccgtccggcacggaagccctgattcgtgtgatggttgaggcaaaaacagaggaaatggctcattattatgccgaagaattggtgaatgtggtaaaatcactaaaaatttcttaattcaggcaaaaattttctcactttttcttgacgaaaaaataatttccatgtatactaaatcaagtgaatagaagtttgaggtttatcatgcaagagatgcaggaaatgacagatggaactctgtgccggctggtcgccgaaggggatcgctcggcagaagagctcttggtcagccgctataatcgcttggttcgcatgtgttcccgtccttttttcctagtgggcggcgatagtgaagatctgatccaggaaggaatgctgggtctgctcaaggcgattcgcacttatgatgcatcgaaagaggcgtcgttccggacatatgcggaggtctgtatccgcagccgtttatacagcgtgctgcgcagccaaaagcttgataaacatgcaaccctgaatcactctgttcttttggaagcacccttctttgatagtaattcctacaccatggacactttttccgtttctcagtccaatccggaggatcttatgattctgcaggaaagctttgatgaaatgtggaagcgtgttcaagaccagttgtccgagttcgaagcgaagattttggggttctatttggacggcctgtcctaccaggaaatagcaatcaaagtacgcaagtccccaaaatcggtggacaatgctgtgcagcgcatccggcgcaaagtggcgcagcacatttatcccggcgaaatcagcaaacgctgagcgcatatattatctaatcaaagagagggtaaaaatcatgtacgaagacaagacattggtatgcaaagagtgcgggcaggagttcgtgttcaccgctggtgagcaggagttttacgctgagcgcggtttccagaacgagccccagcgctgcaaggcctgccgtgatgcccgtaagaacgccacccgtggtcctcgccagtattttacggctgtttgtgcagcctgcggcggagaggccaaggtgcctttcgagcctaagtccgatcggcctgtgtactgcagcgagtgctttgccaaaatgcgcgaagaaaacgcataaggcagattctgagatcatatgacgcaaaggacgagcaggaaaatctgctcgtccttttttgaatgcaggatatcgttatttaccatctgaaagcaaagccgcccgaatggagatcttttctcattcggacggctctttttgttattttgtggtcaaatcgtggtatacggttctgtaatacggatcatatacggcgcagccagcgtgcgcttgcctgcccagcagtgtgccgcaacggttgcagcaggtgcaccagtggatatcctgttcttttcccgctgcatatttggcagggagggccgggtcagcaaaggactgccgccccaaggcaatcatatcgaaatcgccctgctcgatggcagaattgctcaaagcaaacagactgcttttttcggcggccatgccaggaagcgcaccgccctttcccagaagagacaatccgccgcagatcacggtggtttccggccgcagggcttgtcgaaggagtttggcggcggtcatatgctgggaaacgataccgggacagctgtggtcggggcacatcagctgccatccgaggcctgcgttgccgagggactcaataaagaaactggcaccccgggcttccaagcctttgcacagacgaatcgactcttcaggatcgataatgaggctgttcggtcctgcgtgtccttgtccgcccggcatttcatcatatacgctgactttagcgccaatcagaaacttttcatccggtatggcacggcgtactttttcgcagagttcgtacgcgaaccgggcgcggttttcaaacgaaccgccatatttccagcagcggtcgttaaacgggcgcagaagctgggagccgagatagccgtggcagaatttgagatcaaccccatcgacgccgatctgtgccaaaaagtggctggcctcgacataagatgcgatggtttgttcaatataatccgcgtcaatcagtgtgccgccgaagcctggcagaggtttgacgcagacgcgtctggaaaaagattcatccgacaattctccgctatggttcagctgcactaccagaagcgtgtctggagcacgcatccgtttctgagaaacaaaccgctcccactgatcacggttgtccggatcgttcacatccagtaaaagttgtgtttttcgggcacggctttccaattgcaatgtaacggattccatcaccaccatacctgcgccgccgtgcagcagtttttcgtatcgccgcagcgagtcctcagaaaaaccgccgcgcaggtttgcatcgccgcattccatcggctggataacaaagcggtttttcgccaatcgttttccaatatggatcgggcgcttcaacggtgtgattgcaattcccatggcaatcagatctccttcttgaaggtctcagataaatatgttttattatacgccccttttctgtatccgtctttcacggatcgaaccattttgttggatttttgatagaagttcacctcctgatgcagggcgtatcttcctcttttttcagcgaaaaaggagaaatttctattgatgtattgaaaagcccccttttttaggatatactataaaagcaaatttttcagaataggaggcagtttctcatgattgaaattacaaaagatacgatcattggtgatattctcgatatcgctcctcacacggctcccattttcctgtctatcggcatgcattgcctgggttgcccctcttcccgcggtgaaaccgtggaagaagcctgcatggtccacggcgtggatgtggataagctgctggctctggtaaacgaggaagcaaacaaggaagccaagtaaacacagtgtaaaaaaatcattgcacggttctgtacaagacccgtgctttgatttgtttgtgtaaagtaaaggggcaaggcgcatggacggtggaaaagagttgattttgtcagagaggctgctggccattgcacagtggatccctccggggagccgcgtggcagacatcggtacggatcacgggtatctcccgatttggcttttgcagcatggatgcgcagcgtttattgccgcctgtgacgtgcgagaagggccgctggagcatgcccgccgttctgctgcgcagtacggtttgcaggagaaattgtcgttccgtttgggcagtggtttgtcctgtgttgcgccggatgagattgacacgatcgtgattgccggtatgggtggggaaacgatcctgtccatattggaagcggccccttggacaaatgacgcgcgttatacgcttttactgcagcctatgaccaaagcggaagtgctgcgcccgtggctttccgagcaaggctacgtttttttaaaggaacggctggtactggaaaaccgcacatatttcccaattatggctctgcgcggcggcggtacgggacagccgctttccatcggacaggcgtggggcggcgttgccctgcaggacgaccctttgcagggcaacgccttggatgccttgctgcacctttgtacatatgctttgaacgggctggagcgttccactgtgccgaaaaatctggaacgtgctgcgcagcagcgggcgatccttgttcaacttcgtcggatgaaggaggaatggcttcatgccaacggtaaaagaacttgaagcgtttctgttttctgcagcgcccaaagacctggcaatgcattgggataatgtaggccttttggtggggcagccggaacaagctgtccggcatgttctggttgcgctggatattaccgaagaggtggtgcaggaagcggctgcagagggaatggaactgatcgtggcgcaccacccggtaatgaactgcaagtggcttccggtgcagacggtgcgtacggatacgccgcagggacgtattttaatggagttgatccgcagtggtatctctgccatttgcatgcataccaatcttgacattgctgaaggcggcgtcaacgactgcctggctcaggcagtgggattaaacgttctggagccgctgggcgcagacggatgcgggcgtgtcggcgcgttgccggaagaaatggcgatggatgcctttttgccccatgtggcccgggcgctgcattgcagcgggatgcgctatgtgtctgcaggaaaaccggtccgccgcgtagcagtgggcgggggggcctgctgggattaccacgccgatgcactgcgaaagaagtgcgatacctttttgacctcggatctgggctatcacgattttttggatgccagggccatgggaatgaacgtgatcgatgcgggccattttccgacagaggatgtagtctgtcccaaactcgtttccatgctgcagtcggcgtacccgcagttgaatatcaaaaaatccacttctcacagagaagtatttcaatattttctttcataaaatttatttgataggagagatttactcatgtccggacattctaagtggcataatattcaaaaaacaaagggcgcggctgatgcaaagcgcagcgctgcgtttactaaaatcgcacgcgagattattgtggctgtgaaagagggcggcagcggtgatcctgccaataattcccgcttggctaccgtaatcgccaaggcaaaggctgtgaacatgcccaatgacaacatcaagcgcaccatcgacaaggcattgggcgcgggcaatacggacaattttgaaagcgttgtttatgagggctacggtcccgccggcgtggctgtgattgtggaagcgctgacggataaccgtaaccgtacggcccctgctgtacgccatgcctttgataagttcggcggcaatctgggtgccacaggctgcgtatcctggtcttttgaccgcaaaggtgtcctgatcatcgacaacgaagaaggcgagctggaagaggataaagtaatggaggatgcgctggaggccggggcttccgatttctccaacgaaggacctgtcttccaggtttatactgagccggatgatttcagcgccgtgtgcagcgcgctggaggaaaaggggtacactttcctggaagctaatctttcgatggttcctcaaaattacatcgttctggaaaaggaagaagatgtaaccaatatggaaaagatgatcgatgcgctggaggataacgatgatatccagaatgtgtatcacaactggcaacaggattgatgtaatttcctcagttaaaacgctataatttcccgtttattttagacggggacgacaggatgagggcgtgctttgaagtatttcaaagcacgccctatttttgccgataaagttttcaattgtatcgtctggctttatcgcggaagctgcagaacgaataccgagattttggtgggaaaatatcgcattttaatatagagatccatacaaagcgaagcgccccctctgcgatttacgcagaggaggcgttatgcagttgagcaggtctgtaagccgggttctgtattaagcagtcatctatctcgacgcgctgttaccaacgcgctcaagccacctcctaaggacggccgggccggccatatgtcctgtccgcggtgttgctccgaatagagtttacagcatccccatgttaccatggggatgggtgagctcttacctcgcctttccacccttgctggcgcgtaccagtttcaaccggccgctcaccagcggtatatctctgttgcacttttcctgaagtcgccttcggcgggcgttacccgttatccttgccctgtggagcccggactttcctcacagacggcctttcggcatgcctgcgcgactgcctggcctgctcggaaaattattttatcggattgtggatggaaagtcaagatatgattgaaaacaggggcggtttgcggtataatcacctttgacatttttgaaataagaagggactgcgtttatgcggctaaatgaatatctggactcgttaaaggggaaacgggtggctgtcattgggatcggcgtcagcaatacaccactgattgaactgctgctgggatatggcgtttctgtgactgcatgcgaccaaaaagaacgaagcgcatttggagatttggccgatcggctggagaaatggggctgcacactgaaactggggaaggactatcttcagggtttggatcaggatatcattttccgttcgcccggaattcgtccggatattccggagtttttatccgctgtggagcggggcagcgaagttacttctgagatggaagttttttttgacgtttgcccctgccataccattgctgtaaccgggagcgatggaaaaaccacgacaaccactatcatcgccgagatgctgcgcgcagccggaaagactgtgtatataggcggaaacatcggccatccgctgcttgcggaagcaggaaagatgaaggaagaagattatgcggtattggaactgtcttcattccagctgctgaccatgcataaaagcccggaaattgccgttgtcaccaatcttgcgccgaaccatttgaatgtgcacaaggggatggaggaatatgtggaagcgaaagccaatatcctccgttatcaaagcgcagcgcagaaggttattctgaattatgacaatgatctgactcgtgcgttttcccagcgtgcaccggggaaaactgtatttttcagccgcctttccccggacgcaggcgatgtgttttttgccgacggcaggatttctgtccggaatggggactgcgtacggccggtgctttctgctgatgagattgccattccgggtgtgcataacattgaaaattatatggctgccgtggctgcggtggatggcctggtatctgatgaggtgatccgggaggtggctgcttcattcagtggggtggagcatcgtatcgaactggtacgcgaggtacacggagtgaagtattacaatgattccattgcttccagcccgacgcgtaccattgcggggctgcgttctttccggcaaaaggtgatcttgattgccggcggcaaggacaagaatatcgattatgcgcctttggggccggaaattgtacagcatgtccggtttctgatccttactgggggtgacgtgattggctctaccgtgcccaaaatctgtgctgctgtgctaaatgtgccagagtatgacagcgtggcgctgccgatcctgctgattgatgattttgaagaagctgtgcgcgccgctgcggctcaggccagtgagggagatgtggttctgctgtctcctgctagcacatcctttgataaattttccaattttatggagcgcgggaagacttttaaagcagttgtaaatcatttggaataaggatgagagatatatgaatttatttggattgaatgaagaaatcctggcgctgcgcgaccgtgcgcaggcagacatcgcaccgatattcgcccggatcgacgaggttgccgagcataatgctcaaaaggtactcgccgcatttcaaaagcataaagtggcagaatatatgtttgcaggaaccaccggctacggctacagagataacggaagagatacgctcgaaaagatctatgccgatatttttcacacggaggatgctgtggtgcgcctccagtttgtcagcggtacgcatgccattacctgcgccctgttcggcaatctccgccccggcgatacgctgtgctatgtaactggggaaccgtatgacaccattcaaagcgtgatcggtatcgtgggcgacgaagcgggcaatatgaaacagtacggcattgggtaccggcaggtggagatgctcccgaacggtttgccggatgaagcggctgtcgcagccgcagtctgcgatccaaaggtaaaaattgccatgatccagcgatccaaagggtattccacccggcagtcactgtcggtggaaaccatcggcagtttgtgtcgctgcattcgtgccgcggcgccggagtgtatcattatggtggacaactgctatggcgaatttgtggaaatgctggaacccactgatgtaggcgccgatctggtggtgggatctctgatcaaaaatcctggcggcggactggcgccgaccggaggctacatcgccggccggcacgatctggtggaagcagcggctgcgcgtttgacggtgccggggatcggaaaggaatgcggcagcactctggggaataaccgcctgatgtatcagggcctgttcttggcaccgcacacggtggcacaggcgctgaaaaccgctgtgttctgcgcgcgtatgatggagctgctgggctatgatacagaacccgcctctgacgcggtacgccacgatatcattcagatgctatccttcggaagcccagggcctctgcaggcttttatccggggcattcagttcggctccccggtggattcttatgtgacgcctgagccttgggatatgccgggatacgactgtccagtgattatggcggcaggcgcatttattcagggggcgtccatcgaattgtcctgtgatgcgcctatgcgcgagccttatgccgcttatatgcagggtggacttacctatgaatcggggaaaaccggtgtgctgctggctgtgtctgaaatattgaagcatcgggaaaaagagatgcaaacagggaacgtttgaccgaagcaggtatccgaacaagcgtttgcgccatacactgccctatgaggtggtttgatggcaatgcattttttctcctggcgcaagcggcgcagccggagccgttttttagcactggcgttggcaatatgcttgcttgccgtgctgctgatagtggtcacagccatggggcagctc

SEQ ID NO: 2824 - DNA, 9341 bp, Unknown
  16S sequences of unknown bacteria
ctttcatgcaaagctgaggtatataaaaaatcaatccgtcataatatttgttacccatagcaagcatcgtattgccgtctttgtaaatattatgtatcaaatccgtgcttcttacgaaagtatatctgtcctccggcttatactcgccgtggaaaaaaacattccccgcgcctatttgagctgcatatttctttaaattaagcgctatttgctgctctcttccgtaataatgcaattcaaaacggttgtcacacgacagctttttgatgatttcacggttaatttcctcatgacggataaaaccccaaaatgctattcttattttatcggacggtacgccgtatttttccttttcatctctatggttcagcgaatcggtaagcagattatgtgaggtgtatattttactcgactcgcttgccgggagaaaacacctgaaagcgtcactgcttacaaatgttgcatatgaatgcttaaccaaatcgccgataatttttttaaacggagcaaagccctcgtaggttgaatctctgtaatcaaaaatatatttccccgaataacttttttttaatttatccgctattaaaacgcctgtcagggaatgaagaacaataataaaatcgaaatgctctatgtttagtaccttcaatgcaaatttacggtatttaataaaactgccgattttagaaagctttgaaacatcatcagcctgaaagcggtaaaattcatgcagcttaatattgctaaatgccgagacatcctccggctttaaatcgcgattccaataaagcaaatgaacatcatttttatccgcattgatattttcaagataaaaattcatatacggcatatatttaatttttgaaaaacccattataagaattttcatttgttaaatttgccacccgcattccccgatacaaaattcgacattatgttttcaagataatcaactgtattttcttttttaaaattttgactgtagaactcataagcgttctttcccatttcggcaattttatcgtgcaaacaagttatttgctttataatttccgataattctgcggaatttcttgtgcttataaacccgcaatcggcttttttgattatttctgcgctctccccacctgccgccgccaaaatgggagttccgcacgccatatatgattgtaactttgccggaatggtcatattgaaaaccgcattatccttaaaagaaagatacgcgcaatcggcaaaatgaatatatctgtctgctgcatctacggaaacctttcccacgaaaaacacattttgaagtccgtttgcttttgccgtttcttccaatcttttgcgcgcgcggccgtcgcccacaatatagaacttaatatcactgcaatctttaaggcggtctgcagtttcaagcagcaaatcaagcccctgcgcctcgcctatattaccggcaaaaactattttaaaatcatcatcggaataaatttcgggcttttcggcgtttgtgaaatccggttcgtcgcaaaactgcggccaaaacacaagcttttccgcaggaacgccgcgcgttttgatattttcaacaaagccgtttgaggaacacagtattttattgcttgcggaatatattttatcgacaattttatttatcagatttattacaagcttattatgtattccgagaacaacctcaacattctcgggccataaatcctgtacattaaaaaatacgggtgttccgaatttttctttatattccacggcgggcagacctaccgttacgggtgatacttcgaaaacataaaccgcgtcaaactttttggtgcagttttttacccacttttttccctcgcgcacaaatgttatgcaattcaaaagcagccctatcggcgttttcccgcgaggcaaaacctttaaacgctcaatttttgcgccgttccactcatgctcatattccttgttaaagccgtaaccgtcatatatttccccctgcggatattgcggaaagcccgtaagcacggtcacatcgtgtcctcttttgacaagttcagtgcacagcgaattcaccctgaaggtttcgggataaaaatactgcgtaactactaaaatcttcatactaaccttccgtacgttttacagagtcaccaagctctgccaccctgtagttttccttatattcgcttattgatttttcataagtaagattgccgaacgccttattcacaagtgcggtaaaatggctcgtaatcttcagaggccaagtaaatccgcttacaagcttgattttcttaccgtgagcggcggctataattttaacaagctccgatgtattgctgtattcgctgttttgcgggaaaaacgttccgctttcttcattttcaaccataatccggacaaattcgcaaagattttctatgtaaagcattgagcgctcgttttgcacccgcggaaaaaacggaagcttaagcgccagctttgcaagtaaaggataattgcccttgctgccttttccgtatatcatcggcgggcgaagtataaccaccttaaagttttcatcttcaagcagtttcagtcttttttctgcctgtaccttactgtcgccgtagcaattggcgggtgaaacgggcgtatcggcagtaattatttttgttttacctattggtgcgctgttaccgtagacaatagcactgctcataaatataaactgacgaacgccgtcactttttgccttttccgccgcggctgatgtcagctcggtattcacggaataataacgcttttccttttcgggtgatattttaccgttatccgaatgggctattcccgcaacgtggaaaacagcatcatacggtgaaaagtccttttctttccacccgccgcctatcatatcaacggtatctaccgtgtactcatcgggaaaattggtatttatatagttttcaaacgacgtgcctatataactgcccgcgcctgtaataagaatttttttcattttacggcaacccgcctttacagtttcgctctgttccctcaataacaaacataggtattgccgaaaacaacacctatgaaagataacaatatattactcgaatataaccgtttacagtaaaataatctgcttaaaattatatcacatcgacatataattgtcaaatatttaattgtttccaacaagcgcataaagctctgaaatagccttatttaaatccttgttgtattctgcattgattataatgccgtccgtatcggacaaaaatgtcatattcggagaaatgcttgtaaccccggtcacggttccgtccgcagccggagtatatgcaaccgctgtacggcgctcctcgaaatccgtcaatttaccgccgacctctaacatcggtttaaaaataagattacttacagtcgtattttttccgatatttataactacagcacaattctttttttcattaatatcgattttaacaccggaaccgtaatctgctttatagtaagaaaaattatcgtattgaaaatatatgctgtaggtagaaccctcacctcccgaaggacaaccgctcaaataataaacacccttatttaaaaccagtccggcaagtataaaataggattgttcattcgccgtaccgttcgctacaacggtaccatcgctttttactttataattgattccgttatgtgtatggtcaatattggtgtttttatacggatacggcagaagattcttcccgtaccttttcagtgtcacgcccgaaaaaacactgtaattcgattccgtagtaagctttattttaatctcatgctctatcggcgatacatcattaagccttaccgcctcgcccgaggcgctgcctttcagagcgtttgcaaagttgttattgacataacttttcacattgttggacgtatcgtctacatattttttattgactgcaaaatcattagctaaaggattatctctaacccgtaaatagccttgtgtagcgtcaaaatcagcataattttctaaaacagttttattaagtacaaccccagtagagtcaccagccaaatataacgttttagtgctagttattcggtctgtagctaaatatggagtggtcattattgataaagtattatcgattgtgaccgtttgaactgaattctcattggttacggttgcaaatttatcttgtttatccgtttttacggtttgaatagcctcagccaccgccttgccgctctgtgcgttttccgatgtcggggaataggctcggtcggtaactgcatcctttccggggtcgcctttatcacccttgtcacctttagcacccacagctccggtatcgcctttatctcctttattgccctgctctcccttatcgcccttttctcctttgagcgcagccaactgctcggcggtaaaatcggaataggtgaatgcgtcccccttatcgcccttgtcgcctttatcacccttatcgcccttaaaggcgccgctgtcggcatccgatctgaccgactgcgccagctgctccgcagaattcgcaatagctaccagctgctcatattcggtgggagtcggttctgcgggagttgccccctcgccgtagccgctcggctttacgcttacctgcgcaatctgcgttgtcgcgcgtttatcgcccgatacgccgaaaaccgataccgtaaaggcgggtgcctttatcacctcatgcggtatgcagcactcgttctcgcccgtgcaaagcttgccgttttcgttaagcaccacgctgatttttgtttctccgtttgtgaatactgcggttttggcaaagccgtcccactcagcggggaaattgaagtgtatcttttcaaataaaacgctgtcggcaacggcagtgccgtatgtcactatgcggccgccgtcaaaaatatcaatatttatcaattttattcctccgttgcgccgcaaaaagccttcgggcaaattgccctaacctctgcgcggcgattgtttttaggtatcaaaacagagagccttgttttcgccccttcctttcccgaaattattccgatactcatattggagaaataaaaattctaaaccgtttgtaaacccaaagcgcagaaatgcctaaaaaacggggccttcgagttaagacagcaaaaaaaacaaccgggcagcccgaaaaaaagggttgcccggtcgctttgcttaatgtataattaaattgctgaaaataacccgtaaagcaggttaattatacaatgtacggaacaagaaatcaagcggttttaccgttaaattcagaaacaaaaaacaaaggagacgatccggtattcaaactcgcggaaatatgcgacacattagactataccgaactgtacaaagcatatgtccgcacataccggaaatatgatcctgtcacactatgttgcttgtatttgcgtatatgaatgggatttattcaagtagggagatagaaaacgcctacagatacgacattcgtttatgtggatattacagaattcaccgggacccgaccacgcaacaatcgcacattttcaaaatgaaagactgtcggcgtttatggaaaatctgttttaccaattagtattaaagctgtctgagcttggcgaagcagaatttaaaaatgtatttgtggacggtatcaagatagaggcaaatgccaaccgatataccttcgtatgggcaaatgcggtacagaagaatatgaaccgtctgtatgaccgtatagaccgggaattgccgggtattgctttaaaatacggacttttggaaaacaccgaattagaatttgaaaaaatgattgcctaaaccgagtaaaaagtaaatattttcatgaaaaaagagggcatttttcataccctctttatgtttttgcagaaaaactaaaaaagctttcgacattttaacggtttataaacattaagggctgccgctcgcgattctttcgctcttgcgacagccaaccggtttgatttaaaaggtctgtcccgccctgccgtaatgcgcttaaaataacctgcggtttgtgcaggtgggtgcccgccgcgcggcttcacgctcccttcttccgaactcggcacagccgcgggaggtctgcaatccgccgcgcgagcaaaggccccgatttaaaaggttgtagggctatataagacgcggtccgcgaacagcgcaggacattttttattctatattattatttgtcgtctatttcaaaaaaatcctcaagacgttcaacaaatgcgtcggcaatcatatcgtattcgtcgtcgtcctctatttcgtaatagtattcgtcgccgttttcttcttcctcgccgacctttactataaccagctctccgctgtcgtcaagcgttttctgcgggtcgtcataaatcgggagcattgcaaggtatcttcccgtttcggtttcaatagcgtcaagcacctcaaaggtatattccttaccgtcatcgtcagacagggtgacaatatccgggttgtattcgtctttgtttttaatctcgtccatatcagagcctccttagtacaaatatattttaaccccaaaattcctttaagtcaatgggaacttttttctttttcaagctcaattacctttttaaactgcgtttcgtaaagcaggcggtatttttcgcttttaccgagcagctccgagtgcgagccgctgtcggtaataaccccgttttctattaccataattttgtccgctgctattactgttgataacctgtgcgctataacaaggcttgttctgcccgccattacagccgaaagcgccgactgtataaggctttcagataccgaatcgagcgaggatgtagcctcgtccaaaataagtattttgggatcctttaaaattacccgcgctattgaaacacgctgcttttcaccgcccgaaagctttaagccgcggttgcccaccaccgtatcgaattttttaggcagcgatgaaataaaatcgtaaatattagccgccctgcaggcgttttcaatctcctcgcgcgtggcgtcgggctttgcgtaaagcaaattttcaagaatagtgccgttaaaaaggtatgtatcctgcgttacgatgccgatattttgtcgtaggtatgcaagcgaaaaatctcggacatccgtcccggctattttaacgctgccgcggcttacatcgtaaagcctcggtatcatacctataattgtggatttacccgcacccgatgtgcccactattgcgtacatagcgccgctcggcacggtgaaatttactccctttaaaatttcgtgcccgttttcataggaaaaatgcacgccggaaaactctattttgctgtcatcaagcggagggataagcggattttcggggtcttcaatatcgcacttacggtcgaaatattcaaaaattcgggtaaacagcgccattgaccttacaaagtccacctctaaatcaagcagctgccttaccggctggtaaagcctgttgacaagcgccaccactaccgatatatcgcccacggtaagcgatgaatcggtacggcttattataaggaagccgcccacaaaataaatgagcagcggcgctatttgtataaacatacctaaaaagacgcggaaccaactgcccgcgcgctgctcgcgtattgttattttagtggtttcatcatttattttgcggaatttttcatattccgttttttcctttgtaaacagctttacaagcatcgatccgctgaccgaaagcgtttcgtctacctgctggttaagctcgtcctgcttttcctgcgcctcgcttacaagctcccaccgccttctgccgactgcctttgtgggaagaattaggagcggcagcactataagccccactattgcaagccgccaatcggtatagaaaagataaaatacacaggttgccacggttaaaacattgctgaaaaccgaagccagcatacccgatataaccgagcttacgccgttaatatcgctgttcatgcgggttattatatcgccctgcttttcgtttgtgaaaaaaccgtgcggcatatgcaaaagatgatcgtacatctgattccgcatatcgtaaattatcttttgtgagatccaactgtttatgtactgctcaagcacgcttataatctgcgcggcggaaagcacaataaacgccagcaccacaagccccaaaagggtttttacatcggcgctgtcgtccacgatcgcgtcaacgatctttcccgttataattgacgggaaaagccccaagaccgccgaaacggcaagggcggcaaaaaccgcgataaactgcagcttatacggtgataaataaccgaatattcttttaagcagcgcttttgttaatttcggcttgttctgtttttcttcatctgtcaaaaacccgcgcgggccgccgcctatacgcataggccctctcattccggggggcgggggcatcataggacccataagcatttctccttgcaacatatatatttatatcttaacatatatttccaatattgtaaagttttgaacaaactgttaatttaactaaaagttatcaaaaagcacttgacaaactataaattatgctttataatagaaccagacaaaaggaaaggagatgaaaacaaggatgagagaggaagctccaccggcttacttttaaaataaaatgaaagtggtgaatccaatgaagtaataaaagggcagtcgcggcaggcggcactgaaatgataataaaatctaaacgattttttaatagataacccgaaaaggtgattaaaatgattgtgaggaaatcacagcacaaataaatcaatacgggtgataccaatgtactatttattaaacagctcagttagctccaatacatagatttcgcgatatttgattgttcttgatatgccaaagggcattagcacaaattcagttaatattaaaataaaccgttcaagggttaagtatatagggttaaataaaagagctttctaaaattgaataagtaaaaaatctaacagctgcgacatattgtgccgcagctgttttttgcgtttacattttttattaaaatttcaactcataatttacctataatattttttatacgacaacatacaatattactgcaaacgcgaaaagaaaaaacaggagagaaaaacatcatggctaacaaaagcgtagtacctgaggctaaagaagccctcaaccgttttaagatggaggctgccaacgaggttggcgttaacttaaagcagggttacaacggtgaccttacctccaagcaggccggttctatcggcggtcagatggttaaaaagatgatcgagtcttacgaaaacagcatgaagtaagagtctttttgacctatcgg

SEQ ID NO: 2825 - DNA, 3197 bp, Unknown
  16S sequences of unknown bacteria
gaccgttatatcgaggtatggaaccttgtgttcacccagttcgattccgacggcaagggaaattatacccccctcgaccatcccaacatagacacaggaatgggtcttgaacgtcttgcctgcgttatgcagggggtggacaacctctttgaggtcgacaccgttcagcgcataatgaagcacataagcagcattgccggcgtgacatataagcaggacgagaaaaccgacgtttctctccgcgttattaccgaccacatccgctccacaaccatgatgataggcgacggcgttatgccgtcaaacgagggcagaggatatgttcttcgccgtctcatccgccgcgccgcaagacacggacgtctgctcggaatcgaacatcccttcctttccgaggtcgtttccaccgttatcgaggaaaacaaggcctatcccgagcttgccgaaaagaaggaccttatcattcgcgttgtaaaggaagaggaagaaagcttcggacggacgatagacaagggtatgcagctgctttccgagcttatgagcgattcggacaaaaaggaaatttccggagccgacgccttcaagctttacgatacatacggattccccctcgacctgaccaaggatattctcgaggaaaagggcatgacggttgacgaggcaagctttgagcagctcatgaaggaacagaagcagcgcgcaagagacgcccgcaaaaatgccggagcggaggcatgggacgacggcggagtccagcttgacgttgaaaaaaccgaatttgtgggttatgacaccctttgctgcgacgcgaaaatcgaggccgtggtaaacggcggtgaaaaggccgctcttgccgcggagggagaaaacgccgtcataattcttaacaagacccccttctacggagaaagcggcggtcaggcgggcgactgcggacggctgacaaacgagcggggcggaattttcaaggtggaaaccacagccaaaaacgctcagggcgtatatcttcatatcggcaaggtggaaaagggaacctttgagctttccgataaggtgaccgccgaggtttgtgcaaagacaagagaggccaccatgagaaaccacacgtcggctcaccttatgcaggccgctcttcgcaaggtgctgggcacccatgtggaacaggcgggtcagcttgtaaacggcaagcgtatgcgtttcgatttcacccatttttcggccctcactcccgatgagctcaaaaaggtcgaaaaccttgtcaacgtggaaattctccgcggcgaggacgtcgttataaaggaaatgcccattgaagaggccaaaaagatgggcgcaatggcgcttttcggagaaaagtacggcgacgtggtaagagtcgtaaaggccggggacttttccaccgagctttgcggcggaacccatgtatccaacacctctaaaattggtcttttccgaatcgtttcggaaacctcggtggcggcgggagtgcgccgtatcgaggccgtgaccggcacgggagtgctcgaacttctcgacggctatgaggagacggttaaaaacaccgcctcggcgcttaaatccggcatcggcgacattgccgaaaaggcaaaagcaaccgttgccgagcttaaggaaaaagacagaatcatagaaagccttgaggcaaagcttgccggcggccagcttgacgagcttatttcaaaggccgaggacataaagggcataagccttgtgaccggaaagcttaatgtggacgagcccgacgctctccgttcggctgccgaccaaatcaaggacaacccctcggctgtggctttgcttgcctgcgtcaccaaaaagggaacggtttccttcgcggcggcctgcggcaaagaggcggtcgcaaagggcgctcatgcgggcaatcttgtcaaggcggcggctgtcattgccggaggaaacggcggcggacgccccgacagcgccatggcgggcggcaaggacagctccaaaatcgaggaggctcttgcctcggcgggagcaaccctctctgcacagctcaaataatttttgtaaagcaaatttgacctttcgtgaaaacggaaggtctttttttactttgtttttaccttttaaggattttggactttacaagcgggcggtattatataggcgtagtcaaaaaacaagcaaacaaaaaatctaaggagtaaagaaaaatgaaaaagacaaaaattttgggacttatcctggcagccgcggttgcggcagcctccttcgcatcctgcggaagctctgcgggagataacagcggtaccgagtcggcagcctccaaaacagccctttcgggaacggtagccaccgacggctccacctccatggaaaaggtcatcggcgctctcggggaagcctttacctccgagaacagcagtgtaaacttcacctacaatcccaccggctcgggtaccggaattaccgccataagcgagggccgctgcgacatcggactttcaagccgctcccttaaggacgaggaaaaggcaaagggtcttgaggaaacggttcttgccctcgacggaattgcaatgattgttaaccccgcaaatgaaatttccgatttgacggtcgaccaaatcgccaaaatctacaccggcgaaatcaccaactggaaggatgtcggcggaaaagacgccgaaatcgtggtcatcggacgtgaggccggaagcggcacgagagacggctttgaatccattacaaagactgccgaaaagtgccaataccgtcaggagctgacctccaccggcgacgttataaccaccgtttcccaaaaccccgacgccatcggatatgcctctcttgcctcggtcaaaaacaccgtcaaggccttgaatgtggacggcgtgacccccaccgaggaaaccgttaaaaacggcagctataaaattcagcgccccttcgtgctggttaccaaatccggtgtgactttgtccgacgcggctcaggccttcttcgactatgccacctcggcaaaggcaagcgaaataatcgctgccgccggcgcaacccccgtaaaataaacaaaaaaacaatgcttagggagcaaacggtttgtgtttgctcccctgtttataaggtgaaaaaatgaaaaacagacaaaagctttttgaaaatgtcgttcacggcgtttttcttattctcgggcttgcggctgtggcggc

SEQ ID NO: 2826 - DNA, 2709 bp, Unknown
  16S sequences of unknown bacteria
tctgcgtgatggccagcgccaccttgttgagatcatattttccgctcttcagcgccgcgatcatctgcccgatgaccagcagtgccggatagcacgtatcattatgtacatggctgaggccttcctccaccacttcgtctccttcattgtaaagcacttcgacatgatagccgcccgtctcgaagatggccgggaacagccggaagtggatggcgagcatccccggcacgagcaccgtgtgcgtcttcttcatctccggggtgaatataccgtaactcatgcggtttcctcctttcgctcctcaatggccgccttcagggaacgaaggcggatctttaccgcgcccagattatcgatctcatcgatcttgatctgtgtgtagaagcggtctttctgcttcaggatcgctttgacctcatcgctggtgatcgcgtcgatgccgcagccgaagctgaccaggtggatcagctccatgtccggctgagcggccgcgtagtacgccgcctgatacagccgggcgtgataggtccactgattgagcacgcccaccgcgcgtttctcctgcagcggcacgctttcctcgctcaccacgacgaagcccagctgcgtgagcagcttggtgatctcatgagagatgaacggatcgccgtgataagggcgtccgcagaccaccgcgatgggatgatgatgcgcgcgggcataggcaaccgctcgttcatgctcctcgtacagacgcacgtggaatgcgcggtattcgcgcatgcccgcttcggccgccttgcggatgagccggcgatcatgcggcatatcatgcgccgcaaacacttcgctgatgcgtttttcaaagttcttcatgtcatccagcacgatatacggatgcaggaaatcggttccctccatatccatgttcgcatcgatctgttccggataataggcgaccagcggacagttgaaatgattatcgctgatctgttcatccacattgtaggtcatgcatggatagaagatcttctcgacatgctggtcgagcagccactggatatgaccatgcaccaccttggccggcaggcaggccgtatcgctggggatgctgtgctgcgcgctgtgatacatcgccttgttcgtctgcggcgagatcagcgtctcatagcccagctgatggaagaattccacccagaacggcaacagatcatacatgttgagcaccagcgggataccgatcttcttctcatgatgatagcggccgcgatagctgcgcagcaaatcgttcttcaccttgtacaggtccggaagcgcttcttgtttcgcaccggcgcgaagcgtcggcttttcgcatttattgccggcgatcagccgctgtccgtctgcgaacacattgacggtcagcgcgcaatggttcgtgcagccattgcagacagcgcccgtcgacgaatgggtgaagctgttcacctgttcctcgttcaggatcgtggaagttcccttggaatgacgcttggcgatcagcgccgcgccataggcccccatcagatgcgcgatgctggggcggatgacctgcgtgcccagctcctgctcgaagctgcgcagcacgctgtcattgcggaacgtgccgccctgtacgacgatctcctcgccgatgtcctcgcggcggcgggcacggatgaccttatacagcgcgttcttcacgacgctgcggcaaaggcctgccgaaatgtcctcgatgctcgcgccgtttttctgcacctgcttgacgccggagttcatgaacaccgtgcagcgcgtgcccaggttgaccgggtggcgcgccttcaggcccagctgcgcaaactcctgcgcgctgtagcccaggctcttcgcaaacgtctccagaaacgatccgcagcctgaagagcaggcctcgttgagcacgatgtcatcgatgcgcccatccttgatcttaaagcacttgatgtcctgtccgccgatgtccaggatgtaatcgacattcggattgaaatggcgggccgcctcatagtgcgccatcgtctcgaccgcgccctcatccagatggaaggcgtgcttcatgagctcctcgccatagccggtcgcgcagctgccagcgatcgtgatgcggccctcgccaagcgcatagatctttttcagatgctccaccacgacatccagcggactgccctgattggacgtatatgcctcatagagcagttcctccgcttctccgaccagcaccagcttagtcgtcgtgctgccgctgtccacgcccagatacgcttttcccgtatacgtggagatgtcgccgtagctgacgtcgctgcgctgatggcggcggacgaattcctcatagtcttcctcgttttcgaacagcggctcgctttcctcttctcgcaccggcatgttcttcaatgcctccagcttgtcgtgaagctcatcataggtaaagcgctcgctcgcgcagatggccgtgccgaacgccacaaagtgaatggcgatatccgggcacaccgcatggtcatcatcgaggttcagcgtctctttgaagcgctgccgcagccctttcatgaaatagagcggaccgcccagaaacaggatattgccctcgatgcggtgaccctgcgccagcgaggtaatggtctgatcgaccactgcctgaaagatgctcgcgcacagatcggccttatcggcgccctggttgatcagcggctgggtatccgtctt

SEQ ID NO: 2827 - DNA, 4321 bp, Unknown
  16S sequences of unknown bacteria
ttgaccaaacgcgctgcgcaaagcttgcgtgtttggagtctcacccaacttgcaaggcaagaaatatttttcccgactatgcggtgcatgggttcgacttcgccaaacgcgcaatgcttgcgcgtttggcgtctcacccacttgccgccgaaaaaaataattttgactttatttgcgccgtgcgcggcgcaaactctgcgaggatttttgggccacacgcaaatcgccccgccgacagccgtcggcggggcgattgtactttatcgcttgcttgtcagaaaatatcgcagagggaatactcgccaaaatctaagatcttgcccgtctgatacgcaacctgcttgtggaagacggggccgtccaccaccagggtgtggtactccccgttttcgccgcacaggtcgataccgcagcgttccatctccgccaggacgtcctcatctaggacgtggcccagaagcgaccggggcagcagcgtattgttcagcgatttgatgacgcaccggtagcccagggccagcacctcccggacattttcttcccttccccgctgccacagggggtaatacgcttctaagccgacattgcggcagcgctcctcgccccatgcccggtggccctcgatatcaatatcaccgaagcagaccgcctccgcgccctgcgccttcgcctcgcgcagcgccgcctccatagaaaggtgatacgtctcccccgctgtatcgacgggcaggagcgggatctgcagcgcctcggcatagcgggccagcagcgcatgatccgccccatggaaatacgaccgcccggcctccggatcgaacatcaccagcagcgccagcggcgtatgccccgctgccagcatcttatgcagcgccagggtgctgtccttcccgcagctgtaggacatgacaaaggtttttccgcgttccatcatttttccgcctttctcgcccggaccgggctttttttcagcatagcagatgcacgctaaaatgtccaggcaaaaaaactgtgccgccgtccaaagccggacgcgcggcacgcgttttgttctgcgcagggtcagtcctcccgctcgatggcgctgacggggcattcgtccatcgccagctggcagctggcgcaaaactccgccgggacagggcccgcgctggccttggccacgccgtcttccgtcatggagaagatctccgggcaggtggacgcgcacaggccgcagccgatgcagttttcattgacaaaaaatttcatatccttcgcctccttctgtcacactgctagtgtgcgcaaaagatcgcaaaactatgaccgccgccccagatggaacagtccgctaacccccgccgccagcaggcaccccaccaggctggagaaaaaccgccagagggcatagaccgtattgctgtagcgcccggtggcaacgatcaccagcagatacgtgatgcagcccacccggcagtccatgggcgccataccgcaggcgcggcacagcaccaggctcagcagcgtccccgccatcgccagcgggatataggcaagcggtgcctggcccgtcagcccatgcaaaaaggcgatgaggacccccgtcagcccgcagagcaggatgccccgcagccgcagcagcccctgccggacgctctgggccgtccccgcttgggcgcacatcagcgcgcaggtacaggtggccagaatttgtagctttggccacagcatacaaatggcaacgcccagaccgacgctgacagcgatctgggcctcaaattttcgcggcagccattccctcacagccgcttctccccccttcttgccgcaccctctgcggcaggacgccccgccagcagccagcaggcagagcaagccggtcactccggcagaacatattgcgccagcgccgcaacagacggcagatagacatcgcagtgggcgcgcataaacgtttcgatcggcgcaagcgcatacgcccagcccgccgcggcaaatgccacgccgcagcttttggccatcgtatagccgtgccgcagatcgtccaccatcaaaagagcagacggcggcagcgccagctgccgcataatctcccgcaagggataggcattcggcttgcgctgctccggcggtgcgtcccagccgaagatcagatccggctccggcaggccgttttcccggtagtcccggcggatgttgccggagagcgagtgggagacgacgcagagcttcccccctgccgcccggtagcgggccaaaaatgccaccatccccgggtacgcccgcgggacatgggccgcaacgtaagcgtcccaaaattgcagctcccgcgccatctccgcctccgtcaggccatagcggccccggcacagcgccggaaagctgccggtgaaattttccagcagatacgtctccagatcgatccgcgccccggggcgcacctcgtctaaaaacgcctgaaagcaggggtgatggatcgtcgccgtgctgtcgacgacggtgtcgtcgtggtctagcaccaggcagcggtagcgcaggctcatttgtggtacaaccggctcgtctgatacaccggctcctgcgtcagattgattcccagctttttatagatccccacgtccaccggcgagagaatgaccgacgcgtgggcctggcagctgcgcagccggtccagctgctccagcgccagagcggcgacaggattcgtcaccgcactaaacgacagcgccatcagcacctcgtccgaatgcagccgcgggttccggctgcccaggtgctccgtcttcagcgcctggatcggcgccaggacgcttggcgagatgagcttgatctcgtgattgatcttggccagggtcttgagagcattcagcagcgccgccgcgctggcccccagcagctcagacgtcttgccggtgacaacagtgccgtcctccagctcgatggccgtggccgggccaccggtctccgctgcccggtccagagccgccgggaccgtcctgcgcatctgaggtgcaatgccgctcgaacgcatcaggacctccagcttctgggtctcgctgctgtcggccttgcccttgcggacggcacaggccgacgcgtaataccgccggataatctcctgccgggacgcctcgcagcagacttcgtcatccacgatggcgttgcccgccatattgacgcccatatccgtcgggctcttgtaggggcaatggccgtggatctggcggaacatctcttccagcacggggaaaatctcaatatcccggttgtagttaaccgctgtctccccataggcttccagatggaacgggtcgatcatattgacatcagctagatcgaccgtcgccgcctcataggccagattgaccgggtgcttcagcggcagattccagatggggaacgtctcatacttggcataccccgcctggatgccccgcttgtgctcatggtagagctggctcaggcaggtggccattttgccgctgcccgggcccggcgcggtgacgacgacgacgggacggtccgtctcgatataatcatttcggccaaagccctcttccgagacgaccaggctgatattcgaggggtaatccgggatgctgtaatgccggtaggtccggatgccgaggctctgcaggcggcgctcaaactgctccgccgaaggctgcgcggcccaccgggtcaaaacgacactgccgacgtacagcccgtactcccggaacgcgtcgataagccgcaggacgtccacatcataagtaatacccagatcgccccggaccttattcttctcgatatcgctggcgttgatcacgatgacgatctccgcctggtccttgagcttcagcagcattttcattttgctgtccggatggaaccccggcagcactcgcgaggcatggtaatcgtcaaagagcttcccaccaaattccaggtacagttttccgccaaaagaatccacccgctccaggatccgctgggtctgcagcgcgaggtatttatcattatcaaagccgatcttcatgcacgcaacctcctgcgaaaaaacaaattctatcttccagtatagcacttttccgacacattttgcaagggcaatctcccgtttttctaccgtctcggcatagaggaacccccctccggtgccaggcaccaaagggggggtgggtgcgggtttgggcccgcacccggtagaaaggaaataaagaagatgaagaaacgatcaattttatatgggtttccaaacccctggggggattcgccccctctcttggggcttgccgccccctagggggagcgattcacgctcccctgcttttgcttcgcggcttacttgacgatcttc
